United States Patent Application Publication US 2014/0325702 A1 - sequence listing, part 24

SEQ ID NO: 31806 - DNA, 1324 bp, Heterodera glycines
  unsure (1)..(1324): unsure at all n locations
aacattagcgtcacagtacaacgtaacactggccttctgttcgatttgatcagtgatgtgatcacgtttggggcgatcagtgcaatcccacaccgttttgaagtactcattgtctaaagagcatttggcgggaatggcatggattaaaaaaatgaaaaaaacaaaaacaaatgcaatttgcataaaaccgtgtgcatattttttgcgggattttcacatgtcgtaaatttaaaataaaaatttaaaatatttaaaaaaataactcattgttttttttttaaaaatatgaccatcaattttcatacttttaccaagaattcattttacatatattttttttggagcatcctttgtagtaattataatgtacagaaaatttcactttgctagaattctttttttttaaatcttttttttattaatttggcgaaactttttacatttttcagtattttgaagataggtaatttaataataatataataaagtggcgaaattatgaaacgattcatatttttttccaaaaatgattagcctcattatctctctctctcatgtttcttctctctttatctctcttttctttctcactctctatcccttacatcacgctctcacgccctcacctttcctttcctcatctctctctatctctctccatctctatcactcatctctctgtctctcacactctctccctttcgctttctcgtctcttactctctctctctctaactctctctctctctaactctctctctctatcattccttctctctctctctcttacatcactctatctctccccttctctctctccctacttcatctctctctctctctccgcctcactctctctctctctctcaccttttgtgcatttggcaatgtaacagtaatggtcgtcgtgcaggcatttcccctccgacacttggccaattccgttctcatcaaactgtcccactttgcacatcatcccatcagggatgggcggaagcacaaattgttcattgtccatctctttgcccatttccccgaaatggcattcgcaccaatggccattggaatgtgtgatatattcttccaccaactttgtgaaccgctcggcacactcataaggaggggatttgatcctggcacaataccattggattcgtgaaaagcctgcccgaccagctgtaaaatgcgaataataaacttgattaaatcagttgttaaatattagtgatataggtcagccgaatattatatatatttaaatgcatttaattaattttatccatctnaaagtctaatattattccaaatacatctaaacggcatt

SEQ ID NO: 31807 - DNA, 991 bp, Heterodera glycines
  unsure (1)..(991): unsure at all n locations
tcacaaagttatggggagtgaaatagtgaaatattagttttcaccacaaggcattttttctgaaaaccggattcaaaaatctggggtttggtataaccgttttagaaatagcgtagaaaacagcttcgatatcaagaaaccaagtcaagtccagaaaggaatattttaaaacgatttcgttttgttttggcattatgataccgaataactttcggaaattatggaaacaaaattggagaaattcgaataattttttgactgcaaatttttttccttttttgaattgggttcaaaaaaattttaagagaatttttgattattaatttgaagtcttgaatttatttgacaaatccaagacttaaaactgggagaagcaaggggctgtggctgggggcctaaaatttgggccacattggagaattaattctgatttctgaaaaagtcccagaaataactattttttctttccataccttcttgtagagctcgagctgctctttccaatggtcttatcccggtctcgatccgtgccgaactcacaaagttatggagtgaaatgtgaaatattgttttcaccacaaggcattttttctgaaaaccggattcaaaaatctggggtttggtataaccgttttagaaatagcgtagaaaacagcttcgatatcaagaaaccaagtcaagtccagaaaggaatattttaaaacgatttcgttttgttttggcattatgataccgaataactttcggaaattatggaaacaaaattggagaaattcgaataattttttgactgcaaatttttttccttttttgaattgggttcaaaaaaattttaagagaatttttgattattaatttgaagtcttgaatttatttgacaaatccgagacttaaaactgggagaagcaagggggctgtggctggtggcctacaatttgntgcacattggagactgattctgatttctgagaagtccagaaatactattttt

SEQ ID NO: 31808 - DNA, 1670 bp, Heterodera glycines
  unsure (1)..(1670): unsure at all n locations
tgtcaagtcctcttcttttttctcttccgccattctcttaaaaaattattgagtcaaaatcaaaaaatttgagctttttgtcattttcaaaagaaaaacttgcgaatattttttgagggcgcagattttctcgaaagccgagagaaaatagaaaatcacccccccccntgaaaaatttttttctagggtaattttatgagttgagcacgaaaaatgttattgtaagccatcacgcattttacgtgagttacgtgaaaatttagatgaaaaatttacgtaaaaatttaaaattacatgtaaaacttgaaatttcaaaaaataagacactgagagggatataaatgagaaaaatgagctgggagatcaagaatgccgtataacttcgagactcttttgccgttgtgttccaatgaaatggatgcgcccaatcttatgaacgccgcattattcatcgtgaaaagcactgccgatgtggtacagaaatgcgccgctctttcgcgaactcccatggaaaagtttaaaattttacaagtaactttaaatttttcatgtaaaatgcgttatggcttaaaataaacatttttcgtgctcacaatcagcgcataaaattatcctagaaaaaaattttgaaaaaaaattttcaggggagtgacaaaacggataagcaccgaaaattttgtcctattttaacggttactccacatttgcgccccggacatttgcgccccaaaggaaaatcggacatttgcgcccggacttttgcgccccgacatttgcgcctcagacttttgcgccccagtgaaaattagacattctcgccccgacatttgcgccatccatttttattttattttttcccccaatttttttatttcttaggacgcttattttcagaaatttttgggtcatttctgaggggtgtatttttaaattcccaaaaagtcgattcttagggggtgatttttcgtttttattgcatttttgttaacaaattttgggcaaaacgcaaaaataggctctttcaaaatttgggagctcaggaaaaaaataggtttttgcctaaaaatcttatccctaatctggacacgattttaacagattgcccatttatacaatagaccaaagattactctattactctatgaaggtttaacaaagagcccctgattcaaaaacttatggtcgaaaatgctcagaaagtcaattttttaagttaacgaattctttgaaactttgcatctaatagagaattcttagagctattaatttgggtgcttttagaaagtaatggagctttaaatcaggagtgcgattgaaaatttttcaaaatcaaaacatcgggctcaaaaaatcagattttggggtcaaaacagaaattttgcaaaattgcttcaaatcatttatttttacaatttatttaatcaaaatgtattaaaaattatatttttcgcctgtgattatcatttttaaaaattttggtgatcgtaaatttcagtgcactcggaatgaaaaaatgagatttttaagaattttttgcggcgcatttttccaaaaaacttttgggggatggacaggggggtccggcgatgccgatagtcgccgctcggggaaatttttgaaaatgagtatactttgttaagagaattttgtccaaaattgtacaaattttg

SEQ ID NO: 31809 - DNA, 1218 bp, Heterodera glycines
  unsure (1)..(1218): unsure at all n locations
agttcatttgagtgttgagcagaaaaagagatagacgtttttcaaaatattcagagccaactcgcccagaaagaaatccagaaaattagggtcgtcgctactatcgnaaaatgtggtggagttcatctgagtgttgagcagaaaaagagatagacgttttttcaaaattttcagagccaaactcgcccagaaagacaatccagaaaaattagggtcgtcgctattattccgaaaatgtggttggagttcatgtgagtgttgagcagaaaaagagatagacgttttttcaaaattttcagagccaaactcgcccagaaagaaaatccagaaaaattagggtcgtcgctattattccgaaaatgtggttggagttcatttgagtgttgagcagaaaaagagatagacgttttttcaaaattttcagagccaaactcgcccagaaagaaaatccagaaaaattagggtcgtcgctattattccgaaaatgtggttggagttcatttgagtgttgagcagaaaaagagatagacgttttttcaaaattttcagagccaaactcgcccagaaagaaaatccagaaaaattagggtcgtcgctattattccgaaaatgtggttggagttcatttgagtgttgagcagaaaaagagatagacgttttttcaaaattttcagagccaaactcgcccagaaagaaaatccagaaaaattagggtcgtcgctattattccgaaaatgtggttggagttcatttgagtgttgagcagaaaaagagatagacgttttttcaaaattttcagagccaaactcgcccagaaagaaaatccagaaaaattagggtcgtcgctattattccgaaaatgtggttggagttcatgtgagtgttgagcagaaaaagagatagacgttttttcaaaattttcagagccaaactcgcccagaaagaaaatccagaaaaattagggtcgtcgctattattccgaaaatgtggttggagttcatttgagtgttgagcagaataagagatagacgttttttcagattttcagagccaaactcgcccaganagacnatccagacgaattagggtcgtcgctattattccgaangatgtggttggagttcatttgagcgttgagcagaataagagatagacgttttttcaaattttcagagtcaaactcgcccagaaagaaatccagaaaaataaggtcgtcgc

SEQ ID NO: 31810 - DNA, 992 bp, Heterodera glycines
ttaattgtattattaaggggaggggggggggatttatttttttaaatgaacatttcttacatcgtaaaaaaactttaaattggccctacctaataagtgcattttcaatttaaattttttatttatcaattatacataattaattgtttttaaaatgagatttctttttctggggatggaataattattaatcattttgaatgaacatattaaatattaagatgggcatcatcagcaggggccaatcacacaattaggacaaatttggcagttgtctccgaatgtgccgttagcgacaacaaatcacggcgtttgacttggttcgatttggcgtttgtctctgtcgtccaaattgtcgcccaatcacatatgataaaatcttacttaaatttgtcgttcctcataaattatctttaaaatgaatgaaaaatttcagaaaattcaaaaaattataaaagagtctttctgtgcttttttgggtgcattgattgtgagtttaacgtttattttgcttctaattcgaaccctaaacccaaattcgttagacttaaaaaacttaattaaaagtatagactaaagtcaatttctttccctgatttgtcctgatcaagaactctcgattgatataatatttgctatcaaaacttcaatttctggcctatttgtgttagattttcctcaattttttgtcattttaacggttcaaaaccgggtttttttcgatggcgcgcctgtgtccaaaatcgggttcaaacatatgtttttcaattttctgatagcagaaacagtattatataagtgatagaaagtgattgtatctgataattgttcattagtaaacttttgaaaaaatcatcaattatccaaacagcagaattattgctcttaataaactagaagactacgatttcttaattttaatgctgtttaggctatcagaaaattgaaaattttttagtttgaatccgattttggtcacgggcgcaaatgtc

SEQ ID NO: 31811 - DNA, 1446 bp, Heterodera glycines
  unsure (1)..(1446): unsure at all n locations
atgcaattacattgtcaaaatattccatgttaagacgcttaagttttacaatattctccatttcttgaattgttacatgtatatattttttatttctttattagattgttaataaagaaaattttattttattttattttgttttttgagctcatatttttttgaatttcttattcagcatacgtatctcctcacgaactgtcacatataattaatttgtagtatcggttatgattttatttgatatttaattttttataaataatgttttatttaaaaatcatatttttaattattaaattacattattttatacattatataaattattaagttcaattatttgatttttttatatgttatatattttatttttaatttttttatttgtatgtaatatttaagattttttattttattaatgtaatattactattaatctgtttttagcattcatttcactcttttccactcaatatgcataataaatttgttttccattttgtataattattaatgttataaatttttgttaaaattgttgtaaattcaattttaattgctgtgaatttcttataaaatttgaatttttaaaaattagcataataatatgaggtttgtgatcctaacgaaacatagagaaattttttgaaaatttgcaggccaatagagaaaccttagggctatcgaatgatataaagcaaataaaaaatttaaataatttatttttaacatttttaccttaataagactttattcacaaaaattctgatcaaaactttcttaaaatcaaaaaataattgatcttgatatttcgcaaattttcaaaaagttatgaccaaaaatgtttgaaaaacaagtacttagtttgttaaaacttgacaacattttgcgttatgcaggccaatagagaacatttagggctgtcgaatgatattaagaataaaaataaagtttcttttgcacagttatggtaaatttttgttctataacgatgtgtttgtgttttgctattttacttatggcgcgatcaaatcgattcatttttacgagaatacaaaccgtaatattattgtataataagttttgaataaatatttttcactaattcatagttttaaaaagctgcgagattgaggcagtaaaaatttggtttttttattttcgctttctaactcattttataagtatttttatttggaaagataattaaattcattaaaattttaaatttatataatgaatttttctgatttaatgaagtcaactttttataattacatttaataaagaatgatttaaaaagttagaattttcaataaaaaatttcgtgttttcgcgtttttaatttgtgtttttagggcgttttggtttcttatttcatattttatttttatctttcgaantatcgctattttattttttgatcgatagaccnntgcaggc

SEQ ID NO: 31812 - DNA, 1496 bp, Heterodera glycines
  unsure (1)..(1496): unsure at all n locations
cccccccccccnccccctcggaatgaaaaattattttttttaatgaaaaatgatgatccgagcgaggtctctagggttgccatattgcctcacaatcagaaatttggagaatttcggtcgttttgaagtccctctgcgttccttgagagatttgtcatcctttttcagcgatggcaccctcgccatttaagacgttagaatcagtctaatccagcaacatgacgtgcaactcacttactcagccaaaagctgtccattcgttttttcaataagccgaattgtgccgcccatagaagcgaccaaaaagcattggttgtccgccgtcaaatgcacactgatcacctgacaaaaacagagagaaagcataaaagttaaaaaatctttttgtgagataaataaacagaagggggacagacaaaatttcgccgcagaaatttaaaaaatttcaaacttagaaattttaaaaaatcatagaaactttttttataaaaaattttttgaaaattttcagcgatttttttaaaattatatgataaattactaagttttttttgaaaaattttcaaaaaaagtatcaatttttttttcttaaaattttctcataaaaaaattttctatgattttttttgaaacagaaggcacgcaccgaatccttcatgtagtcaatgaaaagtcggccctcccgcaggtcgtacagccgaacattgccatccgccgagccggtgacaatttcggacgcattcgcatccaaacacagcacaccgtcacgagcctcgtccaacacctgcaacagcagcaaacaactagcaaattttttaagagaattttcgggaacaggacaaaatcacgccgccagaatcccgccgctagaaatttttaaacaaattttcaaacttagaattttttcaagaaaaaaatcttagaaaatttttctatatgaaaatttcaagaaacataaaaaaaatttcgaaaaaacttgtaatttatcataaaattccaaaaaaaaaattgctgaaaatttttcaaatttttattttcctgaaattttcatataaaaaatttttttggcggcgggattttggggtgcacccgaattttcttccttttcaattcttgggttgggggggggaatgactggctccgaatcatttcttttttgaagttttttagttagaatttttttttttttgaaacttaaagaatttcaataatgcgttatcgaggactatcgcacatttgtccctttccgtaagcaattgccccccgccccccttcctccagggccgaaatggaaaaattttttgctaaatttttaggaattttggggccaagtttaaaaacatttttgggcaattttcgtgccaaatttcgtcaaaatgttccaacatgagtagagaccacgaattgagcccggcactgaggtcgagaatcttatgttagcttagtacaagtaaggaagttaaagcccgnaaatacacatttatcccatcagcaca

SEQ ID NO: 31813 - DNA, 1660 bp, Heterodera glycines
ccggctttttttctggcgaagtgttctacaggattgtcttcaagctttttcgcctcacttcctcaatgatctctattcgggctcaaaagttgtccgatcaaacggggcgagacggaaacaaaatgtggtaaagagccatgccaaaactgaaagtggcatttaattgggcattaaataaatgaatttggacctgtacacgtcgcctaagggcgtgccgcggggatattccctgccataggccacctactggccgccgtagtcgagtgtgcgctggttttttgcgcaatactcaaattgagcacacatgaacttctttaactaataacttgggatgggatttttaatgaaaaaaaatcccaaattaattaactaaatagtgaccaaaaaatgccaaaatagtggcgaaaaagttccaaatttaggggtgtaattttttaaatagctatttttaatttgaaaataatttaaaattaaggcaaacaattttattcactgattgcagttacaaaacattttcttagcaaatattgagcaagaaaaaaaatttggggaagaatttttgagaaaattttccaattcttaggggtgtaatttgaaaatgtttagttcaattcttaggggtgtattttttgaattcttggggtatatttttcatttttgttgcattttttgggaaattttccaaaatagtgacgaaacgccaaaatagtggcaaaaaactattttagtggccaacttccgaaattgtttttttagtggcaaagctccaaaatagtgattcatactaaaaatcctcgccctattcatcatcatgtaaattgcactaaagtaaattatatttaaaaaacgaaaattcgtaaaatataattaatttgacgtatcatctgcagaaaaagattaaaatatagcttcttttgtcttattaactgttcacttattgcatatttaatccatggcatttgattataaatttcgtgccgttcccctaactttcagccaatgccctgcttccgccccccgtgcttttcccacctcgtttctggccccaacaaatttgttccactgttccgccatccaatcagaccacccgcgcttttgcagctcggcactgtcccaattgctgaggtaaagccgcttctcgtacggcatcgcaaattcgcggacgcttcgaaaggtccatctcaagtgcatttgcgacaacggtgtggtaacattccagtccatgtcgcgcgggtcgccgcttaagcgaacactgccgccccgctcgaaggcggccgcaatgcctttgaaccaatcggtggcattggcgtcgaattgttggctcggccctccgatgtttgacctgaagaagttggcacgggtcggatttgcttctctttcaatcattagttattgaattaccattgagcaaaaatgaagagcaccggtggcattggcaccgaaggattatttggcattgatcggttgccagaaacaagcgtgaccatcaagtcatagtcttggccaaactcggacatttgaggcagcagaccgagtacattctgtgcacttgcatttgtgtactgaacccggggatataattaataaatgcattgaggaatcaattaaaaatgcttcttgtcaagccagagcaattggcattttaataattgccattaat

SEQ ID NO: 31814 - DNA, 1106 bp, Heterodera glycines
gatcactccccaacgaaaagttcctggcacggacagtgtgatttctatgcccggattgaccggcttcacacaaacaataaaatgaagtcaaggagatcattttggagttcatttttgttatttgtccgtcaattaatttgaaaatttcttgaaattaactaaaaggatttagagcataattttgtgcccataaactattcttaaattttgttcaaaatttattttattaaagaaaaatttataaatattacaattatacaataaatatttaaagctaaaataaggaagattttgtccaattttttttttcattttaaactcaaaattcagccgatcaaaaaatttgtgtataatcattttagtgatttcttctgtttttctgctgaaaactttagacggcattcttttggcacacaacgccggcgaggttggcacggtcacactgaatgtcgttccaccagtcggtcgcacgggtgccacacttggacacactcttccgcggactgatcttttgccaaaaagcatcattcatattagtagggctgccaaaaatatgtacaaaaatatgtaaataaatttttaaaatggttattttcttgaaaaaggcacaaaatgccataaaaattatctaattagcagggaacggatttatatgtgctaaaaaacgccaaatctgtacatatatatgcgccaaaaatccccaaaatatgtgctaaaactcaaaaaaggctaaaatatgtgccaaaaatgaaaaatatttaagagtcgagcaatgtgttcgtgaatttagatcagccatagtattcaggaggcggggggttcatgaggggcttaaacccccccccccccgaaacccataaaaagtaaaaaaattttaaattttaagcaattttttaacaaattgtcattaaaatttcaaaaaaaaattcctgcggcgcttaccggcaccaccggacagacctctcttgctccccaaaaatttttgaaaatagtgcgacgcaaaaaacgttttaaagcaaaaaaaaggtcatcagtttgatgttgagactcctgcgcaaacctagtgggtgacctactttttatttgtttttgatttaataaaaata

SEQ ID NO: 31815 - DNA, 1557 bp, Heterodera glycines
atcaatttttaaaaaattattcgtgccaatgccaaaagcggcacacgacgcacttaaaaggtacagtgtgaagaatggcagccagcagaacagaaatgagcaggacacaacgccaagcgtttttgcaatgcgttcatgggtgcgcaacacccgtcgctggtgctcaaccatgccgttgttcttgccgatgtgcactctcagtgcagtctgtgtgtgaaatattattgtgaatatttgactgttatatatgtggtatcgatatttgtggtgattgactctttaattgtctgggtcgagaattttctttcttctcgcgaacggaactctcgagttatttattccattgtgaatgcgattgggctattttatttgtggatgatcgaaaatgtcgttgtgcctaataggcccattattgaaatttatttcattttttttaaattggccccgagagtcttgataggatcctgttctaaatcgttttgtaacacgagtgcgattgtatgagtgtatttgttcgagaatttaattcgtcgagactttaatttatccctaattgggttcatcttgatcactgtgctctgcattttcgaaatcccaaaaaaatagtgtcacacaccgtttgcgacaatgtgttggtcaagaagttcatgttgtggccgagaatcatcaaaaatccgcggtccaacgctctctgcctgttcctggccaggctgtagatgcgccagtacagtgtcaatgtgacagaggcgggaaggaagaaagcgaacaccacgctgtgcgcgaggtagcgaatttcgtcgccaacataacatgtctaaacaacatggacagatatctttttttcgaatttgctcttgggtacactattgcatactgtatgtgcagtatttgctactgtaggagtttgacaaaaattgcccgcaaaatggctatataactccgggtgggagctgaaccctgcgagtttccatttttaaatagacgatcagttctgccccttggcaattttttgcatcgaaattcacgattagcatttcacttatgctgctgatcatctgatcaatcacagtactcatcaacaaatgatcaaaaaatctaatgcaacttctttcccagtgggcgatgtgtcggcatgccactttcccacattcttgagctttgaattccgatttcctattgccgcatttttggggccatcagaatgtcggtttccaattgccaacattttttccaccacctctcactttgttttccacggtgtgctgttgggactcccatcggacagtggccaacagaatgcccaatgaaaatgaccaaatcagcacgatcacaacgatcactttgagtttggtgaccacggatttgtagcgcaacggtcgcgtcaccgccaggtagcggtcaacagagattatgcaaatggtgaccacggaacacgtgcagaatgtcacatcggcacccacctgtcaaattatttattacaccaatcgatcaatgtaaggattatttccaaaatcatatttccgtgtttgaaaatgccaaccatacatgcaaaagggg

SEQ ID NO: 31816 - DNA, 1254 bp, Heterodera glycines
  unsure (1)..(1254): unsure at all n locations
ccaggcgcaggagtgcatgttggagaagtcgatgatcgaccatcggaagccgacggtggtggcacgggtggcactccatctgtacaacatttacccagcagtgtgacgagcacttgcgcagctcgggactggccgatttgctctcctccggccgatacaaggcaaaaaaagggcggaataatcagaacacaattcaaaccatcaaccgaactggtcggatttgggcaattaattaactgttaaccccggcggactgatcagtgatattttgtctaacaaattatagtaaaaattaaaatgcaaatgaattcattaaaaatttgattttaaagaattttttatataaaaatgtttttggtttttaacatttttttgaaaaaattccaaatttgagttttttttttttttttggctcgggggacgaccttttccgtgtttaaatgacgccaattcgtttggcatcgatcctcaacaaagcaattagtccaatctctaggaggtcgagagactgtgcagtgccaaaagccatctgtacggtgccatttccagctattatttgggccaacaggcggacgacgagcaaaaatatgggacgaggtcgtgaaaaccaattaattttcccggatttgaccacccccctccccctcttttaggttggcttactttgcgcgctctttggcccatgccaaaattgcggtgcaattatgcgacaaagagcggccaaagtcggcacttcgcgaggccgtccaattcgcatacgacgtaattgtgcaaaggttggcacggaattggggggcaaacaatccaattgaaattttttttataaatgtttaaaaattctgcgaattgacacaaaaaaataaattgaataaaaaaatattcgactgttttttaaaatccaaaaatgctaattttctgtgcctttttcgcacagagaagccaacgcgcgcaaagagaatgacattgtgtaccacgagagggtgccggggcccgacgaattggccaagttggacggcgcgccgatggtcaaccactcggcttcgacccgtgcgacccgtccatcgttggtgaagatttngtccgggagctgntgcccaccgacgtggtgaagacggtatccatgtacagcgaggagaaggaccggctgaagcgcgaactgctcgccaaagtgggccaatgtgacgcggaattggagtgcgttggnggggggggggggggggggggggaaaaaaatttttttttttttttaaaaaa

SEQ ID NO: 31817 - DNA, 1124 bp, Heterodera glycines
ggagagcgccagttgacggtttgttcacttggctgtatgctgatgatttttgggtgtcctagtgggtagtccgctgtgaagttggtccacgggtagaggctggtgaagtccttgtagctgattttttgtccaggttttgcagtatgcagtagttttttaacatcagtcctcccaccatgaaaggcgtcgcgtattcgaatgggtgaattatccttccaattattgaaaaatccccgcatctgcttgtttctcctcagctcctcattgatttcgtgctcccatataacttccaagtcaacgtaacgcctcaatgttttgtgcttccttttctccctctctcttatttccctcagcgtctttccgttcggcatcctcgattcctcatccatattaccgaaacatatctcacacccatgccaaacacacccattaacttcaataattttgtcccgccttccattcgtgcctttgatgtatccgtcgacttggtaaacctccccttcgcgtttaaagacatattcgccgtaccgagagtgtgccgtctggatattgacattgttgatgtgggagtaccagtcgaggtatttgatggcgagtgcgctttgattttgttgaggggtgtagcctttctccgggacgatggcaagtgagttaggcttcagatgattgagggcaaaatttttgacgcaggcactggcgatggtcatggcttgccacaaaatgtcgattccaccgtgttttccgtccctttgtgtaagttgtttgaattcccggcgtagttctgcaagggcgtgggtgaggattcggacgtcgttgcagcattattcaggtagtttctctttgaggtcgaatggttgagtgcgattgtagttataccaattatcaaatttctgtaaatcggcttttttcatttgatcaggacagtagtcttcacgtggagggaggtgctggaggaccttatcgtagttagctgatttgttgaacatatggggaaagtgctgtttatcctaaaattatatttagatcaaaaaattttttatgcattaatataagtaataaatagagttctaggaaatatggacaaatagactcattttaaatatttatttcaataaaataattaa

SEQ ID NO: 31818 - DNA, 1115 bp, Heterodera glycines
  unsure (1)..(1115): unsure at all n locations
ccccccccattcgttacgcctcaattccttctttcccatgtcgcccattagtccctttcataagatcattatcccaggctaattgacgacgcattgattatatctgaagaagcgtcccccacccctctataaaataaagcgagtaaagtatgaaaattgatatttgaaaacattcccaaagtgtgaaaaatgtccgacctgcccaccggtactgtaacggtggcggtcattctgtccgtcatttctctcagtgccattctcgtcggagtgccgctaatgctcaacgatttggtgaatcttcagcttgagtttggactgaaaagccaagcgcacttggacatgagcaacgttttgtggagagacataatgaaagaggtggcgacgattggccaatgggacaaaagggagcaaaagcagacgatacggaagcggagacaatgtgcgaaagggacggacaattgaccactcgaatcaaatcccgttcagacggaagcggaaatatcggcggagggggcgcgagcagtccaagcgccacttgccctcagggagcgcgaggggccccgggagtgccgggggcaccgggagagccgggtcaatcaaagccaagagcgaagttgctaacaaagaattgcctttaaggccaagacggacaacccggcacttcgggattctcgggctttctggaggattttgctcacgtgtcgcagtgccccacttggtgatttatttcaccatctcttaacctgtgtttctctttgttaaagtccaattggtccacctggccccccgggatacaaagggaggagaggctttcgcggtgaaaagggcccaatcggtacacatttaaatggcccaatggcgtcattcaattttaattttaaaggacctcccgggtcgcctggtcgcgatggccatcccggtgagcagctaatgaacggattaagccgtgtgaggggaaattgtactgtttttttatcaggtgacgaagggcccgaaggcgaattggacttcacggagatttgngagagcctgggccgagaggccctcccggcgagacgggcatggatatgcacagggcgagccggggccaaagggagagcacggacagccggggg

SEQ ID NO: 31819 - DNA, 1196 bp, Heterodera glycines
ctgaaaattttttacacactacaggatgaaacgcaataaataatgtttgtagacaaaagaaattgggcgaaaaaaattgcctcaacaatcagtggtgaaactgaaagaaaaaaacttccccaaaaaatcggagcttttccgacggcatcagctgcatttccaacagttcaacagtataaataaatattaggcaaatgaaaaatttttttccttcctctttagaaagtgtctaaaaatttttgttgttaatattcagaaaacgtgtttttttactgacaatttttttcaagagaaggatatgaacaatcacttataaggctcatgcttggagataaaggaatcggaaaaaaaaattatctcaacaatcagtcgtgaaacagttcaataattcggaagcagtgccatattgggaaaagatgcacaagtagagtaggctcgaaataaaggcaactgccgaagattaacaaaaattcaaatttattggccccgttctgctttgacaggccatatctcgccagggagtggcggtagaccctttgttgatacatttgaaaatgtagagcgcgtctagctcattcgaataacatcaaactggtttgtttttgtcacgaaacaacccgctgatggccacgtcgaagaaaagtcccaaaatttgacatccataaaactccattttttcataggccagcgtgtttaaagcaaacccgaaactgataggaaatttaaattgatcataatagaagtttaatttttatttgtcccatgcattttctgggaaatcttttcgtgaaaagttgaaaaatttcaaaacggcagacaacagatgcatttcaaacaattcaacaatataatataaaatttaggcaaaaatttttgttccttcctctttggaaatggtcttaaattttgcttgtaaatattcagataacaagttttttttactgaaaattttttacacactacaggatgaaacgcaataaataatgtttgtagacaaaagaaattggcgaaaaaaattgcctcaacaatcagtggtgaaactgaaagaaaaaaacttccccaaaaaatcggagcttttccgacggcatcagctgcatttccaacagttcaacagtataaataaatattaggcaaatgaaaaatttttttccttccactgtagaaactgtctaaaaatttttgttgttaatattcag

SEQ ID NO: 31820 - DNA, 981 bp, Heterodera glycines
caattttagaaacgaaacagtgcacaaaaagagggggggggtagacgacgagagtaattttttgaaaggatcgcaccccatcgaatatttccttatttctttttaataactgtccaaaggtgactgcgtcattggctcttctgtagtccttaaggtacttggactttccacagtaaaatgtggtacaaattttggaactgtcccgcctcacggtgggacttaaaagcagggtaaagccaagttaaaaacttcagtggagaatttttagttttgaatttttacaatttaattacttaaagccaaaagattcgaaacagaagcattatttaaatcaaaaataattattaaattttttacattttagtttcaaaaaaacatacaaaaaaatgttcccaattttgaaaatgaaatagagcacaaaaaggtgggatggttagacgaaaagagaaatttttaggaagggacgcaccccatctgatatccacccttttctgttccataagaggccaaaggcgactgtgttcgttgacaagtaattatccaattaaggtacttggactctccgcagtaaaatgtggtacaaatttttgaactgtcccccctcacggtgggacttaaaagcagggtaaagccaaattaaaaacttcagtggagaatttttagttttgaatttttacaatttaattacttaaagccaaaagattcgaaacagaagcattatttaaatcaaaaataattattaaattttttacattttagtttcaaaaaaacaaacaaaaaatgttcccaattttgaaaatgaaatagtgcacaaaaaggggggatggttagacgaaaagagaaatttttaggaagggacgcaccccatctgatatccacccttttctgttccataagaggccaaaggcgactgtgttcgttgacaagtaatatccaattaaggtacttggactctccgcagtaaaatgtggtacaaatttt

SEQ ID NO: 31821 - DNA, 1069 bp, Heterodera glycines
tttagcgctcataatggggatgtataaaggcgattgtagaaggaattggaagcgtaaaaattgtttgagaagctttttgagcgtaattacggatttttacttccaccatttttttttaggcttagatcacatgcgattttcggcactctgataattttagcgctcataatgggatgtataaaggcgattgtagaaggaattggaagcgctaaaattgtttgagaagctttttgagcgtaattacgatttttacttagaccatttttttgctaggcttagatcacatgcgattttcggcactctgataattttagcgctcataatgggatgtataaaggcgattgtagaaggaattggaagcgctaaaattgtttgagaagctttttgagcgtaattacgatttttacttagaccatttttttctaggcttagatcacatgcgattttcggcactctgataattttagcgctcataatgggatgtataaaggcgattgtagaaggaattggaagcgctaaaattgtttgagaagctttttgagcgtaattacgatttttacttagaccatttttttctaggcttagatcacatgcgattttcggcactctgataattttagcgctcataatgggatgtataaaggcgattgtagaaggaattggaagcgctaaaattgtttgagaagctttttgagcgtaattacgatttttacttagaccattttttgctaggcttagatcacatgcgattttcggcactctgataattttagcgctcataatgggatgtataaaggcgattgtagaaggaattggatgcgctaaaattgtttgagaagctttttgagcgtaattacgatttttacttacaccatttttttctaggcttagatcacatgcgattttcggcactctgataattttagcgctcataatgggatgtataaaggcgattgtagaaggaattggaagcgttaaaatgtttgagaagctttttgagcgtaattacgatttttacttgaccatttttttctaggcttagatcacatgcgattttcggcactctgat

SEQ ID NO: 31822 - DNA, 1225 bp, Heterodera glycines
  unsure (1)..(1225): unsure at all n locations
tttcattttttcttcaatttattcccacgaaaaattcaatctaaaaaattatctaaaattcctctttgcgtatgaacagaagttttccaagacgttcttcgatccaccaacaggtgctgtgggtggtgttttgtctgctgatcaccagcgtgtttctatgctcgcccatcaattactacgcggaactgaagcccctgcaagtagcgccttggccggggaaccgggatcgtgaaaacaaattttgtgggatcccgaaccatattttgggggttttcgggaataaatccatatttcgacatttttgcattttaagtccatatttcggcatattttcacaagaaaaatgcaaaaaaaaagcaaaaatacaaccccgaaagatcgactttttgtaaatttttaaaaattacaccccaaaaatacgaaaaatttgcgttttcttcgtcattttggcaattttaataaatatttcaccactttttgcgaatttttctttttttaaatgagaattttttttttaaattggcaaacttggaggtgttttttatacaacggatgacaataaatcggtgtgccaccgccaggccaaaattggcggaattattaatagattagcacacccccccccccccataaaaaaaataaattgctaaatttatgatttttgaaggtaatttggactcaaaaattaaatttttccaaattgcagttgagttacgatgatggcagcagcgaatccagcactcagatggtttgcggttctgatttgccggaccatggcaagaatattgaaaaatataaagaaatttatttttattttttagaacaaaattaaaaaatatatgtaatttttgacttttcataattttaattgaatcttttctcaattaaagttataatttaaaataattttattcaaaatattccaaaacgaaaaaataacaaaaactctaatgttaaacaaatattaataagaaaaaactgacaaattattattaaaattttttgttaaaataaaaacaaataattaaataatgaaattgccgaattaactaattatttatatccatccatttgttagtgatgtcattcttcatctgttatatgtttgtgctcggatttgtccttccgctgtttttcatttcgctgtgctattttttcttgatccaacatttgcgcaaagcaagcgagagttttgaatgttggccaaganggtctaattaaatgt

SEQ ID NO: 31823 - DNA, 1447 bp, Heterodera glycines
attataaaaaataatgtgtcgaagcgaaaataaaaaaacaagaactgcgaagaaacagcagacatgtgagagtcagacactacataaaaattaatgaaaataagtgcgcacagtgcgccaagagaaaaaaagtgataaaacagtgatttttatgaaatttctaatcgcttttaacttggtcattagtaaaccaaatagagcaattttggtctcattttgaaggggaaattcttaagaatatgtttaactatcgtttttacgtaccaatatcatttttaacctttaaaatgacggtaatttattcaaattttcacccagttgaaaaaattttccctatgttcaaatggttcttgtaattttgcatagggccatattttgaccccctctagcgattccaagtttatttaatagaacttgtttttaactcgagatcggctcttccgtttttacaagggaaattctcgacaatttttgaattagcgtggttttttggcgttttgtctgtgcgaacttttgctcaaattgatgatatatgtggcgttaaattaaagatttttcgaaaaaagcagaattgaatcaatttaggacaaaaacagcttgccagactaaaacgactctctgactaaaacggccagactaaactgatccggtccgaaatttgtaaataaaaatatttaatgtatttaaaagagaatctgctgaacagagattttcattcaaattaagcagtttccgtccccgttgaaaaaaatcctttcagttttcttttctgcagaaagtgctgtactttcgccgactcctgattcacactcacatttaagtatattaaattataaatattcttttttcgtcactcactttcgcaacatcggattctgtaataacagtacatgcttttcctcccgcacactttgcattcactcggatgccttttcggtcgtcccacccctcttttcttttgatcgctttcattgccaaatttggcttcatcaacaccatttgtgtgcttttccatttccaattttggcattttgcccttccgtgccataagcaggcatcattgatgaattttggctaaaattttgtgccactaaatattcaattgctgtcaaattgtcccgttgtgggcccaacaaaacacgatggatgaagtcaaactccttttgggcagcacttgccaaagacgatgattttgaatcggttaaataataattctgctgggccactttctccattaatcgaaaaatttataaaattgcttataaatttaatttttttgcgtttgttagatataaagcaaagaaggaaatcccaatatattagcctcctatttctttttggaatggaatctgttgtagattttttcagttacttattgattgtaatatctttattttattgatcatttaaatgcaaaataatattggacaaagcaaagggaaaattt

SEQ ID NO: 31824 - DNA, 987 bp, Heterodera glycines
agagagagagaaaagacaaaaatgttttatgttgtcataaatgcgagcgtgtgtatgtgcgtgagtgtgtaaaacaaaagagattttccgatcattgcatttcgtttcgtttcgtttctttgtttaatttccgctaaccgtttcgctcgtgccttcctcaacatccgcatctcgcgctccggcattggtcaaattggtcgctgccgccgcctcatcgggctcgccctcactttgtccatcatctgccgtcacaacgccggtgcctgtaataacgatttaaggaaattaaattattaattaaatccatctgatcagttcatattttgttgaactgacaattgctttacactcactgttttgtccgtggatgtgctgattattggcaccgctgctgctgctgttgtgacgcaccacgttgctgagagtgttcatgcccggctgttgttgttccaccgccgcctcaacaatgattggtgtgttgctgctgctggccaaatttgcgcctgagaatgtgagggaaaaatgaacacagttacaaaaaaaacgttcgaaaaatgcgaaaatgcaactcaccaatgtggccggatgccgagagcacgcggtgacgagactcgttgttgtagaggagattgaacgggaagaatcccttggcgttcttcccctgctcccgaactttaagacgactgaattcgacgatctggccgcactgaatgttgttggcaaggcgtggcatgcaatcctcccaacagtggacggccatttcctgttgggtgttgtgttggtcgaagatgaggcgcacgtcgaagccattcagaccacccatcgtggtgaacggaccacacaacacgacaagcccaacaacacgccttaaaacaaaacggggccaatgtataaacaatattaccaaagtgatcagaatttgagaacatacccaattagcatggcgggttgccaatccaaaagaaccaagcgggatttgacatcccg

SEQ ID NO: 31825 - DNA, 1311 bp, Heterodera glycines
tttttaaatgagtaatttaggggccgcaaatgtcgggctcgcaaatgtcgggaaataacacttaagaaatgggccgcaaatgtcggggccgcaaatgtcgggccgcaaaagtcgggccgcaaatgtcggtaattggctggggccgcaaatgtcgggccgcaaatgtcggggccgcaaatgtcggggccgcaaatgtcgggacacgtccttgtgtatgtggtgcgcttgatggaacccttataaaaaatcgttttgtttgcttgaaatcgacattacgcatgaaaaatctgacggattcagcgatgacaataaaggcactgattcatttgcataatttttaattgacacaaaacaagaggaagaaaatgatgatcagttcatgttatcagaagaagaaacattagaagaaagagaagatgaaaatatgcaaccaatcgaaaatccttttttatactgcgatcatgcaaaaaatctatcaaatttttctctcagccaataattttgtttagctaggtttttaaaattattccaattaaacaatttgttgataatttttaaatattatttatatttcaatgatagaggtttcaatctataaaatgctttttaaatgaaaattttcgattaagtttaaagttttttatgaattttatcatacaaacgattgggcatgtctccgcttcggagcggatacacccgcatatgatttgcagaagggaaggggtgtcatatgtgacggcatcatacgtagaaaagggagttaattggaacgcgcatatgattaatcatggaaaagtcgtactccgcgtatgacggcgtggcagttacgatatcatatctgtgaccatgacacaattgaaacgcgcctatgacactatgacacgtcatatcatacgccgcatattatttttggggtgatttaattgaaaaagaaattttgcgtatgatctgacaccgtgtcatagagtcatatcgcagatatgatccgaattgaaataggcccctggtcgagttcagaaatataaatacaaagcattttataaataatactaatatttatatagaaaactaatatataagcttaagaagtatttacagaatatttagaattaattcatcagtctttgcaaaataatatatatataaataatttaaactatgaaaagctgaaaagatcaattataatgaaacagcacattttaaatttaataaataattacatttactcataaataataatccaaattatattattacatattagcggaaaatacaaatctgatacaaataatagaaaaacaaaaatgcaaa

SEQ ID NO: 31826 - DNA, 938 bp, Heterodera glycines
  unsure (1)..(938): unsure at all n locations
tcataccttttaattatacgccatttaagaaccattaaacgtatttttggtttaccccttgaacccagctctagccttcgaaaaaaatattctataaaattcgaaaaaatgaggcccaaaatttcggaaattggaattccgaccccactcaaattgtttagcattttcttcgtgccaatgccatttcttccgtcagttacgaaattcatttttatgttcgcgtgccgtcaatgcaaattgtgccatttgaattggtgaacgaatggacaaaggaaaagctgacattggccaaagcaaaggaaaatgaatggtacatcgattggataatgaaacgaagcaaaattattggggagacagcggcggtcaattggaaagacggaaattgggacaacaattgtaactgtgtgttcttttggcttgatagtgacactaattgcattgtgtgagaaaacaacaaaaacagcgatcaaccgcagaagaagaaatgaattaattagaaatgaccgatcgaccataattatatcattgatcaaatgcattttatgaagaaaaaactcaatttcggtaaataaatcggatgtataaaaatggtttggtatctatcgatgtatgaatttctccttgaaacttgtgacaattaattttcgggattttgacgatggatttacgacacacaaaattagcaattagcaccggcaacattaagtgccgatttgctgctgttcttttctcttttcagcttcattctctcctcttccttccgccgaatttttccttttcctctctttctcttccgtctctcctccttccctaatgctatttccttccttttcctcctctttccttgtttctccatttttgctgttgtccatcttaatttatttggntaaatggaacattttgatttttttattaaagaaattttgaaactgctgggg

SEQ ID NO: 31827 - DNA, 1212 bp, Heterodera glycines
tgccgggggtccgtcttcgatcgctgtcatcctccaccggcgaccagcacgtcgacagtagcaacgacaacagcctcggagatggcggttatgctggcaaaattgcaccaacagcaggtgtatagcaattgcaattaaatgaaaaggccgccataattgattccttttcctaatttctcagggatccgacatcgattcgggcggtgagggtggcggacgtgcatcgcttccagactctccgattccttccgccagtgcgttcaccactacgctggcggccagcggcggactgaacctggacgacgaattcttcgccattccgtccagcgaaggtggttgaacggaagatcggagtggaacgaagagtggattttttgatggatttatcactttagattctccacgcaaattgctttacttcatcggcctagtggacattctcacttattacggagtgaaaaagcgtactgaaatggcagccaaaacggtgaagtatggctcaagtgcggagaacgtctctacggtgaagccggaacaggcaaataattcctttttggttgcttaaaaaaactgttcatttttcagtatgcaaagcgattgcttgagttcgtcaatcgtaatgttgtatgtccgactcagcaaagctcgtcgacagcggatgcgttttcaccattaacaatcgctgaccctccgccgtcacagcgtcaaattggcagaaccgaactgatggttacagcgaccccccccccagctgaccatgtgacaataatcactgaaccgatggcggccgcgagcattcactctcaaaattgattgttgaatgataattttaaatgcgagaaaacagaaaatttccatacttattgtagattattatgatggatgttgaatgtgtggtgtctgtcagttatagatgcaatttttaattctgtacatgaatgggtatagaaatgttatattttactttctgacacttattcattccatgttcattcactctttccaaatgcttcacacttcatgcccattactttttgtttctgaaacatgcaaattagacccgtatccccccccccccccccccccctcccttcccgaaatgaaaaaaaatggatgtgtatcggtactgccgaacgacttaattactttagattaaaaatttccaacaaagatagacgtttcttgtgggctaaattttagacctgccaggcc

SEQ ID NO: 31828 - DNA, 1081 bp, Heterodera glycines
tccaaattgacaaatgacacataaaccaacgataaatgagccctttccgctgctatccgacatttttagcttgatacattcacaacaatcaatagaaagctaaaagagaatttggaatcattccttatatgcccataaaaatgagaaatatgtacaaatataaattaggaataaagaaaggttggcacttttccgttttaggccctaaagttttaattttttttttaaattaacaaaggccgcacagaattgcaaaaattgcacgtcaaaattatatcaagggcataaatcccacaatttgagctaagatttcctcaaatagatttataacggaaacaaaaatttgtgcaattctgcgcgcactttgttgcttttttaagaattcaaatctaagcccaaaattgaaaagtaccgaaaggtttgacattcaattgggttataagaatgtgatcagtcagtattgtctgtgctgctgttggttcatcgccctttgctgctgctgttgctgtgccatcataaattgttgctgtgcgttcagcatgcccatttgctgttgctgctgctggggatgcatttgttgcactgaaaatttaatttacagacgcaaaaatgtagctgataatcactgttttgttgctgctgctgcatcatttgctgctgattgtgagcaaacccgcccatttgcgcggtctgttgccgcatttgcaacggctgggcgctgctcatgccaggatggaccattccttaacagcggacaaccgactaattcctaacgcaacaattaatcagtggctgggtgaccctgttgcggctgctgttgcgactgagtctggtgcataaactgaggcggcatcatcgccccgcccccttgactcggaatgagcgtcgtcccctgctgctgattctgtgccattctcatctgctgctgtgctccgttagagcccatctgatggccaccaatttgcatttgttgttgcgaagttggcatttgctgatgcacgttaacaaattcaaaatgccaaatgcggtaatttgtctcccgacctgttgctgaaacatctgttggtgctgatgcgattgg

SEQ ID NO: 31829 - DNA, 1587 bp, Heterodera glycines
aaattttatttacatgctagtttaggcactttgatgctttttctatcaaaaagggagatgaataaaatttttaaaaattttaattcctttttaaacagcacaaaaagtttagacttaactttttagtgaaattcaatcattcatttttcgagtagtgatcagaagcgcaccagattttgcaggggcctaaaaaggtcaaggaaaggcgtctctgcgttgatttagcagtagtacctatgaatttaaattttctatgaatttttaaagttttttgaaatttttttaagtgcaaaagtggtggtgtctgcaaaaaattttcaccgggtttaaaaaatctaggaaaattagtaagcatttgtagtgttccgatacgtatccctgcaaaatttggtgagcccctgatcaattacaaattatttatggacgatcaaatttttagaaatttttatttatttttgcatatctgaaacgcaccaaattttatttacatgttagtttaggcactctgatgctttttctatcaaaaagggagatgaataaaatttttaaaaatttttaattcctttttaaacaggccaaaaagtttagacttaactttttagtgaaattcaatcactcatttttcgagtagtgatcagaagcgcaccagattttgcaggggcctaaaaaggtcaaggaaaggcgtctctgcgtggatttagcagtagtacctatgaatttaaattttctatgaatttttaaagttttttgaaatttttttaagtgcaaaagtggtggtgtctgcaaaaaattttcaccgggtttaaaaaatctaggaaaattagtaagcatttgtagtgttccgatacgtattcctgcataatttggtgagcccctgatcaattacaaattatttatggacgatcaaatttttagaaatttttatttatttttgcataattaattcataaatatttttttcagaaaatgctctgaaacgcaccaaattttatttacatgctagtttaggcactctgatgctttttctatcaaaaagggagatgaataaatttttaaaaatttttaattcctttttaaacaggccaaaaagtttaggcttaacttttttttcagaaacttatcagaagcgccccaaactttgcaaattttttttacagcttaactaggccctattaagcttatttccagaaaatctcgcatgaattctcatttttaaattttttatagatttttaaatgtttggattttttttggcttaccaaaacttcatcgaacctggttctttctattctctttcaaatcgccccaaattttttttacagcttaactaggccctattaagcttatttccagaaaatctcgcatgaattctcatttttaaattttttatagatttttaaatgtttgcattttttttggcttaccaaaacttcatcgaacctggttctttctattctctttcaaatcgccccaaattttttttacagcttaactaggccctattaagcttatttccagaaaatctcgcatgaattctcatttttaaatattttatagatttttaaatgtttggatttttttggctta

SEQ ID NO: 31830 - DNA, 1351 bp, Heterodera glycines
  unsure (1)..(1351): unsure at all n locations
tttttgccttttcacaagagattttattaaaaaaggcaaaattcgccttaaattaataaggtgaaagttgnaaaatgtttattaaaaaatntnaaggatganatataattaaaataatcaaaaagaaaaaaaaatcatttattttttttaaataaataaaaaacattttcagaggcagtgcctcccgaaaaaaagacaaaaaattttcgaaaaaaagctaaaaaaatggaaattttaaataaattaaaaagtgaaaaaaggaaaaaagcttacaacaccttcgattcccaggacgtctccgttccaagtactaagaaggcccaacgttgcttaacttgccagatcggacgggatggcgtgctttcaacgtggtatggtcgtaagcgaaaggaaagcaatgaaagtaatttaaataggcatatttaaaagagctatttttttgccttttcacaagagaatttattaaaaaaggcaaaattcgccttaaattaataaggtgaaagtttgaaaatgtttattaaaaaatttaaggatgaaatataattaaaataaatcaaaaagaaaaaaaatcaatttatttttctaaataaataaaaaacattgtcagaggcagtgcctgccgaaaaaaagacaaaaaatttttcgaaaaaagctaaaaaaattgaaaatttaaataaatttacaagtgaaaaaaggaaaaaagcttacaacaccttcgattcccaggacgtctccgttccaagtactaagaaggcccaacgttgcttaacttgccagatcggacgggatggcgtgctttcaacgtggtatggtcgtaagcgaaaggaaagcaattaaagtaatttaaataggcatatttaaaagagcctatttttttgccttttcacaagagaatttattaaaaaaggcaaaattcgccttaaattaataaggtgaaagtttgaaaatgtttattaaaaaatttaaggatgaaatataattaaaataaatcaaaaagaaaaaaaatcaatttatttttctaaataaataaaaaacattgtcagaggcagtgcctgccgaaaaaaagacaaacaaaaaatttttcgaaaaaaagctaaaaattgaaaatttaaataaatttacaagtgaaaaaaggaaaaaaagcttacaacaccttcgattcccaggacgtctccgttccaagtactaagaaggcccaacgttgcttaacttggcagatcggacgggatggcgtgctttcaacgtggtatggtcgtaagcgaaaggaaagcaattaaagtaatttaaataggcatatttaaaagagctatttttttgccttttcacaagagaatttattaaaaaaggcaaa

SEQ ID NO: 31831 - DNA, 1129 bp, Heterodera glycines
cgagtattttcgtttcaaaattttcttttttaaatggtatagagcatcagaaagagagacaggtgagggttcaattgagtcaaactcggctcgggctgtccactgagcaaaattctcaatctgctcaatttttgcacttcagaatactgtgggtatagtgttagcatatcctcgaaacgtgcaacccaccgtgagaatgatacacttgggtttccatcataaccctctcgaggggggtaattccccctaaaaatggatctgcaaccataatttcgcaacttccgtccccaattgggatgttgtcttccccttccgttgcccctttgtcgtcaggcaatcgattatgttcttgggattgtccgtcatcaaaccattcaccaaatccctctggattatcttgttcaaattccaacaattgtactcggccttttagagcatccaaattttcggtaattttccgaacctcctccttcattttttcaacaattttcccaaatcgaacctttgtgaacgtctcataacgttccatatgattacttacctttccaatttcttcctccacttcaataaacttttctttggtctcaaatgtgtccatttctgtaaagttctcgagttcctttatcgaactttccaattctcttactcggtcagcggtgtcctgaatctgaatttgactcgagatttgtgaaattgtcgaagaatgggtgtttccgtttatctcaccagatgccgtcttcgatcggctcgacctgcatcatggcacagtccctaatcggactccaatgcgggaaaggcgatctaatcaattctgaacagttgagttgacttgaattcgaacaaaaagccgaagcactcaaaatccatgttttacatttgaattcggttatttcaatatgaattatggactttagaaaaggcaatttgaaatttactctaactgctaataaaattttgtcgttaatactcactcaataaaataggttcatttttgcgggtaagcacaaataatgcaaagtgaaaagattagtgattttcgtaattgcttaatagggcaacaattggtgcaattccacgggtcctttggtgcacactttggccagcacgggaggcatcaccaaatcgaact

SEQ ID NO: 31832 - DNA, 1086 bp, Heterodera glycines
  unsure (1)..(1086): unsure at all n locations
tttacatagtaggaaatgattaattatatcaacaataaatttgataaataaatataaaaataaaatttaaaaataatttataaatttttttcttatgccgaaaaattgaaaaaattagattaaaaatcaaatccattaatgtaagaaatattttattatttcaatgacaaaatattgttaattaataaaaaattgttttctaacagaatttaattctatttcttaaggggtacatttgtggcaataaaattatatacctagttgatatttgaaaattttccttcttaagtatgcatttcatttattttatttcatttattaaatatgcgaataaaaattcatatattaaaaaatctacaacttgaattaattaattaataattattattttcttttagttgtttatgaccaaataacgataaatgaactgaacgcataaaccaaggattgagaaataataagcaattatccatgtgcaaaacagaaaaccgcgacaagttgaagacaaatagggcgaaatatatgagacagaaaagccaaacacccatccatcatattcaatcacaaccgaaaacaattatagttaaatgctattgcggtgtgaatcaaaattcgcctgtacaatgtcatttctgtgggcgatcgcttcattaccaacaaaattaaaattgtgttcaaacacaatgccaaaaacacggtaattagcgcttcacatgatgaattaggatgttcattttgtttccagcaaattttgatcaaattaaatagaccttaaaaattttatttgaggaaatgacggcaaattaaatgccttgtcagaaattttgcataaatttattttagaggatttaagcggtagccgaaaaaataggcaaattaggagtggtatcagcttacatcactgatttcgagaattattatttcataatttttgggcaaaactcatattttctgtcagtgatatttttattcctgggattttttgtggtaattccatgcatanacactttttgtctggtggtttaaagtaaaactttttcagttttatttctttattaatttagcgcaaataaaaattaatttttg

SEQ ID NO: 31833 - DNA, 1068 bp, Heterodera glycines
tcaccatcgtcagtcagcttgttgtgtgtgggtgtgtatgtttctgcgctgctgccgctgggttgacagtgagtgatcaaagtgatcaggatttttttgtgtgtgtttgcgcgtttcttttccttcccccaattgtttatttatttgtgtgtacactctctgctgatcaaacacacacgccgctcgcggacgactgatcagtgcgggcgatccccaacctttgattcttaggcttttttgacaaaaaaaaatttttttatgaacgtcattttttgacaattttctcgggaacaaataaaaaaaatcactgcttttccgctccgatcacttcttacttaatgctgcactcaaaataaaacaaaaaaaatttttccgatcagtgacagatcaaagtttgatcacaacgacgacggacgacgtgtacacaaacattgagagtttttcttcctccaaatttcctcccccggggggacggatttgcaagaaaaacgatggaaaaacggacggaggaacagcagcaaaaacgtgtgtgttagtttgtgcccacccacattttgcacacaaaacaaccgcaaatgtcctcaaaatttaacggagatttgcatcatcctttgtcaaatggtgacagttttcgagaatggaaagtgattatttgtggtggtggcgtcggtggatgggactcgaaccgccgcgggacccaatataaaagggtggcgcactgggccattctgctgatcagaggcccgccggcgttccactgtctatatttttgaaggattcgaaatttcgaaaattttgcccaaactttctcgatgtttaaatttcgagatcaatacgatgggtttacacgagagttagcctcttttacttctttaccccccccccccctctgaatttaattttgattttttttaaatttaaccgattttttcgggggcttatttttctccaattttcacaattttcgcaaaagacttttacaaaaatgttcaaacgacgaactttcatcttttccgagcagttcttcccttttttctcggtttttttgaaaattttcacgcgaatgct

SEQ ID NO: 31834 - DNA, 2093 bp, Heterodera glycines
tttttgctttttccatgtaggcattgattttttacggcatatttttctcaatttctctttttatatgcctgatttatacaactataatgcgcatacatttattaatttgtataaaattttaataaataaatttagtttctgcttttttgaatttcccattttgggcatcgattttccatggcaaattttctaaagcaaaaaatgcatataaaagtgatggcacagattaagcaaggcattcgcattgaataattttaatttaaaattatataaaaatgcattttctaacttttttctattttaatcttttagagaaaataagtggcaatgaaaatcattttcatttccatttttctcattgttttttcctctacaacaaaaaatgtgcgtggcgttcttattggcggcaacataaacaacaggggaacacaaatagttggaagggtaacagtgaatggaccatcgaaagatgacattggacgaaacataaacaacggtggtggaacacagatcattaaagcagtgaatgtaaaagatggagcagtcatatcggatgaagaagaaacgaacacaagcgatgctgaaatggacgaagcctggagaagaagcgatgacaaaggcaatttaaaaattaaaatttaattttatggaaaaaggcaaattccattcgtagaatataagtaaaactgaatccatagctaggattgtttttcatatttttcaaaagatcgaaaggaatgcgttaccagcggcacctttcggcaccgccggttcccagcacatttggcactttagtaatatatttctttttcttcaatacttttacggtctttttggcattgcacactatctaataaagaagaaacccaagtggtggtgggattttccgaacgaaactttcagcgtaggtaaatcagtcccccctctttgtgttatcaattttttaaaataaatttgaaaataatttatgtttttaatattttttaggtttttctgagaaatttaaccgtaacgatagtgataatgaagatactgctgaaggcaactcttccaatgatagtgaaattgagaagggcgcgaaagcaaagggtgttcgacacaactcaaagaataaagggatcagcgaatcgtcgagaggaagcggtgactttggacattggaagggatggaagggtaattttgaacactaattttatcttattaaaaggatggagagaatttctatctatattaaaagtgtcattaaaaggcatattttatctcataaaaattaaataaaagaaagaaggtgcccggcggtgtctgtcaattatttaataatatttctcatcttcaatattcttttagggtgcgtaaatcaccccccccctttttgtatagtaatattttactaatattttagattttgaccagaaatttaaccataaagatagtgatagtgaagatgatgaaagcaactcttccaatgacagtggtggtggcgacgttcaagaaaagactggacaacccaccagaaactattggaaatatttgaagaaagttccggtgccttttctaaatacgtttcggaattctttcaaagggaacagtgaacacgtggctggagaagagagaccatcgcgggagaatgttcttgtgcccaacataaacacgggtggaggtagccagcacattgcaccggtaaattttggagaaggagcgaaagggaatcaagttgggggaaactattgctctggaggtagccagaacattgcaccggttaatcttggagctggattgaatctggctcgtgttggaaacaacaaaaacagtggtggaaaacagacgattggagcggtaactattcgtcgatcgtgaaaacaacaaaagcactggttggagaagccacacgattgaaaacatgactatagatcgtaacttttttcttttaacttgtactgttgtactgcagtgataaagccagatattagtcagaaatgtgcctagtccaaaccgtcggatatcggctttatctctgccgggatggctaggtaaaactcttttcattcagaacattgttagaatttttaaatttgaccattgcattttccttt

SEQ ID NO: 31835 - DNA, 1017 bp, Heterodera glycines
atttttaggtgctaaaaaatgctaaaatagttagtttttaggttctaaaaacacccaaaatagatgctaaaaatgggaaaataggtgcaaaaagttccaaatttaggggtgtaaaatcgaaaattttcttcaaaaagcaaaaaaaattatgccaattttaaaatccaaaattctcgtcaataaaataaacaaataaattttggagatgatttattggggaaccgcccaactcgccgcggccatctcgccgcgagactcgcgcccacggggcaaacctccgccgtgccttgttttttgactatctcgccgccagattttttcgttaaaaatacatttaaaactatgtctcaatataatacatttcatcaaattttctctccaaactaagatgattcaaattgaaagctaacgcaggaaagaaaaattgcagaacgatggattcctcggcaattgtgaagattattggtcccacaaaaaaaaaataaaagcaaaagtcgtcacagtgatcaagaggcgtgtggcggaatgcatggaattgccttctcaataccggtactaatttagtatgtgaaaattttggtcccttaaattcagggttctgatttttgccaatatttattacgcaaattgggcgcaagcaatgacagaagtgttcgcagatggaacatttccattgcactgcaaaacctgcacaagcgcctaatttccgaaggacttcaaaaggtaatttcctgttatcagaaaaagaaattgtctccttctcaaaaaaaaaattgtctcccgtttaacgctaccgaagtgaccccgttttcgtagaaacggctcgtatgatcaccgcgctcgcatttttgccaaatcagcatttaactgctgcaaactgcgctgaacgacatcgtggggcaaaactggaccacaatttgcttataaaataagttccttcagtgttccctacaatttggcgtttcatcgaagttcttcgaatggatcagcgtgcgcgcgacgccaattatgtgaaca

SEQ ID NO: 31836 - DNA, 1534 bp, Heterodera glycines
gtacccaattataaaatggagaaaagcattaatttacattattagcactcactttccaacgattccgactcattggtacgaagaaaaggcaaatgaacacaagcaaaacacggtgaagcaacgtgagcagaagactcgtgcaggtggggctcgaccagtgggatggagcaattgggaaaaagaaaggtcagaacggcgtaacgaacgcgacagtcaacccaaagaatggaccaaaaacgcttcggaatggcatcgagaaggccaacagagagacatcggacgaaaattataggataaattttaattattcattgaaatattaatgaagagcatcgtcttaaaaaaacaatagtttaataattaattagacattaatgggtaaaaatttattcatgaagtgcagttttagagatcaacactaaaaagaaaaacaatgcttacaacacatttgtagcgcagtgaaaaaaaaagctgatgagaagcaaatgggagacagagaaaaagagagaaattgagagactgggggaagggaggggcggggcaaatttcgaatcaaaagcggattgactttcttcaactcgaaacttcatcgttctcgtcctgtaacgctttctcactttcattgtacaatttccgacgttttaatcccaatgccggcttaaagtaattcaattttacaatattatatggaaaataattatgacaagcagggaattttagtgaaaagactcaatgtaccagattttttgcatgatttattaatttaaaaaacgcttacttggaattttcttgaaattctaaattttggtgaacatcggaaaaataaactcaaatcagcttgatttagtgcggaagtcctcacagtgttagagaaattaggtgtttttgttttaatccataatttttggcctatcctttttttaaatatgttcaaaaccaattgtgattgaccgttttgagtgtagtgtcaagcattggattatgctccttcagagaagtgttggcgtaatagcgcaggtaattccaataagaggcggacgcgcggtcgagagggggcaagccccctactgcgacctttttccaaaaattggttaatctctttgaccccggtaggggtcgttacggagattaagccgtaaagaacagatactacactttgatcttagccaaaaggccgagaagcgatgcctgaacaggcaaaatgggttccggaaacggatccggcaccatcgaaaacatatgggtagcattttaggcgaccaaaattgcacatttgggagcagagatattgaaaaaattggggaaatagcgtttaacgggagggacaaataggggaaagaaacaagacggacgagagagagtgcttcctgaagaggaaagcgtaggagagagtgtgtgccacagacatgggaagggagaaagtggggggggggcgaggcagcagcagcagttgaaggtcatgtcgtcgcacgccgacgaccacttctcttcctggagggtcattgactctcgctcgttctctctctctctctcc

SEQ ID NO: 31837 - DNA, 1479 bp, Heterodera glycines
  unsure (1)..(1479): unsure at all n locations
acgtatgggagatgctgctgnatacggtgncgagcgtagaaatggcagcaaatgtgatgtttgtacggttgtctgagtctgccatacgcctgggtcaaagccgctcccttgtccgatattccgtcgacaaaaaatgttttctgcatcccattccggtccttgtatgtcgtccgaaccttttttccgaccagctccttcaatgccttcactcggtcctcgggatgattgagcttgtcgcggagagttttgggggaacagccaagaatttgggcacaaaattcgatgacgaggacccattgaagcagaacgaatgaagcatggctgataaattgccgggtcttttatactcccggaaaattagaccacgcccacttttgaaagctatttaagccaagattttctcgcacaatcaaatcagtcttactaaacatcatcatcaaaaatggcagagcagtttgcacaacctgaaacccaggagcaccaagtgaaagaagctaaggaagcacgagttgatgaccgtttcctttggaaaatcacgcggggccaatttatgtttgcaattcgactaaaaggtgcaggaaataagcagcaaaatttaaagaaaaccattaatacttaatccaatttgctgaaagaaactttttagatttatgtattattgagtttctacaaaaattttctgttttatcaaaaatttgagagtgtgcattcaattctttgagaaaataagttaattaccctcaaaaaattgggaaatggagcaaaatctgtagagacactgtctaaatattctttaattaatacactaattgtccctcttattcaggacgccgagatcaaagagctcagacaggacctagcggaaaaggtgctggataaggacccatttgggtatcccaaaaattacaaacgaaggattcactattaggaaaagatgatcacacatcagcaaaaaaaaataaggcagtttgaaagcgatcttcgcgagcttcgacaaattgtaagtgtatttaaacatttttttaaattttaatatttaaattttctatgaggttaatggaatcgccgtttcccatgtttcaacaatgcccacttcatctgccgtcgccgaccaattcattgccaatgacctttacgaaaaaaaagggtggaagaatacgaaatcgaactggccgggctctctgatcagcgcaattggcagaaaagcgaggaggaacaaaatttagcgcaccatttgtgggatgccgtaagtttttctgaaggaattcatcatgtattttggggtgaaattcggcggggcatttacaagggatgggcgggattagactnaaaatttaattgggcataataaataacttgtaaaatataaaatatttgacacaggaaatggaaaatcaacggttggattatgaactttatggaaagcaaaagaaacgggattgccacatttgccttctccaccaacgactcatttcgaaa

SEQ ID NO: 31838 - DNA, 861 bp, Heterodera glycines
atatagctaggggttgtcagttaaccaaacaaaaaaaaggaattttaaaaaacttttttttcaaactccacaaaaaagtgtccattgataattccctgcttaaaattataagttatcaaatagaccacacctttcatattgatcgatttccagacatggccactgtgcattttgcttgtaatcagcaatcgttttgtactcctctgataaaacgttttgatgataaaatccagaagcgcgcttttttaattggcattgacttaaaaaatataagaaattatttgatattaaaacaaatataagaaattatttggtaataaacaaacataaaaaaatatttgatatttttaagaaaaccgaacaagaacacggtttcggttagtaattctgcatataggaagttgaaatgattccggtatgcgaaaacgaataacaccgataagtctcgaccagacatttagcgatatgatgttatcaaaaaaataatcaatatttgagcccaaatcatcagagcttggggtgatcgttttggcgccgacaatagagtcgtaatcacacatttcgagattctaggcgaaaaaaaacaaaaaaagcaaacaataaaatttaccagacaaaaaggaacataaatgaacacacagacccctgcccccaccagcccccagccccacgaacacctgcccgccagcagacccctgaccccaccagccaccagccccacgggcacctgcccgccagcagacccctaaccccaccagcccccagccccacgggcacctgcccgccagcagacccctaaccccaccagccaccagccccacgggcacctgcccgccagcagacccctaaccccaccagccc

SEQ ID NO: 31839 - DNA, 1561 bp, Heterodera glycines
tgcagcagctgcaggaccaggtggaccagctgaacaccgaacggggccaccttccagcggcgccttcgtgcattggctaaccaattggggcgcgattgatttggtcgcagaatgtgcgcgagtttttcatgtttttgcgcgtttgactgaacacaccacaaaaaatgctaacgaattaatttaagatcagattattccattccatattcatttttattgtttattttctttgttcggctcaatgattgatgtctcttgtgtctcgctgctgtccctgatcgatagggatgaaaaatatgggtataaattgcaaaatgtggccataaaatgcaaatattgagtgaaatgtcttgaaatccgtcaaattcagttaagaaatcgcgaaatggctgacatgaaattttcgatgtgatttaaaaaaacgccggattatgtttccatcttgcctagcagattcaaatcaagttaaaagttcggataaattccatgattttcatccctacttaataatatcctcgtcgtccattatttatctatccaattttctgcacatactataaaatgccaatgaaaattgtttgtgcgttttgtttttctattgttttttttccgattttcatcaacacaacatatccaaccacagacactgactgtcccttctgtgtccgacattctctcccgctttctctcgcaatttcactttttattattattattaatgaaaaattgaaaaataattcccctttttatttttgaacatttccttcctcccgcacacattctcttggcactcctctctttctgctcatttttaaattatatatatatatatatatttaaaactcaaaaaatgaaattgtgtatttttttggctatgacgtcatggaacaataaaatttaattattacacaatttaaattgaattaattatttttcaaatcctccgccaaactcctcccgacttccatcatcatcatcatctgttgtaacgatgagtttcgtctttatctctttctctcaaattctattttattcttgccttccgttccgaccaccgccgctggacccacaaaaacaaatcgccccgttcgtttccatcatcaatttttgtgtcccatcatttacccatcaatcatcatacattcctctttctcccccccccaattttacatatattatgctttccaccgtttgctgatcagaatcgaccaattttggctgactgatcggagaatgtgaccctcattcaccacccaattcccacaaattatgcattattattattacacacaccaccaattggcactttacgcttttaagaaaaatgtttatataaattaaggaaaagtgcttttcgatatgttttttcatttaatcaaatcaatttgagaggatttttctctttgttttttctttttgaattcgcataaacatattacgatctttcaaaatataaggaaattggggtccgaaacttcaccaagttattaaatttgtattttttgggatcattttgaccggatttttaaacacacagcaaccaattattattgtgcaagaa

SEQ ID NO: 31840 - DNA, 1088 bp, Heterodera glycines
  unsure (1)..(1088): unsure at all n locations
ccagggcctaggtttttaattctttttttttaaattttaaattatggatgcacccaaaatataatttttgccttggaaaacacattaagagcttttggaaccctaaatgtaaaaaaaccattttatagaaaccagaaaatttaaaaaaaatatatctacaggaacccaaaaatgcaaaaaatttactcaatcaaaacacgcaaatttcacttacaaaattgttactacctaaattttaggaattaacaaaacaactacacaaaaaaattttttttgttgatattattgttttttgaagatatttgtataatatttatccattatttgaaaaacaaataaataaacaatgtttttggcagaaagtaaattttgtttcaaataaaatattatataaatatataaagttcattatgaaattaaagaccaaggaaataaatacaaacaaaaagttttaaattttatttgttatactttaaaaacataaagaacaaatagattcaacaaaacaacaaaaatgaattaattgttgaactctggttaacgcagaaagttaaataaaataacagcaatgaaaagccaaaatatttataaaaaaaatagccaaaaattttcaaaaaaatacaaacttcggaacgtaaaaagcaacagaagaaaaaaggaccggaaaaagacaagccttataatctgaaaaaaagttcatatacaaaataataaatatatagttaaaagacattgaagaagtaaaatattgatttaatgcataaattaattttttattcgatgctttatcctagatagtatttaaaaccccaaaatgtaaaacaaaaaatcgataaattaatcataaatattctttaaaaattcggaataaggtaaagttgaatcaaaatccagctattaacgaaaaattggtaatttatataataaaatatcttgataataaatataaatttgaaccaaaataataataatttgttaagcatacatttctgtttaaagaaaatcaatttccttaataaattaaaaaataataatttaataaagcaagatttgnatatatanttaaaaataataatttaatcattttt

SEQ ID NO: 31841 - DNA, 2019 bp, Heterodera glycines
  unsure (1)..(2019): unsure at all n locations
gacagggagattatttttcgacagattatnttagtggaaaatttttgaaatttattttgaatatttcttcaaaaaacccccaaaaaaacnctcatntgaaaatgtagcctcatgaccctatcaaaaaatcancccaaatgaggctaaagcctcatnacctggggaccctgatttaaacgaatttcaatntagaataaattaatttttataaaaaaagaagttattttttcgaaaaaataaaaatttctatttatccccgggcagataaatagagacgggcagattaatggagacgggcatataattagagaaaatacgtaagtaagtaattgtgaataaaaatggaaaataaagcatgaagatgcaagattcaatttaaaaggttctaattggcaagggatgagcttcggtgctgaacacccattggtccaatgacaacatttgttggtcatcggagagcaacaagtacagatatttgagcgactgaaaattacagtgttttaccatatttatttttttaatggatacataaatagtaaattcaaatttttcaaaaaagagtaaaattcaaacactgttaaacccccacctcggctaggaaaaatgattccatcaggtcccggtgttgaacgggaattcgtttgacattttgcactgaagcatagccgtcaccatttgaccgcttggcgtaccgttcaatagcctgtcaatataataatatatgtaaattaatatcaaaaattcaatattatttttcaacaatttccattttttattggaaacagagtctatctagcatgctctcaacatatttataattgaataaattgtatgaaaataaatatttttttaatttactcattttacaatacctttctaatttattctgaattaatatatatttcgttaataattctcaaaattctcctccgtggtgaatatcggcaccgccgggccctaccacttcaattgaaaaaatggcaaaattagtaaaataaggtggagcaacaaaaaaaaaagtcgccgaagatatacacccctgttggccgtgtggattatagtcacctgaaatgcgtcccagccccagtcctggtactgcttgtcaccggtcagccgatacatgtaaaaccatgctaaaatgtctcaaaaaattgtttaaaaaattctgtgtcattctctccatcaagtgcgacccaccttcaaatgcctcgggacgaagcagagaatgtgcgtcaagcggctaaaaagcaccgaattaggaaactgtacaatacagtacatcaaattgtcatttggcaatgcaatagaattttttaattgcctatcctaaaaattcgataatttttgcaaatacaaaaaaacacccaaaaattttgtcaagtattttttggcctttttttttggaaattcagcaaattttgttttcagtaacatcattccaaacagatttttcttgaattttagatatttttcaatttttttccaccttaatgtacaggtcaggcactgttgttgctgctgctttacgcctctcaacattctccgcactcatcaactgttcatgctcaacaccagcaacattgaaccttattacaatacattagcaaagcaacatttggtttgttcgtaagttttaaatgttaaaaataggtttcataaataatttaaaaaattgtttttttttgagttcctataggaaagtgaccagcagaaaaaaaggggaccatcactttgtgaagttgggaaaaatcagtaaaaaaaagtaagaaatcaaaagtacagtagcaaatttaaaaaaaaatcaaagaataaaaagcagccaaactcttaaacttttttggaataatcaatggggaaacattcgaataaatcaaaaataacatgataaaacatgtgttgttaacccatctaacaatcagcactttttctgatcacttttggcgcataggcaaaacaaaaaaaaggcatccaaattcaattaacaaattggaaatagaaaatttcagtcccctttttttt

SEQ ID NO: 31842 - DNA, 1704 bp, Heterodera glycines
  unsure (1)..(1704): unsure at all n locations
ctaaaccccttgctttttaatcctggacgacctgatgctgagcgtaaacaacgatttttttgatttattgttcacccgaggctnccataattgggacgtaagtgtgattttgtaacgcaaagtcttctatggacgcaatattcgtacgncaagagccaatagccattttntggttntaactcggaatcctttctggcccaacttcagggtcagaacggtgggatctcaactcntttccgaagaggttaaattattttatggaagcatacaatgatgcaaccagcgaacccgttcagttatttggttataaatatgcatcctaatgcgcccgagtctgaacgtttaacaactaaaattttcccagatgaacagcgtgaggtgtacctaccaattgaatagagaaagggtataaaaggttgagaaaatctgtttttgtcactacaaatgtatgaattcagtccatatataagggaaaacgcagaattttttaaaaaaatcgcctctacgaaatccgaaaaaaagaaaaacattcttctgcgagacgccacagccgaacaaatattaggacttgttgaaatttgtgcaaacatattaaaattcaatttcagcctaaacagaagccagaggaaacggttggccgaatacgcggactattatcgtgcaattgcacgctcgcgtagcgaaaagactgcgagaaaaaggctacaacagggaagtggtattgcattaggggcaatattagtacctattcttggtgcactagctcaacacttggtcgaaaaaattacggcctgacaatagcgagtcaatgaaatatacaaaaaagatggttatggtgccagaaagcgagtatttggctctcattaatctactgaaagggagcagcggcgtatctcctcctctagccgatccgttacagggcgagaaaacgctgcttgatgtacagattcaaaggaatttggctgatccaaaaacgaacgcagaaataaaaatgaagcgtcactcatggttgtacaagcgtagacaccagctaaaagatattattgagaacaaacctcaaaaagtaattgttgagagtggctcagttacagcaccaaacgttgcgccgtatatgggcattcaaaaacaacaaacaccgtccaatgtgaacgcacaacaccgcaattcgacatcaattcaatcgtatggtggcgtaagtaagagcaacactgatgtagaagaggacacggacttttcaactgcctctgatcagtttgagcctgctgctgctgatgctgctactacatcgtcgaggaaaacgccacaccaaaagacgccagccatttcattaaggaccagtccgaaaaatttcccaaaattgatgggtattatcgggaaggatctcaaaaaattcggtgtcaatgctagcagcggagaaattttgactaatttcaataaacccgtttcaggctctcatttcaccgaatcgttaaagcatttgacaggtcagcgcgaagatgtgcccagaggccatcgcttcttcattcagcgcatctcaaaagacccggaaatgatgaaactgcttcaaaaaatacatcaaacgggggaaaggccgccggcggcacagcactgtgaagaaaatgggaaagaaaaaaatagtgtttgtcaatatgatgaattcatcgtctataaaaaccccagnattacacccgaacggaaccaaaa

SEQ ID NO: 31843 - DNA, 960 bp, Heterodera glycines
tctgacgaaatcacatgttaccctccttaatgttgatctacactagagatcaacattttgaaaaaaccgtagttgtacctgtttcaaaaaatggcctgtacctattttttctgtacataagtacaggaaaataaatgtacaggaaaaatccaggttgccgaaaaatggcctgtacctggatccaggaaaaatacagggctggatccaggtacatgttgatctctaatctacacccataaaacacagtcaaaatcgggaagtttgaaaaaaaattctagggggttgtgaattttttgaaaatttgaaaaacccattggaaggtaaaagtttttcacttttttttataaaatttttgatcaaatttttaccttttttaatttttggcttcgcgccaaaacgtgtgcgccaaaacgaccctggcgccaaaacgtgggcgccaaatcgtcggcgccaaaacgtgggcgccaaaacgacccagtcccttcgggggggggggggggggggaagaaatgctgatgtcgacattgtgttactgatttgggccatttgatgaaatgatcctaatgcaatctcacgcatttcttgcgcagtaaaggcctccgtaacattgtcacgattgaatacgtcaagaaagagtgtgcctgttgcaaaagcctaaaataacgcatgaaggccagcttcggccggtgggctgatcgaatgaaagaatgtttcggagacggcacattctcattggcacctccaatgttctaccaaataaattgtttccatttcttcattttgttaaatttattatatttaacgaaaaatttcattttttataatttttacaatttcttcctgcctttttttcatttttggcttggcgccaaaacttcggcgccaaaacgaccctggtgccaaaacgtcggcgccaaatcgacggagccaaaacgtcggcgccaaaacgacctggtccca

SEQ ID NO: 31844 - DNA, 1666 bp, Heterodera glycines
tttcaattaaaatagattaattctatagtaataataatccttttttttgaaaattaatagaagaaagtgctaaataaaattctcctgggaatgcgcagaaaattttcgcaacattaatcaatttggaacacatattcacacattcattcatttattcattattagtttcacgctgaaaatggtaaaaattttaattccttatttaaaaatttaatttaaaataatatttaaaagatatagaacatttttttccattaaaattattcaaaatgatctgattgaaatatcaatgattaaaaacaatctttttttaatgctttattattttaataaataaattttttaaacaataaaatttaaaaaaattaataatcattgattaaattcattttatattccaaataatttttaaaaattattttgaacaatatagaatttcaaaacgatttggttgaaaaattggtgctaggtcgaacctaaaaaagtatcaatgattataatatttgaatttaattattgtttaaatattatttgctggttaataaatcataacttagctcaaaattgataaaattaaacaatcttgagaaacaaccaatttaattttgtttatataattagatagccaaaagatttctctataaatcagttaaatttaaattttttttattgggtataaaaaaagttagggaccatataattgggtataaattttacgaaattttttgtcataagtttttataaatttttgccaaattttttaaaaatatataagataatggagggacatgtaaagctatcgctaactactaagattctttaattttatcaagtttgtgctaagatatgatttattatacagcaaataatatttaaataaaataattaaatttaaatattattatcattgatacttttttaggttcggctcagcatggaaaaattaatattcaacctaactacataaaatcaaaatgaattaaattactattcaaaaattaatcccaatttcaggtagccccacaacgtgaacaatcagttgacgacagcggtggaccatctgctgcagaaacagtgccattaatagagcatcaacttttgatgacggatcaggaccagctgaacaacaacattgttcaacaacaaaatctgtatcagcagcaccagcacaattttgtggcaccgtccatcttggtgtcgtcgtcgtccatggagaaaagtgcgtcggcacaggacttggccggcacggccgcagcgctgatacgacggcaccgcagtgcgagcaaagtttggacacaacaaataacggaatattaattaatttaaattaatatttctttattgaaaattaatcattttttttttgagccccggacgggttcgatggtattgaatctttttatctaaaactcaaaaaattctgaagtaaaaaattgaaaaatgcttgccaaatttggctaatattcgatccttttaattaaagaagcttttcaaaagcccgcaaaaaaatctgtttggcgcttagttgtcaaaaacaggctttttggcacccaattgcccgccgtcgtttcccttcaaatattaaattgtaagcaaagagtggaaagaggaaagactttgcggatttttagagatgtttttcagcaggatttgcatgataattctt

SEQ ID NO: 31845 - DNA, 835 bp, Heterodera glycines
acgaagtcctcatccggttaaaaaaaatcaatttaaaaacgaaataacgtaaaaaaatcagcaaatctccctcatccttcttaaacgttttttttcgaattttcgtacgaagtcgattaaattttaaaggattttgttaaattatttaaatttcttcgcttttacgaagtcacctctctcttatcccttcgtctccgacctttccccacattttttttcacattttatcccaacaaatacgaagtcagcccttttttcagttttatacgaacgaagtcaggggaggtcgaccccccccccccatttaatgtatgactttattcgtattcattccattgtcttttcaaagataatgtaactgatgcgactgcactccgacaaatggtctcaaattcgggaacaccaacttcagatttggtcgagtccatcgtacggtaaatttgtggggctctaagaaaactttatagaaacgcatgtatggaccaatcctagaacaaatcggtggtaattaatttagtctgactttataatataaatgggaatttaagcgaaggattcatgcaaaataataatctatagaaattctcaaaaaagtagttcctcgcagattcgggaaccgtttctataaagctagagacatatgcgctaaccataaaaaagatgaatcattttttgaaaaatttatatttcgactaaatttgctaatcgatttatggtgtacaggatgtttgtcgaaacataactcgtcaggcctttaagatagacctgccattgctattcctgcaaatatggagtctagtcagcccaatcgattgctattcgaatggtttggggt

SEQ ID NO: 31846 - DNA, 905 bp, Heterodera glycines
atataataagtgagaggaagctccgccccttttttggttgagttaaattggcgtttatttatggcgcttagttcttttaataaaaagaagagaaaaatcaaaaaaacgttagaaaaagaaagaggaaaagtcagacataattataaccaagaaattttttgcttcacaacaatgcatatttcaaaatattcatttctgtttttgtttttatgtatgagagagagagagagaggggggaggtgagaaaaggaggaagagaaagaggagaggtgagaaaaggatgaagagagagagagaagaatatgaggagagaataaagagaggaaagaagaaaggaagagagtgagatgagaagaaaaaaaggggagagatagataatgaggagagataagagaggaagcgagagagaaaaagagaaagagagagagtgatatgaggagaggagagaataatgcgaggatagaaaaaaagagagtgatatgagaagaaaggaaggagagagagagagatagtaaagagagaagatagaaaaggaggaagagagagagagtgtgatgagacagagagaaagaatgaaggggagaaagaatggaagagaaagtgaaaggaagtagagagaaagaaagggaagacagaagagtaaggtgggaaagagaaaagagagagtatgaggaaaaaaagtgcgtaagaagatgagagaggcagaggagagagagagagagagagagatggggagagagagagggggagaggggagagagagagaggagagagaggggatgagagagagggggagaaaaagaagcatgggaagagggagagaaaggacggaagagagaaaagaggtaggagagagaagcatgggaaaatagaggggggggatagagagtgagggggagagagag

SEQ ID NO: 31847 - DNA, 1109 bp, Heterodera glycines
gcctgaaaatttttaaaaagttcagtattttttcaatcgttttggaatcggaacgaaatttatttaatttgaaaaacgctagaaaaaaattttcaattttttttcttgaaattttcttagtatttttatacctggtcttggtcgttggccagcctgaacaggcactccaggaaaggatcaatgacggcactgatagactcgttttggaccagcaaaatgcagttgaccgtgctgacggagagggcacggagccgggcgagctgcgagttgaagaagggcaacacacgggcaaccacttggttgatctcctcgtgggacaaacggtcggccgaatcctcgcaaatcttttgcaatgcgccaagcgtaccctgaacaaacagaaataaatgataggcataccagaaaaattttttgaaaaattatgagtttttgtgccgacagtagcgataggtgtcgggaaaatttggaaattttggacaaattgtcaacagatttcaccgaatggattttcgggaaaattttggtcagagagctcttggagaaggtaaccaataaggaaaaccgtaaatttgataaaataaaaatattattatatttttgaaacttttgcacaatttcatatcatattttattaaaacaacttaaaaaaatttcactggtggcgcctaccggcacagccaaacctccatttcccatattttctagaaatttgactccaaaataacaaaatttgttattttttggcacaaaaccgttattaatttctgcattttcgctccggcgataaaatttttgaaaaataaactataaaaaatttttgacccgaagatgaaaaaaatttttcagagattctccttccgaatttttttcttgctatgggcctgaatttaaaagcaaacttttaaaaatgcactcgtccgttagtccaacctcaaagacattggcatcgtgttgctggttctggtccaggaattggcacagcgttggcaacaattcgggccattgttgggtgccgtcgtacagaaacatggtcgtgatgataatgccgaccgtggcacggaccaacgacgacgggtcgccaatggcgcggaacgcattccggcgtaggt

SEQ ID NO: 31848 - DNA, 1438 bp, Heterodera glycines
  unsure (1)..(1438): unsure at all n locations
tgtgggcaaaaggccacaaaaatttgcacttcccggcagaaggggggagtcttttaagcaaagcgaatttctgtccaaaagacagaaactcacagagtccaaagggacaaattaaagggggaaattcctctcctttactgaagggacatttggaaggagaaattcttctcctttcctttggtaagccttttctgacccaagggggtcaatggcttaatggtctgtattaaagggctcctgatgtcccttttacagacagggaaaagattaagactcttttcttaatctttattcaatttacacaattacaatttaatgcaaattgtttggacagaaaactgtccggctgacttaatcaaaaattgatcagtgaagaaaatggagaatgggccggacttttataccctcacaaatcaatgggggcggggccaggcacgtgaaaaatgtgcacaagcaaagggaaaaattccctcaaaaatgatgactcataataaaaatgaagagagaaaaagagatgagtcataaaaaagaggagcgagcgaatgggaaaattgatcgacgaaaaaggatcaaaaaataaaggaaatttcaaagaaatttgtgtcgcttcggcgacagttatgtaacaattatgaaatggaagaaagaattcggaatgagttggaaaataacggagaaagaaaaaatgaataaaatgaaaatgtattggcaaataaaaggagaaaatcaaaaaataagtgatgaaaacattgcaaaaatgttgaaaattagtggtaagaatattcgaagatggaagaagaaatttggagaaatttaggatgccgagaattttatgaatagggacaatatcgggcacgaaattttggtttcttttttcatgtttcatgcctttttgatttattatttttttgtaaaaggctcaatttttttcgtattttttgtgttttatttttcaaaatatccagaagccgatccttaggtgtgtattttttattttactgaatatttattgtgaaaatttcaaaaaaatagatgaaatatggattaaaaatccaaaaatttcggggccgggggacttttggcacaggatcgtacgcaaaagccaagtctgggcatttttcagtgcaataattttgcacaatttcaattttttcttcatccgaagtcaatttgtgaaattatattggcctaatttttgttcaatagtaaatatattggcaagtgatttgtgcccaattttttcactattttttttcaattttccccattcttgaacaataaagtggtgcttcattctgcaagatggaatatgaaaaccaaagattccaacatacatgtcccttacaaattagagttgtttatttcttttttttctatccttagctattagcaaatctgctttgttttcctcctnaatttattctattttggtgttgtt

SEQ ID NO: 31849 - DNA, 1521 bp, Heterodera glycines
  unsure (1)..(1521): unsure at all n locations
atcgcgcccgtttttaaatttttggggggacattcggccgcttcgcggcctcaggacgggcgcttcgcgccccgtttttaaaatttgtggtggatattcggccgcttcgcggcctcaggacgggcgcttcgcgctctttttaaattttgtgggggacattcggccgcttcgcggcctcaggacgggcgcttcgcgcccgtttttanaattttatgggggatattcggccgcttcgcggcctcaggacgggcgcttcgcgctctttttaaattttgtgggggacattcggccgcttcgcggcctcaggacgggcgcttcgcgctctttttaaattttatggtggatattcggccgcttcgcggcctcaggacgggcgcttcgcgattaaaaatcgaatgcattttagtttaaattttttttataataaaatactcgttttattaattaaaaacaacgttgaaaattaataattaatttaaaattttagcctcagaatccccaatcacacagggattctaaggctttaacgatgtattaactgaaatctgatttcagattcgtgatcagcgtcataaataacccctaaaaaactaatattaaataactaaggaaaattttttaattaaagattaaaaatcacatgcattttaattttaattttttataattaaatactcgttttattaattaaaaacaacgtcgaaaattaataattgaatatttgtttaatttgaaatgaaattaatttttttgcaaattcaaaaaataaataatgaaaatttttaattaaaaaaaattaatttaaataatttacaacaaaactattttaatttattaaatgcagtgaaaattacccaaaaaatgaacagaaaaataatgtacaccgaccggatccgaacttgccccccgccccctcaaaatgatgcctcagaatccccaatcacacagggattctgaggtcttaacgatgtcaaaagtaaaatctgattgcgtattcgtgatcagcggcccaaataacccataaagacatatttttggatgatttttgattttcaattaataaaaatatgtaaaaacagcaaaaaatacaaagaaaataatttacacagtccggactcgaacttgccccccgccccctcaaaatgatgcctcagaatccccaatcacacagggattctgaggtcttaacgatgtcagaagtgaaatctgattacgcattcgtgatcagcggcccaaataacccataaagacatgtttttggaagatttttgtgagaaaaatttttcaactcaaaaatcctgtccaccccctttggtcccgaaccccaaaatcacttttatttttgtatctttttttaaaaatatgataaaaaggtcaaataaaatttatctaatagagcaaaaaattgcggatttttgtagtattttactcttctctaatgacttttcagaaccgagttatgaatttttttctgaaaaatcgaaaatttccagaatttctggaataactttttttgttttt

SEQ ID NO: 31850 - DNA, 1503 bp, Heterodera glycines
cccgggactcccgttaaaaatggacgggattttccttttagcgggatttttacgggattcccgttcgggactcccgtctcggaaaattttaactcccgatcccgctcccgctcccggaaatttttttttaccggactctaaaaaagatgtttttttttggtcgccaagcccatctttaggtttattttcatccccgtccccggcggggattcagtgcggaggataggaaaatggggaaggggatgaaaatccttgggatccgcccgtccccgcttcccctgactgcaaccctttcaaaaacaacattttggcgtcttggaagctgtccgggacggagttgactcatacagttgcagggagttgggggcgggaaacaatcacttagcaattagtacagccaaatccaaaccaaaacggtcattcactgatcactgatcattcttttccatttatctttggcttttctcacttcagtggaagaccatttccgcaagtcattgggcgaggatcgctttctgcaaataaaaaatgaacagcaaaggaaggagagggaagagcaaagcgaagacggagggacaataagccgattgtgaagggaacggaagaagaagcgggggggggggacaacggacgaaaagcaaaccgaaggggaaagcgacgaaaagcaaaccgaaggggaaagcgacgaaaagcaaaccgaagggaaaagcgacgaaaagcaaaccgaaggggaaagcgacgaaaagcaaaccgaagggaaaagcgacgaaaagcaaaccgaaggggaaagcgacgaaaagcaaaccgaaggggaaagcgacgaaaagcaaaccgaaggggaaagcgacgaaaagcaaaccgaagggaaaagcgacgaaaagcaaaccgaaggggaaagcgacgaaaagcaaaccgaaggggaaagcgacgaaaagcaaaccgaagggaaaagcgacgaaaagcaaaccgaaggggaaagcgacgaaaagcaaaccgaaggggaaagcgacgaaaagcaaaccgaagggaaaagcgacgaaaagcaaaccgaagggaaaagcgacgaaaagcaaaccgaaggggaaagcgacgaaaagcaaaccgaaggggaaagcgacgaaaagcaaaccgaaggggaaagcgacgaaaagcaaaccgaaggggaaagcgacgaaaagcaaaccgaaggggaaagcgacgaaaagcaaaccgaaggggaaagcgacgaaaagcaaaccgaagggaaaagcgacgaaaagcaaaccgaaggggaaagcgacgaaaagcaaaccgaagggaaaagcgacgaaaagcaaaccgaaggggaaagcgacgaaaagcaaaccgaaggggaaagcgacgaaaagcaaaccgaagggaaaagcgacgaaaagcaaaccgaaggggaaagcgacgaaaagcaaaccgaaggggaaagcgacgaaaagcaaaccgaaggggaaagcgacgaaaagcaaaccgaagggaaaagcgtaagggaag

SEQ ID NO: 31851 - DNA, 1694 bp, Heterodera glycines
cgtaatactatttcgccatttttgagttcttagagatccccctctttgttagcttaattccacgcagagtaagacggtagaacaattcatttaggatgaaaagttgggccgaaattttaaatatcgctcaataacccaaaatggcacgataaaaatatttgtgaagtataaaatttttcattaatccttcttcgatagcaaaacacacgaataagtttgattaaacaaaataaatttatgtaaatatttaaaaaatttctcaaaatagtgacaatttttaaaatcaaaaattttataaatttgataattttcgagaaaatgttatttctgcttagaattttataaaaagaggagaggatttttacaaaaaaatgataaaatcataatcaacaataatgaaaaatacatcatttgatcatttttgcttactttttgcaataaaaataaaatttttaagcgaatttatgaactgataagaaaattaacttatattcaaacttcatgaattttacagccctggcaatcaatcagagattggggtgggaggcatttgttatcaaaggaagacaaaaaaaagggagaaatagtacacaaactagtgcattatttatcgacaaagaaacgagcgcagcggagaaatagtgcatggatagtgcgccccgctgccatccatccctcgccccttttgaaccccacctaaaaatacaaataacatatcccatcttttataataaatttgtgtgcttatttgccctgcggttgctcgccggcgccgtttcgcgccccccgccctctgtctcgtatctcctcagggagaacggatattttggcttgacaatggcttagaccgcatgcgcagtcgtttgaagacgccatgcggcgcttgcattcggttggagtcggcttgagcgaaatcgccaacttttttttttatttttcaaatttgctgtaaatccttttttttgtactttttaaaatgtacatgaccaccttcatatacattttaaaaacgacataataaaaaaggctttcgagaattttctgggtcaccgactctgcatatgacatccatttcgacgaattattgtgagccccggcccagaacttgatcgttaagtcaaaccttcaaattttataactcaagcattactttaaaaattcgactggtttgttcgaactcgggtccggattttcgaaatttgtcgaaatgaatgtcatattcgtaatcagtgagtgaccccgaaacccttaaaaattttttaaacagaaatatataatttattcatatttattggcattaaaaaatgcatataaattggtcatgtaaactagaaaagtacaccttttttttgaattggcaaccggtggaaggaggacactaactcgtacgaaactgaggaatcataaatttgatggcggatgcaaaatcctgggactgttcctgatctctggacgacaacatctctcataatttaaaaaaaatcgaatcaatgtcccaaaagttggcgaatttcgtgataaattgcgtcaacaaattttattaaagttcagatttttacgccggtgccgacaggcactgccttccccatctacataggactattgcgaaataccgactgattttcggcaaattttttcgcttttcttaatcattacatcgcttctgatcagatattatttgagtcaaaaaatga

SEQ ID NO: 31852 - DNA, 1454 bp, Heterodera glycines
  unsure (1)..(1454): unsure at all n locations
ttgaaatggaatcattggatgatttaaattttaaaaatgaaaaatgtgatgccaatcattcactcttcactttccaactcgttggacagcccaatcgggattggcacagcgggcaccggttgttctgcttcacccacnagagacatacaaccctgtaaggggggggggggagtttcgtcaaatttttgaaaaatgaaaaaacacattttgaaaaaataaccccaccccccatttgttgtaatgacaaaaaaaaaatagaaatttttttaccgatttcttggaaaatttttcaaaaaaaaaaaaacagtaattcatcataattcggggtctattgaccacgaaactgccatccatttcgaccaataaccaaattcctaacccgacaaaaattcgaaaactcaaatttacgaagttcaattgcccaaatcgggattcaaacaggtggaaatggatgtcagattcgtgttctattcagagcgacccccgaaagcctccgggaatataaataacccaatgtgagacacatacaaaggtggaaacagtggttgcactcgccccaaatgaccacacattcttgcgcctttgaatcggcctgacaacggaggcatgcctctgaaaaatttggaaatctattggacaatcaactaaaaattctactttttattcttatccaaattaaaaatattcccggcacgggaaaattttgagcgatgaattcatgttttccagtctgtcaactttggggaaaaaattggtttctcctgaatcagactcgggtgtttttcggtaaccttgatttttgtcaatgaaatccaggccaacatggaagcccagtcttttttcataatgttgagctttaattacatatggtccaaatagttagtccatccttttacttaattaatataacaattaggtaacaatgacccattaaatggacacgacaaatggcgcacgtgtcacactccacgtcccaactccatgtagacaccaaattccatcgcttaattgcaaatggtcgttgttgctgttgctgtgtttcctctgtttctttgaagaaaaatgaaatttattaaaaaaaaatcaaaaatttaaaggcatggctcaccagcgttttcagtttccatgaaaaaagagagaggggaattgttcgggtatcgtacaaaaaaaaatctgtaaaaaaggaccagaaggtcgacaattttgattagaaaatagactaaaaacattggcaaagacttaatttacaatcggcggaaaggaatcancaaagaagtaattaactgatttgtcaaagctnaaaatagatcaacaaatttatttatttatttgtcacaaagaaaaataatccacgaaagggaaaaatccacttactttcgggacatatgaaaacataaaatagtgcacaagcaaatggataaataaataataaaaaatcatcgtcaaaggaaaca

SEQ ID NO: 31853 - DNA, 2408 bp, Heterodera glycines
atcaggatttggtcgaaccatttcaatttgatgtttgattaatattaatttactatccaatatcttttgacattgaagtaaggaaatgttatgtccattttgatcggattttaattgaattattttgtatttatttatattagaaagtattttagttttttatattaattgattaacagattttttatatgcatagcgagtttgcctggagctttccccaatacatttgctatttagtttttcaattaaatagatattattattattagactattattataaaataaccatttgctctcgagtccatgggccaatactcaatgcttactcatccatgttgtaaggcgtgatgagaccatttgcgccgcgcccatttgcgccgcacagcaaaagtggacacttgcgccgctcagcaaagtcgacacttgcgcctctccatttgcgccgcaacatttgcgccttccagcaaaaatggacttttgcgccgcgctgtcaaaaatattatattcataaaaattccactattatcaataagttttactaaaactataagccatcgacaaaaataactaattgaaaattcgaaaaaattactagtcataaagattgacattcaattttttaaccattaaaatcttaacattgaataggttcatcaaagatatgaaaaaatgattaagaatacaaactaacaaaaaactgaaaaaaagaattttctgtagaaaccccattatttttttgcttcgaaaaaagaatgaaattcaattcctttgtaattaattttctcaataagttattttcatcgattttaatttaatttcattgaaaaaacgcactgattttcaattttcgctcctattttaccatttttcgcattatttcgcaatttttatgcccttatttatttacctatttttttcgcttaaaatccgccgcttaatgatcaggcaatacgaaggcttgttatcgcatatggtcccaatgaaaaccaaaatgatcaagatttgatcaatcattacgtgcacttcaatatggaattgacatgaaaggcttcgaaaaaggaattaataatgaatatctatcaattcttattctataaagcacataaatttattttaatcagagcgcaaatgtcttttttcgctgtacggcgcaaatgtcgcggcgcaaatgtcgtttttgttaggcggcgcaagtgtcgcggcgcaaatggcacggcgcaaatgtccgcggcgcaagagtcttttttgctgagcggcgcaagtgtcgcggcgcaaatggcgcggcgcaaatgtctgcggcgcaaaagtcggctaaccatttagacctcattttgtgtggccaccgcagcccaagaagcaatcgcaactgaggcaaaagcgccgctcactttcaccgcgggggttttagtgactgtttgcgcttcgatgcttatcagtttctttgagatcatgtgagcgataattatcatttgtgatttatcggattcacattaaggctttctctcttctgatcactcacaatttgaaacttttcatgcgcgggctccaaataccggcgaatttgcacaatctcagcgaacgctatcaggtaaatcccattcattcattcattattcgtcattcgtttaaattcctccaatttcatttttataattttattttatttaaattaaatttagttggccgaaaatattcgaacggggcgccaactcgcgccgacttttctgttccatttcattaacatttgcgggtccgtcttcaccccatttgtcgtctattttcatctgatcaccgacccaattttgctgaatttaattgtgttcacttattactccgtcctttctctcagcaacgctttgattgaattgactttaatgaggtcattaaaagtgataatagaataaaactcattatttaaatgcattttaattaattaatttttagacgtcatcaaattttgaagaaaaatgcattgaaaattttggcaaaatttcttccaaatcgctgcttctccaataatcgcatcactgacagtggcaaaagtcagaaaatggtccaaagaattgacgggcaaaagcggtgggaaaagccacagcaaaaaagagacaataaaagcaatgaaatgacggaaatgcactttaaaaagttgaaggaacagtggcaaaagtgaaaaggaaatttgtgaaaaatggaaatgataaaagaaaaggaaaggtgaaaatgaagtggacaaaatgaaattgatcattctgataatcgtttgaccattttattattgacttttggcgaataaaactaaaactaaaaaaagtcagaaacaatttcaatccttaattaagttatttaaaattattgaaaagtgaataaatggtttatgtggtaaattatttaaaataaatatttaag

SEQ ID NO: 31854 - DNA, 1468 bp, Heterodera glycines
taattcgctttcatcgttcagaaatcattgccaccggcaaagagtcggccgttttgcacgcccttttggacaccgacggggacagcagcaggaagaaagtcgttgggagtggcatggcaacaaaaagtgggactgttcaagaagttgaggaggagcaggatgaaggaagacaacaaattgttggcctatccgccgatgaaacggcggaacatttggcaccaccggcggagcggcaaaaaatgccaaccgccgcggcacggcaaacgcattttgcggtcaaagtgtaccgggcgacgttggccggctttcgcaaccgagcggagtatgtgaaggatgacttccgcttcaaaaacccacgccgtgtgatgaaaatttgggcggaaaaggagtttttgaacctcaaaaggtatgaaaaaaaactcgggaaaaattttttgggatttcttttgcatctgaaattctctaataatttaaaattttgcaaaactattcaaagtttttggattttctgtatttctctacccttattagccacattttccttggagcaggtcattttctcccccaccaatttccaaaaaagtattccaaaaaatcgctttttcgtggaaatttttttaaattttcggtgaagtgcaccccattttcatttcgtttactgtgccactgaaactcagactgaaaaatgccaacattatgtgcccgacgccaatcaaattgcgcaaacacgtgctgctgatgtcgatggttggcgaaacgtacccggcgccgaaattgaaggaattggaatgggtcgacgacgcaatgcgacgggacgcgtttgaaagagtcagacgagtaagtttaaaaggttcgaaaatataaatattttatgattacaaattgaattgagcgggactggtccggcaatttccggtttcccaggtcccggaagaaaaaaaaaatttttgacgcctctcccccgttttgttttttgttacaaaatggcgttttatttgtatggacatctttcccatttgcgcagatggtcgtcacgatgtacaaacagtgtcagttggtgcacggcgacctcagcgagttcaacctgctctaccacctggacactgtctatgtgattgacctcgcccaagccatggacatttcgcatccgtcctcgctgcgcttcctccaccgggacatcagtcagttcggtgatgggcaccaacggcggaattttgttagaaattttgtccaaaacccaaatttgaaaccaatggcattctcttgattcgtgaaaacatatttatatgggttttcagggtcactgatcacctgacattcagcccgggattcgaaattgggtcaaaataaatgtcaaatttgtgattcgagactctgaaaatcccttcctctccctcataaacatgtttttttcgggatttttttaaacaaaaaaaatcttcctcaagatggaggggggggagggggg

SEQ ID NO: 31855 - DNA, 1143 bp, Heterodera glycines
aataagcagtgtgtacaaatattatctaggtatttcaagtgcaacaaatagccgagtgcaaactaataaaatggagcttcaagaagttcttttaaattcccggaaaccggaactttaatgcagtttcttccgtctttagatttataagagcccacgggacaagcgcagatttttcctttgttcatgttaagacactgttgaccttgaaaaacgatgaattgtccaaagtgaaaaaaagaacaaaaaaataacctttggggcattcttcgtagagacattcgtctaaatccacgcattggagaacatcaaaacgataaatctgaaaaaggtttctaacaataaatctgtcccttcccaaatggacctttgaattgtcaatgctcccatcggcagaggcacaagcgcagctcaaattccagcggttctgctgaaatttgagaagacaatgcgaggacagtagctttcgattaccataatcgcaaacaaatcatcgttaaaaggactttccaaatctaaaaatgcatgtttttcgcggaaagggaacttcggataaaagcattgctggggtcggttggtgcttcgcttcccccccccccccactcacagcagtagtgcgtgttgacaacgctgtttcctgcttcggtggcgttgtgccgttcctcttcgtcttcctccaagtcctccgcctcttccgtcgtcgatggcatacgttccgtcgtcccctccccgtcgccttccgccgcccccttaggcaattcctctttcggtgttttctttttgaagtgccgcgctgccattttctcgttgagattttttacattctgaaagttcaaaatacagcgtcaaatctcaaaaaaaagaccatggcacaagcggagtgggcgcaaaagccaaaagagccttggttttttgctgacttagaattgtcaccgcctcggaaaaaacgaagacttttccgaccacaacatggatcaggacagaagctgtggggaagggactaattttgtttagtaaatatgagtagggcacccaattatatgcacataaaatcgtaaaatatgcaccaaaaaagtgaaaaatatgcacataaatttttccaaattgagggtataatttctcaaattttcttcaaattcgctaaat

SEQ ID NO: 31856 - DNA, 1289 bp, Heterodera glycines
  unsure (1)..(1289): unsure at all n locations
cgggagtctcgtnacaaagccttcattttctggcatccatttgaccnaattccgaaccccttgaccccataatcaagcaaaaaactcaaaaactttttgactatatcgaattcggtcaggggctcagaattaattgaaatggatgccggattatgatcagcaacccgaatacccacttttggatgtgtgttttcgtgatggggtgcgtgagttgaaaaaatgcaccaaaaccgatttgattcgaatcgactcatgtgttcattcatcggtctttgtcttttttggttctgttttttgcgattcattgctctacgcgttaactaatgagaatggaatttggggtctccagaaaaaaaatttaatccatttttccttccaactattcattatgattaattatgaaaacggttttcccttcaattcaagggccacaaatcgggcacggaagacagcatcagtggcacggacactccgactgcctcttcgggcaacggggcggaacagaacgacaacagccgagcggccagacggccagcggaactgcagcagcaccagcacgtggctttggccggcgggcacagggcgaatctgcggctggcccgctcccgccactcccaggcctccctggtgagtgaggacgaattagtgttcgtccctgccgccggggggggcggggggtggcggtggagcctccagcagcagcagcagttccagcgctgagaagaagaagaagaagaagaaggcggggaagaagaagaagaagaaaaagcgggggaagaagaagaagaagaaggcggggaagaagaagaagtgatcattttatgaaggaaatgaaacgattgttgatggaatgctttatcttttgttttggctatttattgtttgtttttggatggattttcagttgaattttttaaaaattttatcagaaaaaaaaattttcgggggggggggaatctgaaggcctttttttttgctcttctgccaaaaaaatttttctattaaaattcgggagcaaaaaaaaaagtgtcataattattcctaaatttttgaaaattatggtaaatgtcaaatgatagtgcagcaactgcaggtacttccgtgttttgctacccccccctcccctcgaaaaattttaaaaattcataaaagggaggaaactcaaaaattttttggtggacaattgggtcagttaatgcgctaatggacaaattggtgttatagcattatggtagtcagcggttaggcatacggtaagggtgcttatggcgcgcctaaaaagcctgata

SEQ ID NO: 31857 - DNA, 1558 bp, Heterodera glycines
  unsure (1)..(1558): unsure at all n locations
cattttttatacatatnttatttacatatttcgcgatttttcttacataaaaaaggaagtcctattaataatataggcaatactcccttttcaatatataatatttttcttttcttgttctctttttcacccttgctcattcattgtttgtctgtcacacttttttgtcccaaatttttacgttttgtcgcctttttgcttgttatttgggaaagccaacgtggaatgaaaggtgtcattatgtgaaggggacaaatgagtgacattcaaaattaattattgcctccaattattttattgttttatttaaatacagtttactaaattatttaactcataattaataattattaatcaatataatttaaggatcggattggttttgcatttttttttcctcatatacaatgaagaaaagagctaaaaaatcaaaatgaaattatttgaattgtcaaactaattagatttataaaattaattttctataataaattttttaaaaatgcgattacattgtaaagagttttgaaaagtttctaatttttatgccaattttgaatattttttatatgtatgtctttgttgcctttttattgcgtttgaaaagttacatatttcagcagttttcatacatgttttgtttctttgcggttttagcccatattttagagggttttgaccaaattaaatgtccaattttgcgtctttaatcccatacaaattcgaaccctattaaaaagaaatgattattaaagctttttgataaaatagatttgctatgacgtagcttgcttactgcaactttttgtcaatcgatagggaagtaatgtctttaatgaaaaaatcgaaattgcaaataagcgaataaaaaaataataattttaaacattcatattttataaatttttgttgaattcacttacaagctttaagttacattcaaaaaatgctcaaaatatccctattttcaggttccattatgtttttcactgctccaaaaacgctatttttttctcaaatatttaataaccaacataaaacgcacataagcgccatttcttcctctcattattaaatgataatttaaaagttattccacttttggttaattagagctaggtcaagcatgcttctaatcatcagtcattaaaattctaccatctttttgacctctgaaaaagtggtcgtaatttttgaacattgttctacatagcatgttcttgcctatatattttaaagaatagtttttttcatggcaaccaatgcatcgatcaatagcaattagaaaatttttacaattatttcatgcttaattggatggaagcgttatgatttttatttgctcatatgctatgaagaaaggagcccgataaataacatttatgtatgaaaatttttggcttatgaatacgtttcttgtcaatcatataaatccaacttttgngaaatttggaaatcatttttaatgtgaattttatttgtccacatttaataggctcaacttacgtgctcggaaaatgcgtcagtattcagtacttttgaaagcgggatagtatga

SEQ ID NO: 31858 - DNA, 1159 bp, Heterodera glycines
  unsure (1)..(1159): unsure at all n locations
gtcctatattacaatattaatgccatacaactttataagtccccccctgggtgangnattttgtantgggnattttgnagtcttaattttaagtggaagattttagggttagggatatagtaaatgggttacaaggatatgtttaaaaattgggacaaaattttaataaatatttttttgagaaaaattgggtaaatcagtgccgtttcggcgccgccattttggcgccagacccataataataaaaaaaaaggtgagaaaggaattttctagtgctcgttttcgagtatctgggtcctcaaatcgagtcgaggcaatttcactccctcccctcaccaaatgaaaaattaaaaaaaaaagtgtctttaaaaaatcataaaatttgaaaaaaacccccaatagcgcacaatggcaaatttctaaacaattaaattccttaaatttcatggaattgcgagccaaaaattccttaaaagtcatcaattttctgcaaataatacgattttttttaccaactatgccaataatttttagaaaattaaaaaagaaaaaaatttttgggggtttgattttattaattgttcaatttcttataatcagggctcgcagatctgaggctttagcctcattttgtggttttttgataggtcaatgaggctaaattttcaaactgaggctttttgtggttttttgagaaaaaccgcaaaataaagaatttttttaatgaaaatagggtcaaaattcttaatttttcccccggtggcgcctgtcggcaccgccggaccataaaaatttgctcaaaatcacaaaatttggtcatttttgtggacaaatctgttaacaaatcgcattaaaaattacaaaatttttcccggcgttgcctatcggtgccgccggacccccttgttccccaaaagtttttggaaaaagcggtgaaaaaaaaaatcaatttcgatttttcatactcagattttcacaaaatgcttatttcaaataaaaaattgctcaaattgatcatggacagtcaaaaatacaacatttgaacattttaaacgtgttttgaataaatttgtaaaaatgaggctttttgacccaaaatgaggcttttttgcttgccgaatgagacttttgaaaattttcatctgcgagccctgcttat

SEQ ID NO: 31859 - DNA, 914 bp, Heterodera glycines
gaattgggcaaatattttattagtataatgtataaaagtaaaagaaaatgattagaaataaaaaaataaaaaatgtgcaacccaaaattatcaagataaattaattttaaaaatattcaccaagagcaataaagttaatttgaattttatttattttagaataattaacttaaaaataagttattaaaaataatttacgcaatggcaaccttagataataattataataaaataattatatttaaataccgctgatcacgaatttgacatcatttttccctattccgaaccatgaatcaaaacaattttaaaaagcttttacaggcaagtggatttgaacgcatggcaaagaaaaaaataaaacttttttaattaaaatcattagaaaattgtttgctattttcgagaagatcttataaaaaacgccattttttgttgggtttttatttgaaaaaatagggtggtaaaataaccccctacctaaatcagacaccccccccccctaaaataaagttccccttttgtgaggggttgaaaatagagccctccggggctcaagcatttgttaggaaatatattatttatttattcaattataatataaattaatctatcaaaaaacaataactagttaattattaaaaagaatttattaagggaatttgaaatcttcccggtcgctgagtttaggtgagttggcgaaacgtccgactttgggtcagttggtgagatgtcagttggtgaaaagtcagttggcgaaatgttaacacaccggttaattgtcaatttaaatgtcatgtcacaaatatatttttaattattttattttctcgaagttaaataaatatataaatgatttcaatagtttgaaatccttcaacttggtcaacttcagaaattttgctattgagttt

SEQ ID NO: 31860 - DNA, 2496 bp, Heterodera glycines
aatttttgggaaaattttgaaagtaattattaagtcgccctttcaaaggtaaatttccgttttggctgaaagtatgcaaattccaagattttgataaatctattataatggaaatttcgttcgatgggaaaaatgaaaattaaagattaaatttagcataaatattaaattatgataatattaaataaaaatttaaaaattaattaaaaaagagaaaaacttaaacaactctaaaaaattaagaaattataaattaaaaatattaaattaaaaaagaaattaaatttaaattcttatgaattaaactattttaaaatgataaatgatagagataatttcaattaaaacctaataaaaagaatatataaataaattattaatttgcccattttattacaaaattaatgaaataaattcattttagtaatttgtggcatttgtttttatattgccaacctattgaataactggtgtttaaataagaaaatttcagggaattaattggtattttatcccaaatttaaaacctgaaaatgatggcattgtgctatttttatgaaataatgagttgcgtttaccgttaattaacacataaaggcatcattggtttcatgtttgaaaatcaaagtttatactaattggaacattcatcattttaaaataattggctatccttttttgactttaaaattccaaaaatttaatactaatactaatgggcataggcttttttgctctaatgaactcattaaaaactaattatcttcactagttaaccctttttagcatttacattacgccaaatgaaaagtatgtctcaatttttttaaaattcgattggaaacttgtaattgaaattaaattaccaaattttgcgattttgtgccatttttttaagaaaaataggagttttgggggcgcggcggtgccgataggcgccgccgggggaaaaattggaaattttgatcatttataaacaggttttcactgaaaattagccaatttataggtaaaattttgaaaaattttaggggaatttaatccaattcttaggggtgtaaaagtcgtgtttcgcgccaaaatgcgaaacgcgaaagcgaaagtgccaaaaaagcgaaatatgcgaatgcgaaacgcgaatgcgaaacgcgaaagcgaaagcttatccctgataagtacctaatttatagaataaaacattgggcattttgttatgctgagggtggggatgtaagaatttattttaaattgagccgccgctggagtgaatttgttttgccggaggcgtttttgataatcaaaaaataataattgggctgaaaaattgaggcgagtggggttagtggtgtaaatcaattacatctaaatttattcgaaaagaattggaaaaaatatatatttttaatttatgtctcgaaaataaattaggtcaaaaaaaattaccagaaaacttttaaaaattcagaaatttcttagtccacgaatttttggagcctcatgaaccgaaatttgtaattttgaagttttttaaatatttacatagaaaaaacagcaatttaataaatttcacccccccccccaacatttgaaactttttcgcccctattttgcgaatattattgtctcaaaagcaacataatgccattcatttatcgtctgtttccggtcctatggccaaattgaaaaagaaaaaaatggcgtaatgtttctcttttatcaagctcaattaagaaaaaaaaatcataaatgacatcatcaaaaaacaatagtttttcgggatgtttgccttaacctatgacacaattggcacattaattgctccacaaatctgttttttgtgtcatggaaaaatggtaaaatttatttggaattaaaaacaaactgaaaaaagcgtaaattttagaaaacgattggcattttttttttcatttttactatataaatttatttgagaaactattttttacaaaaatgggtaaattaagcctataaaataataaattttaaaaaatagtgataaatctttgacaattcctaaatgatttcttgttgacatgatcaggaaaatttgagttaattgaatttttttaatatttaaaattggtattcctaaatttaaaaaattccttaattatgggtttggaagcaggaaatattttaatttttagcatagaatttaggtcgacatttaatttaacacaaattattattaattctaactctaattatcattaatacctaattaaaataaagtaatttcaaaaaaataaaaatggtaaattcagaaagtcaaaaggtattaaatctgtaataatacaaaacattagcatctatctttctgtatttatagcctagcggctaaagaggtaattcattagtttttaattaaccctccgcggtcatttttataaaataacaaaaaattattaataaaataatcatacgaggcaataaaggggacacaaacagcaaggaaaagcgtaatatcgcaatgta

SEQ ID NO: 31861 - DNA, 1425 bp, Heterodera glycines
  unsure (1)..(1425): unsure at all n locations
tgattataagaggtacancagtgattagaagaggtacaatggtgattagaagaggtacaaaagtgatataaagaggtacaacagtgattagaagaggtacaatggtgattagaagaggtacaaaagtgattataagaggtacaacagtgataaaagaagtataaaagtgattagaagaggtaaaaaagtgattagaagaggtacaatgtgatttagaagaggtacaaaagtgattagaagaggtacaatggtgattagaagaggtacaaaagtgattataagaggtacaacagtgattagaagaggtacaatggtgattagaagaggtacaaaagtgattataagaggtacaactgtgattagaagtggtacaacattgttaggagaggtacaatattgtttaaaattaaataaataaggaaacgtttttattaaaagttaaaaatcgagtgcattttaatctaaaaattttttaataataaaatactcttttattaattaaaaacaaccttggaaattattaattgaatatttatttaatttgaaattaaatgaatttttttttacaaattcaaaaataaataatgaaattctttaatttaaaaaaaataaatttaaataatttaaaagaaatcttcaaaaattaattaaaaacattgtaaaataagccaaaaatacaaagaaaaataatgttacaccgtccggattcgaacctgctgccccccccctcagaacatgtcccagaatccccaatcacacagggattctgagggcttaacgatgtcaaacgtaaaatctgatcacgtattcgtgatcagcggcccaaataacccctaaagacatgtttttggaagatttttggtgaaaaaaatttttcaatcaaaaatcctgtcacccccctttggtcccgaatcctaaaatcacttttatttttgtatctttttttaaaaatgtgataaaaatgtaaaataaaatttatattatagagaaaaaaattgcggatttttgtagtattttacttttctcaaatatcttttcagaaggcagttacgaatttttttctgaaaaatctaaaatttccagaatttctggaataacttttttcatattgatgttagaaaacctaaataaatcccataaaattctcctgatttttctctatttttaaagctttatttgctcaaaattggtcaacccttaggctagatatgaattttcaaatattaagccaaaatcccgagggccaaaaaactgccaaaaaataaagaatttttaaaatattccaaaaaatctgaaacttaaaataaacatcatatttgtgctcaggaccctaatttaccccagaaaaatatttttcaccctctttttcacccaaaaaaatttttgaaatttctagggggcctagctcgaaatttttgaaaattt

SEQ ID NO: 31862 - DNA, 1487 bp, Heterodera glycines
  unsure (1)..(1487): unsure at all n locations
aaaaaataaaaaaaaaaaaaaaaaaaaaaaaatattttttttttttttttttttttttttttttttgggggggggggggggggggggggcgcccccccccccccccccccccccccccgggggaagaaaaaaaaaaaaaaaaaaaaaaaaaaaaaaaaaaattttttttttttttttgcccccccccccccccccccccccccaaaaaaaaaaaataatattttttttttttttaaaaaaagggggggggcccctcaaaaaaaaaaaaaaatttttttttaaaaaaattccaaaaaatttttgaaaaaaaaaaaaaaaaaattttggggaaaaaggggaaaaacccaaaattttccccctttcccaccccccaaaccccttttttttaatttttaatgggttttccaagcccccccccctaaaaaattgggggggttttggtttaaaaagaaatgcaaaaattggggggggggccccttgaaggattccctttcttttacccccccctttttgagatttttgggtaaatgagcaaatttggcttaatcagggtgcccgttttttttcaattcagaaaaagaccctaaattcagatttagactccaaaatcagattttttcaaccaagagggtcagcgtcaatttccaatttgtgaatgtccgcccattcaatcgataccacccgcttttttcgcggcgcgttctttcaaaaatttttacccaaagatgactaatttgcgctttaagccaattttctagaaaaatcgagttttgggggccggtggtgccgataggcaggcgccgcctgtgaaaattttggaattttnttatgaattctgttataacatatctccttttttcttttaccggagacctaaaaattcaggacagtctgagaattcaggacatttttgatttttcagataggtgccctccacaatacaggacaaatctaaaaaatcaggacacttggtcaccctggctttaattaacctcgtcatatttaaattataactttatttaagccattgtctccacaaaaggcgggtcaaatgaacacaaaaaattcgtctgaaaatgagaagtaaatgaattattaagaagtgacaagtgattgatcattatgaaagcaagtttctctgataattgctcctcatatttatttttttcgtttgagtatatattaattgtttggttttttacttttaattggacaaattggaattggagcaaaaaagaaaaaagtgaaacttggagaaaaatgggaagaaaatttggaagaagaaaaaaaaaataaataaaagccacaaatcaaaaacggatgaacaaaaaagtgaaattgttctaaaatttatatgtaatgaaaaatgaattaagtaaaaaggaagaaaatatttgggaaaagaatggaagaaaaattatgccaaaatttgtaagaaaattggggttggccgtaccgtaattgaaaaatggaagaaacaatttgga

SEQ ID NO: 31863 - DNA, 1473 bp, Heterodera glycines
ccagctttgtccaatataaattctccctttaattttctatgtgtgtgatgtatgcactggtcaaagaaaggaaattacatgtttatctctgtgattaatgcttttctttagttaggcgtttttttttaaattttagtcaataaaattgttgaaattaaaatttattaaagcggcgcaaatgtcgattttgctgggcggcgcaagtgtctgcggcgcaaaaaacgcggcgcaagtgtctgcggcgcaagtgtcgatttggctgggcggcgcaaatgtcttggcgcaagtgtctgcggcgcaaatgtcggccaacctagcagggatgttactcgtctcgtgtctcatttaattataaaatactttcggtttttcacacaaacatacatatcaatacatatttacataggtatctttatacatattttggacttttcgtacatattcaatttttcgtacacattttcatttttttacataatttagttttttgaaaattaacacattcctttcaaaatttttcgtttttgcgccactcactattcatcacttggaatcactaaaaattcaatctccaaaatttattttgcttctctgacatcttgcgacgtgaaatatctttttccgtttataaatcaattttggccggtaaccatatttatgtcttttaaccacgaaaattttgaaatgttttttatgtatttgtaagtgcgatcagtgaataaaattgtttgccttaatctgaaagtattttcatataaaaaaagcaattaaaattataaatccgagccctacatattaataagtagggatgccatttctaagaaaaaaattgctaaataggcacccaaaaaggcagaaaaaaatcgtaattaaattaaacaagtgcttaattcaaaaatttggtaaatcaaacataattaattagaatttttatcagaatttcgattttaatttagtattttataaacaaggaaataaaaccattcaaacattggtaggaaataagaactaaaaaagagttgctcggtttctataatttttttgacaagaaaatcaaataaaaatggcaaaaagtgtaactgtttttttttgtaagaaaattcaattcgaagaaaagaccctgaaattcgatgtttaagcatcatattttggatttgtccaattatgtatttaacgtttactttgccttacatatgcaaatgaatcgcattcgcccgcaccagttaatctgctgaatgatctcaacattttctcatcagttcacacatctgcgatttcaccattataataaaccattatttttactgccaatttattcagccaaacatttttatttaaatattcgtacaaaaattaataaaaataaaataaatcctaacttttactttattttagatacaattttttgaaatcctaaaatgcaatttctcgcatttcttattgctttttgttgggcttcttctcattgttatg

SEQ ID NO: 31864 - DNA, 1323 bp, Heterodera glycines
  unsure (1)..(1323): unsure at all n locations
cgcgtttggagacggaaaagtttggaccaatttcagttcggtgacaactgaaaatttgggtagggggaaggccagcccaacaacggcttcgtcggcaaatgtgaggttggatctatgcgatcgccgccctgactctcgtccccaatcaccattccatcgcggcgagactaacaccaaatttggccaaagaattttttatcgtggaggaaaatgtcgtaaagagcccgatcgtggaatgctaggagacggacgccggcacaagctgaactcgcccaccacctatttgatgccgaatgagcataaaaggcaggggacgcctttttcttggagggtcgggatgtgttagtatttgatttttggcgtttaaatttattttaattatattgtcccttcataattttgtctctttgtctgtgattgtactctctcgcctatcaatatttgccattcccttcccagcagaaatgttccccccatcttgccttcaattcattctgttggcagtgcactttttatattgttgtcgtcagttattttttcctcggactttcctttgggccgggcaaaataattattaaatttttcaaatttggggtagttttataggtgaaacttttaaatggaccgggacgctcccgttgactcccgggggttaaaaaaaccgggataggagccgggggtccagcaaatccggcggagccccggctccgtcctggctctaatcttttatttaatttaatataaaatatttttatatctgcgaaggcccctgaataaaatctattattatttacttgtccgccaatctgcgcaatcagaccaacaaatgtcaatgtgctcacttcttcaatgaattcatactgtagatcattgtaagacatatcaatacggtaagcaaaatcgaattcactcgcatttttgtacacacgggtcatgtcaattttctttgaaaattaattttttcataatttatttaattataaaaaattttcacttccattgaaaccatgtactcccatcgatcacaggccaacacgcacttaaaatttgcaaaattttaatttcggatgattaataatttttgggaaaaaaactattggagaaaaaatgaaaaacaaaaaattaattccaataatacctgaacaattaaatttaatcttatgttaaaagaaataaaacattaaaatagagaaaaaaccttatcattttaatttttatatttaaaactgtataaaaagagaccaaaaattcncaaaatataattcatannatatatttatgtttttcttcatttttttgtanaattattcatttttctcactg

SEQ ID NO: 31865 - DNA, 1218 bp, Heterodera glycines
  unsure (1)..(1218): unsure at all n locations
actgcgagagttggtcaacatnttcaaggcccagttcgatcggggcctagcggcgatcggggtcaaagcgccggaagctgcacgactacgttgtatgatgctttcaccgtgcccactcccgnccagcaacgagatgtttggggcttcgatcgcanccgccncccagccgaactgcttcaaatcgcgatggaacatcttgctgatctgcgcacggtccgtcgaacactcgaggacgtggaaaagctatctcagctttcatccgggactcggtcaggaacaggggacagtctgcctgcgggagatgatctcgctatccgtcgcacgccgcctgcacagcaaatccatgacccgactgatcaccagtcggacgagtggctgtttggacaattcccaagacggttcgagcagctgaacatccaagagggacgtcgggcagtgacgcctgtgatgcgaagcgtcgcccaggtcgcccaatacccggtcttaaacgcaggaggagccggagccaacattcgagaatgggtcaatcaagccagtgatcggagggaacgacgacaagcccatcccgggcttcgaaaagcatcttcttctccttcgctgcttaaaggagggatccccagccaggagggctgtcgaggtctaccctccttcggacgggaattatcccgtgagtagtatatggcacagaaatccggtgtaaaattccggcccttcttacgcaaattccccctcccgcccaattcgaactctattttatgaatatcccttgtcatcccgttcctttgttttcttttttgaccactcgggagttaattgtttcactaattttgactcctttctcttagcattttttttgctgcatgaaaataccgaaaaatgatgactaaaaaaaagcatttacaaaattttccaatattgatcctaattataattttccatttagcaataataaatttcacgttaaatttttttctttaatttcaaattcgaatttaataaaatttaaaaaaatagaggttatttctaattttcataatccgggaaatttttgaaaatttcagtgcaatttattaacaaaatttgtaaaaaaattgttaattttttgaaaaaaaattcaaaaaaaatttccgactttttatcagaaatttcggaaatcggaattccgacgtccaaaattttttcggaaatcggaattccgactccaaaaatgtcggaaat

SEQ ID NO: 31866 - DNA, 1117 bp, Heterodera glycines
  unsure (1)..(1117): unsure at all n locations
agtgcggacggactgctgctgggcccgacgactcgccgtgcccaccaacgcggagggccaattcgtctacgcatggtccgctgagcaggagcaggagcggaaattggcaccggtgacngactcgagtggacatctgctgatgccggtggttgatgcggaagggacgccgttggcacgcgacccggccagcggacgttacttggacccagcggatggcacaccaattgcggttgatgatcagggacgaccgttggaccgtagcggcaacgtactgtccaaaaacatttatgacgagtacgtgtgggtggatgtcggtcttgtgagtccggacgggcttccggcacggacggcgggcggccgaatcggtgccgaagcgaccactgccacacttcacgacgatcacgccgtggacggggctgaactcgtgccgtctgatgaaggcggtccggtggcggcacttccggatgaccgcgtgccgacgcgtgtagagaagggcgagtgccgcgtgcaggaggcggtcattgacctggtggtggcagtcaacgacgaactgctccaagcgcatggggaccgcttgcgccaggcgttggacgaccttttggaccagcatttggacctggcggcggatgccacccgcgtggcactgctccaatacggcaaaagtgtggcggttccggtcagtctgggcggttaccacgagcgtgaccaactgctcgaccaactcggccaactgcgctccactgcctccaacttgttgggactgcccgacttgtcggccgcctacgaagcgagcttacaacagttcgaaagtttcggccggggcggaaatgtaccaaaagtgttgctggtggtttccagcggggaggatatgtgagtgtttgcggcaaagggattttagaggggggggggcaaaggtataattagggaggataggtctcggataaggacgggggcaagggcgtagccagacccttggctttggggggggggctgaagtcaaaaagccgatttttaagggtgtatttttcttttttaaatcgatttttatgggtgtatttttcttttttcagtcgatttttaggggtgtatttttcgttttttgaaatcccgaattatg

SEQ ID NO: 31867 - DNA, 1615 bp, Heterodera glycines
  unsure (1)..(1615): unsure at all n locations
tttgatggtgcctatttagtccgtttccggtaaatttggtaaattttcgctcccatcgtgtctcggagggaatgtaatcttttgctgggatttcatctcctnggtgatgcattaatttgaacgatttccaaaatctgccaaatgtgactttccatataatttaaccgctgaatttcccgcatttaaaatttgtattgttacattcttactatttcctggtgaaaccaaagttcgtccaacaattattccgggatatttaagcttaattcctttcaccaaaaaattttgttccattggaaaacattcgttgacttttgctgaaagtatattttcagaccttggctctaaaacttccgtcttttcaagtatcacagacggtggttttggcttttcagacccaattactgacacaatgtttgtccacacatcgccaagtctaactcttttctctcccagggaaattacaccttttaattccataagaagtggtaatccaataagcaaagggccgggacaatgttcgtccactgagacaagcaatacaacttcccattctcggacatttccagtcacattatcctcaattcgaagttttgccatagttttccccaaaatttctatgctcgaatcgtttgccgcagtcaaatttccttttccgtcattttgctccaaaattttaagtcctgcttttcttgctgttctttctctacagtaggatacactagcacatgaatcaaccaaggctgctgttaacaaatcattaagacggacactaatggatgggagtctcctcgggtcattcgtaatcgctgcaacccgtctcggaggaagataatccagaacataagcttcttcatcgattgaatccaattctggtgcggttggtaccgccaaaacccgagtacttcgtttttttgttcccatgattgctcttaacactcttgccaatactgacccagcacgaaccccggcaaatattatcagtctgtatttaattccaatgtatcccatcaataccaaaagaattaataatggtatcgcaatcagtgcatatgataggcctttcaaataacttattgcttccttggttttctccggaattttctttactatttccaaccaatctccggatctaccaattatcacaccaagcgtttcatttgcttcacttttaaccaatttaatagcttccgtaatgtttggtttttcaactaatcgtaatatcggtgtgtgcaaattattcatttttgagcgatattcacgaattgtttcctcaaatcgcacattgtctgattcaaaaagcgctccggcttttaaaattaacgggttttgtatatttcggtacttgggtcgaattttctcaatattttcacccattttttgtattattcccctttgagtctcattctgcattccctttacactgccattttccacacattccgactttttccccaaaatgctcaactcccttgtgccgggtttaacaaaaaatattgtgttttctttacagtactctttggtaaaacagatactgtagcattttgttcctttgttttcaaaacgttttcctttttaccaatttcacttttcagttgaacttcctgttttaccg

SEQ ID NO: 31868 - DNA, 1341 bp, Heterodera glycines
  unsure (1)..(1341): unsure at all n locations
taagttatatcttttcataagattgcctcacatcagcaaatttaatagggatttggaatgattgtaagattcgtaaacttctaagaattggggagggatgctgatacgtgggtgggatgtatttaccttttggaatggactggtttcgatgtacctcccttcgatgcacaatgtaagaaccccatcaatttttaaattcctgtatttgatgaaaatagaatgcttgaaaagccatttcaagaaacggtatgtctcatgaaatgccattaaatttaattttcatttttgaaaattcagcttctctttgtttattctctccatttggttcattcttcgttgctttctgctctctggcgacttttctcagtgatttttcatcttccaattcataaatttcctttattttaagctgtcttttctcctatctttggtacttctttttggaaacacaatgcttctcaactcacttttcttcacttctcttgtctctctaaaggtaaacgagtttacaatcagcatttttcaaaattttgacatggtttagctaatattacttctccgagcgtttctgctacgttttcgctcattttctctagtcttcgctgtccatcttttgctttattttatcggcacattcggaatcaaattccttctccaacgcttgttcaacttcacatcggacaatcatgtagagcgtctttgtgcttgtttttctttgcattcttaactatttccaggtgtttgatttatttgttgccaaatttactggctctcataatttccacactcggctttacacctgcgcacctgaattcgactttctgagtctcgatgttagctatttttttttaattagttaagtttttctttcagactatccgtaaattgactgtctcttggcttttgccacttgcttttctgtccgttttactcttatccattgcactgtttggtgctgctcttcaactcagaaatcgccaaaataatccacaaaaaatgactaatcagaaaacacatcccgaggtatgtttttgggttcgacccgctcgacccttccttcccctgcagatggtgttcaacgccatccaacttggctgttttgttgcgatggctttgatggttatgagactgaaactgttcgccacccctcagttgtgcattctctgttcttgcgctctcaataaagtcagtcccattgttttaattttgtttctcattttgcccttttttaaggatttgcttggcattcgcttctcccgttttcgtgtctttttggctgttcttttttttgccggaatggccattccgggatggnnacaaantatacggggaccnntgcag

SEQ ID NO: 31869 - DNA, 1050 bp, Heterodera glycines
tttccatataatttttttttaataattatttaaaaattgaaaaagatttaagtctctgctccgatgtcatccttcgctccattggcggtgtccctcattttctctttttgctgctaattgccttgccgtctttggatggtaatttaagtttaattatcattcttaagaaggaacaacttttaaaataactgtttttgacaatgaaatgaacttattaaaaattgataaaaattcttagttttttctctgccaaaaacatattttttgagcacttcaatgtatggctgcagttcttccatccgaacggtgatgttcatgcaaaaattaaatttcttaattgggtaaaacatgattttttttctcctgaaaaacagggttagattattgctgccatatttgcatctttttctcattgttatgggttttttgattggtcgatgagtttttattttaaaaatgaacttttaagtttttttattggaagaatttgaaaatttaaatttattttgaacgtatcacatacgacttattttcaaaatctacccaaaaccggcaaaaggatgaagatctgttaaaaatatggccaaaatttctaattccttcccccggcggccaagaattttcgaatgataccaaatttgttcgagtttgaccttttaaacggttaggaatgccccattttgttattttttcagcattttgaaccgtttaaaaacccattttcttgccatttccgcacctcaggagagtatttttctgagcattacagggtacgagagaatgtttcctcataaattatttatcttctatttaaattttaaaaatgatatatctcaatactgatttggtttatgattttacagccctaaatttgaggctttttagtgcctattttcgatttttaatgtctatttttgggctattttggcaatttgtagagcttaaaaatatcatccttaataacgatgagtttttttgtactaaaataagtttttgaattgtttatttttgcacaaagattttttagtatccaaatgagtttttaaaaat

SEQ ID NO: 31870 - DNA, 877 bp, Heterodera glycines
acaataaataactaagatttaaaaataaaaataagtagcgacaactaaaatataaaaaagaaaaaaaaccaaatatctttattatggaaaaaatatttttaaattaaatgaattgaaaagtaaaagtgcgtgctctggaaaaacctgagggacagaaattaattaaatttggtgattcatgaaaatggcgaattccgttaaagatttcgcggaacggtaaaacattaaattagaaattataagagaacaattaaatgttaaggaaaatggaaaaatgttaagaaattgaaaaagggaaaatagggcaaatttctaattgccaacctggcaaacaacagaaactgatcgggtactttgtgccctgggacgtataaaaggagggtaaaaactcctatcaaattagttcaacaactatgtacctttgaggagttttatctctttcgctctgcccctttttctctccccgtttcccctcccgttgtgacgccccgtcgtgcttgcccgtgttgcccatcgtgctgccactgacgtgccatttcgctgtgccgcccgaatcgcgttgcccgtgacgtgccggcccaagcttttttccaatacttgattttgttgtgattgtgccacccgttccggttccctccgaagtttcccccacatttgcgatccccattttttcccatatttgtaccgttcaaatttcccccaattttttccaatttgtgccgttcccctttttcccccaattgttcccccttttttccccttcggggggtttaattacccaagtttgagctgaataataaagtggactattcctgcacacttgctccttgggcctttattcaatcaattcgctctgaatacgttggcatcccgcccc

SEQ ID NO: 31871 - DNA, 1428 bp, Heterodera glycines
gtaccggtaaaaaccggtaattttagaacataaaaatttttggacaaaattttccaaatacaaaatttttattcagttttcgcgtgagtacctgttttttagcattagaattgttcagaagtatatgtatattcaggttgaccaagttttttttttcaaattcaggacatacagtcatggtcataagtgttgtcccatcatgctttgaaaaaaataatgcgtataaaattgtcattttccaatttcaacagataagtagcataccattggatagcattttttatggactttccaatgataccatatttgcatttgtgacataaacatttatttgatttattttaccatattcacaatttgatcaaaatataggtggtcaaaagtgttgtcccatttcatttttaaaatattgcttctctggatcaacattaaaaaaatctaaaaaaattcaggtaagcataactttggatgctgatcaaaaaagggagcaacaccaagttgatcagatcactccttcatggtgatctgatcagcccattttggcggctgggaacgaggggtaaatttcaaaaaaaatttctagggggttgggaaaatttttctggaaattttgagtaggcccattttatagagcacaaaatttgctaccgaattgcctttggaatagtgggtctacgatttaggcccgctgagatacgtcgacttttatttcggtgcctataaaaagtactgtatttcttaagaaaatagtgcattttacactacgtcaaaattgaagtgcccatacctcagccggtataagtcatagagacatgcggttttttgaataatcagcggcaattttccaattttgcgaaggggtctccggccatgtaaattaatgtaaatcaatgacctttttttgctttcaacaccgcttttttcgcggcacgttttttccaagacttttgggggacaaggagggccggcggtgccgataggcgccgccgggaaaaattttctaatttttaatgcgatttgttaacagaatttgtaaaaaaatgaccaattgattaagttttgggtttttaggatgcttaacatgaaagaaaaaagttggaatattttttaaaattaaaattttaattaaaataattgtaaagaaaatgtgaggaatattctatccaagtggggaattgaacccaggcgaaaaattatgaaaggtagaaagtttaaccactacaccacatgtgcatgtgtgtaatccaatgactaaatgaaataaaatttaattttttctcaaaaatttctccttcttcatcaatttcctactcttttctcgaccagacccccattcttaccagtgcaaatttttaccggcggtaccggtactagacaaaccggtaacggtatttcatttttgaaaaaaccgggaccggtaccggtacc

SEQ ID NO: 31872 - DNA, 957 bp, Heterodera glycines
accggtaccggtaccggtaccaactttttcaaccggtaccggtaccaactttttcaaccggtaccggtaccggtaaaaaccggtaattttagaacataaaaatttttggacaaaattttccaaatacaaaatttttattcagttttcgcgcgagtacctgttttttagcattagaattgttcagaagtatatgtatattcaggttgaccaagtttttttttcaaattcaggacatagaacactaaaattcagattattgcaaaacaagggatcagcggccaattttccaattttgcgaaggggtctccggccatgtaaattaatgtaaatcaatgacctttttttgctttcaacaccgctttttacgcggcacgttttttccaagacttttggggggcaaggagggccggcggtgccgataggcgccgccgggaaaaattttgtaatttttaatgcgatttgttaacagaatttgtaaaaaaaatgaccaattgattaagttttgggtttttaggatgcttaacatgaaagaaaaaagttggaatattttttaaaattaaaattttaattaaaataatggtaaagaaaatgtgaggaatattctatccaagtggggaattgaacccaggcgaaaaattatgaaaggtagaaagtttaaccactacaccacatgtgcatgtgtgtaatcccatgactaaatgaaataaaatttaattttttctcaaaaatttctccttcttcaccaatttcctactcttttctcgaccagacccccattcttaacagtgcaaatttttaccggcggtaccggtactagacaaaccggtaactgtaatttcatttttgaaaaaaaccggttccgctcccggttccaaaaaaaccggtaattcccgaccagtcccggtaccggtaccggtcccgatcagccctaatagtaatatttgtttgcattttgtc

SEQ ID NO: 31873 - DNA, 1458 bp, Heterodera glycines
gaggagcagcgaaatcagcgcgaaatgttggcacaccagcgcatggagcaggaggagagaagcaaattggagaccaaactgatggaggtggccaacatcaattagcgaatattttggcttaattaattgagtcaatcgccaaatttgaggcccaacaaaatgccgaacttgccaatgccgagatggaattggccagggaaaggctggccaaggagcaggaaacggtgcgaacactcggcacaaaagtgggcatttatttatcatgttgatgatatcatacacttagagcctaaccagaaaattatcggcattgcaaggcacaagccgacggcattatttttttttgtttatcgtccaaaaaataatttaattcgggttcggtaatgccgacagacgtgaccagagaatttttaaatgaaatcggctaataaaatgctttatttcaccagtttttttctttaaatatttataaaattcagcttaaagagcgacaaattgaagaggaacagcgcggtaaaacaagtcaactgaattttaatcaatcaatggcattttaattaaaaaacaaataaaaaataataattcttttaaatctctccccccccccaccgcccccttaggctccgcgcgactgcgcgtccaacgcgagttggaggcggtacaaagcatgtcccaaatgatggccagtgagaataaagggcttagagaggagaagggcgcgctggaggaaaagctgaacgaactccgacaaagggtaaaaaaggagagaaaaaacggaaattaaaaattaaatttcaaaattaaaattaaaaaattggaatttcagttgcacgccaaagactcgcgcgtccatcggttggccgaacttttgggcgaatttttggaaaagtaccggcaaaatgcgcaaagggcgcgccaccaaatcgggcgacaaacggaagagtgagcgcagaagcgggggaaacaaaatgaaaatgagctataaaacagatgccaacagttggaacaaattgtggacaaaattcggcaaaccgccggcgccgcgccctttgccgcgtcgtcgccgccgcacgcgtcggccaccgcgacgacgtcaagcggcgggtcgagcacgcggacggtgggcggcgggtcgacgacgcggcgatcgaaaacggactaaattatattcagacaaaataattatgaaaaattggaataaattttaaaaaatgggacggaaaaagaaatgccaatttttaaaataaaatacaaaaaattttgaaaaaatatcgaaataaattaaataaattaattaataaaatgtgttgactggtgtaacaatgagaatgaaaaataggaaaatattattttcgttttaatttaaaaattggaattttattcttcgattaattggccaatttatccaaattcattttttgcattttttgcgattgctttttttggcggaagcgcatg

SEQ ID NO: 31874 - DNA, 1014 bp, Heterodera glycines
  unsure (1)..(1014): unsure at all n locations
atgtggactaaaaacctctaataattttttaaaaattcaaaaaatctctccaaccaattcgatcaatttgaatcgcttcacagtctaggtagcgaagctccgaaagcgcgaagcgctttttcccagctaaatagccgacggttcacgcacccgctagttaatatatacgttatattgacaaggagtttcgttgctaaaaccattttctcccggccgaaggccgggagcgccctgaaagtggtggaagggtcttacaactttttgaggagaatccgggaaaactatagagaaaaattcagcgcggccaactgagtcccagcggctgatttctcattttttcgtgcatttgagggcccctaactttttttctaaaaccctgaccaaaaagtttccgctggtaggattttaagttgaagtgttggctaaaagttaaaaaaaattccaggcctctacctataataggaagggctgtagaagcgcggacaaattcagtaccaactttggccagttcagtaccaggcgaataactcgccagggtttgaactgagcgagggggtgccagcagacttattgtagagttcaatgagctggattttttcagtttttaaaattttgaaaattttcaaaaattttcgagctaggcctaaaaaacgattttcgggtttttgaattttaggaatttttaacgaattttcccagaaaaacggagaccacttccaaaacatagtttttcgagctctatcgattggtaatttttttggaaaaatttcgattttttcccggaaatagaaaaattttttggcctgagcgggacatttcagtcccgggcctataactcgtcgggggttggttctagccaaaaattgcctcagggcaaaattgtagtgttttttaagctctatcgaatggtgtgccatatggccggaaattttcaaaaattttcgagctaggccccctagaaattttcaagaaagtttttggggtcgaaaaangggtgtgaaaaattatttttct

SEQ ID NO: 31875 - DNA, 936 bp, Heterodera glycines
tttattctcaattcattacttttaataaatttaaatgtttggttttattaataataaatttttttagtttaattaaattattttttgatgaataatgattttcatttaaattattaattttttgtttaatttaatattgttttattaattattttaaattattttctgatgaataaatgttttatttaatttgaattttcgagaaattaattcctttcaatttcaataaatattctatattataaatttctaactttattttaataagtaaaaggatttttttaatttgataaatttataatacatccaataatgcaattttcttatcattttaaaccatgattgtacctcttctaatcacttttgtacctcttctaacaattttgtacctcttctgatcactgtgtccctcttctaatcattgtacctcttctgatcactctcgtacctcttttaatcacttttgtacgtcttttaagcacagtttgtacctcttttaatcacagttgtacctcttctgatcactgttgcacctcttctaatcacagttgaacctgttctaatcactgttgtacctcttttaattcagttttgtacctcttttaatcactgttgtacttcttttaatcacttttgtacttcttttaatcacttttgtacgtcttttaatcactgttgtacctcttttaatcactgttgcacctcttctaataacagtttacctcttctaatctgatgtacctcttctaatcacagctgaacctgttctaatcactgttgtacctcttttaattcagatttgtacctcttttaatcactgttgtacttcttttaatcacttttgtacttcttttaatcacttttgtacgtctttaatcactgttgtttaaaattgataaactaaagaattttatttgttttttttaattagaattt

SEQ ID NO: 31876 - DNA, 1146 bp, Heterodera glycines
  unsure (1)..(1146): unsure at all n locations
gaagagccgagtgagtacctcggtgcaggaaaatattaaatttaaaaatttntaattgctttttaaatatgcaaaaaatgtaggctacntttttagtgaaattcgatcactcatatttttgctaattggagcagaagcgtaccaaactttgccagggatactccccggtaaaaggactacttacactgaaatgagcgccgagctagctggctcaaaaaaattttcgaaaatctgagtctttcgtttttatttgttttttgcataattaattcataaatatttttttcacaaaatgctctgaaacgcaccaaattttatttacatgctagtttaggcactctgatgctttttctatcaaaaagggagatgaataaatttttaaaaatttttaattcctttttaaacaggccaaaaagtttaggcttatcttttttttcagaaacttatcagaagcgccccaaactttgcagggatactgaaaggaagagaaataacctattttaaatattatctagtcagttcatttaaataatttttatccaaaaaatttttttttgggttttcggggcagtccccctgaaccgatgcgcccagatttatggggagaccgaatccttccggaatagcttcactatagcctgtactttaattctgcgttggatttttgctccccataattgtttgagtaccccaaacggacacttgaaaaaatcgatttatttttgttttcggggcagtccccccgaaccgatgcgcccagatttatggggagaccgaatccttcgggaatagcttccctatagcctgtactttaattctgcgttggatttttgctccccataattgtttgagtaccccaaacggaacttgaaaaaatcgatttttttgttttcggggcagtccccccgaaccgatgcgcccagatttatggggagaccgaatccttcgggaatagcttccctatagcctgtactttaattctgcgttggatttttgctccccataattgtttgagtaccccaaacggacacttgaaaaaatcgatttttttgttttcggggcagtccccccgagccgatgcgcccagatttatggggagaccgaatccttccggaatagcttccctatagcctgtactttaattct

SEQ ID NO: 31877 - DNA, 1012 bp, Heterodera glycines
  unsure (1)..(1012): unsure at all n locations
tagaaaaaagagctctttagaatggtaccttcacatcaaaaaacgactgtcatggagatgagctgcagaaaaaaattacaagccaagaacaagccactatagcagtatagtgacaaaaattaattgaaaatattaatttgtattccggttattcttccgtaaaaaatgacgccaccttagccattaggcctagaaaaaagagctctttcgaatggtaccttcaaatcaaaaaacgactgtcagggagctgagctacagaaaaaaattccaagccaagaccaagccactatagcagtatagtgacaaaaattaattgaaaatattgatttgtattccggttattcttccgtaaaaaatgacgccaccttagccattaggcctagaaaaaagagctctttcgaatggtaccttcaaatcaaaaaacgactgtcagggagctgagctacagaaaaaaattccaagccaaggccaagccactatagcagtatagtgccaaaaattaattgaaaatattaatttgtattccggttattcttccgtcaaaaatgacgccaccttagccattaggcctagaaaaaagagctctttcgaatggtaccttcaaatcaaaaaacgactgtcagggagctgagctacagaaaaaaattccaagccaaggccaagccactatagcagtatagtgccaaaaattaattgaaaatattaatttgtattccggttattcttccgtaaaaaatgacgccaccttagccattaggcctagaaaaaagagctctttcgaatggtaccttcaaatcaaaaaacgactgtcagggagctgagctacagaaaaaaattccaagccaagaccaagccactatagcagtatagtgacaaaaattaattgaaaatattgatttgtattccggttattcttccgtaaaaaaatgacgccaccttagccattaggcctagaaaaaagagctctttcgaatggtaccttcaaatcaaaaaacgactgtcaggnagctga

SEQ ID NO: 31878 - DNA, 1128 bp, Heterodera glycines
  unsure (1)..(1128): unsure at all n locations
aaaatccccaaatttcagagtgccttccgcgccttttgccccgccattacacactttgctgctatttgtcggcacaacctcacaagcagcaacagttgcgtttccgcttcgtttactccgtcctccaaatgcccccgtcagtgataattgacgaatgtgcggaatttgagggccaaaaacaacaaaaacggtacggcgcatgcactcaatggttgttgcagcaacggactggccaaactgttcaggtggggacggacacccgtaaaatttaaaaaaataaataaaatatttgcggcgattgcaattattttctaattttgaagaaccctgacgaacttgaccaaaaatggttccaatttaccaaaaatcataattcggaattataaccgaaatgctttttctcttgcattccgctcaacctaaaaaattgtgaaaaatttcgaaaataattttattttttcagttttttttacccttttttaatttttgctatgaaaatttttcgtccaatttactttttttgacagttttttggttcataaagaaatccatttccatattgaaaaattgcagatcatccaaaaggagccgtccaaattccgctttttgccccttctttcgtcccctctcccgcttcaatgccgtcccccgactccacgatggttgaccagcccgaccatgcgctgttgttgctgaacatgccgttgatgatggtcggcccaggcactggtgttgctccgttcattgcctttcttcaaaaaatcaggtccccctttttcaccttttctgaggcctcaaaaatttccggaaattggaaatataatttttttttttggggctgtaggagcaaattgaatttatcaacttgaaattgacttaattctttctagaaacttttcacactatctgccctgtcttttttttataagaaaaaattctttcaaaaggtggattttttaaaatttttccaggcatttcatgcaacgaatgggcggcgattgtggacgagtgaaacgcgttctgttctatgcgtccagcaatttggacgacgaaattcctgttcaggtaccacgcacaaatattncatgcnagtttttccaaatgtntattcacacatttcatgtctga

SEQ ID NO: 31879 - DNA, 1941 bp, Heterodera glycines
ctcaggccaacattgaagctagcgcccagccttaaatactttttaaatttatattatctaatgaaaaaaaaaagtttaggccccgttctattctcgttgttttgccgtgttgagtgccgtcattttttctggtgaagcaaaaataaatgtgtagcaattaattacagtaacggatcgggctaataaatttcctggaaaagcgttaataatttcataaatctatacatagattgctgtgtataaaggggttgtataactcacgtagtaaagagggtaattcagcttttaaaatgctttaaggtctgaaacaattcttagaaaaacgaaggtgtgataaattaaaaaagatttttatttttactttttaagcaggctttgccaaatgattctaattgaattaagaaagaatgaagaaacaaaggatgtgaaagaaagaaagaataaattaattatattatttgtcatcagagaatgaaaaaaattaaagaaatttttttttgtaaaattaaataatttatttttttaaattaatctcttttgtcaccagccaaaagggttcacttgccctttttcagactgaaaatgtgccggaactgaagtgccaaaattaagcggggactcaactgaccactctatgaaaagcgccaaaattattgttaaacgggttttttattcagaggatatttattagagagcggaccggaccggatccggtaccggattttcctggatcaggaatccggtccggcgattttttggaaaaatagggattgaccggattacatagattgaccggattatgagagaccggatcccgaatccggtcatttttgaaaatgccaatccggtccggtccggcgaatttttgaccggatccggtccggcttggtctcaaccaaaaaaccttgacgtttgttcgtttttctttgaaaatatctatttggcataatgtctttaactttaaatggtcaaaatttcaatttctcccccgccggagcctgtcagcaccgccgggcctccaaaacttttttctttttaaaaaatttgcccaaaaaagcaaaaaaaaaaaagctcatttttggtgaaaatctgtttgcaaatcgcctcaaattttcaaaatttttcccggcggcgcctatcggcaccgccggacccacttctttctttcccaaaagtttttggaaaaagggcgccgcaaaaaaaaatttttattttttcattaaacataggttttcaaaaataaaaaactttaaaataaattttttaaattttttttgaaaaattgaaattttatatatttttttcggcgcattgtcttttctatgacgacattttctggtgcaccaaatttctacatataatagatgaaattttaagggttttttcccaaattaacatgtgaaatataaatttttaccaatccggaattcggttccggatccggcaatttgaaaatctggattgaccggattaccggattatgagagaccggatcccgaatccggtcatttttgaaaataccagtccggtccggtccggcatttttgagaattccggtctctaattatttgtctcgattttgcgagagtgtaatttttaaataattgtcgtcactaaattggtggaagtgattggcaaatcttaaattgaatatcgatccaattaaaattgcatcccttaaaacattgcaaatatttcttttttattattttctaaatgttttctctttcgaaaatgattctttcttttttgccaattctgatagctttcattgctcactttcgccttttttcttgtctaagtccaaagggcgaaaaattaacggataaaacggaaaaggaaattccgttgcaaattgtgagttaattttcttaagttccatttaataaatattctaaaaatctctgatttgaagaatccgtcgcattcttttcgcattaa

SEQ ID NO: 31880 - DNA, 1271 bp, Heterodera glycines
tcttgttgtacgtctcgaatttgattgtaaaaaacagctttctcgacagtaaacaactctcgaccatcagtcagtcactttgcccccctctcccccattaactgactctgtccttgaggcccttctccttgagccagtcgcacaacggtttgaactgttcctcgagcagtttgtgctgctcctccgacttgctgccctcgtccagcttcagtccctccttcgcaacattttggaactttttgccttcgaattcgggcatcgactaaattaaaatttttagaaaaaaaatccacttttttctgtgtgtgactcacctgaatacagtactcatcaacaggctcggtcaaatacagcacttcaaagcccttcttaagcagacgctccacaaacggtgagttctccacctcctcgccttgaaaacaaaaaaacattggtaaaatttcaaaaatataattatatccgcacgttggactgtactataatacaaaatatatgtaatccttttttcagatttttggataaatataggatccaaaaaagcacataatttctgcagaaactatcgaatggaatcgaaaattttttttgttttgatgtcatttttaaaaagatttttcaagaaaaatgttataaatttttataaaaaaatttcaagaaaaaaaatttaaaattttactaacgttttttttgaaaattagaacaatatattaaaagaatggaaatttttttggagtcaacaaatgggaataaaaattgggatttaatatttaaaaaaatgtaaacggtcactcgcaagaaaactctttaacccgtgccgttaatttcctttcaatttacacccatttgtttggcggaaaaccacaaaaagcaaaacgtacgggatgagccagcaatgtagtagatggcctgctgcttctccttcattcgctccacgtacgcctccagcgttgtctgtttggccgagtcggcggagctgtggaagcgcaacagtttggccaggcggttgcggttggacgggtcctccatgacgcccagcttcaggttggtcgagtactccttgaaatgttgacaagaaaataaaggttacacgttgtgctaaattacaaacccgaggagacagggttacttatggcatcaccacagtttttgtataaaaagcagggatatctaattgaaagtactcataaaaaagggttggccgcagaaaagtcgataggaaacataaagtgcaatagagcctatcgacctaataaactgatgattatcattga

SEQ ID NO: 31881 - DNA, 1624 bp, Heterodera glycines
aaatgaatgtcatattcgtgatcagcgcccatgaaaacctcagaaaaatacaaaaaaaaaaattattattttttttatgtggcgtaaagtgaaaaagtacccaaatatgttgaacagttcaggcatatccttttaactatgattaaatctgtcacctaaactagagtccggtaaaaaaaaatttccgggagcgggatcgggagttcaaaattttccgggacgggagtcccgaacgggaatcccgtaaaaatcccgctcccgttaaaaatccagttcaccgaaaaaagcgggagcgggactcccgtaaaatcccgcgggagatcccgccggactctaacctaaactaaacaaatatcaaaattcttatagagtaattaaaattatatttcaggtgtacgattatttctccgaatttattcctaaatcatttgacgataaagaatgggttcggtacgtttttgactaacacattaagtcagtcttcttttcagaacaatggaatgttcaagtgttgtcgaacgcgttaattattgggcttttttggcactttctcagcatcgaaaagacttggacgaaatgaaacataatcaaagtgtagaacatacggatagttttttcaaagaacaggttatttgttgttcgttttttattttaaatgtccttactcctatttttctcaatatttattgaaaggatcatttttcaatgggttttattgaataaattcgcatttattcagttgcgactttataatgctggaggcatgggatacagtgaagacgcgtactgtttgtatttaaattcctatcaaggcagaaattacgcatcgagaaaatgcaagtggtctttgtcattgtcgatccttaattcaaaattttgaaaatgaaaagccttttcagatcgcacaattgaagaatcaaagaaattggcccagcaattaacacttggagaatcaccgcggattctcttcgattgtcaatttttacctcaaatgacacaacgaatttacggcaaagtagcaaaatcggcagttcatgcatattttgtatggttttggaattttacaatgatttttatttctttgatttcgcaccaaatttaaaattcaacgcacccagagagcgtcattttgaaggaattatcaaggggcttttggacaaaatcattagtttaattttcttgtttattttttaattttgttgtacttaatatcatcgcatttacccgcttctcgtttagaaaaatcttcaccttccttcgccttttccttacgcatttattaacgtcaatcaaacggatcggaacacaatggacttatttctttagtaatattacttttcttggttattttgttcaaagaaaccgcttgagtgttaagcaaagtcgggcacatttccactgcaagaaattggtcaattcggcccgagctctactcaaacgatccttttcacgacccatacgaaactgatccccgtaaacaagttgtctatctctcaaagtattagcgcttcgttgtttcattaaaattaatcagttttctattttcgacatgcttctgagtttatggatggtcctttgatccacaaggcgtatattattccgttcactttcgacataaaacagg

SEQ ID NO: 31882 - DNA, 1000 bp, Heterodera glycines
gtgaagaactgtgttcctccaggcaaaaaattctaagaaaactctaaagcatttgaaattttatttacaacttaactgcaaaatttggtgagctttttctatcaaaaagggaggtgaataaaatgaaaaaaatttttaattcctttttaaacaggccaaaaattttaagcttgtgtggtaagtgtgaagaactgtgttcctccaggcaaaaaattctaagaaaatttataagcatttgtagggttctcagcagtttccctgcaaaatttggtgagcttctgatcagtctagaacgttgggtgataaaatgaaaaaaataattaaaaaaaaataatgctggtgtggtaagtgtgaagaactgtgttcctccaggcaaaaaattctaagaaaatttataagcatttgaagggttctcagcagtttccctgcaaaatttggtgagcttctgatcagtctagaacgttgggtgataaaatgaaaaaaataatttaaaaaaaataatgctggtgtggtaagtgtgaagaactgtgttcctccaggcaaaaaattctaagaaaatttataagcatttgtagggttctcagcagtttccctgcaaaatttggtgagcttctgatcagtctagaacgttgggtgataaaatgaaaaaaataatttaaaaaaaataatgctggtgtggtaagtgtgaagaactgtgttcctccaggcaaaaaattctaagaaaatttataagcatttgtagggttctcagcagtttccctgcaaaatttggtgagcttctgatcagtctagaacgttgggtgataaaatgaaaaaaataattaaaaaaaaataatgctggtgtggtaagtgtgaagaactgtgttcctccaggcaaaaaattctaagaaaatttataagcatttgaagggttctcagcagtttccctgcaaaatttggtgagcttctgatcagtctagaacgttgggtgatcaaattgaaaaaaaaaaatataaaaaaa

SEQ ID NO: 31883 - DNA, 1355 bp, Heterodera glycines
caataattatatccggtaaataaaatttgtattgatacatttgctcaaataaaagcaacataaaggtcaaaataataaaattattattagtcaatgtagaaacaatcatgtataaaaaaaaaatccattgaaaataaacaaaaaaaaaactaataaaaattttaattaaaaaatatttaaaaaaccaagtaaattatccaaaagaaaaaattgatttaatgtaatagatgaaaatttaaaaatgaaccttataaagtaaaaatttattgtaaatgaatgggaacatacgaaactttacgaagattgaaagaataaataaaggaattaaatattcttattaacaataataataataataacaaaaagagaggaaggatatgaaaataagatttaaaaagtaaataattaaactattaattaattaaaagcacttaaaaattaattaaattttttcaaaatattttttttatcactgacgcattttccgggggccattaaaattacaaatttttattacaaactatttcatttaaaaagacagcattttaggattctattctcagattagtaggaagtttatatatcactatcataaaacattataaaatgatcaaatgaacaaaaattcaaattaatttctgtaaataattaaaaataaatcttttggattgatttagttatgtaattgtatgcttttattcttttataattttcaaattttttttcatcattaaattaattaatttcaaataaaattaaaagaaagtgaaaataactaaatccaattaataatcttgaaattaagttttattaaaaaagcatgaaaccaaaataatatttttaacgaaatgacttgctataatattaactttatctcatattaaatacaaaataaaaattacaaaatccaatttatataatcttaaaaatatttaatcaaacaaagaagattacttattacaaaaaatgatatattggaccaatccttgaaatttaaaggtctagacagcgagtttaacacaaaaatcaaaacattttaaaatatattaaaaacaacaagtaatttttgcaatgatttaaataataaaattacactaaaattaatgataatagtaaaaacaactacaatatataagtaaattcaaaatctacaaatataaaaactgataatatttaatttaataccttttaacgttaattgactaaataaattatttaaataaatcaggaaaatataatatttaaatatttttgtcatttaatttaagcaataatattctgaattattttgtcagagactttaacattatttatgaagattggaaattgaattgtgaattgttttaaattattga

SEQ ID NO: 31884 - DNA, 882 bp, Heterodera glycines
cttgatagaaaccatcaaagtctcaacaactaccaaaaataaccagataaaacaaactaaataagaaagaataaatcttttttcacacttctgtttattttgcgaacagaaatatgtcttttaggcagagttatgttgaattttctaagttttcaggagaaattaagggccaaaaggctcaaatcgcctctaacatttgcccaaccgaatcaaactaacagcaatcagcactaagataacgtacagacatcctttaagcattttttattcattttatgccataaaaaaggcattaaacacaaaatttttgcgggtgaaaaaatacgaaaatctgagtaaattcgaaaaaaaattctagggggttgtgaaaaattttccatagaagatgaatatgacgaacagaaagagcacaaaattctctacaaaatggcctttgaatgattgctctatagcaagtattcgctgaggggtgccttgtaaataccgattatccaaaaaatgactcaattcaagccatttttcctcatttttgagacatccattctcccccgccgtttccctcatgtttcgtcgctgtggtcgtctgctgtgttcgctgcagttgctgaaatgggtgcagttgagggatcagtgccgccacgttcagcagccgtgcgatgcccgttggttgagctgcgaaactcctttcctgtcgcggaccgcgccaacaaccaatgatagaggcatataaattattattattattattattattgtatccaaactttgaccgtaaattcattaatttaatctaaactaatagaattttgtcatattgataaactaaatttattctataagagggtctttgtccatcactaaatttaattgcttgatctttat

SEQ ID NO: 31885 - DNA, 915 bp, Heterodera glycines
tggcaaaaaatgaaaagattttcggcacattttatttctttctgtccgttgtcagaccaaatcgcgccttcatagtgtcccgaatgctaatcccgcccattttcgtgctgaaatgtgctcatccagtttgggtgccaacaacaacttgatgagccgccgttgggcaaccaatgcgttgggttctgaaaaaatgtaataaaaattagaaaatattttaagcggattattggcacacctccgaaccatttcaatccaatccaatttatacgcgaaaagcgtgacaccgaccgataaataacaatataaataaatttggtcactgaatgagatgaggtggtttcaaaagtaaagaatcacctccgataggtgtcgaagaagtttagcgaaaagtccgaatggaattaagtaacctcgcctctttaggcgaaacacctatagaggcgagaggtacgaataaaaaacgaatgataccgaacatttggttgaacaataagcggttttaataataaaatcatttttcagttctgaatatgtttttgaaaaggaatcattatgctgaatatggatcttttccaaaattatatcatggaagagttttaaatctatttttattctgcgttttaagagggattcttgtttaaagagttggaggagttcgttatacccgggtatatcatccttattattattacgtctaaaaacaatacgtaaaaatgttttttgaacattttcaagagcatcaatgtcttttttcatatatggattaaaaatcggagaaccaaattccaaaattgatcgacaataaacattgaatatatttatgagaatttttgggcttttagtttacagtgacttgagtaaagcaaaagatgttcctattgcttttttagtaataaattctatatgtttttccca

SEQ ID NO: 31886 - DNA, 1223 bp, Heterodera glycines
cgctgctccaagttgagaaaacttttccgaataattgtgacgaaaacgctccaaatttcagcctaaattgaaagaaaatgcactcaaaaagcggcaattgtttgtggttgagtgccacctgcacattctgagggcacaactccaacaattcgatcatccgaccgatgttctccgagtcttcgatcacataccgcgactccaagtcaaacggaccgccaacaagctgtgaaaaattccaaatttcaatgtaataaaattcaataagtgtttatttaatctttgcatttatgccaatccgaagaaagtcagtcaaattaagccctaaattgatttttcaaaatttgattcagagtatgcaaattcaataaaataaagctttaaatggcattttgaatacaaaaaccggacatcccctaggcatttgattgtaatttacggcttaaaataattgatccatttcttaccgtgttgaacagactgtcaatgatgtctttgtacgggagtgtggcgttgatgcacgcctccttcagccgctcgaaagtttcgcttgggtcctcgtcggtcgcatggatgacgacggtctttccgaattggccattgatggaaacggcgagagattcctgaaaaaattttcaatgtcattaatttgcttgtagcgattctgatcaattttgccaatcatcaattaagaaaagttccaaaaaatgccaagtcggaatggcttaattgtgtttgggattttatcaattattcgtctgtctttgtacaaattggtgctgctggtcctcctcgtccgccgttgtctgagagtgtctccgtgccgtcgttttcgatcggctgtcctccgctgtcctttgtcctgcttccacttctgttcccccctcattttggctttcgtcctttttcccgtcaaatgatgtcggtgtattttcgtcgtacaattgcacatctttcatttctttctcgtcaaaatttgtcgaattcaatgtctcggggaatgaagtcagtccgtgcgattggggcggactttcctttcgctgcctttcgtcgtcccccgatgaatcagtcaaatttgttgttgcttttccaccgccaacaagcatctcataaaaggatacaacgctttccttgctttttaaataaatgaaaaaattcctttgactcgtaaaaatgaatcaccgatctttgttactcctctactactacatttttcatcttatgct

SEQ ID NO: 31887 - DNA, 1565 bp, Heterodera glycines
  unsure (1)..(1565): unsure at all n locations
catttttttgttacttcatcacaactactcatgtaaagcacccgtgacttgtttgaattttaaataataagcagatatcaaagtacaaataaaagtagnccaaaataattaatatttatatgttttaaataaatacaattaggtgttaatccaatcaacataatgtaattttatttaagaaaataataaaaaaattttattataaattaattaacaaaattttcaaataattaaatggcaaaaacctagaaaaatttcgaaaacaattatataatgaatgaattaactattaatatagccaaatggatattttaaatgcatttttaaatccgggaaaaatataggttttccggtccaagggccaactgagtaccagggactgatttctcatttttcgtgcgtttgacggctcgtaactttttttctgaactctaatcaaaaaatgtccgctgtgagggggctaagttgaagtgttgtctaaaagtcaaaaaaaattccaggcctctacctatagtaggaagggctgcagaataggagaaattcagtaccaacttttgtccacttcagtcccaggtgaataccgcgtcagggtttgatctgagcgagggggctccagcggacttattgtagagctttgaaagctgaattttccaaattttaaaatttcgaaaattttcaaaatttttcgagctcggcctaaaaaacggttttcggtgttaatccaatcaacatagaggtaattttatgtagaaaataataaaaaattttaattaaattaattaacaaaattttcaatgataaatgttatcacttctaatagaaaatttatttactctcatgaaataccagattagaatccaggtgagacgaaaacaatttgccagactaaaccaagcctaccgttaataaacgaataagcaataaatttctgacgaataaaaagtgacactctgaaaaaacatttcgccataaattttaaattttgatgtttttgttacatatcatttttacatagaaatggtctttttgagtagcaaaaatcagcaaatcaaaaaaaaatcagcatttacccttgaaaagcagcaaaacactgataaatcagcagaattggctgccctgaataagaaagtgttttaatttttatgaattattttttatgaataagcatggtaaaaagggggtctggtttaaatttttggtggaaattttggaaagaaattttttttaattgaaaaatatacattttgccttgttaaaacatttttttatcataaaattccgacaatataatttggtaatttttatctattgccaatttttatgaattattatttttttccataaaattccaaccaagtttggtacagcataaactctaacgcatctttctcttttcaacctcttctctctctctctctctctatcttttcttacctatctcttttctcctctttttgctctcctatttctctcgctctcttattatctcactatttctttaattctctctctctttcagacaaagtctgaatttgcttcgccaattacattccgttgaatgtagt

SEQ ID NO: 31888 - DNA, 1448 bp, Heterodera glycines
  unsure (1)..(1448): unsure at all n locations
atcattttgctgtccgatgggtgtaagacgacggtggaaagttcaaacaaataaaggagagccntaaggtgggagggggataattaattgaaatgtaaataaatttaaacaaattaaatatccaacaaacttgcgattgctgcaaaatatgcgaccgagtcgaatcggtccgttgtccaacccaacaaaaacaaccgacgaatcgtcgggcgtccaaacgcactaaatcaaggcaaaacaacaaatatttgattcaaaatgttaatagacgaataagttttcttcccaccgattggggcgtcagtttgtccagccattcctcttcaaaagtttgcacagtttggtcctcaattttgaacacgcaaagcatcggttgtttcacctcagcgcattgctcaccccacgactcgcgcagttggaatttctcacccttgggaaacgaagttcaaaccgagtaacacatgattttctttgagaaagttttgaattcgagttgtgctttgaaagacagataaaaaacttaagcatcgggtgaatgagccaaaataaattcaaaaatttagaggtaccaaacaaaagttgaaaagatgatgcctttttgtttaagttcttgccgttaggtaggaaacgttaatggggtgattaggagtggggaggaggtcaccaaacatattccacccaaggggagggggaacaaaaaactgacaatttggccaactgatcggatgccataattatgcccatccccaccaaccagcaatttcttctccattttgtccgcctcctcccattccaggcccgcgtcgtggaatttcgccagtcgctcagtcaatttgcgttccgccaagtaaaggagtcggtcctccccggaggaccaacgaaaacagccgaaagtgccgcccaaaattgtgccatgctttttcaagtccgtaacattggcacaacaaatttcatcacccgtacgattgtcaatcacctcaaagaatttgcaatagtaaaaaaatgcttaaaaagtgcaaaatattaatcgatcaacaaaatttcaccctgataaactgtttcggttcgccgtcagctgccgaaccatttccgtttttgtattcgaccaatgtggccattttggcacacgacggactcagcgaaacacgttgagaactaaaaaaatggcacgtaaaaagttgcatggattaaggagtcttgaaaactattaatttatactcagtgtttatcattggcacattaatggtggagaactgcttgagcccgtcgctgatgcccaacggtgtgtgcacgcgctgctgtcggatcattttctccacaaacggcgcgcgattggcccaaacactgacaatctgaaaaagagtgaaacgaccgttgtaaattaggcgaaagtgaaaatcgaatgcaatttacaagaccataagaaaatttgcacaacaataaaatga

SEQ ID NO: 31889 - DNA, 1104 bp, Heterodera glycines
gagaagcccgcgaacagcacaacatttcgcacgccgttactttgtcctcgagtccggccgtgtgaacgcccagcgagcggttctcgtcgattggcatgtaatcccagtcctcgttgtcatccgtgtccttgccatccacaagcgcaacagacggcttgaagtcggcggcggacagcacggccggcataatcatgtccaaatacttggcgaaacccttgccgaggattttgcaaatgcgcgcccacgcgctgatgaagtaggagatttgggggtcgtcattgttctcgaatttgactcccgagctgagcaacacttgcattacgctgtcggcgtccgtctcgaacagttccgcgccgactgccattccaatgagcgaaatgcattcgatggttttgccacgcaacaacttcaaattgtcatctttggcgttttcaaaaacttaacggagaaaggaaaatgatggagaaagggtcggttagcaatgagcatctttaaaatgaactgtatttgagagggggcatcaaattgccgtaaaatttggcgaagtgatcctgggcggcatcagctaccgaagcgatcgtggtgattatctgaaattgtttgaataatattgatccaacaaagggaaaaagacaataactgacctgttccaagacgagttttttgccattggtcatcatttgctggaaagtttgtgaaagcactgactccaatcgttccattatcttaacaaataggttaaaacaatgaacaaaatacacaataaccgatggcaaataaatactgatgattgacttgggacaatcttcgcaaaagttcacctaaaccaatgaaaatttggccgtataaaaccaccgtcgaatgcgtctcatgccattgcggccgccgcgtgcgcagccactcgcgggacggacatgtcggccatggcctcgaggagaacgggcacaatacgctcatggcatttcttttggatggtgggctggaagtcggtgcacatcttcacagggaaaagttgaattttgccaatgtgtatgtgtgggaaacaaaacctggccaatggcattgcaaacggcgtaacgaacacgaggatgctgaatttaaaga

SEQ ID NO: 31890 - DNA, 333 bp, Heterodera glycines
tccgtttcttaattttgaggcgacattcggccgcttcgcggcctcagacgggcgctttgcgcttctaaatattgtggactcattcggccgcttcgcggcctcaggacgagcgcttcgcgcccgtcttttaattttttctgatttcagattcgtgatcagcgtcataaataacccctaaaaaactaatattaaataactaaggaaaattttttaattaaagattaaaaatcacatgcattttaatttaaaattttttataattaaatactcgttttattaattaaaaacaacgttgataattaattcgtccgtttcacggcctcaggatgggcg

SEQ ID NO: 31891 - DNA, 1283 bp, Heterodera glycines
  unsure (1)..(1283): unsure at all n locations
aatcttagttattcagctgcaaaatttacagtgtatcagatttgttttggtgtatagaccacccaaaacaacacttaaacaaacagaaaatttgtttaaattcttacaaaaattttttaatgaaaattcagtgagattttaatttaccgaataaagatttggtatggaaaaatgggcatccctattcaatgagtaaatgtggtgaaatattttgtgactttttcaatagattttcttatgttttggccacgaatgagccaacaaggattaactcctggctagatttgatttttncggccaatgaaaaaattattactgattgtactgttaaaggaggcatattttcatcggatcatttaacacaatttttcacattaattactcctaaaacaaaaccgaaaacaaagatcgtaaactttcgttggttttgtccatcgaatgtgttacattttaatatagtcatagcatcaaggctaaatgccttgtcatatgaatgctttagcataaatcaaaaatattccgcctttaacagtatgttgttagaaattttaaatgagtgtattccaataaagcgtttaacaaagaaagatttgactcctaaataaccacaacattattagcatccgtcaaagaaaaggctaaattattcaggcaagctaaaactgacccatctaaaaaagcactatacgatagcatttctttacatataaaaatacaaacaaataaataccataaccaaattgagaaaaaggctatttcaaagggaagaaattcaatttataaatatatacaaaaattcaatgtcaatccctttgaaatacctaatctgatttatgaagataaatgctatcataacagtgctgagaaatgtgaaatatttgccaccttatttgccaattcatttaataatagtgaaaccacccaagcattccatgcttgggtaatattatagaaattgatcaatgctttatatcggatataaattttacatcatcgagacccaaaatcttatgaaaaaacttccgaacaaaaatggcacttctccagataatattagctataaaattttaaaaattgccattcttctctgtcaactgttattactgacttgtttaggatctcattagacactggttcacttccagacatctggaaggaatcaattgtttttccgctttttaaaaagggtgacaaaaataatcccgaaaactataggccaatttcattaacctgctcactttgaagggtaatggaaagaatttcaagcagacatatttacaatt

SEQ ID NO: 31892 - DNA, 934 bp, Heterodera glycines
tcagtaaattcctcttttgagaacagcgggaagcgaattttgaagagagccggaccaagcatttgacgaagattttctgcggtgcattcaatgccattttcacggcacttttcatcggcccaatggagtgccgaaaaaacaattaaaattaattgggaataatcaaattaattaatgaggatttaatgaaaattactgcgttccaaattaaaatttcttcatggatttgcaattcttcacgttccaaaatttcgcacaacaatttttggtcaatttgcaaaaatgaatcagatttgatcagagtttccacatttgtatcaatgtacaacaaacatcgttgaacaaaatcctaaaaaaataattgataataattaaatcccatcccttttttaattgaattcccgtttcccgtctcacaaatttaagccagggcttcgatcgaaaatttttaaaacaaagaagatcaagattttgaggtcaaaaacagaagattttgcgaaatttgcaacaaaagttatccagtgaatccggatcaaaaaaccaagtttttaacagttttttgcggcgcattttttattttgtgcttttgagccaatttttaagaaaataaaggattttagagtccgacaacgccgagccgtggatagtttttaacagatttttgtccaaaaagcatgtttagaaatcattaaatttggtcattaccctcaaatcagaatatttcttagaaaaagaacaaatcgaagccctgatttaacccaactcaaattatattaaacgaatgcttttgtccaccttcagcaaatggtcattaaagcgagcgacggaaagtgctgcgaaaacattggacagtttggaaatgggaaaatctccacacgctttgaccaatccgatgacattgaattttagggctaattaaaaatatatatatata

SEQ ID NO: 31893 - DNA, 1413 bp, Heterodera glycines
  unsure (1)..(1413): unsure at all n locations
cttttgcatttgcgaatgctgctcaacaantttgcaccgtttttctccaaatgcagcaattgatggcttatcaaatcgtcgtggtcaaccaggcatttccggcgggcaacgaaacgaaggacagatttaaccgtgccaaattattaaatggtgagcaattaaatcgaaataaatttattttccgctaatttttctccaatttaaaatttagtcggtttcgttgaaatgcttaaacaattttgcaaccattctgctcaatgttgggattgtgttgtgttccatgacgtcgattttgtgccagaaaatatcactaatatttaccaatgcgaccgaaacgcaccgaaacggctaatctcagccaccgacgaatgggacaattacaaatatgagtcggttttcgaatttaaaatattaaatattttaaaaagttgaattttatgcctggcgataaagcatggatgggcggcgtcgttgcgataacgccggatcacttttcgctggtcaatggcttttccaatgactattggggctggggagcggaggaccaaaatttgcgtgaaaggttttttgggtgccaatggaaattaattaattaaaaaaaaataaaaaatattttaattaattaaaataaaattgggaaaatattttaatgttaacatggattatacataaaaattcttgtaaaatatttttaattaatattatatttttggattttaattaatgcaattaatctatatataatttgttgcataatgcctaaatgcctattttatgcctatttcgcgagttatagcgcctttttcaggattttgaaaatttctatttcctattatagtgcatattcgggggtttttgtgcctattttgcgattttttctgcctttttaggtgcctatttcgctcgcagcactatttataacttccgcgcgtcacgaaaattttccattttaagatttaaattggcaaataaatcggtgcttttcgttcacggacccatcggccattacaaaagcattgagttggcccacaaagacaacgacacgacaaatgccgagatggactgcgcatgtcggcagcttttgatcaacaatttgtccaacacttggaaaatggatgggctatccagcttaaattatgcgcatctgagcacaacggatgagattttgtacacaaatataacggtgaatattaaaaaataataattaaaaaacagccattgcttaattgtttaggtggatttgttaatggacgaatcactgaaaaagggccatccatgcggaaagaaaattaacggcatttatgggtgtgaaaatggggagaaattccatcataactaagcaaatgataataatatttttactttctttaattttgaaaatgtgtcatattattggtattaaatgtaaaaaaa

SEQ ID NO: 31894 - DNA, 893 bp, Heterodera glycines
aaactaaatcataaatttttaacaaagtttttttttatacaattttggccgtttgtaataaaatagttaatgcaacagtactttattttagaaatactgtattactgatggcttttccactgacgcattttcccgggaaccccattttgaaacattaccatcaccgccgacggcacgtccaaaacgtaggaaattgttatttttggcacgtccaaagcgcagaaaggtcgggtcaacgctgccacctgctccgccaactttttgtcggccaaaacggagaaaatttggctcagaaacgagcatcgatgatttgcctataaaattttccaagaacgatagtttaagtatgaatggatagcgattagtagagccctgaaattctgaacaaaaacccggacccgaatttccgggaggaacccggacaggattccgaaagctatttcaagtatgaatggatagcgagcgattagtaaagccctggatttgggaaaaaatccctgacccggatttccggaattaaccggacaggattccgggttaaaagtcacgttttataacgggactccgcgtccttttgcatttttcaaaaacaaacaggactcagacccagatcctgggaaaatcctgtagatataacatgtccgcgctctagcgattacacgattaagggaagaaattcttttataccgaatctgagaaaatttgaggacgtccttgtcggtgtctgagatgcactgttgaattcgttcagttggccattacttcttccaaagcctgtccatgtgacggaattgattcaacaaatttaaaaaacttgactctttacagtagaaaaaaagaaatacatacctaattcatatatccaaaattttcttgaaatcgaatcgaccctt

SEQ ID NO: 31895 - DNA, 920 bp, Heterodera glycines
tatttattcgcaattgaaaaatttttaaaaataatttctttttatgtttatcacctcccccccccccccctcttaaatgctttttttaaaattttttattagcaaatttgggactctgaattcacaaataataaaaattttttgcttttatatgtttcacgttgcgccgaaaaaatttgaaaaaattctcaaagaaatctctcatatgtaagcattgtcaattttagtcaatttccgatcactttcaaaaaaatattattacgaaaaatgcatttttaaaaaaagctcagtttgggccacggttggcaaaaccggggcttttttttggcatgctgttgcccgctggcatttccctttttttctgaggccaggagcggaaaaaatttgcacattttttgaaatgtttttaattttttcattgagaattttattttttaagttagaagagagaaaagcccgttttcaggtgccagtagtccgtcccatccggcgggtctctctctatttaaaagggtatatggcattttcaaaattataaaagtctcagtttcgtgatcagtgtcctaaaattagcctataaaaatatttaaaaaaaccatgagggggggggggggggagggaaaacttagaaataccatattaaaaggagaaatctcaaaaattgtaattttctgtctgttcacacctaattcggcaagcccatcagcagtctccgtgtagaagtagaagccttgcgagatgtacccatgcggcagtcgatgctcttcgatcggcaaaagtctaataaacggttggctgatcacactgatcactgatcagagttactttttgcaacaacaaaaaaaactaaaaaaagaccccataagcttaaaacatagtttaaaacattttttgcgcatatggccatagaaaaagcgaaa

SEQ ID NO: 31896 - DNA, 739 bp, Heterodera glycines
  unsure (1)..(739): unsure at all n locations
gagagagagagagagtagcgagagacgagagagcgagagagagtagagagagagctgatagagagagagagagtgtagagagagatgatagagagagagagagtagagggagatgattagggagagagagagtagaggggagatcatagggagagagagagtagaggcagctgagagggagagagagagtagagggagatgatagggagagagagagtagagggagatgatagggagagagagagtagagggagatgatagggagagagagagtagagggagatgatagggagagagagagtagagggagatgatagggagagagagagtagagggagatgatagggagagagagagtagagggagatgagagggggagagagagtagaggaagatgatagggagagagagagtagagggagatgatagggagagagagagtagagggagatgatagggagagagagagtagagggagatgatagggagagagagagtagagggagatgatagggagagagagagtagagggagatgatagggagagagagagtagagggagatgagagggggagagagagtagaggaagatgagagggagagagagagtagagggagatgatagggagagagagagtagagggaggggccccccccnnnnnnantacannnagatgctctttgacgaagagtagagggagatgagcgggggagagagagtaggactctagacctcccc

SEQ ID NO: 31897 - DNA, 1222 bp, Heterodera glycines
  unsure (1)..(1222): unsure at all n locations
ttagtcatttctcattggtgtgnacgatccaccatttcagtgtacaaatttgttaaacctctcaacattttaaatcaaaatcctaataaaaatttcgttgaatttctccgcctcttatttgtgcaaaattttcgaaaaagtaattttctatttaaaattaaaaaattcagaagcaaattcaagaattttttttatttttaaatgcattttttaccacatgaattatgattaaatttttgcgtttcgaattcattttggaattaagaaaaataaaaattgataatcatttgatcatttttagcgcactttaagcaccgcagttaggcagcgcagttccaaaatttattccatgccacagatattatgggcaggacacgccaagtacctcaaacttgggtaattaaaccaaagaaagaagtgcagtggggaagaatgacgcccaaaatgaaggaaatattcgatgctgtgcgaactctttgtgacccctctctgactctgccaatgcagcagttgaccatttttaccactatttttctctcactcatcgtctgctcgtctctcctttattataagctattttcctaagccaacgcccttttctccctcttttctgttagtcatttctcattggtgttgacgatccaacattcagtgtacaaatttgttaaacctctcaacattttaaatcaaaatcctaataaaaatttagttgaatttctccgcctcttatttgtgcaaaattttcgaaaaagtaattttctatttaaaattaaaaaattcagaagcaaattcaagaattttttttatttttaaatgcattttttaccacatgaattatgattaaatttttgcgtttcgaattcattttggaattaagaaaaataaaaattgataatcatttgatcatttttagcgcactttaagcaccgccgttaggcagcgcagttccaaaatttattccatgccacagatattatgggcaggacacgccaagtacctcaaacttgggtaattaaaccgaagaaagaagtgcagtggggaagaatgacgcccaaaatgaaggaaatattcgatgctgtgcgaactctttgtgacccctctctgactctgccaatgcagcagttgaccatttttaccactatttttctctcactcatcgtctgctcgtctctcctttatttatagctatnttcctaagccaacgccccttttctccctcttt

SEQ ID NO: 31898 - DNA, 1647 bp, Heterodera glycines
  unsure (1)..(1647): unsure at all n locations
tttttatcgatcattttttgcttgttttttttgtttatggactgactgtctaacctcgattttataaaagcgaattggtcaaaaggaattaattttactgtcgcccatttttgaattttttgatcaaagcaaactcaggaattttgacacaaatttaaaagggttntaaaatatacgattgtctattgtgtatacagtaagatttttaatgatattccaaaccacccatttgggttatacagtattaatagttgttccctcctaaatatactgtttgccagcagtgtactgtattctcttccactgatcatgatcacatttttcgcctttcagcgatgtggccacacttttggccgacattcaacgagtttctgcacatgatgtgctcagccaaccgctgggcactgatgttaatgcgctgagggcacaacaggaagtgctcaaggcaattcaaatccggcaattttcgtgccaataaatttttctttaattttaagatgctgaaaaacgaagaaatgtccgagctggcggaccgcaaagagaggacagaatgggaatgtaaggagctgatcaaaggagtcggccccgggatcagcacggacaaattggtgggaatattttacattttggaattttaaacagagtcgggactggtgaatctcggttatggataggtaaatcgatcaattcgggaaattcatgtaccatatatggcacatttatggccaagtatatatgtcaggaataaaaaatggcgataaaatggtgacaaatcgggccgaagcgaggccattaaattatgcgcaaaattttatgggccttccaatcgaaaacttttttttaacgcccaccatttttgatacccgcataaaattaaattttgtttttggatggaatcgtcatacaaaattttgcgcttcttgcgaagaaaattgttcatccgatcaataaaatatgacttggtcgcggcctccaaattccataataaaaatactactgtgagttgcgcctgaggtccgactgagtgagtaccgcacggtttagtcccagaaaatggtccattttttcttttatttaattaaacgatttcacttataaaattatatcattacatgtccccattctcccaaaggtttttttggaaaaagcgccgtaaaaaagtgatgatgaaaagtaaaaaaaaaaaagtctccgcccccggggggaggtacccccccccaagccgaaatcctgggagcgtccctgggaattccgaccctaatacggcacttggaagtcggaattccgttcatccatggaatacagacgccagtcctgggtatgccaatgattgtcagagaggatgagggcgaatttgctaatgtcaaaatgtcccttatatccatccacacaaaatgtttatcttgagtttttggattaaatacccgatacttttttgagaagaggctcttgaaatcaaggctcgagagttttgttgggtcgatgatacccaagaaaatcaaagactcttacagaccagtgatgaaggagatatctattttttcttattattgactttttccctaacttgcagctcaaaattcgtaacttgtttgttgtatgcatgtgtatgtttactcttttgatcactcctcgtacggcaggtta

SEQ ID NO: 31899 - DNA, 943 bp, Heterodera glycines
gttttgattagagttgagcgggaccgggaaatttgacaaaaaccgggaccgggacttaccgggaccagaaaagtcgggaccgggaccaagtttttcgaccgggaccgggaccgcgaaaaaaccgggaccgggaccaaccgggacttttcccaagtgaaaattttttttgaaaaaaattgaaaatttaagtgtactttgttacgaaaattgccaatattcaaaaatgtacccataaaattttgtatttacgttttgggggacgagttcgaggaaaatttttaaaaattttgttatcagggggggttcttggaattttatgagtcccaaaattctgtattttttaaaataaattaacaatcttttaaattttttgcttttagatcgctgtttttgtggcaatgttttttcaaaaaaactttttggaacattgtgggggggggggggggggtccggcggtgccgataggcgccgccggaaaaattttgaaattttgagcgagatttgttaacagaaattgtcaaaaaatgaccaaatatttggttaatttatgggtttttaggctattaaaaatgaaaaaaataataattttaaattaaaatattttttattaattaaattcaattaaaataatggtaaagaaaatataaaaaaattttctgttccatcagggaattgaaccgaagagacaaataatgaaagtaaaaagagttagccacttgaccacttatgcatatgaacatatgctataatgataataaataatttaatttatttttatcaaaaatttctgatcctcaccaattcccttctcttttctcacccagacccccattcttaccagtgcttatttggtcccgccgggaccgggatttctgtttttccaaaaatcgggaccgggacctgaaaaacccgggatttcccgccccggtcccgctcaactcta

SEQ ID NO: 31900 - DNA, 1277 bp, Heterodera glycines
  unsure (1)..(1277): unsure at all n locations
aaaaaatttttccaaaatgctgattttgaccncaaatgatgaatgatttgttgtttgaaaaatgattattttgaaaattttcatctgacaaccttggtntaaagcttctatgatggagcttccatatccacatttttccatattccactatttatgttcatacttccatatttgtccatatttttgaatttttacaaaagtctctattagaacgacccccatcagctattggtctttttgaaccttaaacacggaaaaattttcaaaatcatttttttagtgtagtatacataaagttctaaaaataatccataaaaaggcgaggccacgctggacaccgcccgttccatggtcgtcacgcctggcggcacttcggacaattactgctcctcggcagcggagttggagcagtacgcggaagacggcggcgatgactgtggcgatggggacaacgatggcggggacagtgttattgtgcatcgacggtgcagcagtgggctgagcactgaaattgtcaacgacgcaatggcaaatgccattcgggtaaaaaaatgtttggtgttttttttaactattttctgttctatctactataccatgttttgggggttaccatatgaaattttatgggagcaggacaaaacgtcgccggccgaaacatcgccgggacaaaacgtcgcctgaaagtttttatagagtttgtgccatatcacattttgaatttgcaatgccaattttttcgggctctttgtactataaacatattttgggttggctcatgtcattttttaatgatttttcgtgcaaatttgtgggaatatccaatgccatatttttctggttttggccatgctatttttttcttgctcactttgccatgcgaaatttttgtttacaaatgccatattttgcgtactccttaagaatgtttcgcgcgccagcaaagcttcggctacaacagcagaaggacaacaaccggcgactggagatgaacagccgaaaatgcggcacgggcgcgaatttcaattggaattggacaaacgcgtgtcagcgcatcgggtgaaacattttgccaaaaaatcaggcattttggcgtaaattcaaatccatttacaacatttgaaatctttaaaaaaaacctgcttctgcgactagaaaaaatttattaataaaattaagaacgaataataattagtaaaaattaaaaaaaatagtaaattaataattaaattaaaaataagaatttcactaatatggacgatatcactgacacgttt

SEQ ID NO: 31901 - DNA, 982 bp, Heterodera glycines
caataactatttcctagtcctcaccaactgttactacttttttggtgcaaaaaaatgtcgcggtcaaattgcgaaaatttgaccaattaccatttaattactccccccccccctccaaaaatgcaaatttaattccggaaagtgctcattttgagtccccttttcagtgtatgccctccgtgtcccaggaaattgtgcagcgctataagcagtggaaggacgaatttggctcgcaataaaattggctgactgtgtacattttcagtgggctttataggacgacagcggaataattcattttctggccaatgattcctttttcccttcccccgactcttttccctcccattaacacttttcattccatcccaaatttgcatggcaaattcccttaatcattcactcacccagggacggtcccaggattttggcttggggggggcacctccccccgggcgacgaccttttttttttttttttgcttttcacacccgttttttatatggcgcggtttttccaaaaaaaaattttgggggacagggggtccggcgggggcatataggcgacttctcgaaaatctttgaaaaattataagattttagtttatggattataattaagaaatgatcacactactagattatgaacgatattagcatatattagttcaataatagttgacgtctagattgatgacgatacattacagtgttataaacatttccgctgatcagtccccggctctgatcactttttgctgattaattttatttgtgaccaattttggaccttatttgatagtgaactatgatatctcttttttaaatttaatttagaagttaaaaattgacacctcatcactgtcggtttcaacaagtaacaaatctgttaaaaattttaaataataatgaaaattatgggcaaaacactcaccaaatggcacagctgcaatcatctgaaaatggcaaaattagtgcctttt

SEQ ID NO: 31902 - DNA, 1667 bp, Heterodera glycines
aaattaaaatcaatttaaataaaaatatcgcatttaaattaaatttatttaaaacaatatcgtttttaaattaattatttgttcatttccaaattctcatattcctaaactatgaggatcgcttagcggccaatagatgctttttgcacgccccaaattatatctcccactagagccagcgttgaaagcgcccccggcgctttcacagggcccgcagggccctggttcaatttaatttaaaaatgcgttttttatttaaacatattttttatttttaaggtattgccagaagaagtttaacatgctgtatgtttaaaagaacaatttatattttctcagttttataggaaattgaacaatttgtaaattcaaccccccgccaaaaaattttttttgttgctaaatttattaaaattagaggcagtgaatcggtttcaattctcggtaaaacacttcgcacatcgttactataaaaaaaaacatgaaatcggagaaaaatgatgtggggcatagggggagtcagagtattttatttgttgcgctagtaaaatttcttatttgggtcggtggtcatatatgacaccaaaatctatgcattttaaatcaaatgattgattttcagcagaagcagccaagaaaacgcagcagtcccgcttcattgtcctaaagttctctcctaccgctgttcctggttcagtttcagcaccttgtcgtcctctgcaggtattttttccataaccatttaaaaactgcgctaaacgaggatgaaacccaactcgtaataggcaaactcatgctaaccctactcatattattttttgacaaaaaaagataatttttgtcaaaatcgaccaaattaaacattcttggtatcatttgatagacattaaagttctctctacctgcaaaatacaagaaacttttattggtttacaagtaaaatatgagcagagattttataaactcaaataatttcaaacataaattttgcactagagaatatttttataaacttgttagggatttacatggatcttattgtgagaatgcggggccgacaatttgcgacagggacggaggaagggacgacccgtgtgtgcacggcacttgccgagttggcacgacggtggacgactttgtgtgcgattgtcagtacggatacacaggtgggagaggcgaaataaaattcaaaatattttttaaaaattgtgcaaaatgccataatttgcatttttaaaatgtctttcccttctctctttgccccaccattcattaatcattcaatgagttaggggtgtaccgtaatctctttttttgcccactgttgtggcattcattcgcgcactttcacatttgcacagcggggcgaaatggcgaaagttatttatgaggggggagaaaaaagggaaaaaataaatgggcagagcgatgagaggagaaaactgtggccaatgggcgagcgaaatgcgattcattccaataaaatgtgagggaatttctgatttttggaaaaattatgtttaaataataattatttttttctggatttttggaacattatctgtttaaatttggataactttcatcagagaatcgtttttttggcatttcacagtgatcagacagacttttcgttagaagcacccccaccatgtccctctccccct

SEQ ID NO: 31903 - DNA, 1530 bp, Heterodera glycines
ctctctctctcactctctctctatcactctctctctccctctctctctctctctccctctctctctctccctctctctctccctccaatctccaatcaatccgtcttctgatcagtcaatcactttgatctcctctatctctctctccctctgatcaggtcaaatccactcgtgatctgttccgcgtccgttcttctgatttattcgaattctgggccgattcttttgtgctgcgacagcgtgtctctctgctgccaaatgtgtgcctttctgatcacttctcttcacttatagactttgaacggcgaattcctcaaattccaaaaatggaaaaagtgaaaagcgtccgtttggagggcgatgtttggctgggcaaaagcataacgatgagggtatttaatagttaattgacaattattgatctcacatttgcaaaccgaccaatatataacggattaaattggtgcgttgttaatgaaaagttttttaagttaaacaaaatccgtccccatttagagaatttaaaataatgaaatttattcccatggtttggcattttcccatttttgccaccccattcgcattattaaatttcattcgcgtcacaatgccatttccgctttttggttttctttgtttttatttgttcacttattcaataattggccccagggcatcgttgaggtacgcgccgactcaaaagttcgagttgaagacaattcgattattggcctgattgagcatgcggaagaaggcgacgacggcgatggcaaccaatgaggaggaagaaaataggaggaggaggaaagggaaggaaaggaagaaagagtgacaaaagggagacggaagaggagaggagaaagaaaagagtgaaagggaggaaagaggaaggatgaggaagaggaaaagaggtggaggaggaggatgaagagaggaggaaagaggaggaggataaagggaggaaaggaagaaagtgagagaaaagggagacggaagaggagaggagaaagaaaagagggaaagggaggaaagaggaaggatgaggaagaggaaaagaggtggaggaggaggatgaagagaggagcaaagaggagtaggataaagggaggaaaggaagaaagtgagagaaaagggagacggaagaggagaggagaaagaaaagagggaaagggaggaaagaggaaggatgaggaagaggaaaagaggtggaggaggaggatgaagagaggagcaaagaggagtaggataaagggaggaaaggaagaaagtgagagaaaagggagacggaagaggagaggagaaagaaaagagggaaagggaggaaagaggaaggatgaggaagaggaaaagaggtggaggaggaggatgaagagaggaggaaagaggaggaggataaagggaggaaaggaagaaagtgagagaaaagggagacggaagaggagaggagaaagaaaagagggaaagggaggaaagaggaaggatgaggaagaggaaaagaggtggaggaggaggatgaagagaggaggaaag

SEQ ID NO: 31904 - DNA, 1729 bp, Heterodera glycines
gccaaaaatccaagcagtgattgaagtgccttctttgacgttggaattggcaattccataatcggacgtactttgtttacatccatttttattccttcagtagtgagaatgtgcccaagaaacggtagttcgtttgccgaaaaatggcacttgctgatttttaattttagtcctgcttcccgaattcgttcgaacactatttttaagtgctcttgatgcttttcccacgactcggaggcaattaagatatcatcaatatagatgaagacaaaatcgttgattaatccttcgaaaagctgtgacataaatcgttgaaaagttgcaacggcgttgcaaagtccaaacggcaaaacgacgaattcatgaagcccaaattctgtggcaaaagccgttttgtcgatcgattccggtgacattttaatttgccaataaccggaaataaagtcgagggtcgaaaaaattttcttgcctcccagtgccaataatatgttgtcaatattcggcaaaggatatgcatcctttacagtgactgaattcagtcccctgtagtccacacaaaaacggagtgtgccatcctttttcggcacaatcacaattggtgaagcccatggagacgaagaaggtcggatgatgccacgtccaagatagttttggatcatttccgcaaccttttccctgtaggcataggggacgggtcgcatccttgaacgtatcggtgccgaatttcccgtggcaatttgatggctcaccaagtccgtttggctcaattcctcatcggaaaaggcgaaaatttgaacaaaatcattcaacaacgccattagttcggcttcgcttcattcggaatgtgtccaactttcagcgacatttcatctccaaattggatatcgttttcaccttttccaattagaaagtcttttgtcggcaaaaacgaattgccagaatcataagacgattccacctcttcaactcttccgatcactgtgttcccgtcaattttctccacatttgaactcaaatttgaaatttggccgacaattttcccattttcaactttcccaattgactgatcaattttgactgcttttttagcaggcgctggacatattagcacgtcctggccattccatttttcatcaacctccatttcgacgaatttgctagtccttggttagaatttcgtgttgaaaataatgcggacggtgtcttcgctttttgtcgctttttcgaaatggatcatttcattattgggctcatcgtaaagggagaacccgagtgctgacaatgaattcgttccgaaaagcatgtcgaatccgaacggtgcactggttacgtaaaaatgtatggccacttctttacagcctttacggagaattggcaatgtgagtgtgccaaaacatcggagttccttcccattgacgtcggcaattcggtcatttgtgcgtgcaaaatttgttttttgcaaattcaatcctttttctctgatcagcatatacagaaatgaggcaccaatcaacgaaatttgcgctccaccatcaatcatcgcttccgtttttgcaccaaatgtttcaattttgatgaccaaaatttttccaactctgtcggaactcatttctcgctgattgtttccgtctttcctttctttgaactcgttggcgaaaaattcagcgatttctgatgaaagctgaacaccacggcaaaaagcttccggtgttgcttcttcttgcacaac

SEQ ID NO: 31905 - DNA, 1308 bp, Heterodera glycines
ttgctccccataattgtttgagtaccccaaacggacacttgaaaaaatcgatttttttgttttcggggcagtcccccccgatacgatgcgcccagatttatgggagaccgaatctttccggaatagcttccctatagcctgtactttaattctgcgttggatttttgctccccataattgtttgagtaccccaaacggacacttgaaaaaatcgatttttttgttttcggggcagtccccccgaaccgatgcgcccagatttatggggagaccgaatccttcgggaatagcttccctatagcctgtactttaattctgcgttggatttttgctccccataattgtttgagtaccccaaacggacacttgaaaaaatcgatttttttgttttcggggcagtccccccgaaccgatgcgcccagatttatggggagaccgaatccttcgggaatagcttccctatagcctgtactttaattctgcgttggatttttgctccccataattgtttgagtaccccaaacggacacttgaaaaaatcgatttttttgttttcggggcagtccccccgaaccgatgcgcccagatttatggggagaccgaatccttcgggaatagcttccctatagcctgtactttaattctgcgttggatttttgctccccataattgtttgagtaccccaaacggacacttgaaaaaatcgatttttttgttttcggggcagtccccccgaaccgatgcgcccagatttatggggagaccgaatccttcgggaatagcttccctatagcctgtactttaattctgcgttggatttttgctccccataaatgtttgagtaccccaaacggacacttgaaaaaatcgatttttttgtttcataaatatttttttcagaaagtgctctaaagcgcaccaaattttatttacaacttaatttagcactctgatgctttagtatcaaaaaggaagatggagaaaaaattttttaaaaaatttttccttatattttggttatatcgttttgcttttggtggggtgcttggaacagtggaatcatgcgcacccgtccgatctggcaagttaagcaacgattgctgactagccaaaaggttcggtgccgtgatgaaacgaaccagcactgcttaccccgcggcacccggcacggtcccccgaaggaatggatttaattaaattctctccttcggggatttttttccattaggtcgtccgttagcgttcgattgctctagtcaatttttaaaaatttttgttgaaatatttgtcgtgctctgaagggcgggg

SEQ ID NO: 31906 - DNA, 1680 bp, Heterodera glycines
tcgtttcctccgtgcggatttcgtccgccgtcgcctttccgtgcctttccaccaatgccatgctcaacacacacgcgcactgcaccgggttgagcactttctgctcagttccttccgaaaaaacaattctttccaaaagagtgtcgtcgccgctctcacaattcttgggaagttcactcggcgatggcgccaaagaaccgtcgccattttgagaggaggaaagagtcacctgaaagagggaagttagaaaatgggtgacagtctaaacacacacactaattcaaaatgaaacaacaaaaaaaggaattttaaaaaaatgcaaataaaagtcacaaattatcagaaattacacctgtaaaaacaattgtgggacttctttttgttgaaagcgtgtgcgacgacctaaaaaattgaattataaattgtgaaatagacaaatggaaatttaatttcttgcattgcttttacccaatgctccgccaaattcgactttttcaatgccggacaattctgaagcttcacggagcgcttctttagctgcggaatgttcgaaataacgcaaatgatgccacactttttccaaggcgaattcggcacggcggtcatctgggacggaccaatgggaaaagtggcgattgatggaaagaagctgaaattgccaaatgaaatggtgttttaagaatgggtgaaatgaccgtcgcttcggcgagtgttttcagttggctttgcctttccaagagaatggcggaccaaacggagacaagtcgaaagcgccaaaagtcgagctcaatcagtcgctggtcattctcgtcaaagtgacaccaaatcgaagaaggcccttttggagagccaaagcttttcaatggatcgaaaaagagagaaaatcaaaaagaaaagtcaaacggagaaaggcaaaccgaacggcgaagaaagggacgttcaaaccgaaggaaagggcggacgaagcgaattgggaggaaacgcacgacaggggaacatccgaagaagtgccattctcttccgattctgaaaaaggaaatgacaaattgagagggataggcactgattgtgaacccgtccccgatgatcccgccaaacctggcaaaagaccagcaaaatttgcaccgataaaggaaacaaattgtcctacggcccattcaaacagttggccattttcagctttgctcctaaggaattggtcaacaaccaattcgatttcatcagaattattggtcatcgttaacgatgaaaattagccaatgacaaaacaatgagaaaataataatggtgaattcgtttgactgatcaatttcagctgagttttggataataacaatttatacttaaatgaaattaattaaactttcgaagagtaataaatccaaaaacaaacagctgcggaaaagagcgaaagaaattgggcggatttttgtgctgcctttaaatatataacaaaaagaagacgcgttttattccattttggaattttatagagtctaaagtttgatgactaacaaaaaggtaaagaacccaaaaacagagaatgaatggtaaaaaaaacaaggaaagaaagttgtgctgtataaattgaagatttccggggaaatatgctcggaataacaaatattaaaaagagaaaaaaatgcgcagacaaaagaatacaataaaaggaaaagacga

SEQ ID NO: 31907 - DNA, 1314 bp, Heterodera glycines
  unsure (1)..(1314): unsure at all n locations
tttcgctgtcatatttttntgttnaaattattacactctggggcacattttcncacctgacnacatagagaacgggcgtattgctggccgatgcgacgagagtcagctgaacaagcccagcggcaaaactgatgctgttctccggcgacagcttcaaaagtggcacataaaaggtgctcagtccgttcagagtccagccgaacatgacgaacacaatgatgacagtgagggacttgagaatgtgcatgttgctggtcgaagtgacttagccattaaggaatgaagcaattaataatcaattatttaattagttttatttaagaataaatattatttaaacaattaacaataattatttaaacaattaattaataaataaattattatttattagattgtcgtttgcccttcttacttttgacttttttgatcgccctctggccatttggacccaaattaggcaataaaaacacactgtgcagatttccatggagacgttgacacgaaagctgtacagcttggagaatgtcgaccgattgtctcccaagaagcacaacaccaatctgatggcagcagaaaggaattataaatcaatcaatgaattgcaatttatgaggccatttaccaatcaattaccaataaatctagtcaatttaataaaatggccaacaaaatttggatgatttcttaaattattggagagcaattaaaactttaaatgcaacttgttttgaaattcgttcaaaatgccaatgtagacgatggagttgttgatgagtccgtaggtaaagctgatcagattcagcacaattttgtaccgtttgacattgcgctcaatttttgacctataagcacacaattttttttttgatcaattgttttttttagagttgctcggtaccggtaccggtaccggtactggccggtaattaccggtttttttggtaccggtatcggtaccggttttttcaaaaatgaaagtaccgttaccggtttgtctagtaccggtaccgccggtaaaaatttgcactggtaagaatgggggtctggtcgagaaaaaaataggaaattggtgaagaaggagaaatttttgagaaaaaaataaattttatttcgtttagcaaccatgcatatgtggtgtaatggttaaaccttttgcctttcattatttttcgcttgggttcaattccccactgggatagaatattcttcatattttctttaccattattttaattgaaattttaattaaaaaaaatattccaactttttttctttcattttaagcatcctaaaaccccaaaaattaatcaa

SEQ ID NO: 31908 - DNA, 950 bp, Heterodera glycines
tgtttgcctctcttcccataaaagtgcaactaatactcttaattaccggaacattcaaatcatattcaaatttattacgcataaatttttttttaccgaaaattatggaatttttaattttgttttcattactcaattaatttgtccatttggttttaaagaggttgcgaagtaaatcatttttgcttttttcttatttcttcaacaaacagttgtgaaccgcgcatccaacatgaacatccttcgacataaaaagtggcacgtacggacgaaagtgcgtttttggtgtttttttttttactcgagatttcctggtgatggttgatgccacggtctcgaaaacctagcgaatggataccgcgaggtcaaacggcactcaaattcatccaaatttggtccacaattagcggtcgtctctcggcattttgccaactaatttcttcccttaattgtttattcgagagtctcgacccgataaaatggtttttgattcgtaggtcaaaatgatcattttttggttgttaattgatctgcctttaacctgtcaattgatcacaggagaatgtggcacgcgtgcgacgtgacgaggccaaagcggcggaggaggaatgcgcgcgggcggagcgtgccgcacttgcggaacacgaggtgtgccgcacttttttccctattttttaaatgatggtatggcacagtgccgactcaccagaccgttcttttcaaggacgacaagccgggattttaaaaaaatggtcgaaaacaagacaagaagaaaatgggattttttcatgaatttattcccgagtcatgaaaatcattctgacccaaaaaatttgcggaaatgggaatgaggccttaaaaataccttaaaattcgacaaaccaaaaccgtgaaaatcggaatttccatcaaaaatttccggtcaacattcgtaatttttgttacatcca

SEQ ID NO: 31909 - DNA, 1292 bp, Heterodera glycines
  unsure (1)..(1292): unsure at all n locations
tttttttactttaagaaaaaccctcaaatttttattttttgccaaaaatgttaaattttgatcataaacttggattttctttaccctgacctgataattagtgctaaganaattaactntaaaaatagtccataaattatgcaaaaaaaaaaattcaaaatntaagatgcacatttttttgttgcgcataaatttcataaaaactaaattttcatgaaacttagaagtttttaaatgtattcttttttaacatttttttttgtccaatttttgtttttctctttttttcaaaaaagtccatttaagggagcgctaaaatttaatcaaaatccttgaattggtagattttttttgccaaaatctaatttaaaaaatttctttttttttgccgcggcacattattttgtaaaaattggtagcttttccggcaattttgtccgatcactgatggatcatgctttttgctggtttgatcactttttccctcaaaagtgttctccgaatttgatcagatttctcctctctgatcaatcacaactcactctttgtgcgtttttcagttgggcgacctccgttcggctgtccgtgccgcgtacactcatctgatggccaaccccacggacgaggacacattggccaacctccgcttttacatgggccaacccaacttccacaatggcatgttggaagatgtgtggcaaagtgagcacgaggtaattaacatggcatgccaatcaaatcccggagagagtttttcagagggatttcatcagaatttttttctactttttacggggaacaattacaggaggagggattgatttcgtaggaaacagatcaaaatcgatttacgaggcccaaaattttttggaagaaattttaatttataaaatagtaaaaaattttaattttataaataaaccatttggcagttatattaaaaataattaaaaaaagatttcttttcaaaattttataaatgatttcccaaaaaaattcaagaacgtgaagtttgttttttaaaaagcacattgattccttttttgaattttttttgagcatttaggcgccttagttcttttaattanagttgtcccccgaaatacatcnaattgggatttttaaaagcgtattgtaaacacactgttttagtgatatactgtaatgggtctttactatacgtactttcattaccattttgctttgttataaaagcgcattaaaaagtacagtatcactgacgcacttttttgctgggtgtattttctgattactatttttaaatttctgat

SEQ ID NO: 31910 - DNA, 1191 bp, Heterodera glycines
  unsure (1)..(1191): unsure at all n locations
cggaagaggtccaatcggaaggagaggatctggcaaatgggacagacaaaacgtctagagtcagtgggacggaagcgaatggggtaagagggaggggcaggggaagaggagggggcagggggaggggagggaagannncagcagtggaaaggtagggaactcggtgacagaaagcaacggaagacgggactggcatttacttatcagagtgatgctaggcaattaataacagttaattgtctgtctaattgcttttcagcagtcaaacggtgtcacaaattgcagcaccttcgaaacaacgactgagagaaaagtacactttaatgttaaaacgatagttgaatatttctgctcgtccgctatccctaactgattcagtgcctttggctctgtttcttcttatggcgggtacggagtgccgtcgccaattggcacgggcgaagccgaagagcaagcgcaagcggacggagtcaccgcattcggaccgggatttttatctaatcaattgggcgaaggaccactccgagttgggcgcgacccaccgggtgagaagagagctagtaagaagcaatttgggttagcactggactgatcagggagaacggaatcaccggacgaatcgaatccgacggagccatcggtcggtggactgaagggacagccgcaggcggcgatgagtgccgagttcgaaacggaggacgagctaatcagcaaaacgatagtggacaacatgccaacgcctgggaggacattcaccgacggcgcaccaatggcagagaatgggaaaatgaaagacacggaaagagagacagcgaaaacaacggagagcggacagaagaaaggtcagcagagaaaccgatcaaagccaagcaaaaactgatcaactgacagtagattattcggattacgagacggacgtgacagtgccgcccaatctgacggatttgctggccaaccttcagccggcggatataagtgcgcgaaacctgcaaaggatgttccgagactcagtgaccgaccgaaggacacttttgcatggctttgatctgctgattagaaaagtgatcagaacgaaaaaagaataattatcgaaacaaagttgcagataaagaaagaagagggagagaaggaaaaacaaaaggcccaaagaaaatggggcgaagggacaaagagaacggaggagaggcgaca

SEQ ID NO: 31911 - DNA, 1759 bp, Heterodera glycines
ttaccgaaacttcatcgaacctggttctttctattctctttgcaatcgccccagattttttttacggcttaactaggccctattaagcttatttccagaaaatctcgcatgaattctcatttttaaattttttatagatctttaaatgtttgcattttttttggcttaccacaacttcatcgaacctggtactttctattctttttcaaatcgccccaaattttttttacagccacgaggccgcgaagcggccgagtgaggaccttgggcgcaggaaaattattaaggaggagggttcattatttatttatttttgcaaaattaattcataaatttttttcagaaactgttctgaaacgcaccaaaatttatttacgagtcgaataaggcactctgactcttatattatcaaaaagggagatgaataaatattttaaaaatttctaattcctttttaaacaggccgaaaaagtttaggcttaactttttcagcgggtttaaaaaatctagaaaaaatagtaagcatttgtagtgctccgatacgtatctctgcaaaatttggtgagccgctgatcaattacaaattatttatggacgatcaaattttttgaaattttttaagtgcaaaagtggtggatgtctgcaaaaaattttcagccgggtttaataaatctaggaaaattaataagcttctgtagtgttccgatacgtatctcagcaaaatttggagagcccctgatcaattactaattattttttgaatttttttatgtgcaaatgtggtgggtgtctgcaaaaaattttcaccgggtttaataaatctaggaaaattagtaagcttttgtagtgttccgatacgtatctctgcaaaagttggagagcccctgatcaattacaaattatttatggacgatcaaattttttgaaatttttaagtgcaaaagtggtgggtgtctgcaaaaaattttcaccgggtttaataaatctaggaaaattagtgcttttgtagtgttccgatacgtatctctgcaaaatttggtgagcccctgatcaattacaaattatttatggacgatcaaattttttgaaatttttttaagtgaaaaagtgttgggtgtctgcaaaaaattttcaccgggtttaaaaaatctaggaaaattagtaagcatttgtagtgttccgatacgtatccctgcaaaatttggtgagccgctgatcaattacaaattatttatggacgatcaaatttttagaaatttttatttatttttgcaaaattaattcataaatttttttcagaaactgctctgaaacgcaccaaaatttatttacaagtcgaataaggcactctgactcttatattatcaaaaagggagatgaataaatatttaaaaaatttctaattcctatttaaacaggccgaaaaagtttaggcttaactttttcagcgggtttaaaaaatctagaaaaattagtaaaatctaggaaaattagtaagcttttgtagtgttccgatacgtatctctgcaaaatttggtgagcccctgatcaattacaaattatttatggacgatcaaattttttgaaatttttttaagtgaaaaagtgttgggtgtctgcaaaaaattttcaccgggtttaaaaaatctaggaaaattagtaagcatttgtagtgttccgatacgtatctctgcaaaatttggtgagccgctgatcaattacaaattatttatggacgatcaaatttttagaaattttt

SEQ ID NO: 31912 - DNA, 1318 bp, Heterodera glycines
tgcaggtccaaaaatctgagaattcactacctgactgtccatttttaatgacttcctcacatttttataaaatttccataaataaaatgatttttcatcatacattaacaaggggtgcgccggcgcaccccccccccccccccccccccccaattgctgccatatgggatcgttagccgaggaatttacgttttatttaggatgttgaataaaattaaataaaatacaactcccaacagcaaaccagtgataaagtgcttacaacaacaattgatggtaaataattttagaaattttagagggaatgcaaaatttacttccagcagaagctgatgatggacgtgacaacaatccgatcagagacatacgccgtagagttcatttcagcgatcgctcccaaagggttctggacgactcggaccatttgctgaaatccatccgaactcgccgagcggcacctctcgccacttccatgtccatgtccacgctacccacctcgttggagcgcaacggtgatcaaagtctgcaggaccatgcgcggaaaacactgatcagagcgcagcgatcggtcagccccgaagagccactgctgagcgcatcaacgtaagcaatttacagcattaaaatataaaataaaaggtgaaaaaaacaaatgaaaagtaagcgaaataatgaaaaatataattaatctattaaagtattaccggaaaccggggctaaaatcccgagtttgtaggaatcacggtcctgggtatcattttagggcatgattcgggatttgtctccaaaaatgaaaattccagcaaaattttctgaaaatgacgaactaatagagtaccaaataattaatctcttctagtattttccaaagcattgaaaatgccgataaatgtcactgaaaaaaattctaaaactggtttgaattgagaaataacttttgggtgcggtggtgaaaagccggggccgttgtcccgagaaaattgcggcgagatccccgaccccgcccgggctattggttttagaaggcggttatatagcagtaaattttatctttcattaatttttagtagattattttttactcaggagccgttatctgcagcacaccccgaaatttccgagaatcgattttgacgattggattgaggaggaaacgcaagcgaaaaagccggcatggaaagtgctccaagagaatgtcaaatcgtcctacaacaaagtgcgaaatgttgttgctcataaaactatttcattaattttatgaaaaaataatattaaatttttaatttaaatgtccaatttcgttttgttttaagccccg

SEQ ID NO: 31913 - DNA, 1007 bp, Heterodera glycines
agaaagtggaagaggaacaggaagtggaagagaaagtggaagaggaacagaaagtggaagaggaacaggaagtggaagaggaacataaagtggaagaggaacaggaagtggaagagaaagaggaagaggaacagaggaagaggaacagaaagtggaagaggaacagaaagtggaagagaaagtggaagaggaacagaaagtggatgagaaagtgaaagtggaagagacagtggtagagaaagtggaaaaggaacagaaagtggaagagaaagtggaaaaggaatagaaagtggaagagaaagtggaaaaggaatagaaagttgaagagaaaatggaaaaggaacagaaagtttaagagaaagtggaaaaggaacagaaagtggaagagaaagtggaaaaggaacagaaagtggaagagaaagtggaaaaggaatagaaagtttaagagaaagtggaaaaggaatagaaagtttaagagaaagtggaaaaggaacaggaagtggaagagaaagtggaagaggaatagaaagtttaagagaaagtggaagaggaacaggaagtggaagagaaagtggaaaaggaatagaaagtttaagagaaagtggaaaaggaatagaaagtttaagagaaagtggaaaaggaacaggaagtggaagagaaagtggaaaaggaatagaaagtttaagagaaagtggaaaaggaatagaaagtttaagagaaagtggaaaaggaacaggaagtggaagagaaagtggaaaaggaatagaaagtttaagagaaagtggaaaaggaatagaaagtttaagagaaagtggaaaaggaatagaaagtttaagagaaagtggaaaaggaacaggaagtggaagagaaagtggaataggaatagaaagctcaagagaaagtggaaaaggatagaaagtttaagagaaagtggaaatgaacaggtagtggaagagtaagtggaaatgtatagaaagtttaagagaaagtgaaaaaggaatagaaag

SEQ ID NO: 31914 - DNA, 1022 bp, Heterodera glycines
ttttgtcttctgttgtagcgtgaataaagcactaatagtgtgttgaaaacgcacgaaaaatagttcttgagaaaaaatggctatctctgaaagtcactattaaatccctaccgggaattggacaccaacttttgtcttctattgtagcggtgaataaagcactaatagtgtgtttgaaaacgcacgaaaaatagttctagacaaaaaatggctatctctgaaagtcactattaaatcactaccgggaattggacaccaacttttgtcttctgttgtagcgctgaataaagcactaatagtgtgtttgaaaacgcacgaaaaatagttattgacaaaaaatggctatctctgaaagtcactattaaatccctaccgggaattggacaccaacttttgtcttctattgtagcggtgaataaagcactaatagtgtgtttgaaaacgcacgaaaaatagttctagacaaaaaatggctatctctgaaagtcactattaaatccctaccgggaattggacaccaacttttgtcttctgttgtagcgtgaataaagcactaatagtgtgtttgaaaacgcacgaaaaatagttattgacaaaaaatggctatctctgaaagtcactattaaatccctaccgggaattggacaccaacttttgtcttctattgtagcggtgaataaagcactaatagtgtgtttgaaaacgcacgaaaaatagttattgacaaaaaatggctatctctgaaagtcactattaaatccctaccgggaattggacaccaacttttgtcttctgttgtagcgctgaataaagcactaatagtgtgtttgaaaacgcacgaaaaatagttattgacaaaaaatggctatctctgaaagtcactattaaatccctaccgggaattggacaccaacttttgtcttctattgtagcggtgaataaagcactaatagtgtgtttgaaaacgcacgaaaaatagttcttgacaaaaatggctatctctgaaagtcactattaaatcc

SEQ ID NO: 31915 - DNA, 1057 bp, Heterodera glycines
tcgtcaagctccgcttgaacttcgcaaaatccgctttgtttggtttttctcggcctccaattgacttcttaaccaccaatccgctcttctattgctctccgcttcaacttttcttttcaattatgccaattcgttgccgatgtttggagttgatcgttgttctcttcgataattgtctcctacaaattgttaaaaaatttaatttaatttaaaataaaaattaattgtaatatatagaaaaaatgctttaattgtcaccttctcttgattttcattatattcctgttcgtattttgcatagataattttgtgctggtcgctaagcttttggtactttttgatgcaatcatcagaaccgcattatccggtgaatctccgccggactgcattaagtcgagaaaagcagattggattttaaagaaaaaaaacaaaatctattagaaataagtttataaaaattgtatttggctaatggagaagtgatcagagatagcttattaaaaaattgtatttggttaatgaagaagtgatcagagatcatttggctaatgatgatgtgatcagagagagccatacatttcaagtttaaaaaatggtttaaattcatgaatttaaaactttaaaagtgactcccaatgccaatgtgtttatttgcatggtttgttccatattttgtatataaatgcatagccgaatcaagaaagttgaaaatttttggaaaacctgacaccatttatggaagaaaaaattttcgtatcagtgcaaaaattcccaatcaaatttgcgggttttaaaaatttcataaatgccgaggcacataatttcatagagagtcggaaaaaaacatttatttgaaaaaagagtgaagaattaatgcttttgagcaaattaagtgggaaatgaaatgaggcagtcgaatgagacaaataaaggtcaattaaacagaaggaaaatttaaataaaaaatgaatctttttaaaagtgtataaaactcgcttcattcccaactaaacagaacaaatttggtatctaaaaaaagcttttgaaaagaaaaatc

SEQ ID NO: 31916 - DNA, 1040 bp, Heterodera glycines
  unsure (1)..(1040): unsure at all n locations
gtgcgcaaaacaaaatttgnccgtctccaatgctgaatntatttgcatttttctgcttttcaatccgtgccacctgcgcaattaaactgcccaacgaaacgccaaaaattccggcaacgcaagtgatcactcctgacaaattaagagttaattatacgccgtaaaattgaaggggaataatttgcaccaaaaattagcgcaatttgattcttttcggcaggtctcaattttgaggtgtcgttcaaatgttcgtccatcgctttggcgtgttccatggcggtgggaccccaccaaaaataaaagaagaaataaaaaagaaattaggaaattattaccatgacaaagttccggtgacaaaaaccacggcggtgtaggccaaagttgaccacacgaaggtacggctaaagcacgaaggaagcaaatgttagtccaattaatttatgtaataataattgactgtcccattattttgcataaaatggcctaattaataaattaattggctgttaatgaattaattagctgttaataaattaattggctgttaataaattaattggctgttcaattactttgcaattaaatgtccaatgtctgcgcaataacttttagtgtgagtgcgtatccgatggtaatactccttccaaatgttctcattcggtgcttctgctgatgccactgttcgccttgaacttggactgatcgttccgctgtttttaaattttttttctcttttttaaattttcctttttcaatacgtttcgtaatttgtcggcatcagttgtgccacactttgttcggattgtcccctcacctgcgatttaattaattaatattttaattgctttctttgaattgttttccatttaattaattaattaattgaccggttctttgacaaaaatcagcaaagtgattatgcagaagaagccgagcaacggagtgacgcgaattccccactgccaacagaagggacagtcgacggagccaagcgcacttttggccaacgaagtggcggaagaaccgatcacataaccaag

SEQ ID NO: 31917 - DNA, 1164 bp, Heterodera glycines
tcactgacgcattttccactgacgcattttccactgacgcattttccggtcacgcggaatagcaatgatcaacgacagccaccaaaacttgttcatccaaaatcaatgcgaaattttccgggtgtcgggtaagccttaattaggtatttaatttattcacacgaataaatattgattttaatcaccgaccgttcaacggcttcgctcagaaggaggaaaacgcatttcgtttgtccgttcgaaatggtgctaggtcgtttcgtaaattccgccactattggcgtttcgtaaatccgccaacgtgggcgtttcgtaaatccgccactatgggcgtttcgtaaatccgccagggcgtttcgtaaatccgccagggcgtttcgtaaatccgccagggcgtttcgtaaatccgccagggcgtttcgtaaatccgccagggcgtttcgtaaatccgccagggcgtttcgtaaatccgccaaaaaataataattcatttaggccaaaattttcataaaaattatatttttgaattttatctatagaacatttgtcggatgcacaaatatcagtctagacataattattagcaaatgtttgtttttcacgaaaatttaataaatatttgtcaacattattgccaacattatctcagttatgaattgtatatattaacaaataaaatcaaattagaagttaatgctttaataaaaatttttggtgttaataaagttcatggctgcattgtgcactacatacgcgcagcagttcatcatatcaaatcgaatttttcaaatttatttaatgaatttaatcaacaacaagacgtgtggaaatgggtaaaataaaattatgtttttaaaaatttgttagatacgtcgaatctttgctcttccgtttcttcgtaaagatgaagctacaaaaatgtggccgatattggtttcattcaaaaatgattttgaaggaagattaagggaggaaatggatagctttgtaaattatatgaataatcaatggataagaaaaatggagcaaggaaacttattttcttttaataaattaactagaacaagatctatgaattccgtcgaagcatggcacagtgttatcaagctggtattgtagcaaaagtgaaaaaaaaataattgtaaattacagagacgcagcaag

SEQ ID NO: 31918 - DNA, 1621 bp, Heterodera glycines
ataaagtgcattagagccgatttttcaaaaaatcgctgagaattttttgaaaaaaattttttcttagaattttcttaagaaaactttctaagatttttttcttgaaaaatttctaagttagcaaatttttttaaatttctaagttagcaaaaattttttttttatttctcggggggggggcaaccgagcgtgggggagggggggaactggtttaaaagatgacttttttggcctttcaataaacaacacctgctgacgccggatttgtggccatagcagcagctgaatttcgcacatgctgttgttggttgggcatgaaaatgttgttggccattgccgacggattggcacaagcggcagccgccgccgccgcgttaccgccgctgccgccacctatgagtgattggaatgaggaggccattgcggccaaataaaggtcggccgagttgagtgcggcagcggccgacgacaacgcgttcatgtccgcagcggaagcgctggcgccgctttttgcaatgccgccgccgccagtcgtcgcagcagcgcttggcaccatggagccaatagacggaaagccggcggccgccgcagcggcagccaacgcggcgatcgcctgctgctccaccatagcggaggaggaagcctggtgttgctgttggttgtgctgctgttgttgtgttacggatgaaagcagtgccgaagcggacaaggagttggtggtgttgctggtgccgccaccgccactagcgacagtgccaaacaatgactgctgctgaccatttttaatgctgaaaggcacaagtgttttggatacaaatggataaagttggcacaattttttgaaaagcggtggtgcgtataggcgtttttccgaaatttttaaaagtgccgacagacatcgtcacattaagaaaaattattgaaaattttttttttgtaataatacgcccgcattcgttcaacaaagacaacgataaaacacactcgaacagctcggccgggttctgctggtagagaaatgatgcgtacggatggttcatcatactgctcgctgtccctccgctggaattgcccaacccgcccagtgccattgtttgctgcagcaacatcatttgttgctcaatgcttttcatgctgtggctgtgctgctgttgctgttgttgggcagtcgaattgctgttgctgttgttggcacaactgctgctggtcgacgaagcggcggcggcggcagccgctgcggacgttgccaacgcagttgcggcagccaaattggtggccttgaaatttaaaaaaaaataataatattgtataagaaatttccgtccggtacaccccaaaacacagccgccgaaacacagccgacacataaaacgccaagaataatttttcaaaaattttttctaacttaagaaatgtttcaagaaaaaaaaatcttagaaaaaatttttcttagaaaataaaagaaacaaaatttcaaaaaattttccagcgatttttttgaaaaaacttagtaattcatcagtaaatttggaaaaaatcgctgaaatttttttttttaaattattcccggctgtgttatgtctcgactgtgtttcggcggctgtgttttgtcctgttccgc

SEQ ID NO: 31919 - DNA, 1091 bp, Heterodera glycines
aaatctgggcgcatcggttcggggggactgcccccattaaagaaaaatcgattttttcaagtgtccgtttggggtactcaaacaattatggggagcaaaaatccaacgcagaattaaagtacaggctatagggaagctattcccgaaggattcggtctccccataaatctgggcgcatcggttcggggggctgccccgaaaacaaaaaaatcgattttttcaagtgtccgtttggggtactcaaacaattattaaaaatttttagatttttattcatctccctttttgatagtgaaagcatctgagtgcctaaaataacttgtaaataaaatttggtgcgtttcagagcagtttgtgaaaaaatatttatgaattaattttgctaaaaaaataaaatagtgaagctttaaaaattaataaaaaattttaaattcagaattactggagttagcatcatagcagtgcttttccttgtctttttgatgccctcgcaaaatctggttcgcttctgatcagtttataaaaaaaaagttaagcctaaaatttttcgcaaatttaaaaaggaattaaaaatttttagattttttattcatctccctttttgatagtgaaagcatcagagagccttatttaacttttaattaacatttggtgcgtttcagagcacgttctaaaaaatatttatgaattaattttgcaaaataataaataattaatgaaaaagtcagaatttcgaaaaattttaaaaacaacaagcgttggcattttttcaggttaagttagtcctttacaatggagaaggcctgcaaaatttggagagattatatcgattttagtgcgctaggttcgatgaaactttttaaaatataagcctaaaatctttcgcaaatttaaaaaggaattaaaaatttttaaaatatttattcatctccctttttgatagaaaaagcatcagagagccttatttaacttttaattaacatttggtgcgtttcagagcactttctgaaaaaatatttatgaattaattttgctaaataataaataattaatgaaaaagtgagaatttctaaaaattttaataacaacaa

SEQ ID NO: 31920 - DNA, 1267 bp, Heterodera glycines
  unsure (1)..(1267): unsure at all n locations
tgcactancaataaattcaancctaactgaatttttttaattcaanacagaaattttccagaaaanaataaaatttatagcgttattccttgaattaccaatttttttcaaatgtttccaaagattttttcggaggatgggacgaaacgatacagtgagggagtggaaacgagctgcccccgttaacgacctgctccgaaataaaactttttcgatacaaattcagttttttttttgtcaaatacacattttttagcctggcacattccgttacgtgttcctgttttgtttggcacattttatgcacggagttggcgcaactccactgtacaccattggcgtgtcctacattgacgaaaatgtgtctattattaaaattttcaaatatctctccaaactcaaatggttatttctgaataaatggagcaaaaaattagaaaagatcaaaaaaatatattaaaaatttttaggttggaccactgctctcttcactgtacatcggcgtgttctatgcatttgcaatttttggaccagccattggattttttgcctcaagcaaattccttctctggcacaccgattttctcgtcactggccaaaaattacaaaaattgtatggaaagcgagcgcatttttctggctgcaatttttttttacaaaatttatattttatacagaatcatcgacctagacgagacagacccaaaatgggtcggcgcttggtaccttggttttctgttggcctccattcttggcttaatggctgtttttccaacactcatttttccaaaattactgccggaatcattgaaatggcacaggttggttgtcctaaaacaaatttatgattcatttatagaatttttaaggtttttcaagaaaattcattctgattactggacattccagaatatttaatattttttgttcatcttttttccccctacagaactcgtcttcaagaagagacgttggggcagaaaaaacgttcacccgaatgttgtggtattccgccgtcgtccggcaatcgaacagcaatcgtttttggcgctgggagcgccaattttgatggtacctatttcattcaatttatctccaaaatttcttctggctatggtgcctgacttcgattaaatttcaaaaaaaaatttagaaatttttatttcgctccttttccgttcacagaggatggcaatgagaaggcgccaatggtacaatttcagtcctcagcactaaagcctcgttcgggccccatttggtaccaact

SEQ ID NO: 31921 - DNA, 867 bp, Heterodera glycines
cgttttttaattttgttgataaaattcgaccgcttcgcggcctcaggacgggcgcttcgcgcccgtttttttaattttttgcgggacattcggccgcttcgcggcctcatgacgggcgcttcgcgcccgttttttttttttgtggggagcattcggccgcttcgcggcctaaggacgggcgcttcgcgcccgttttttaataaattaaaaaataataaacacggcctgggtccgaacatgccgcccacccctcagaatccccatcctggtcacccccctgtggtcacaatttccaaaatgacttttatttctataacttttttcaaaaaagtgataaaaatgccaaataaaaaagagcaaaaaattgtggattttttgagtatattatttttataaaatactttttcagaatggagttaggaatttttttctgaaaaatcgaatttttccagaaattctggaataacttatttattttggaagataggaattctaaataaatcccataaaattctcttaattttttgcttttcctgaatgcgccgtcaaaagttgcccccaaggtcgaaatttcgaacccctcccggcaaaccgtaaggagattttgtttttggaaatgagttgccttgttattctaaagtatataactagcgggtgcgtgaaccgtcggatctgggcttgagataaagcgcttcgcgctttgggagcttcgctacctagacaagctatgggttgtgaagatatttggaatttttaaaaaattatctgggacttttaggccgcttcgcggcctcgaacgggcgctttgcgcccgttttttaaattttgttgggcggatacgggcgcttcgcgcccgtttctaaattt

SEQ ID NO: 31922 - DNA, 998 bp, Heterodera glycines
  unsure (1)..(998): unsure at all n locations
tttgcacatacccatgtttttataagcttaataaaacggaaataaataatgttattattatttctaacatcagcagaagaaagcaatcatataacattcataaagaaaaaaggttttcttttagatagggttcatattttcgtgcattttttggcacattgtctaatcatcccctatttttcatgcattttttgtaaattgaccaatgatcgtccctgctgaatgtctgatccattctaagtgccttcattaatccatttaccatacccaaattttatttttaaactaattccttggttcattttttaaaaagaatttggtgtccacttttccggtgtccaattttcctttgatgtccaaaattccggcggtgtccatttttccgcttggtgtccaattttctggtgtccaatttaccggtccccgtaagcaatcattaagacacacaaagttgcgcaattcaaatttgacacaagcaggattaagattatttaaatgttggccgtaccggtcctcaaagcgtcccgtgcccatcgatgcctttttgggatcagttggctccgaatcggatggtcgcaaaaactttattttaaaaaagtgattttggcatttcaatttttgattttggcattttttcttacccatgcttccaatgagcagttgcagtgccggatgacgaaaagtctcatcgtttgttcatcccatgggatcatgtccaagccgagcacccaaaagcccacaaaatctctcaatttggcaccacttaatgacttattcttatactgctcaacctttgcatcttcaacttcaatcacttcttctaaaatataaataaattttaaaattaaatttaaaaataattttaaattatataataattttataattttaaatatttttttaccatcgaccgtaatgtatgcagataaattgtttttgttacccaaatgaaatgtgaattgacgaaacacttcgggcancatgtaacaaaattgtta

SEQ ID NO: 31923 - DNA, 1203 bp, Heterodera glycines
  unsure (1)..(1203): unsure at all n locations
cattttttgcttattgaaaaggcgaggttaaagaccactggcgagtgtgcattacatataaaaaaaggaaagaaagaaaagtaatcaatttttattcaaaagtactttgctccatattttttattatgcctttctttctcttttaactcactcataaaattcttataagaaaaacattaaaaacaaattttaaaacgaataatttaaatataatatttgacgtgaaaatcccataaattaatgggactcgaacccacaacatcccatgaccaaaggcaagcgcactaaccacttgacaaccgggtcgcttgcttcctcccggtttaattcccttttccttttcctacttttttggaagaaatcccgaccaaaagtgcttgagctccctttttagggcacttcccggacccggacccaaacaaccctggtatcattcgaaagcccagactttgtagactgaggcaaattgtttcatttttttcttcattcactttcccattctcttcctattccactcctgttcttttccccattatctacctcttcttctcctgttcctcttcccttttctcctcctctctctctctcttccactttctgttcctattccactttctcttccactttctatttctcttccactttctgttcctcttccactttctgttcctctttcaccatttatgttcctcttccactatatcttccactttggcattctcatccactttctcttactcttccacttattttggcattttttcaaaaaacccctattagaacggcccccatcagctaaattggccgttttaaccccaaagaccggaaaattttccgaaaaagacattttttagcaaaattttgtcgaaaaaattcattaaatttacactttcttaaaaattgataaatttgcttcaaaaataagcaaaaaatggaaaattttggtttttggttgttttctctaaaaaattgcattttttcttctaaatcgagttattataccggatttagccattttagatgtattttactagaatttaatgaatttgaagaaatttttaaaaatttacctctccatatttaaaatttatgtccatatttttgcgattttatgtccatagaattactangagctcggnattttgaggcatatngcctttttttctcgcactagtttgaatatattaangcataaaacgcatt

SEQ ID NO: 31924 - DNA, 2460 bp, Heterodera glycines
  unsure (1)..(2460): unsure at all n locations
tgttttgaaacgtgctgttaccaaaggcggttgctcaacctactgagctccgttatcctggcagcaattttaattgcctttnagagctgagggtagtgcgttaaacatttctaaattttccgtgtcgtttaggtgccctgtcgtcttgtgcttcatgggtggcagtgcgctgctcttcgggtcatagttggttacgaattttacaaattttatgctaatttgtttgataatgcatgtccatgtccatgcgtgtgctataaaaatgaatattttcggctcacctaatcattcacaacgtcatttccctcccatttaagatttttgaaaaaaatgcaaaatcagcctcccaaacgtccctccaatttttctattgaatacctgctgtctatccctaataaaaagccgcggcgcggcttcctcatcaaccaattgttgggagaaatggtgcaagaaggtgctggaacatcatcatcgtcatcaaaaacgagtaaagactatgttcgaaagttggacaacaccatcgaacatgtgccacgcttccaatacaccaaagtcaagtcgcggttcagcattgaagacgtgccagccaatcccgagggactcctcgccggaatcttccaatacagtattgacgcagcggtggcggacagtcatgagcgtggggttcggccaacacatctcggctgtctcatcagcagcccattgctcactggcggggacattccaatccccatccggcaaatcacggacaacacggtcaacaccatcttgaaccaattcctcaaagtggcccaaagcaagaaacaacagaacgttacgctttggggagagccattcaccgttattgttacaacagttgatcgccgcggactccctaccaaaagatcacttaaaggtggcgcacgacgggctctggcacctgttcaccatcgggtcaatgatcggagtttgataaaggtccgcatattcaaaaaaatcaattctgatgaggaaggtttaagataaacaaccctgatgaccgtaactactgcctcttttatgctttgcaagcaacgatggtggcaaaaacccgaggctgggccagttggaagctttacgactatacgcacagcaggaggggacaacagggatgtttgcagcgagattctctacaactgatgcagcaaattggcgtacggcttgggctcaatggttatgatgctgaaatttgtgtgccgcgggtggtggatcattggaacaacacgcagcaacagcatcgttttgcagtatttatttttggatcaactggtcagtacaagccactgtacaaatacatcaacaacaataactacgacacacccctggtattgtacctgaacaatggtcattttgacggcgtaaagaaagagtatggattgtttggtcaacactactgccttgaatgtgagaagccataccaacgaccagcaacacacctcaattcctgcaaagcacgctgtatgctgtgctcgcgagtcggtccagcattcccatgcgctcctcgtgatggctttttccatcaatgtgcgggctgcaacaaaaagtttcgcaacaacgaatgccatcagcaccatttgacatccaatttttgcgcccagtcaaaacagtgtaaagagtgcggggtatttgggacacacgagtgcatcatcgaaatgaacgaaaggtaagaagcgtaaataaatttaaaaataccattcgttggcttcagggtcacaaatgtcacgaaacgtattgtcaattgtgcaacacgtaccacaatccagagcggggttgcttcatccaaccaattgaaccgaaggaacatgacccctaccgcattgtggcctttgacttggagacgatgcagcaccaaccagtcaatccacgtgagcctgagaagaaggaacatcaacccaacttcatcgctgcgagagttgcgtgtccagactgtattgagagcggaaagtggcggagagcaacggcaggctgccaaatatgcggactacatcgaaccgtcgctttttgtcagcgccgttttatggacactcaggtggacaagcaagtagtggctgacaacccgctggaggcatttgtggattggcttgtctaccaactgccaaaaaagtacgacacctatgcctactctcactttggcggccgcttcgacatggtgctcgtcttccgcgagctgttccggatcgggttcaaccccgagatgctgagacgggtacaatgctatttttctaaatttggttaatttaaaatttagggtaataaaatgtacgagatgaaagtgcggaagcagaaaaagcgaaatcccaacgtcatcttccgtgattctttcaacctgatgccatgttcgctggcagcattggtcccttcaatatggacttgatgtggaggacaagccgttcttccctcatggaagcaatagaccggagaactacggcatagaaatccacc

SEQ ID NO: 31925 - DNA, 1026 bp, Heterodera glycines
gatttaagtgattaaatactgaatttttggggtcatcaactcctttgtttttgccatagtttgtgtgccacaaataaaaaatgcgggaatagaggaagaagaaccaaacaaagatgaacgatgaaaaacactttcaggaggcgctaggtgattattggagcccagaaaaattgtagattcagaattttaatggtaataatagaagaggcacaaaaatttagaaataagcatattgcagtgattgggaagaaagatttaagtgattaaatactgaatttttggggtcatcaactcctttgtttttgccatagtttgtgtgccacaaataaaaaatgcgggaatagagaaagaagaaccaaacaaagatgaacgatgaaaaacactttcaggaggcgcccggtggttggttattggagcctagaaaaattgtagattcagaattttaatggtaataatagaagaggtacataaatttagaaataagcatattgcagtgattgggaagaaagatttaagtgattaaatactgaatttttggggccatcaactcctttgtttttgccatagtttgtgtgccacaaataaaaaatgcgggaatagaggaagaagaaccaaacaaagatgaacgatgaaaaacactttcaggaggcgctatgtgattattggagcccagaaaaattgtagattcagaattttaatggtaataatagaagaggcacataaatttagaaataagcatattgcagtgattgggaagaaagatttaagtgattaaatactgaatttttggggtcatcaactcctttgtttttgccatagtttgtgtgccacaaataaaaaatgcgggaatagaggaagaagaaccaaacaaagatgaacgatgaaaaacactttcaggaggcgctaggtgattattggagcccagaaaaattgtagattcagaattttaatggtaataatagaagaggcacataaatttagaaataagcatattgcagtgattgggaagaaagattaagtgattaa

SEQ ID NO: 31926 - DNA, 2183 bp, Heterodera glycines
  unsure (1)..(2183): unsure at all n locations
ccccgattaaaaaaaaaattcaaattntagagatgagtggaccggtgnagtgcccattttgctgatcggttctccgtttggtatacggtcgaccgcgcgccaggcgcacattggaaatattcggagggatttatcaatgagcaaatgatcgccgcccatttgcccactaacaaagtcggaaccgccgtttttatgtgcggaccgcctccaatggtaaataaaggacaacgtaaaaatgcaattacaaaagttaaaccaattaaaaaaaaattttagtttttttctgaaaaatctaattttttaaaaacataattatgtaagtttatgtttaaaacccattttttaatttttaaaattcattcgtttgtgtcacgacatttcctgttcaacttttacgacccatttcttaagggctattttcggatattttttaggcccgactttttcaaacccaacaaaaatataggacatttaccaaaaatagctttttttctttaaatttatgctgcacttaatattcgtagtttctttctcctcattttgtagcgcacaaaagtttttgttcgtttttggttgcggtcgtaaaagttgcgttaatgtcgtttttggttgggacgcaaatgttggaccgaaaatgtcagggcactgttttccaaaaaaagtttaaaactttcctaaattcccttaaaattgtctacaaattgtttacccccatttttgccagcgtcaccatttattatctcgcgggacgtccattcgtaaattttctcaaaattcctctttttcaggtcaacttcgcctgcttgcctgccctcgacaagcttaactttcccgtagagaatcgctttgtcttctgattgattggaatgtaattagcttttcgttatacaattagtcctttgcccgttttgtttccatacatttgcaagggatgtctcaagacttcgggaagggaacaaaaatttatgttttcttaacaaatttcgtttaattttcttcatttttgtcagtagaccagttgatgaaaaatttatcacaagtctacactcaaattttcaaaaatttggcttcgcccccggcgttttttgaaattgaaaaattcaaatttcacaatagttaaacacatcagcctattggtaaaaatttcgtgcatatgaacggccgtcgatcttggacaccatcccttgcgcatgttcggttattttgccatttaaccggttcaccacaaatttatagtaaaaaggataaacattaaattggaaaccaaaaatgtgtttatgcgtcgacatcgaatgatttaaggtctttcttctttcattctttgctttcctttttctcttggctcggtttgccttttcgtcttatttttgttcggctgttcccttaattttgtttgttcctttaattgttctactcttcacatgacaaatccccgtgacgaacagtgaaaatctgtcaaaattcggtcccccccgtggcgattcatttcgttaatttgattattttccgctgattggggattggttgtcattctgcgcttaattaatttttactccgttttgtcgaattctttttgctctttttattttgtttaaatttaatcagacagaatggttaaaccattctgttaattcgctggactggaaacacttcaattgtcatcagccaattctttgtcttatgtttgttgaactcgtagagagagaaacatggcatacggaggacacaaaaatattgcaaaaattgaggaagacacaaaaaaatgtcgcattttttcgaaatatttcctttgatttgtcctttagtttttttctgcccctttaaaaaagccaattgccatgtgattcttccgtacttttgccacaacaaaataatataacccacgtggaaagtgaaaagctaacgaacggagtcatcaacagacgaacaaaggctttccccgcggctgttggccatttttccgttcgcaaatcgccgcgtccgattttcttgcgttcgaagtgtaaaatgtgccaaatgaccccattaattgtgcaaattgagtattaattaaggngaggggggcaaagtccgtccgaactttcgctttgccctttcggaattnctttgttggactgtcaccttcaccttatctatttttgtaatcaattagtgatgttgtaatgtttgttctgcccatcatt

SEQ ID NO: 31927 - DNA, 1525 bp, Heterodera glycines
tagagtcacatgggaaatccatatttttttcctggactgtgggaggcctgaaacgcacgaaaaacatgtttttagcttggtttgaagcttctaggaaggatttctatatccatattttccatatttttccatatttcgcgatttatgtccatatttccatattttggcattttggtccatattttggcatttttcaaaaaaaactctattagaacggcccccagcagctaaattagcctttttgagcccaaaacccgaaaaatttttcaaaaaatctttttttcgccaaaatttctcgagaatattgaataaatttaaattttcttaaaaattaataaattatgtcaaaaataagcaaaaaagcgaaaatttcgcttttgttgttgattttgcgctaaaaaattaataaattttagcttttatgttttttttcttttaaaatgattgcacgtaattgccgaaaaaattcgagaccaatttccgaatgttgaccgactaattgcaaaacgaaagccgtctttgtcaaagcgccttaccgagtcaaaaaatttggaaatgtatctcatatgcaatttcaaccaataaatttgaagaaattttgcactcaattttgaaaaatttatgtccatattttggcatttttgccatttatgtccatatttcgcgatttttgccattttatgtccatattttgcgatttttggtccatattttatggccatatttcgcgattttatatccatataattacactccctactgattacgcatctgagcttaggttttacaaaatcattgattttatccatcatttatatcagtactcgtttttttaccaaaatttattttttatttttagaaaaatttggcgtcatgttcaacacttaaaaaattttatggttgtatttggaaatttggattcatttgttttgttccttcattgtccttctcattctgggattttgtgttataaatttcaaaaaattccttctccataaattcaaaagctcattcgaaagctctttttaaactttacaacatccgtgtataagttttacgccaaattttactatttttccatcgggaccacaattccacaccattgccagtctgttaaacctgggtttagtgtttgtgcataatctttaatgaaatctggatagaggaaataaagccggaacatttttacagaaatgacttcgacttctgctgatatttctagtgattttgatcagccgaatcaaaaacaggacccagatgactccggagaatttcaacgtgaccctgatgaattcgttgagtctattcagaatgaagtaactcaatggcttgacgaattacggcgaatcaaaaagcctggcgaaagggatgggccaaaactcggcacgcttgagaagtctctaaacgatttgcaggctgcagtgcgacatttgaaacagaacattgaaatcccacaagttgtgcttgaattcgattccaatattcaacagattgtggatgtggcaagaaaagaaaacagaaaacc

SEQ ID NO: 31928 - DNA, 1395 bp, Heterodera glycines
  unsure (1)..(1395): unsure at all n locations
agtgaacaaaataattggggcattattntgcgtaaaacaaaagcattttttgttagagataaaatgggaaatttgccggggtgctttgtgcataatggacaaaacaattccctccgccccccccccccaattttggttttggtgtccgctcgtcgtcttcctcatcaagtgcccttctcaggaagtgcccaattcttcttcttcaatcaccccgccgcttttcctctgttgttgccgatcgcgctttgatcgtttttgcacaaatttgtgggaagaagacgaaaagcattgggcattggcagatgaagcatttgttgctgctgttttgacgaagaaaaacaaataaaaatgttaccaaaatacgaacaatgttggagaatggaaacggaatgctcaatatacgtattttttcttcatacttcaaatcattttttgatcaatggtcaattgcatttgttctttttttcgaaacatttatggagaaaaacatttattttgtgatgtggtcagctgggttgaacctaattgtaagaaaagtgtcgatgatagtaataattaaattaataaaaatttagactcttagaattgattgaaaaataattagtttaacctttcgttcaaaaacttcggcctaagaaaagattcttttcttttttttaaactttcgatgatatcaaaatcgttttgtttacattgagataatgcgggttatgggctgatcaaaataaacaataaaaaaggtaatgatgtattttttgaattaacacacttttggcattatgactgaccgttcattttatttttgtcaaaccgtgggagtgggtccatcgtccatggtgaaattagagttggtcaagctgagttttttttttattagcactatagcgggccctgaatttctaccatgatttaccgtctttttcgtttttgagcgaccccagcctagaaccaaagtttcctgtccctggttttccaaaaatccctgtctcgactaactctaggagaaatatttgaaatacgtgaatgctgttcttcaattttacaaatccataggaacttatcgaacaaaaatctaaatgggaacatttttaaaattcttatttgtaaaggttcatttgaaactatgtaaatgtaaataatcattaattgaattaaaatcaggatggtaatcctaaaatttttaggtttgatctcacattcatacattgctttctattttttacaaattaccaagttcataacggtttcgaagatgttcaacaacggttaattttcaatgcctcacaaattccttatatattttatttcactttagcatacggctcttacggtggcggccccggggcatattcaagcgcttacggcgccttgtcttcgtaaaaaatttgaaatttt

SEQ ID NO: 31929 - DNA, 1306 bp, Heterodera glycines
ttttaaattttttatagatttttaaatgttgggattttttttttggcttaccaaaaacttcatcgaacctggctctttttaaacatgccaaaaagtttaggctttactttttttaattaaactgatcagaagcgcaccagattttgcaagggcatcaaaaagacaaggaaaagcaccgctatgatgctaacgccagtaactcttaatttaaaaatttttattaatttttaaaacttcactattttatttttttaatagatttttaaatgtttggattttttttggcttaccaaaacttcatcgaacctggttctttctattctctttcaaatcgccccaaattttttttacagcttaactaggccctattaagcttatttccagaaaatctcgcatgaattctcatttttaaattttttatagatttttaaatgtttggattttttttggcttaccaaaacttcatcgaacctggttctttctattctctttcaaatcgccccaaattttttttacagcttaactaggccctattaagcttatttccagaaaatctcgcatgaattctcatttttaaattttttatagatttttaaatgtttggatttttttttggcttaccaaaacttcatcgaacctggctctttttaaacatgccaaaaagtttaggcttaactttttttaattaaactgatcagaagcgcaccagattttgcaagggcatcaaaaagacaaggaaaagcaccgctatgatgctaacgccagtaactcttaatttaaaaatttttattaatttttaaaacttcactattttatttttttaatagatttttaaatgtttggattttttttggcttaccaaaacttcatcgaacctggttctttctattctctttcaaatcgccccaaattttttttacagcttaactaggccctattaagcttatttccagaaaatctcgcatgaattctcatttttaaattttttatagatttttaaatgtttggattttttttggcttaccaaaacttcatcgaacctggttctttctattctctttcaaatcgccccaaattttttttacagcttaactaggccctattaagcttatttccagaaaatctcgcatgaattctcatttttaaattttttatagatttttaaatgtttggattttttttggcttaccaaaacttcatcgaacctggttctttctattctctttcaaatcgccccaaattttttttacagcttaactaggccctattaagcttatttcaagaaatctcgcatgaattctcattt

SEQ ID NO: 31930 - DNA, 1987 bp, Heterodera glycines
ctttggggaaataaattaatttcttgattgagtgcccttattatttttgtacttttaccgtatttttccaaaagtaaatcaattgcaatttggtaaccatcttccgaaattggtattccctcaattagctccttagcttccccttctaaatttgactccaataaattatgcttttcaattttggtaaccgaatcatcctcgtggacatgtactctgaatgtctcccaaaatggtatccatttttcaactgacccatcaaattttttcaattgtatttgtggaattttcactcttttgattggctgatttcttggagtaagaattgtgctatttagtgaattttgagggtttatgtcaaaaatatcttccaattgttcttttttgttttgccattcatttttcttaatcactgctcgattaatttttgcctcaatgtcaagctgtgtacaaaagtctacataaactctttccttattttcgcgcgctgcaactgcaattttttgcaaactttctgccatttctacgcgttttctcttaatttcttccaaaatttcgcttagctcttcacacgcattttttgctctgtacatatgtctttgtactgtatttggggttgcattttgaccgggatttatcggaatatctcttttaattcaacctctaaccgattgactagcccgtgaattatatccaatattggcgaactcattttaatcttttgctagccaactagctttttagaaatttaacaaaaattaatttgtccacctttaaacaattcggttcgcaatggccaaagggtcgccacgtgtcggagatcggtgtccgtccgctgttctcttttgtcagttcgtccaatgacagtagaagaatcaaacaatcaatcaatcaatcagcctttgtttggtggaacaaattagagtttgccaatcacttcttaattcctggtgagccccttgatttttcagattttgttttcaaaaagtccccggtggaccaatctcccgtttcccggtgaaacaaattttagcaccaaattttcccctaccgtaaccttcaaataatgtcccggtgacaagtatttattacggtgcgaaaatacgaaattgacaaataatatttttttcaatcggagagcaagaacgttgaacagattttttaaaaaagttaagcgaatgaataacggatttttatttttcatctttcccccttttttcgctcacggacattttccgccttttgttaaactctgtgaaattccctatcgctctttttcttcttgtctccaacgactttaccataaatgaataaagtgatcgcaaaggcaaaggatgaaagatatggatgataataataaaatggagaatgaaatttaaattaataaataattaaatgcaaatttgttaaaattatttcctccgtctcttctgtttttggcatttaattctttcggcattctcggcattctctggcatctcggctgcgtcggtcgtgggcgccgacaatttgtcacaataaatagaaaatctaaataaacaaatatttatttttagaaaaaagataaaataaacagagaaattaaattaatttgactaatgctaaaattatacgcaataaattaattaaaattaataaaaaagaaaataaataataaaatgaaattgagttaaaaaactaaaaattaatataaaaaacagaaactaataaaattaataacttgctagaaaaggtttaaaaaaatatattgattaataaattaccataaaaatttgcgggtttgacttccaaaataagcatctgcaagaagattataataattatactataagaaacgtagtaatatataagcgataaataaataaaattttgatgattttttgatatagtgaaagatatttatgataaaaagtattttaagttaatagtaagattacgaaaaaattgaataaatcaataaagggtttaatcattagttatgattctgatt

SEQ ID NO: 31931 - DNA, 1743 bp, Heterodera glycines
taattaataatctacacataattttaaataacatgatgtttttaaaaaaatttgctgacggactgtttactgatggattgtcctgacagattatcaatcatcattgatagatttacactgaacaattgtccgggggcacaaaaagtaccaaatttttttatgagcaaaagttgatataatctttttatatgttaaaaacttgctctgtgtcaaaagaaatcagtttaaaaattctatatgtaaaaatataaaccgagactcgatttttatgaataaagattttcttgcatttttatttttatgcaaaaaattccattcattaattccgaaaactttactctagttatttattaatttcatttataaataaaattttatttttctaaaatttatatcaatttttatagtataaaagtgccgtatttgtatctttcaaattaagccgagaccatgacacgagtcgagactgagggtttttagcacacaattattttttactcacccaattgttttccgtctatgtgtaaatgatttccatggaagttaaattgactccacaaccgatggtgtggccctctccaaacggaggaaatcctccgaaaccatcggtgttatgaccaaaaataaagccatggctcgaataaaaaaaatagtcatcatttgacgtccaaatgccaactccgatggtgctttcattgaaaattaaattttacaaatcattagcaaaatatgtgtaagtcataatggagcgggactgaaacatgtcattcaaattagaaacattaacttctaaaccgagtctataaacggaagtattcattcataatatttaaaaaattttattcaaaaggaagtattcgttcaaaatttttattaatattaatctactatttaattcccaattttcttacacaggttgctaaaccgtgaccatgaatataatttttcaaagattaagtccaagagacatgaattcctgtcgggccacactactataatttgagtttttgacatacccgctcccgtaggacatttgccttcggattattttagtctcgtaataagcgatgccaaaacgcgggataaggtcaaactcagcaattaacatccgataatctggaaaattttctgtaatttaattttataaaaaattgtaaaatcgaacaaaaattgttagttttatagcatttcatatattaaacatgcattttataccaataataaacatttgcatattctattattcaccatttattttcccgacgactgttgcttttgtatatgtaggcttcaaaattaaaaagccactgtgcgatttgtttacgctccaatggtttggcttaaaaaagtttaagattaaaaatgccagatttaaaagactaatagtaagctcaaaaagcatctcaaaactacagatataaaaattagtgtaatttgccctaatctgatcgcacctctttttgcggcatttttccatcaaaatcaaagcctccgctgaggtgcgataacgacagctttgttttgctcaaaaaatcgagcgtcggcctaacgatattattgccaattttgtcaataatattcatttgtggggccctaaaaattcatttatttttttatacagtttcattaataaatgttaaaaaatgtgtttgagcaatacttacaatgagtttttcgattttcgtgatgttctgccgtaatcattgaattgtttgttttgatggcctttaaatgtaaaaattt

SEQ ID NO: 31932 - DNA, 977 bp, Heterodera glycines
  unsure (1)..(977): unsure at all n locations
actttttccccacatattttgccacaaccgggtcccatccggttttttactcattttgggtatttgctcctcttcctcctcctcttcatcatcttctaatatgacttcgtccacttgttttaacttctctttttccttatttcgcttttccagttcaatttttcgcttgtttgtctcttccaatttcattttcatcatttcaaattcattcaaaagtcgtttttcctctgcacttaactgttcatcgtcgaatggcaccacttcaggcgcttttggtgaatccatgactaaatttgatatgatattggttcagcaaaatttggatcattttttttcgatttttcggcatttttatttaattctgtatcttttgaaatttccgcactttttcaatgtcgtagctttgaaaagttacttgatatttctataaccgaccctttaatccctttgccttcatcattccggttaatgcgctgcaatcagttatcacttttgttattcctgagcctacaatgtatggtgaaaattctttgaccgaataaacgagggcaagagcttctcgttcgatggatggataattagcttcgtgtcggttaagagcccgagaagcgaaagctacttgcccattttcctgtagtaaaactgccccaattgcctttcgggatgcgtcacactcaatgataaatggtttaccaaaacggggtgattgtaaaactggtgcggttgttaacacatttttaagggtttctaaggcttcactttgctcatttccccaatgttcttttattttcccttcaaatttgtcctgtgttaaaatttgaangtgtctcgcaatgtgcgcaaaatttttaataaatcttctgaaatatgtaagtgcgccgagcaatgatttcaattcctgtaagctttttggtgccgtaaattttgaacactgagactttgtttgggtcattctcacgcccttctcacttaataaa

SEQ ID NO: 31933 - DNA, 1287 bp, Heterodera glycines
caaaaaaagagatagccattttctgggatagagtataaattaaaaaatccctcaaaaataaaaggtctattgcgcaccgccctccctatcatgctcgagagcatttgtatgtgtataaaatttatcaaaaaaagagatagccatttttctgggatagagtataaatataaaaattctctcaaaaataaaaggtcgattgcgcacagccctccgtatcatacgcgagagcttttgtatgtgtataaaatttatcaaaaaaagagatagccatttttctgggatagagtataaatttaaaaattccctcaaaaataaaaggtaaattgcgcaccgccctccctatcatgctcgagagcatttgtatgtgtataaaatttatcaaaaaaagagatagccatttttctgggataacctctaaatataaaaatcctctgtgaaataaaatggcgattgtgcacagccctccgtctcatacgcaagcgcttttgtgaggtataaaatttctcaaaaaaaagagatagacatttttctgggatagagtataaatttaaaaattccctcaaaaataaaaggtctattgcgcaccgccctccctatcatgctcgagagcatttgtatgtgtataaaatttatcaaaaaaagagatagccatttttctgggatagagtataaatttaaaaattccctcaaaaataaaaggtaaattgcgcaccgccctccctatcatgctcgagagcatttgtatgtgtataaaatttatcaaaaaaagagatagccatttttctgggataacctctaaatataaaaatcctctgtgaaataaaatggcgattgtgcacagccctccgtctcatacgcaagcgcttttgtgaggtataaaatttctcaaaaaaaagagatagacatttttctgggatagagtataaatttaaaaattccctcaaaaataaaaggtctattgcgcaccgccctccctatcatgctcgagagcatttgtatgtgtataaaatttatcaaaaaaagagatagccatttttctgggataacctctaaatataaaaatcctctgtgaaataaaatggcgattgtgcacagccctccgtctcatacgcaagcgcttttgtgaggtataaaatttctcaaaaaagagatagccatttttctgggatagagtataaatttaaaaattcctcaaaaataaaaggtctattgcgcaccgcccctcctatcatgctcgagagcatttgtatgtgtataaaatttatcaaaaaagagatagccattttt

SEQ ID NO: 31934 - DNA, 1491 bp, Heterodera glycines
  unsure (1)..(1491): unsure at all n locations
gccgttttctttgctctgcccattttgctgctgctgttcgtcctcgcgcttctcttcgtcggtatggtccacctgatgcaatntgatagggacgagcactctctgagggaattggccaattaattaattaattgagtaataaatgctgttaaaaatgattattgactaattgcctgatggccggacgaaggactcgtcaggaaaaagcctttgtgagtgcgacccgcgcgattggccacgtaatttttgaagaacagaaaaaacatggcgaaggtacaaattgctaaagacattttttaaagcaaagttagtgattaataggacaaaaaaaaacattttcgattaatttcagcaaaaattggacatttataatgctttataaaactttaataatttccttttttgttttaccgtataacggggcataaatcagcatcagagagtacattgctatcctgacaaattggaaatggcttttgaaatagcattagaacattcaacaaatgcctggcattttgcacaatttggttggaccgctccaactcggcctgcggattggtaatgtcaaattgggcacttcgaattcgcacgtcctccgtgtgaattaaatatgccataacaaaaaacaaaaagagggacagaacaaaggcagcagaggacaaaacggtgcaaacaatctgaaaaagagggcattaaaatggtcaaaaagcgaacggacggaccaacatcggccgagttctgagccgacggagatggagcagtatgagcacggaatggagcagcaacagaacaccgacgagggagccgagccaatggccgtcgaagaacacacaaacgacggagaaaatgagcagctgaagggcggtgccgagttggacggcgaaaagccaaagcagcggccgatggtggacgagcagaatgtggttggtgctcagctgctcttcaacctgatttaaattgggaaaatggtagggaaattggaacgtttgtagctaggaccgggttccagaattcccgaactttgtttgggcctgaattgcggatttatggtgataattccataaattgggcctcggaatacccggatttcggatagtcttgggaccacccttggcttgctgctgatttgtaaggttggcttgtctatctgagtttgcctggaatgagtggctaaagtcggactgttccattatgtcgtggccccccgtgcccccgccgtggtcgccctgttgctgctgctgttgttggctaatgaccccggagaagccggactgcttgcgacgctggccgaacatcagcagccgattgagcgacgggccgggcaccgacggttgggggtggaaaatgcgaatagtgtgccgaactgacaaagggtggcaaaattgcgaaatgcaattggttaatcgctttaaattttgacccgtcgattttgtggtcgccgtttcgtctgatccgacggatattcgttcttccgtctgncaattctgctcg

SEQ ID NO: 31935 - DNA, 962 bp, Heterodera glycines
cccatttttcgcaccgtgaatgttatttttattgattctgaaccgttttgagtagattagactagaaaaaattgaaaattttgaaatcatgttttccactcccttctcccaggggtattattttgtaaagtctttttttcaaaataaacttttcaaaccccatttttcgcaccgtgaatgttatttttattgaattctgaaccgttttgagtagattagactagaaaaaattgaaaattttgaaatcatgtttcccactcccttctcccaggggtattattttgtaaagtctttttttccccaataaacttttcaaaccccatttttcgcaccgtgaatgttatttttatcgaattctgaaccgttttgagtagattagactagaaaaaattgaaaattttgaaatcatgtttcccactcccttctcccaggggtattattttgtaaagtctttttttccccaataaacttttcaaaccccatttttcgcaccgtgaatgttatttttattgaattctgaaccgttttgagtagattagactagaaaaaattgaaaattttgaaatcatgtttcccactcccttctcccaggggtattattttgtaaagtctttttttcaaaataaacttttcaaaccccatttttcgcaccgtgaatgttatttttattgaattctgaaccgttttgagtagattagactagaaaaaattgaaaattttgaaatcatgtttcccactcccttctcccaggggtattattttgtaaagtctttttttccccaataaacttttcaaaccccatttttcgcaccgtgaatgttatttttatcgaattctgaaccgttttgagtagattagactagaaaaaattgaaaattttgaaatcatgtttcccactcccttctccctcgggtattattttgtagacttttttctccaataaacttgtcaaaccccatttt

SEQ ID NO: 31936 - DNA, 1349 bp, Heterodera glycines
  unsure (1)..(1349): unsure at all n locations
cagggtttctatctcaaaattttcaaaataagaacatcaaggccaaaaaataagattttagggcaaaaataagaacattttgcaaaattgctttaaaccagatatttttcgatttattcgatcaaaaatgtattaaattattatatttttcgtctcccattatcgaatttacaattttggggaggaaataagcaaatcgtaaattttcgtgcatttttcggggcgcatttttctaaaaaaaactgttttgaaatgggcgaggggagagggtccggcggtgccgttaggtgccgccggaaaattttngtaatttcgttctgatttgttaacagattttcatcaaaaaggccaattttttcacttagaagccaagcggtgatcctttttttgcttataaaaacacttttttggcggcgcgctttttccataaatttgggggacatagggtccggcggtgccgataggcgccgccggggaaaaattttttgaaaatttgagtataatttgttaacagattttgtccgaaaaaatgaccaaattttgcgattttgggctaatttttaagaaaataaagtatttttggggttcggcggtgccgttaggcaccgccgtggaaaattttgaaaatttaagtgacattacgccataaaattacaaattttctgaagaattttaagaaataagattaacatatttnttctgcgcatatgctataaagaaaggggctcaaaaatagcatttctgcgttaaaattttttggtttgctgaaggtttttagtccatataaatccatatttgggggttttcggaataaatccatatttagccatttttgtgtttttagtccatatttcggccatttttggcaaattttcacaagaaaatgcaagaaaagggaaaaatacaccccctaaagattgattttttggaaattttaaaatttacagcccaaaaaatatgaaaaatttgaattttcgtcgtcattttggcatttttaataaatcttttcatcattttttgcgaacttttctttttttaaataataatttttttttaatttttgcaaacttgaaaatatttttatacaatggacgacaataaatttttttgcatttttatgttttaaatccattttttgattgtttattgttttttttaaatttctttaagcaaatattgaattcatacaccttttttggaatttttgagggtttaaaacatatattttggcagtttttagtccatatttggctatttttgagctttttagtccatatttcgtgcttttttagtccatattttatgtccatattttgggttttttagtccantataatttaaaaccctac

SEQ ID NO: 31937 - DNA, 894 bp, Heterodera glycines
taagccaggaatcataatttattctgttattggatcagaaactttttttatcaatttttatgctgttaattcttggtcatcataatctatcaatgttacattgatggtattattgaaatcgtaacatgtataaaagcgttgtataagctattgctttatgattagacaactgctaaagaagttatacatgaaaattgcgaaaagaatgaaattttgaagttcatcttaataatatttttcagagacttgagcatcgcgttgatgtctgtcaggataatagagcaaaggggtaaagaggggggaggggataaagccatgccaagcgcatttcctcacaactcacggcccaaccaaacattgcttagcttcttctacacgcatttgcacggctcccaactccgtcctttccctttccttctcgacacactcaaataaatcttctgtttggttaagtcactctctcttttgactttgcgggagagagagaggaaaaattgtataaaaagaaaagcaaagggaagggcgaggggaattatttggtggagacggaaatgggagaaggaaaggcggcaattggcagagagaagggacaagcaaagggaaaaggggggaagagagagaggaaagggagggggggggggaaggcagtgaatgattagcaacgaacaaactcaaactctcggaaaccaatcttaatgcgcgagattaacgacatggagaggagccgcttgaggtgagcaaaacaaaaggaaatggcggacaaaaaaagggggcaaagggtgggaaatgagacgacatttgaaatttgtccgacccgcgcatcccaccagacaaattgtaaacaaacgaaacaaagccatcagtcagctcattaaagttcaacgcaaaggcaaa

SEQ ID NO: 31938 - DNA, 1379 bp, Heterodera glycines
ctttcggggatggtgcgtggactagagctgagagctgcttgtggagcgcttcagctgcatgtatgctcgtcagggtattctcttcgcttggcgctgaacgaccagtttagaactggctcgagctcgggtaatccgacggtctaattaaaacagaggagacggatggtccttgtggacgttgtccgagtctgatttctgctcagtgctctgaatgttaagccaaggaaccttgattaagcgcgggtaaacggcgggagtaactatgtctctcttaaggtagccaaatgcctcgtcggctaactaccgacgcgcacgaatggatcaacgagattcccactgtccctatctactatctagtgaaaccacagccaagggaacgggcttggcaaatttagcggggaaagaagaccctgttgagcttgactctagtctgactttgtgaagaatcatgagaggtgtagcataagtgggagcctcaaggcaccagtgaaattccactactttcctcgattccttacataatcggtaagcacgggagtgcgcccgaaagggtgtccattttggcgttaagtcgggcccgcccccccccccccgcccttcaaaattttgaaaaaaaaataaaataataggagacgcagaattttgaaaattttttataaaaactgatgacaagctaatgtgataaaacaggttaattcttttcctttcagtatccctgcaaagtttggggcgcttctgatcagtttctgaaaaaaaagttaagcctaaacttttttggcctgtttaaaaaggaattaaaaatttttaaaaattttattcatcctcccttttcgatagaaaaagcatcagagtgcctaatctaacatgtaaataaaatttggtgcgtttcagagcattttctgaaaaaatatttatgaaataaaaaaatcgattttttcaagtgtacgtttggggtactcaaacaattatggggagcaaaaatccaacgcagaattaaagtacagactatagggaagctattcccgaaggattcggtctccccataaatctgggcgcatcggttcggggggactgccccgaaaacaaaaaaatcgattttttcaagtgtgcgtatgggatactcaaacaattatggggagcaaaaatccaacgcagaattaaagtacaggctatagggaagctattcccgaaggattcggtctccccataaatctgggcgcatcggttcggggggtctgccccgaaaacaaaaataaatcgattttttcaagtgtccgtttggggtactcaaacaattaaaaggagcaaaactccgtcgcagcattagagtccagtataaagagaagctattccggaaggattcggtctccccgataaaa

SEQ ID NO: 31939 - DNA, 1035 bp, Heterodera glycines
aaaacaagataaaaatttaattttatattattttcacttgaaataaattaaaattagattttttttgaatttttaaaatttcccggttggtcctggttcccggtcccggacaaaaaccgagggcccggtcccggcttctcaggtcccggcaagtcccggtcccggttttgccaaaaattcccggtcccacgccactctaataaaaatgccataatatggacaaatatggaaatatggacataaatcgcgaaatatggaaaaatatggaactccatcctagaagcttcaaaccaagctaaaaacatgtttttcgtgcatctcaggccccccacagtccaggaattccccgccctacttataaccctaattattaggtatagtccattttgcttaatagtatttttttgcagaaatttaatgattgcagaaaaaattaaattataaattaagagaataattgcaagtttttagaaagaagtaccagtccattcattacttaaaaaatcaaaataaaaattggattttttttggggtaaaagctctaattcatgcaacaactattattttttgataaaataatgcttcaaattgttattgggtaaaaatgcgcggtttatgccagaatttgaccgatttgaacgtatatttttgaaaaaaaatttcaactttttgttcgaattcgggtccggggttcggaatttggcaaatccgagttcagattcgtgatcagcaccctcgaaaacccctgtatacctatttttagctcaaaataaaaaaagttaaattagggacccccattcttcaggattccttattttcatataaaaacaacaatttaaaataattatacccctaaatatggaactttttcgaccttattttcgcccttatttacggccttattttggacttttcgtccttaaaaatcccagccctaataataactagggcttatattttaggcaaatgcctaaaatttttgcgcacttgatacgcacaattaaagcaccaaaaaccccgttttcccgcttgggg

SEQ ID NO: 31940 - DNA, 1276 bp, Heterodera glycines
aaaattacccaaatttaacaaaaaggggaaatggtggggggatttataaaagccactggcaacttccttaaacgaaagaaaaatttaattttaaacatattttaattgtaaaacatttaatattggagtttttttatccgggcaagtgccggtcccggtttttctccaaatttcagatcccgtgctatttagttgatatttatactgactgatttgaagataattttatcaatccaaaacattcaaattgcattctctaagtgttagccaattaagctaaaaatcaaaaatgtcctatgtttacataaaaaaatgttctgaaaaacaggcaaaatttaaagtcatcaaatttatagattaatgattttctcaacattaaacaaaattggaaatcaacgatttactaattttcatcatcaaattttcttaataattttataacattaagtaagtctgtaaaattgagcataataattataaaatttgtaatactttttgctattgttataatataatccaaaatataaatcattttttaattgcattgaaaatattattttagatcctttcagactgtcattacagaaaatgaaagtattcttaatgatttctttatttgtgtttttgatcatcattttaattaatattaattatgttggatcagaaaagaataaattggaacagaaatcatttgaagaaatatttggagaaaaatgggaagaaaaaagaaacgaagaacagaaaaaaagagaaataattggaaaatataataaaataaaagagaaaattaagcaaaaaggaagaaaatacccaagaaaagaatggagtaaaattgaaagaaaaatagcaaaaaaattgggcacaaatcgccaaaatatttatgaatggatcaaagaattaggattaaatcaaaaaacaaagaaatgctacaaatcaaaaactgacgaagaaaaactcgaaattgtacagaaattcattgaaatgtcaaatgaatataaacaaaaaggaagaacatattcgaaaaaagagtggcaacaaaattatgaagaaatttgtaagaaaaacggagttagccttttcataattaaaaaatggatgaagcaatttggaattagccgaaaaataatagcggaaaaagaaaaaacggagaaaatgaaaatttattggcaaataaaaagagaaatgccgaaaatgagtgacaaggaaattggaaaaacattgaaaattcatataaataccattggcaattggaagaaacaattaggagaagaaataa

SEQ ID NO: 31941 - DNA, 1372 bp, Heterodera glycines
ttcgctttacggtcgatttgcgacgcctttcgatcgataacgaattcattctttcgtcggcggtgttccatttctgatcagtgcacccgcacgaccttccgaattcaattctctgtgctcatcaaattatttgttgtttgtattgtcccccccccccccctccaaccgtccacaacatttgcgggagggacccctcacccctctccctccctccctgttgtccattccctcgtcccccgtccgcacggctcccgataatctcatcgaccccattcccaacccaacctcaccacatcactgtgtacaatcaacgcattttcgaccaaaatcgaacggactcatttcactcatcagagttgtcgaccaaattatagaccattgcttgccaatgaatgaatgactcacaatgattcaatgatttccattggcacaattcaaagtgcctttgatgccgaaaaatactgctaggagccaatgccaatgccattctcttctccgatttatttgctcatttcatcgcttctcttttccctttgcttacatttgcattcccacgacaggcgttttttctggcgacccagggactttttgtgtccgcggaacaatcaatggaaccgtcgcccggagggacgacggaagggacggccaaaacggaaaggaaaagtgcggaagaggaagaagaggaggagatggaaaggaagagggagaagaataaaaggtacgatcatacggaaagtggaattgatactgtaaagcgggaaaggggtacgataagggaagcgtggactaatcaaatggggaagactgacattgatcaaatttggcaaggtggcactgatcaaatggggaagaaacaaatatgtaattactaattccgtgtgctaattatttatttttttggatcgaaaaggtcgtctccttctcgcccttcgtcttcttcctcatcatccgatagagaaggtgatcatccggcagataagcaacgcattggcaaagtgccgcttaaaatcgacactgaaaagcttttgcacaccgacacaatgccaaaagaggcgagaatttaaagagcaattttcaaaattaattgaagcggcctcaaaggaaaatccttgccacttaataaagaatgaactaattaattcgatttattattatccattgattgggttttggcactcggccaaaagcataaattaattaaaacaaaatttatgaatgaattcccttctaactttagaccattgccttagtgcccgagtcgccgccaattgaaattgaaactgtcggagtccggagggataaaatctgtgccgaattggaaaacaaaacggcaaaaatgggagaagaaaacggacaaacggagactctagag

SEQ ID NO: 31942 - DNA, 588 bp, Heterodera glycines
ttcttttggtatcaatttgctgttgcttacgtacggaataatatttatatctattaaattttaaaattggaatttatagtcgcaataaaacattttaataaaaaaaaaaattaaaaaattgttggaatattggcgcccaaacgtgccgcgcccaaacgtgctggcgcccaaccgtgcgcgcccaaacgtgagcgcccaaccgtgcgcgcccaactgagcggttccgggctggacatttcgacaatgaccgtttcgcctttaaaacaattttaatgactcatagctacgcataattatattttaacaattttacgatttttttctcgcagataattcaaatttccattaaaattttcaactcattctccaactgtgttgacaatgtctactgtccaatattcttggtaagactttggcatttattggatatttacaaaaagcattccgctaaatccacaaattcagcaagggctaaatttcggatctcagataatacatatgactaaagccttgaatttttaaattgttggtctctggattagacattaaccggttccgggccgccccggtaaaattctcatttattat

SEQ ID NO: 31943 - DNA, 1179 bp, Heterodera glycines
cgaagaaaagtaataatttcatcagacccttcaaccttctagacacgagagaactgaaaagcgaccaaagcagcgcctttattagtcagctaattgtgagagggatcagccataaataacttatcaccaacaaacaaatattttaaaagctaaaggaaaaaagggcggcgcctatcggtaccgccgccccccccccccgttctccaaaattttttttggaaaaaccgcgccgaaaggtttttgaaaagtttaatgtctcaattaagattgaccctaaccgcgaaaagtacatattataatatatttgaaagggtgaaacgaacgtcgactgcaagataagtgctgtagtaaaagttggttgagaggggaatttggaactgaaagaaaatgcattcagcagaaggaaatgacaaaacggtcactcatcgagagaaaccatcggaagattcagaggaacacaccgcaaatgcatcctcttccttcgtcagtttgactacgtcgaaagggcaatcacagatcactttcacaatctcttggatttcgtaccgactttttgctttaacgaattcagcagaaaactggaaaaaagtgccgacttccacgtcgtgcttacaattagcccagataaaagggaaattggtgatgtgagggcaatagacctgaaagaaagaaaataccgtaatttgccgataataaagataaaacaatgatagccggaagcaaaagtttaccgttcctcgtctgttcagcaaaaatcccgacgaaataaatgagtctttctgaaaattttggttttataaaacataatttcaattgaaaacaatatttcacaatgtgggattaactgggccagtggtattataggtgtccgaaatttacgttcttaatttttaaatttaataaaagccttattttgaaaaaaattgtttcattcaaaaaaaaaccccttaaaatttgaacaaaaaatttaaaattgaggttattttatataataattttataaatattcgagttttgagatggattcgatgttatgattttacacttaccaagaattttctcaatttaatcttcgttccatcctcattcgtgcgctgttctttttcagcaattgacacaacttcaaatctcatcgggttttttcgattggctttctcttgcaaatatttaacccaaaca

SEQ ID NO: 31944 - DNA, 1132 bp, Heterodera glycines
aactttttcatttgcattctttattaatctagcgcagatacaattaatattgtaaaagctaaaaaaattattaataaatggaaattcatatttaaattaattcataatgcaattaatattgtattatctacatattcattcattagcgtttgagatctatcattaatatggatcttccgcttctaattcaaaaattcacacgccactccgatttctcataatcattgtgataatatatgtaataaaataaactataacgatcaattttgtattaagtatcagacttccgacgcaaataaaaagaattaaaatattttttctaagtttaaggaacatatttaaatttatagaatgaaatggttagtgaatcagctctgctaaagcatgattattatagatataaccctatgccgcatttttacacatttatgctgttggttctggttgtggtagtggcagaactgctctctcatcttttggttgagatgtctcaggcggtggaggcggcggaggaggtggaggcggcggtggcggcggcggtgctccgtagcttgggggctgcggtggctcatagcttggcggttctggtggctcgtacgctggtggtggcggaggcggtggaggaggcgggggcggaggaggtggcggaggtggtggcggtggcggcggcggggctccgtagcttgggggttgcggtggggctccatagcttggcggttctggtggctcgtacgctgggggtggcggaggcggtggtggtggaggaggtgggggcggaggaggtggcggaggtgctggcggtgctccagacgcgtcgcgttttcctctgccgtatttgccgtatcctttagatggaggctgcggttgaggccttaaaataaatataaattttaataattatttatttttgagtgtttttacggttgtttctttccgcaatcgcttgggtagttgcacacttggtttgcctggtcgaacacaagccctttcgggcagttcagcttcgtggacacaccgcctgagcatgcgtagtaaacgttggacgcgcaatatttaggcgccgacagtccctctcctttgcctaaaatataaataatggctactttaataatcaaaagaaataaattacatt

SEQ ID NO: 31945 - DNA, 1536 bp, Heterodera glycines
  unsure (1)..(1536): unsure at all n locations
aattcttaaccaagtaaaaggtgactcaaaaattttccggatctatttaaaagcatatttcgctttaaaaaattattcaacgattttcatcaaaaattttaccttttttcgcggcgcgttttttcaaaattttttaaaacatcggcgggggaggtccggcggtgccgataggcgccgccggggaaaatttttataattttaatgcaaattcttaacaaattttgtccaaaaaatgaccaaatttagcaatttgaggcaaaaatttctcaagaaaaataagattttaaggtccggcggtgccgataggcgccgccgggaaattttttgaaaatttcagtgcaatttattaacaaaatttgtaaaaaattgttaattttttgaaaaaaaattcaaaaaaaatttccgactttttatcaaaaatttcggaaatcggaagtcggaattccgacgtccaaaattttttcggaaatcggaattccgtgccatccctgctgtacaccgttcacatgaaccaaagccaataatatttacaaaaaagtttattattagggtggtcgaacttgacatgcacgaatcaaatgggcatcgaattgccgttgaagcagatgaggaagaagaagccgcaattgctgatgaagaacgaattgagcgagagaaggagcgaactacctagttaaccgcattcaactagttcgtttatagaagcagcattaagaacaatttacagcaaaaggaagattgccatagagccaccgttgaagttcacgtacgtcaattgtttcaagaaactatattatgattacaacaaaagggagtggaaggaatatgttcaacaagaacgagctggtcaaaaactttgtcgccttaaaacagtatctccatcacatatgcaactttttgtaccattcattaattaatgagcaactttacaaatattttttatatgtgaactataatttgttaaatatatttgaaattgaatataaatatgatttttacatttctccattgacacctttcgccgaatttggggagatagaaaagagtcacttgtgtttagttcaggggtgcgagatgcggccaaaaatttaatatttgatacctttttgatcgaataattttaaaaataaatgttttgaagcaatttcgcagtgttcagatttttcgaccctaaaatctgattttttgattatcatttttttatttaactttgtttctcccatagaaatatttttgaatatttgctggttctaaaattcattttatagctagctgttttttgaatttacattttttattttcgaacccattggcagatttaagaaacgcgccagcacgaatggaaattcgaagcaaaattggaatttttggtttttcaccaaaatgaatttttcttgttttcggttaacattttttttctatgttgatatgtgccggcgtgaaaatttaaaattatttcagaaatttattcgcaaatttatccgnaattcaatttcttttgaatttatcgataattaattttggaattttatggga

SEQ ID NO: 31946 - DNA, 1101 bp, Heterodera glycines
  unsure (1)..(1101): unsure at all n locations
tatcaaaaagggagatgaataaaatttttaattacttttaaacatgccaaaaagtttaggcttaaatttaaaaaattttcttcgactctagctctttcaataagcaataaaatcgtaccaaattttataggcatactccncggtacaggactaacttaacctgaaaaaatgacaattgtaattggttttaaatttttttagaaattctgagtttttaactgtttatttattttttgaaaaattaattcataaatattttttcagaaagtgctctgaaacgcatcaaattttatgtacaagttaaataaggctctctgatgcttttactatcaaaaagggagatgaataaaatttttaattgctttttaaacatgccaaaaagtttaggcttaaattaaaaaaattttcttcggctctagctctttcaataagcaataaaatcgtaccaaattttataggcatactccccggtacaggactaacttaacctgaaaaaatgacaattgtaattggttttaaatttttttagaaattctgagtttttaactgtttatttattttttgaaaaattaattcataaatattttttcagaaagtgctctgaaacgcaccaaattttatgtacaagttaaataaggctctctgatgcttttactatcaaaaagggagatgaataaaatttttaatttgctttttaaacatgccaaaaagtttaggcttaaattaaaaaaattttcttcggctctagctctttcaataagcaataaaatcgtaccaaattttataggcatactccccggtacaggactaacttaacctgaaaaaatgacaattgtaattgattttaaatttttttagaaattctgagtttttcactgtttattattttttgcaaaattaattcataaatattttttcagaaagtgctctgaaacgcaccaaattttatgtacaagttaaataaggctctctgatgcttttactatcaaaaagggagatgaataaaatttttaattgctttttaacatgccaaaatgtttaggctttaatanaaaaattntcttcggctctagctctttcataaagcataaatcgtaccaa

SEQ ID NO: 31947 - DNA, 1876 bp, Heterodera glycines
aatttgacttttcgaatttttgttcgaattcgggtctggggttcggtgattggtagaaataaatgccggaaattaatctttaattgatataaaactcaaaattcataaaatttgacttttcgaatttttgttcgaattcgggtctggggctcggtgattggtagaaatagatgccggaaattaatctttaattcatattatcaaataaatatatttgcatcaatcaatttttatattttatatacgtaatattgttctggaatttttcattactaaaaacccgtgcgctttattagctcgaattttaaaattagacacccaattcacaggacgaactcaacataaaaatcgaatgtaacggagaatgtgcgctctattaacatgaaggaaaatgggaaacgatagaggaacggggagagcactaattaataatcaataaatgcgcaaaagggtaattgataaatgataacactgatttgcaatcactaaattatccataattttattctgaaatgagaagtgaaaatggaggagagaattggcgagaactgttacatatcacaaaaaacatccgatattgttgaaaagcaaattgacaaattaaaaataattcttttaactgatcgaattttcacaattgcgatatcttcatcagtactgtaaaatgatgtagagggcatggataatgccggggatgtagccgagaatggtcaaaatgatgttaatcaaaatgtggatggagcagcccgtctccacaaaaacgccaagggagctaaaataattgcaattcaacagtaacaactaacagcacagttgactattgttgcattatcattatttaattcgattacaaatccaaaagccatacccatttaaattcaatttaataaaattatattttcaaaacttagcatatatataataaaaccaaatcttactccaccgcacaacattaattagaaattaataaattatttaaagagaaacaaaccggtaaaatgatggcacaaatgactttaaagaaatccgcaaaagtcactgccatattggaatgagaaaagggataaaaatgattattaggaaggacagaacctgtggaaaaagcgcatttggtaatatgaaaacaaacatgtgcacacaaatgtatgtacacaacacaaatgaaaaccaaaataattcgtttaatgggaaattttggatgagtcatccatccatttctgttgttaatagttaattacaaaacacaacttcgctggccaaatcaccactctgtatgtctgtcctctcactgtctgcgcactcgaaaagtgaattggccataagcttattgagctttcccctgtttataaatacttttgaaccaaataggtattcaaatggagccatagcagaaaaagaggacaatggtaatggaaatgataaaatttaacgaaggacagagaattgcaaagaatgagcaaatgtgggggatgggccctgggaattattcgattggatgttgtggggggggggggcgggggtcctttttccttcgtttcctttccctccttttccctctctttccctccctccttttcttccttttctgtgctgtgctcattcattttctcttcactttctccctattttagacctctctctttcttcactatttgtttgttttcgtgtgacattaagctaacaacaaacagttcattgatcaaattttaacacaaaatgagaggaaatatcagggctcccaactgaaaattttcaaaatcagcatttggccggcaaaaaatcagcatttggggtcaaaaatcagcattttggtaaattttattccaaatttataaaactcaataaaaggtttttgctgcacgctttatccaaaaaa

SEQ ID NO: 31948 - DNA, 1106 bp, Heterodera glycines
aaagactttacaaaataataccctggggagaaggggagtgggaaacatgatttcaaaattttcaattttttacagtttaatctactcaaaacggttcagaattcaataaaaataacattcacggtgcgaacaatggggtttgacaagtttattggggaaaaaaagactttacaaaataatacccctgggagaagggagtgggaaacatgatttcaaaattttcaattttttctagtctaatctactcaaaccggttcagaattcaataaaaataacattcacggtgcgaaaaatggggtttgaaaagtttattttgaaaaaaagactttacaaaataatacccctgggagaagggagtgggaaacatgatttcaaaattttcaattttttctagtctaatctactcaaaacggttcagaattcaataaaaataacattcacggtgcgaaaaatggggtttgaaaagtttattggggaaaaaaagactttacaaaataatacccctgggagaagggagtgggaaacatgatttcaaaattttcaattttttctagtctaatctactcaaaacggttcagaattcaataaaaataacattcacggtgcgaaaaatggggtttgaaaagtttattggggaaaaaaagactttacaaaataatacccctgggagaagggagtgggaaacatgatttcaaaattttcaattttttctagtctaatctactcaaaacggttcagaattcaataaaaataacattcacggtgcgaaaaatggggtttgaaaagtttattggggaaaaaagactttacaaaataatacccctgggagaagggagtgggaaacatgatttcaaaattttcaattttttctagtctaatctactcaaaacggttcagaattcaataaaaataacattcacggtgcgaaaaatggggtttgacaagtttattggggaaaaaaaactttacaaaataatacccctgggagaagggagtgggaaacatgatttcaaaaattttcaattttttctagtctaatctactcaaacccggttcagaattcaataaaaaataacattcaacggtgcgaaaaaatgggggtttga

SEQ ID NO: 31949 - DNA, 1801 bp, Heterodera glycines
taaaattcatatgaaatctgtcacctaaactatataccttacgatttttcatatgaatagaattttttataagggattataaaaattttgttcaaaattttttttcttgcataacttttccaaaaaaatttcgtttaaaaatgacaattttgttaaaatctggctaaattccactcaactttttaaaattctcgcctacctcaagctggaccaaaaacacaaatttattattaataataggctaaaaaaccaaaattttgtcattttttgacaaaatcagttaacaaattgcaatcgaattttcaaattttttttccaggagcggacaccaaaataaacactggcaaaaatttatttacatcataatctcaaaatcaaaatttaaggcattgaaaatataaattaatttgctgtgacaaaataaaatgatgcacaaattagaaaattataatttaaatgaaattttctaaaaataataatattttctttttcctcactaattaggcatgagtaattgatgctttttctgtaagtgccgtctcatatccgatgtctgtctgtcccgctgaattcgaatttccttgccacatttggtgcatttagactgtttggcatttgttcaaaaaaagtccacacttcggatgttcggtgtctagcttaaaattgaatgaattatttaattttttattgaatataaaattaattgagacaatttttaaaaattgtaatctccttcttaattacgtacgtttttttgtatgtggaagatctttttttaaatctaaaaattgaattgaaatttatattaaaataaaaatcggatatttcgtctaaaattagatattattttacgcgataatccaaatttgtccatccatctgtaaatatttgcaaggcttacatcaagaatttttgcaatttcattcacatttttatatttgcgttttccattttcgtcaaattcgttacgcatttcacaaatttggtgaacaatttcaattcgttgttcatcagttctcattttattatattccaatgatttttttctttgaattattaatattttgttaattatttgcgagtttttctcccctttttctgaacattcgtcataaatttcttcaagaaattgatcaatttgcttttgatcagttttgatttgaattgccataatcttatcaccatttgccgatggcaaaacattgctcaaatgagcatcagcagcagaacgattagaggagtcaattagcgaatcattttcagtatttgtccataattttgctgagaatgtcgtcggcatcaagcgaataaaacaaaagaaaatgattaaattcatctgaataaataacatttaattaattttttaagtttatgatttttttttgtatttcgcgaaaaatttatatttaaaattaatatatttataaaaaaaataaataaattgttaaacgaataataaaaattgacattattttttcggagaaaaatacattcattgaattttcaatattatgactaatccattaatgtagcgttcaataactgccaacatttgtcatttttctacaattttcggaacatattttatgcttgtattttttaagaatttttataaaaaaatttttaaatatatcttctaaaagatggatttgtttttcggtggcaaaatgctaatgagtacaattgagtaccgaagtcccggttttttcccggttttcccagcaaaaaattcccggtttttcaacccgaaaaggtcccggtcccgtttatcccaaaattcccggtcccgctcaactctaat

SEQ ID NO: 31950 - DNA, 1277 bp, Heterodera glycines
ggagtacgcctgtaaaaattggggagtttatattcattttagagtgcgctagattcaatgaaacttttaaaaattaagcctaaactttttcgcatatttaaaaaacaattaaaaatttttaaaattttattcacctcacttcttgatagtacaagcatcagagagcattgcttaacatgtaaataaaatttggtttgtttcagagcagtttctgaaaaaatatttatgaattaattttcaaaaaataaataaacagttaaaaactcagaatttctaaaaaaatttaaaatcaattacacaattgtcattttataaaaaaatcgattttttcaagtgtccgtttggagtactcaaacaattatggggagcaaaaatccaacgcagaattaaagtacaggctatagggaagctattcccgaaggattcggtctccccataaatctgggcgcatcggttcggggggactgccccgaaaacaaaaaaatcgattttttcaagtgtccgtttggggtactcaaacaattatggggagcaaaaatccaacgcagaattaaagtacaggctatagggaagctattcccgaaggattcggtctccccataaatctgggcgcatcggttcggggggactgccccgaaaacaaaaaaatcgattttttcaagtgtccgtttggggtactcaaacaattatggggagcaaaaatccaacgcagaattaaagtacaggctatagggaagctattcccgaaggattcggtctccccataaatctgggcgcatcggttcggggggactgccccgaaaacaaaaaaatcgattttttcaagtgtccgtttggggtactcaaacaattatggggagcaaaaatccaacgcagaattaaagtacaggctatagggaagctattcccgaaggattcggtctccccataaatctgggcgcatcggttcggggggactgccccgaaaacaaaaaaatcgattttttcaagtgtccgtttggggtactcaaacaattatatgtaaaataggttatttctcttcattaaagtatccaggctatagggaagtgcgcttctgatcagtttctgaaaaaaaagttaagcctaaactttttggcctgtttaaaaaggaattaaaaatttttaaaaattttattcatctccctttttgatagaaaaagcatcagagtgcctaaactaacatgtaaataaaatttggtgcgtttcagaaccctttctgaaaaatatttaagaataattttgcaaaaataaataaa

SEQ ID NO: 31951 - DNA, 1448 bp, Heterodera glycines
attgataatagcagcagacaactgttgggacgacgcctttacagacaacccattcggtaatgaccactgtcttttgctcttccacctttgtaatttcagagtgagcaagtcgagaaggcgcgccaggacaaagatgatttccatatggagtctttggactcgcccgcttttaagctcgaagcggatgagtcagacgagtcgggtgattatgtccaaatcaacaagaaaatgcgcgagtcgccatatgttaaagtgcgtccgaagcggtcgcggtaaggacaaattgggaggtggtatatatattttagcaaatttattcaacagtctcaactctccgcgcttggagttttctcgattcatcccgaagagttccctcaaattgtctgtttcgagtcgttccgttttggtgtgtgttttcttagtcagcagtttgacctttttatgtttgcaatgttcagaaaagcccagatgacgctggtccatacgtcaactccccgattactttggattagattgctgatggtttgtttcccaccgtaatatacctaattgtaataaagtgttttttgtttcccaccgtaatatacctaattgtaataaagtgttttttgtttcccaccgtaatatacctaattgtaataaagtgtttatctttttggccttatcgttaacataaactgaatttacttcgccacattttttcttctactcatacaatttgaactaatttttgcataccgttatagaaaattcatcgatttctagattagttttttgaaattaatttgttagtttattagttaaaagaaaaatttcagaacatcgtttttctttgctatattgggtaaactgcttacaattaacatttgcttttgaaaagttctcctcatcatgcgtatttgattttgaaatgggagcctaaaattgagttggtgtttttaagatgtatttttttgacaatgtgtttaatggtcgaaaaaattaattagacgtgagcttttagaatttgtcggtcacctggcaaaacggtctttgaaacggacaacccgggttcgtttcataatctaagtaagttcggacccgtccccaattgtaaagttccaactttgattttgaatttacaaaatatttcttaagaacgaacattttttaaaatttccttgtttgtgttttttccattgctgattttttagcctgtgattttgaattgtcttttcaatgaatggaattggatttggagttccgtccattcaacaattacccgacaatgtcttggagttgattttcacctatgtgtcgccttacgaggattacaattccataaaattggtgtcccggcgatggtattatcttgcgaccgcaacgttgaggcgaatgaatcattttttcaacaaatgcataaacttttcatggtttgttaataagaaattcaaatttcgttcctactt

SEQ ID NO: 31952 - DNA, 2209 bp, Heterodera glycines
aaaaatatttatgaaataaaaaaatcgatttattcaagtgtccgtttggggtactcacgcaattatggggagcaaaaatccaacgcagaattaaagtacagactatagggaagctaatccggaaggattcggtctccccataaatctgggcgcatcggttcggggggactgccccgaaaacaaaaaaatcgatttttcaagtgtccgtttggggtactcaaacaattatggggagcaaaaatccaacgcagaattaaagtacaggctatagggaagctattcccgaaggattcggtctccccataaatctgagcgcatcggtaggggggacggcccgagaagccaaaaaaaaattttttttggataaaaattatttaaatgaactgactagataatatttaaaataggttatttctcttcctttcagtatccctgcaaagtttggtgcgcttctgatcagtttctgaaaaaaaagttaagcctaaactttttggcctgtttaaaaaggaattaaaaatttttaaaaattttattcatctccctttttgatataaaaagcatcagagtgcctaaactaacatgtaaataaaatttggtgcgtttcagagcattttctgaaaaaaatatttatgaattaataccacattgagtattatttttcgaaaattatttttttcatttgatcacccaacattctagactgatcggaagctcaccaaattttgcagggaaactgctgagaaccctacaaatgcttataaattttcttagaattttttgcctggaagaacacagttcttcacacttagcacaccagcattattttttttaattatttttttcattttatcacccaacgttctacactgatcagaagctcaccaaattttgcagggaaactgctgagaaccctacaaatgcttataaattttcttagaattttttgcctggaggaacacagttcttcacacttaccacacaagcctaaactttttggcctgtttaaaaaggaattaaaaattttttaaaatttattcatctccctttttgatagaaaaagcatcagagtgcctaaactaacatgtaaataaaatttggtgcgtttcagagcattttctgaaaaaaatatttatgaattaattatgcaaaaaataaataaataatgaactctcttccttaataattttcctgcaccgaaggtactcactcggccgcttctcggactcgtggtgggcccccgcccccccccccccacgcccttcagagcactacaaatatttcaacaaaaatttttaaaaattgactagagcaatcgaacgctaacggacgacctaatggaaaaaaatcccccgaaggagagaatttaattaaatccattccttcgggggaccgtgccgggtgccgcggggtaagcagtgctggttcgtttcatcacggcaccgaaccttttggctagtcagcaatcgttgcttaacttgccagatcggacgggtgcgcatgattccactgttccaagcaccccaccaaaagcaaaacgatataaccaaaatataaggaaaaattttttaaaaaattttttctccatcttcctttttgatactaaagcatcagagtgctaaaattaagttgtaaataaaatttggtgcgctttagagcactttctgaaaaaaatatttatgaaacaaaaaaatcgattttttcaagtgtccgtttggggtactcaaacatttatggggagcaaaaatccaacgcagaattaaagtacaggctatagggaagctattcccgaaggattcggtctccccataaatctgggcgcatcggttcggggggactgccccgaaaacaaaaaaatcgattttttcaagtgtccgtttggggtactcaaacaattatggggagcaaaaatccaacgcagaattaaagtacaggctatagggaagctattcccgaaggattcggtctccccataaatctgggcgcatcggttcggggggactgccccgaaaacaaaaaaatcgattttttcaagtgtccgtttggggtactcaaacaattatggggagcaaaaatccaacgcagaattaaagtacaggctatagggaagctattccggaaggattcggtctccccataaatctgggcgcatcggttcggggggactgcccaggaaacaaaaaaatcgattttttcaagtgtccgtttgggg

SEQ ID NO: 31953 - DNA, 1548 bp, Heterodera glycines
tcacctcactctctctcttttttcctcgttttctctcttctctcctctctctctctcttccctctttcaacctgcctcctctctctctctctctctcttctccccatctctccctctctccccatcactttttttcacaacactctctccctcttttttctctccattctctctctcccttcctttgtccctctgttcatttaactcactcactttctctcacccttattttcttctttgtccctctctctctaacgtctcaccatctctctttcttttcctttctcttttctccgttctgtctctttctcgcatttccttttcttcttctctccagttcttccttttctttctctctcttattctatctctattttacttttcttctctaccttcacattacatccactcctacacacccatcacaaacataaacaaactcgcacgcattcaaccctgcgggagaccgcacgcgttacctactctacctctcccacccgcgcggacagagaaacaaaatccaattcaaatttgtttcactttttgggtcatctttttgcaccataaattattttatgcattcgccatcaatcataaaattatataaataagacaaattcattgctcttgtttaattattctttttgagttaattatttggcatttttatgttgtggaaaaatcacatttttccaaattaaaatggtgaacactccattttaacgcagttgtaattagggctactatttttaggcacaaaaaatcgcgaaattattttttggggatcagtttttttaaaaaatttttcaattcttaagggtatattttttgaattttttcgggtcgcttcttaggggtgtatttttcatttttacaacatttttgttaagcacttccgaaaatcctgaaaaaggcgctaaaaatggcgaaataggcaaggaaataggcatttagacattaagcataaaaagacgaaaataggcaaaattatgtttaaaaagtaaaattcgattttttttttaaattttattttgtcatcccttttaatcgtgcctcatttcacagctaattacctaagacaaaaattttgattaaatttccgagtgcaattttttttttatataaaatgccatcgtcggtggaactgatgaaacatttgttgagcacgggtgagcattcggatgtgcactttttggtgggggacggagacgcaaaagaggcgagtttaatttaaaataaaaatttaattttatttttcaattgcaatttcattaattatccacgttttttaaaggttttgccagcacatcagcttattttgaagagcgcttccgatgtttttgaggcaatgttccgttttgacgccaaaaaagaaagaccggaaaatggtaaaaaaaaataataattttaagggaaaataccaattatgttatttgttcttcattttgtctctgctaatttccctaattaatactacaataggcacctatctttttttttttctggtagcctacagtacccttttggagcggtgtcgggcgggggggg

SEQ ID NO: 31954 - DNA, 1535 bp, Heterodera glycines
gaggaaattgtgtacattgacattgtgagtttcctttttaattttttttgttcagaaatctgttttgccaaggtgtcactgtacccgttctgcatgaagacgcggccgtttcccatcggcacgccaagtgtgtggaccggtgagcagctgtggcaccagcagcagccacaaacggcaggaggccacccccacactgattgtggtatgtataattatagttttatgatcatgactaatttctgccccctttttctacagctggaccaccaccaccggttctccgaccacccgcactgccatggtgccgaccggaggacaaccccttccgcggcttcctcttctgccgtgtgctgccacccagtgcggacgagctgggcgaccgcgagccgctgctgccctatcgcacacaggcagacggacgactcacgttcggcttgtgcgcacgatgcgcggagctccgacagcagcgtacctgtcgtcacacggagcgtgagcgcgcgtggaccgccgcctacacgcatgtggaagtgaatcgcgcgatgctcctcggctaccgtgtgctgcaggtgcacgaggtgtggcactacgagcagtgggcgtcgccggagagcgggaacgggctgttcagcgactacgtgaacacctttctgcggctgaaggcggaggcgagcggctggccggccggctgtgacgacgagccggcccgggcggagcacgtgcgtcagtttggggagcaggagggcgtccacctacgccgcgacaacattgggcacaacccgggcctgcgacagctggccaaggatttgctcaactccctgtggggcaagatggcggagcggccggagcgcgacgaggtggtatacacggacagtgcgcgtgccttccacgagctgttgatggatgcgcggcaggaggtggtcagcttcacgcacatcaacgagcagctggaccgctgtgtggtgcgcaagcgggagccgtttgcacgggcgccggagcacaacaatctggctgtcgcctgctttgtgacatcacacgcgcggctcaacctgtacgaatggttggaggaggtgcggcgggtaggcggccgagcgctgtactgcgacacggacagcgtgttgtatgtgaggcgactgggtgcggccggtgtgcgggagggcaacgcgttgggcgacatgaagcgggagctgcccggccgccgcatcatcgacttcttcgccgctgggcccaagaactacgggttccagcacgtggacgcgcgcacgggccaggacctgagggcggagcgcaaggtgcgctcctttgagctcacctacgcggcggaccaacagctgcagtacggacggatgcgccagctggtcatcaaccactttggcaggtaatggaggtcatggatacaaaagcacttcacaaccaccaccaccccacttttttaggcccgagcagcgcgccaaccatggtggtgggggcggaggcgacattgcggaggcggccaccaagcagcggaccattgccgtgccctgtcaacgctttgtgcg

SEQ ID NO: 31955 - DNA, 1190 bp, Heterodera glycines
atcccctcacgaaaatctgcagaggcgacctttgcaacccggaagtgagcacgtcatgtccctacccggaggcgagtcacacccgaaatcactacctttaaattggtttccaactgtcaacttcagtattgtcaacggactccgttgggcaatcaccgatgcctttgtccgtcttccttttcgcgcgactcccaaactggcgagtgcgtgtcgtcgcgcgtgccgttgccgcccgcctcgccatgcccggcggggaaaatgctgagtgcacggacaggtgaaaaaaccattattaagcaaaaataattgctgaattctttatgcaaaattaaggcaaatgtttgctgcctggctcctgcgaccccaccgacgcaaattcgtgcgatttgcggaaacgcgagttgtgtttgcgcactacgccgcaacagtcgcagtcgcacccgcaagttcagcaagttcggttgcccacggcaccgccagcgacagaccaatcgtacagaaagaagcaccgcgacacagagacatatgagacaagtaggaaagcagaagaagcagaaaggggctgagggaaagagaaagagagagatagagagggggggggggagacagttcgtattaaaagaaattttcaatttttttttgaacagaatttttctaaaggcctctgatggacttccgattcgaaaatttttctctcggtccatcccccgggggcaattgacaaaagtggacacgcattcactcactcattcagagaacccgataagttacgtgtcctcacaattgcccgattacacgtgccaatgtgtgagcggagagaaacggcatccgatcacaggagtgtgccgtaagaaatgaattgaaatgttgcaaataaaataaatgttatgattgatgttcagttcggaatgaatgtcttcggaaggaggacaacgattgcgacacgcacgcccaatgcattgacacggacgaagggtttttgtgcatttgtctgccggggttcatggacaacagtcaggacaaagtgcagcacacacaagcatggcttaatttgattccatttctctttgcagttgcgtaaaccgggccgtgtctgtacgcctttggtcgacgaatgctcctcgggcattgcgaagtgttcgccccatgcgaaatgcaccgatacgcccgaggggtaacaaattggcatt

SEQ ID NO: 31956 - DNA, 1204 bp, Heterodera glycines
  unsure (1)..(1204): unsure at all n locations
ttactggtttgttctgtgactttcatgtgagacctctcgtgtgtcatgcttttgataaaacattagtggtttgttctgtgactttcatgtgagacactaatgtgtgtcatgcttttgaaaaaacattagtggtttgttctgtgaccttagtgtgagacactaatgtgtgtcatgttttgataaaacattagtggtttgttctgtgactttcatgtgagacactaatgtgtgtcatgcttttgaaaaaacattagtggtttgttctgtgaccttagtgtgagacactaatgtgtgtcatgttttgataaaacattagtggtttgttctgtgactttcatgtgagacactaatgtgtgtcatgcttttgataaaacattactggtttgttctgtgactttcatgtgagacactaatgtgtgtcatgcttttgataaaacattagtggtttgttctgtgactttcatgtgagacactaatgtgtgtcatgcttttgaaaaaacattagtggtttgttctgtgaccttagtgtgagacactaatgtgtgtcatgcttttgaaaaaacattagtggtttgttctgtgaccttagtgtgagacactaatgtgtgtcatgcttttgataaaacattagtggtttgttctgtggccaaaaaacaagaagagatgatgaaaatgccaagaatgttgtgccataaggaaatgccacaagaaacaagaagagatgatgaaaatgccaagaatgttgtgccataaggaaatgccacaagaaataagaaaagataagaacaagaagagatgatgaaaatgccaagaatgttgtgccataaggaaatgccacaagaaataagaaaagacgaggaaaatgttcgatgctggtgggttgagtcccagtgattgaaatgttggtgggttgtcccagtgattgaaatgtaggagaattgagtgccagtgattggaatgtaggagaattgagtgccagtgattggaatgctggtgggttgagttccagtgattgaaatgttggtgggttgagtcccagtgattgaaatgttggtgggttgagtcccggcgattggagaaaaagccaagaaaaggatgcgaggccgcgaagcggccgagccagtcgattttatcattcataatcctataatacaatcgtactaccntagcgggggatgcgccgaaggcgctgaccccgctagtt

SEQ ID NO: 31957 - DNA, 950 bp, Heterodera glycines
  unsure (1)..(950): unsure at all n locations
ttctcaaaaattacatttttaaatgacataatgccatactttaaataaatattagttgaaaattacaaagatttttcaaatttctttgatcttttttaaacttttccaaatgctcattttcaaggacgtccttgcatacaaggacattttttattttcaagaaagagggcccattttcaaggacgtccttgccattcaaggacggataccatccctgatttacattaaaacaatttcattaaaaatattaaatatgaaaaaaaaattaccggatcatgataataattgaaattgacgaaaacctaaaaaaaaaaaaaaaattaatttttaatttataaataaatatttattattgtaaataaattaatttgatgaaaatggttgagtgagttataatgaggaatatccatccaaaatgtgaaaaaataagggataattttctttttcttttttttcaaaatgtgccataaaaaattttttgttgacgcctttaataattggggccagttcttcttcacccatcaataattaatttgtttttaaaaaatctttttttacaatcctccagcctctagagaaacaaaagcatttacatcgatttttaaaacatttaaattttccaaaaatttgccagacattaactcattaataattaatcagtttttaacagtttaatgggaatttaagaaaaaattttgccattgaaagtaatgttaaaactaatataaatatttaaaaattaaaaaatccccaaatttagtttctcccacttttttcggaattcctaattgatgataggtacccaaccaattttttaaaataatggtgatacccaatttttggaaatatttttaaaattcccaatttcattattatattttttaaaaaataattaaaaattcccnanattnggctctcccactttttcaggaattccgaattaataatgg

SEQ ID NO: 31958 - DNA, 1062 bp, Heterodera glycines
acatatactcaaacgccctgaaaatcatttttagagcatatcaactgatgacagtcactgtcattgtttccaaagagatttctattaccagattgccaaaaaaagagatagccatttttttggaccgtccatacctcacatatactcaaacggcccgaaaatcatttttagagcataacaactgatgacagcccctgtcattgtttccaaagagatttctattaccagattgccaaaaaaagagatagccatttttttggaccgtccatacctcacatatactcaaacggcccgaaaatcatttttagagcataacaactgatgacagccactgtcattgtttccaaagagatttctattaccagattgccaaaaaaagagatagccatttttttggaccgtccataccccacatatactcaaacggcccgaaaatcatttttagagcataacaactgatgacagccactgtcattgtttccaaagagatttctattaccagattgccaaaaaaagagatagccatttttttggaccgtccatacctcacatatactcaaacggcccgaaaatcatttttagagcataacaactgatgacagccactgtcattgtttccaaagagatttctattaccagattgccaaaaaaagagatagccatttttttggaccgtccatacctcacatatactcaaacggcccgaaaatcatttttagagcataacaactgatgacagccactgtcattgtttccaaagagatttctattaccagattgccaaaaaaagagatagccatttttttggaccgtccatacctcacatatactcaaacggcccgaaaatcatttttagagcataacaactgatgacagccactgtcattgtttccaaagagatttctattaccagattgccaaaaaaagagatagccatttttttggaccgtccatacctcacaatatactcaaaacggccgaaaatcatttttagagcataaacaactgatgaccgccactgtcattgtttccaagagaattctattaccgattgccaaaaaa

SEQ ID NO: 31959 - DNA, 1026 bp, Heterodera glycines
  unsure (1)..(1026): unsure at all n locations
gtaaatcgcaattgtttctttctgcagtacaaccacgaatggtccaagggcaaaaaagaggacgataatccttggcgaaattcgcctctcagaatcaacacagcttttctgttactacttgcttcgtttaattatgcaggtttcgccattaggctattcgctcgcgatacaattagccctatagaatcttggagcaaaaactagtaatattttatcctttagaaagcatgcaaaatagttcgttatagacttgtgcaacaactatgaaataattcgctgaaattagtgtcctttcgacaatatgaaattaatttcgtttattttagaaccttaggttctgatgaattaggtaaaattaagttctaatttattattaaaattatgaataagggtcaaaaagcaattaacaggtggtaaatcgcaattgtttctttctgcagtacaaccccgaatggtccaagggcaaaaaagaggacgataatccttggcgaaattcgcctctcagaatcaacgaagcttttctgttactacttgcttcgtttaattatgcaggtttcgccattaggctattcgctcgcgatacaattagcccgatagaatcttggagcaaaaactagtaatattttatcctttagaaagcatgcaaaatagtttgttatagacttgtgcaacaactatgaaataattcgctgaaattagtgtcctttcgacaatatgaaattaatttcgtttattttagaaccttaggttctgatgaattaggtaaaattaagttctaatttattattaaaattatgaataagggtcaaaaagcaattaacaggtggtaaatcgcaattgtttctttctgcagtacaaccccgaatggtccaagggcaaaaaagaggacgataatccttggcgaaattcgcctctcagaatcaacgaagcttttctgtactacttgcttcgtttaattatgcagggttcgccattaggctattcgctcgcgnatacattagccctatagaatcttggagcaaaact

SEQ ID NO: 31960 - DNA, 1058 bp, Heterodera glycines
  unsure (1)..(1058): unsure at all n locations
ttttcattttttctagtctaatctactcaaaccgggttctgaattcaataaaaataacattcacggtgcgaaaaatggggtttgacaagtttattggggaaaaaagactttacaaaataatacccctgggagaagggagtgggaaacatgatttcaaaattttcaattttttatagtctaatctactcaaaacggttcagaattcaataaaaataacattcacggtgcgaaaaatggggtttgacaagtttattggggaaaaaaagactttacaaaataatacccctgggagaagggagtgggaaacatgatttcaaaattttcaattttttctagtctaatctactcaaaccggttcagaattcaataaaaataacattcacggtgcgaaaaatggggtttgaaaagtttattttgaaaaaaagactttacaaaataatacccctgggagaagggagtgggaaacatgatttcaaaattttcaattttttctagtctaatctactcaaaacggttcagaattcgataaaaataacattcacggtgcgaaaaatggggtttgaaaagtttattggggaaaaaaagactttacaaaataatacccctgggagaagggagtgggaaacatgatttcaaaattttcaattttttctagtctaatctactcaaaacggttcagaattcgataaaaataacattcacggtgcgaaaaatggggtttgaaaagtttattggggaaaaaaagactttacaaaataatacccctgggagaagggagtgggaaacatgatttcaaaattttcaattttttctagtctaatctactcaaaacggttcagaattcaataaaaataacattcacggtgcgaaaaatggggtttgaaaagtttattggggaaaaaaagactttacaaaataatacccctgngagaagggagtgggaacatgatttcaaaatttttcatttttctagtctaatctactnncaaacggttcagaatttcataaaaaataacattcacggtgcgaaaaatgggggtttgacaagtttattgggg

SEQ ID NO: 31961 - DNA, 1241 bp, Heterodera glycines
aaaaatggacatttgccccactctcttgaaaatatattttaaaatatttttttaccaattttcaacgaattttattcaaagactgtgcatcagcaaaaaagcaattaaaagaaacgcaaaaaaaaaaaaaaaatcacaacgatagacacctatttttttttgttaatgcgtacatcaacagcaaaggcaaatttgatgccaatgaaaacaaaaataataagcaacatttatatatacaaattttaattttaaaaaattaaaaaacttttgaattacttagaacggtgcaaatgggttttgtagggcggcgcaaatgtcgcggcgcaaaagtcgggtcaccgccaccgactaggaaaattggaattttgaaaggaattagtgagaaaaggaatccattttccataatcttttgattttaacataacaaaaaattatttttaaatataaaaaatcgtttcataataatttcctttttaaaaattttgtcccaaattccgcgaatcgcggattcaaaatcccgcggtacggatcgtggatgtggaaaacgacgcggatcgcggtcggctcctcacctgctaccaatcacaagacatcgtccgaaacatccttgttgaattgaacaatgtataccagtggagatgaccagacaatgaaggataaaaggcgccctaatttggatttatgtgtttcaacttaacaaaaaagggaatatggcaacgatttgaaaaaaatgtttgtaactgacggtttttacgatgttaaagggttcatgagctggcttaattatttataattggcgcttgacctaattttcctctattctcgagagaataacccaaaaagcacccataaaaactccgactcctgtgctatttcaatcttcctttaatgcagggctgggatcgtccaaactctctttccaagtacagggatgccattttccaagtagataatgcggaaattttgttaaatccaagtccatttaaaaaattttcaacacataattaaaaaggttaattttaaatgtatccttttaaaatattttttgtttttgctgatcattttcctcatttcgctgcatgtgacttttttttgctgtgcgcttttttcgaaaaaacttttggagaacaaggggggttcagaggtgccgataggcacccgacggtaaattttttgaaaatgaagcaatttttaacagattttgaattaaaaaaataatttattcatgaaaaatgccaaag

SEQ ID NO: 31962 - DNA, 1152 bp, Heterodera glycines
  unsure (1)..(1152): unsure at all n locations
gcctgcannggtcttgaactanagtgaggatcaattaataaaaattctgcacgattataattttgttagtttctgagaatatatccataattgcaaatttgctcttttgtccatattttaacacttttatggattttcatttattctgatttatgtttttcttgtttggcggcgagtccaatctgacaaaataaatatttgagactggcacagtcgatcttttgattggtctttttcgatcgtttttttgttttaatatcgaaagaaaatcagtcgaaataattttaaaatcgaaaatccgaccgaaaaatttagaaataaccaaaaataaaaaaactctcaaatgtccaaaaagtttaaattactttttaaagaaagacttaatttaattgtctagtggctaacaataagcttttagtctaacttatcctttacattttcaagcccatgaataaaaataaaaattttttaaaatttgaattgactcgacgaccgcgaaaagttctttttgggcataattacttatcagaatgcactttaattttaagaatctttctgtcggagcttttcagcatcaccggttttgtcgactattttttgggcccaagggtcagccagcatttgtgaataaagtttcattaattaaaaatttctcaattacaaacaccaatttttcctcgtgaacacccattttatggttatgaagcgtccgtccctccatagaataatttttagtcattatattttaatttgaatgagatgcagctaatggcctggaatattgattatgcttttattgcgtatggcaataaaattgattatttcattaataaaaattattttatttctccattttgcaaaattttcattttatgaaaggaaaaagtaataaaaatattaaaaatgaaatatgttaattttttaaaataaataaaaaatatttgaaaatgaaataatttaagttttgttttagggtgataaatattaatatttttcatgttttataacggaaacttcatcatttttctttttttggtatactgtttatattcatcagtgattttgtgtgaaggggacacttactgactattcattacaaaatgttacttaggaggtttaattttagagtctatggagcatcagcttcgacct

SEQ ID NO: 31963 - DNA, 1420 bp, Heterodera glycines
tagtcggacatcgctctcaagtccgcaacaaatgtagcgttcgagtgttgttgaatacgtttttgattttatgaatttaattttatttgctattttttgtacacaaatgcttttgaaatgatggtgaacacagagaaaacgagttgtgaaacaaaagaaccggcagatcagcaaatttttggttctttttttttgttgcttaaatcatgaaaaaaatgccagaaagtgatggcaacacagcgcactcagccgaaacacagtcggcgcccggcgatttgtctcaaccgtcaaagggttggcgacatcggtcgcaccattgctacactgttggccaccacttacgtcctcatccgcccaaacggctgcagcgtcatgcggaggaaccgtgcgtgagttgtgggcatcgcgcgactgccgcacgagggaatggcggcaactgcacagcaatcagcgaccatcagcaggatgatcacgaaaatcggttaccaatttctcatacatatttaaaagcaaatggctcccattttacctgaaaatttttggcggctctgtgtagccaagtttttttggtttttgactcccattttttgggtagttttggtttggtggaactgttaaaagagggaatggaatgcgatgcaagtataaaaataggaaaacgcttcattttttctcccccgtttctcctttaaataagtcgcaaataaaaaattccaccaacttttggatgtgtttctaaaatttaaccaatcctttgattcagtcaactttccctcccatttataagaattctcttgtcgctccatagttactcagttttttttgttttttagccctttaatgcatcatcgtcaaaagaacggcagcaatggtgggaggagtgcacgctgttctcaaccggcaggtgaacagcaacggcagcagagacaatacgacaaaaggcaactgcgtggccatttgcgtggcacccgaagcaatgggtaattattgtcctattttgccaagtagcgccggtgccggcggataaaattttagtttttttttcaagatttaagtataattactattaataattctcatttgttccaatagctttgcatcgggcccacccttcccgaaccggacgcttgacaaaaaacggagacggcaacattcatgcgattatgaggatgatgaagaagaagacatttgtgatgaccattacccattggatcgtgcaacagtgcagaatgagcgacaaaagcagcaacaatttgcaataattgaacaggtttgttgggggggattaccgtcatttgtggcctgtgcccaaaaaggaacaatttttataaggaattgaggaaaaaaaatttttggcaaggggaggtcaccggcgcggaaaaaggcgcaaaaaaaaaaatcaggaaaaaacaaaacaatt

SEQ ID NO: 31964 - DNA, 1556 bp, Heterodera glycines
  unsure (1)..(1556): unsure at all n locations
aatcggtgccggtcgcgcacacttttggtggagacgctcccacttgaagccaaagtactcgtcgatgaacttggcgttgttatcggtccgtaactggttggtaaaaaacctattaaaagtatcctcatgcatttttgcaccccctttttttgtcaccatttccgggtcgtcacagttcacgcgtacaaggataatttgcagcggtttccgtccgccctcaaagcgcagccaattggcacccgcccggtttggagtgttcagcgtgccgagcacttgccggtgaagaaaggcagccaattcacgctcgctcagtgttttgctaaataacttttcttttaattttctggccgatgcactcgccatccaatggaacatttggacgaaaataaatcccttagaaattatttttctcaaaaatgttaaaaatgaggtatttgtgccatagttccctccgtcccatccttcaatttcgagccaattattccaattggttccaaatgttaatacagaaacgcaatgcctcgtttgacgaacccgttgagtttgtgcagctgcagcttggactcgaacacgacggtcttgggcctctgcttgcgcaactctttgcccaattcgcgcgccttttccgccgcgtcgtcgcccggacaaattttgaccgctttaaaaagttgtgatgcaaaagaccaaagatttgtgagcagatttaactcggttacctcctttcgacttaatggggctgaggagagacaggctcattttcaatttttctgattagacaaataagtgaggcagcgttagacctcgccactttccccttcctgggacacatcccccggntggtgtgagtttgggatgagttataaacaaaaagggatgttcgtgaattctcgctaaagatatcggtgagagtctctgaacatctttcacctccgttcccctccttcgttgtcgtcccttttgtcctttttgtgtccgcgtgcgccttttctgcagcatcacaaattttcaccgctttcgttgtgcgcgaaatgtccgaaattgaagagacactcgccgcaatcggaagtcctggcagaaagtaaaagttaagaaattaaatcgaagatcagctatttagcattttgaaaattttctgatcagcaaatcaaactcaaaaagtcgcgagaaatcaaatgctgctggcgcagttccgcgaaaagatgctctgaaaatgacactatcgagcaaatcccatgaatttgaaatcataattcattgacccaatcattgccttatccgtggcactttttgttaaatcaaccccacaatttgccgctaaccttcgtcctccgttttcgtctctttggcccgttttgtgtccgttttgctgtccatattttgtccaccatccttgttgccgctcaccaacaattccaactccgcacggcgttttcgaattcgattgatcgctcgggtttctttccgacgcttttgtggcatttctaattttattgtaataattgaaaattaaaaaacagccgaaaaaaagagaaatatgtacattgaacataatagag

SEQ ID NO: 31965 - DNA, 557 bp, Heterodera glycines
attcctcaacagtgtttcatttacagctgccagagttttagttggaactaaaaatttaatttcgttataaactccaacatttcattggtgaatgtctaagattcaattccatatggctctaggaaaatccgacactggaaaatccgacactggaaaatccgacactggaaaatccgacacaagcagaaaatccgacacgagaccaacttaaatttaaaaaatatttttgattgtttgagttaatatctggctaagtttatcaagttttcgatttggatttaaaaaaaattaattgattctgcattcgatgggatattgatggcaaataataaaagggttgtcgattgttgcgagtcgcataaatctctgtgagattcatgtcttgcaccacgtacactttcttatgcttcatgccctttcatctgattccatttgccggattgttacaatttttttgagatgatcaaaaagaacattgaaataatatgattattatatgcctaccttaaatctattttatagcaataaaaatatttattttaaataacttaagtatt

SEQ ID NO: 31966 - DNA, 884 bp, Heterodera glycines
ccttggactatagcaccaaacggacggacaatgtacgtgaatcaaagtagaaccgaaattcgtatggaaattttaagtgaaaaatgccaaaatttttcaattggagaagtttgggtagaataaaacatttagaaatatttattaattgttagttttaggagtgtgatgtcagagaggaattgaagaaaaataaggagatgaaaaagttctttgaaagtgtgccggacaagggaccgatcaatccgagggatgcttatgccgagggaagaacgatgccattttgtttgtacgcaaaggctaccgaagaaattgagatatcaatgtttgacatcattagtttgtacccctttgtgaattatggtaaaaatctgcttgcatttttaatattgccattcacttaagacaccccataccccgttggagtcccgaaaattgtaatgagcaggaattttaatgtgaattggacagcacccgacgacgtaccctatgatggacttttgaaagtaaaagtgatcccaccgaaaaatcttttgaccccctcctccccgtgcacatcgatgaaatgctcctcttccctaattgttggtcttgtgcgagaagggccaagaatgaatttgtgatgacaaaagatgtaaagaaatgtaaccatcgtcccacgcagagagcatttttggggacattcacatcaattgagttgcggaaggctttagagctaggatatagaattgtgggattctatcgagcgtatcattttgaacagtttgacagtcaactgttcaaaggatatgtgcggatgtttttgaaagtaaaaagtggcgacgtgtaaataagaattactattacttttgcatgtgaaaaatatagcaattgatcattttttgatc

SEQ ID NO: 31967 - DNA, 1782 bp, Heterodera glycines
aaaaaccccaaaaaaaaaaaattttttgggaaaaaaaaaatttttttaaaaagaagcagcctagtaaataatttttaaaaaaatggttttttttttttccctttccagtttcccccgcaaaagtttggggggtcttttgactccagtttttgaaaaaaaaaagtaagacttaaactttttggccctgtttaaaaaaggaattaaaaatttttaaaaattttattcttttcccctttttgatagaaaaaagcatcagagtgcctaaactaacatgtaaataaaatttggtgcgtttcagaaccctttcggaaaaaatatttaagaattaattttgcaaaaaataaataaaaacgaaagactcagattttcgaaaaattttttagagcaagctagctcggcgctcatttcagtgtaagttagtcctttaccggggagtatccctgcaaagtttggtatgcttctgctcaattagcaaaaaatatgagtgatcaaactttcactaaaaagttaagcctaaattttttggcatatttaaaaagcaattaaaaaatttttaaaattttattcacctccattattgatagaaaaagcatcagagagccttattaacttgtaaataaaatttggtgcgtttcagaaccctttctgaaaaaatatttatgaattaattttgcaaaaaataaataaaaacgaaagactcagattttcgaaaattttttttgagccagctagctcggcgctcatttcagtgtaagttagtcctttaccggggagtatccctgcatagtttggtacgcttctgctcaattagcaaaaaatatgagtgatcgaattttcactaaaaaagttaagcctacattttttggcatatttaaaaagcaattaaaaaattttaaaatttaataattttcctgcaccgaaggtactcactcggcctcttcgcggcctcgtggtgggccttcgccccccccctcccacgcccttcagagcacgacaaatatttcaacaaaaattttgaaatcatgtttcccactcccttctcccaggggtattattttgtaaagtctttttttccccaataaacttgtcaaaccccatttttcgcaccgtgaatgttatttttattgaattctgaaccgttttgagtagattagactataaaaaattgaaaattttgaaatcatgtttcccactcccttctcccaggggtattattttgtaaagtctttttttcaaaataaacttttcaaaccccttttttcgcaccgtgaatgttatttttattgaattctgaaccggtttgagtagattagactagaaaaaattgaaaattttgaaatcatgtttcccactcccttctcccaggggtattattttgtaaagtctttttttccccaataaacttgtcaaaccccatttttcgcaccgtgaatgttatttttattgaattctgaaccgttttgagtagattagactagaaaaaattgaaaattttgaaatcatgtttcccactcccttctcccaggggtattattttgtaaagtctttttttccccaataaacttttcaaaccccatttttcgcaccgtgaatgttatttttattgaattctgaaccgttttgagtagattagactagaaaaaattgaaaattttgaaatcatgtttcccactcccttctcccaggggtattattttgtaaagtctttttttcccccaataaacttttcaaaccccattttaacgaccgtgaatgttatttttatcgaattctgaaccgttt

SEQ ID NO: 31968 - DNA, 1036 bp, Heterodera glycines
ttcaagcgcaagctagccgagttggaagcgacaaacgtcgcagcgcatcgaatggtggtgccaacccaagcaccgccggtgactgctgccgctgaaggcacatttcgggcattgccggtgatcaaattaataatgaattaatttgtgttaattaaaaaatattaattaattttaaagttacctgcgccagcggatcccgacctgcaatcactgactttcgaagcaagcatggcagttgataaagcactgctaaagtggaaagaaattgacccgcaggtggccaattggctgaacaatttcaaagtgagtttattattttatttattattgttaataaagaaaaagtccgcaaaaggaaattatctatttaaaatcactttggattagcatatccattaaattgaatttgtttttgcagttactaatttgattatagaatttttgatttttttgaattgatgaaatgattaattacctaatatctaattaagttgttgccaaaggctgttgcctacccacaaaagaatttttgccaaatttattttcggaaattaaatgattattttaaaaaatgtttacgaaaaaattattatttttttaataagtttgtattaaataggaaatgctgaaccgtcttgggaatgacgccgacaaatatcgtccaagaaaaccgccgcgtgcaaattaattgttggaaattaatattataaaaagataaattgtgcgtgataattgtatctgataatttgtttacattaatattataaaaaaatgttcataaataagactgaaaagcatcaagaatatgccattcaaaatctatggtttgtctagatttttatcatatgatccgcttcatttcagcattttatataagtttatcgattattttcgtttttattagttcggtttcttcgatttttttccattctccgtgccatgccaatgccaatctttgctttctttgcttcgcttggcttccccccccccccccccgggatccgtcggtgaccgtccgtcccgcttcttctttttt

SEQ ID NO: 31969 - DNA, 1240 bp, Heterodera glycines
ctaatatttaatggtaatcatcatttttgtctactgctgattagtaatgattatctgctgttgagcgaacttaaattagtataattataataatgattgtttatttttgttcattgttaattagggtttaaccacctgttacgtaaaaaatgctcattagtaattgacactgctcattattttaatgatgatatcacttttattttttaattatcctaacaccagttgcaaccattatgattttatcattctctttctcagtttctttaacatgcccattcaatgcgccacgagggcaacttcctaattacaatacaatattaggatgctcgagattctcgaccttgtttctcgagaagaaaaattttgaaaaaaaatctgcaaattttctccgctcctgtcctggcggcctttacaatttactttgaaggaaaacgccggcgggcaacagcactgccaaaaaccctggttttgccaattgaacgccaaccgagatttttttgggatttttaaaaccggaatatttcgttataactttgtttaaaattttcagactttgatcatatttggcctgcctccaatgataataaatgaaggggttattttttgagaaatttttcaagatttttcattgaaaatttttttagttagagccaaaaaatcccgacccagtatgaaatcacaaaaaattaaatgcaattaaaaaaattgtttttttaaaataaatgcttgaaacatttactatctgattaattggcttctcatttcgtatgataaaattgttaagtgtacttggatttcacaaattttcccattatgtacttgaaaattggcatccctgtactcaccaattcttatatggcccatatccgccatgccaattcaatccgccacgaggccaactacctaattattagggccgctcgagattctcggtcttgtcttggtttacagagaaattctcgtctttttggggtctcggtttcgacactcatttgtcaaggtcaattcttctcgagtttcagcaaatatttcctggttttcctacttacttagcgccaatcagtctttttttttttggattttcaaaatctggattttcattatgacgttgcttaaaattatcggttttgagtccgaaaatctcgcatcgatactgaaatcccggttccgggttctaatattaaaaattattaacaatgaaaattcagtgccattttccgaaaaatttgcaatgtaa

SEQ ID NO: 31970 - DNA, 1589 bp, Heterodera glycines
atctcttatattaaaacaattaaagaggttagattgtaaataataattcagtaaaaaaataaaagacgagatcacatgatagaaaatttaaaaattaatcacttaccccattatatattaatatataaaaaataaatttttacctatactaattctttaataaatattctttaaatataaataaaattttataccagaatattcgtatattattcactttaaatttatggcatatttgacgaaaactcgtacaaaatgctgcaacaaaatgcccaaataaaaatgttaagcagcacaacgtaaataaacccaccaacgacgacttagttattacgttggagaattcaagtacaaatcgtaggtataatgatagcagtaaaataaaaaggaatgatgtgatgctttttatttccatcttattttaaattattattagcaaaatttaaaatcaaaatatacaaaatatccaaaattgattctaaattatatattgaaaattaaaaaacaaaatttaatttataatattttttaaatcttttctagatccagaatctagcaaaatgcatttaatttaaaagaaaaatactgaaaagtgcaaataaaatgttcaaagtgaatgaaataattaagaaaaaatttattgatttagcaatcgaaaaaatttctaatttcttttaccaaaaataatccaataaagaattaaattaacaataaagcaaaaataggaaaaccaaacaacttcaagtataaattgacagtatttaaacagtataaaaatattatattgtaaataataaaatactggcaaaatatttcaataaacaatataaataattataagattttattattattaaattaacttattataaatttaacaatatcgatcgattaatagaataaatctttatctttgaagtgtacagaatatgaataattaagaaaccgagcattggtttgtactaaaaattaccaaaaatgaaaaaaatatataagaacataaaaatgcattagtaaatttagtaacaaacaaatgcaataaaatttcaatttaaaatattttgaaaataattacatataatttttaacgtgatgagacatttgcgccgcgccatttgcgccgcacagcaaaagtggacacttgcgccactcagcaaagtcgacacttgcgccgcgccatttacgccgctccatttgcgccgcgacatttgcgccgcctagcaaaatagacatttgcgccgcgcagtcaaaaataatatttttcatttcaatttcactaatatcaataagttttactaaaactataagccaacgacaaaaataactaattgaaaatttgaaaaaattactagtcacaaagattggcattcaattttttaaccattaaaatcttaacattgaataggttcatcaaagttatgaaaaaatgattaagaatatacaaactaacaaaaaactaaaaaaaaaaaaaagaattttctgtagaaaccccaattatttttttgctaaggaaaaagaattaaattcaattcccttgtaattacttgggagggagttattttcatcgattttaatttaatttcattgaa

SEQ ID NO: 31971 - DNA, 1455 bp, Heterodera glycines
tcaaactaatcagaagcgtatgcccaccccgaggtcccgtatccgaatcttctccagctctcgaattctctcctgctccattctctcgcggatctcttcccgcctcgccttcagtctctgctcctgctccgctctctccctctcccgttccaattccctctgccgttcctcctccatctccgcctctcgtcgtctctccaattcttgcctttcgtgttcctttcgttctgcttcttctctttccctccgttcgatttcggctcttcgtcgttcctccttaaaacattcagtagaacaaatattaaatcacgaaaaacacacttcttctcggaggatgcgccgacgccgttccaattcggcctgccctttgtccaaattatccttccgtttgtcttcaaaagttctgaattggccatggcccggtttttgcggcggaggagccgacgggtcgtcctccgtggccatcgtagacggagagactgttttgctccggttgcagaaggaatggagctcatttgggagtttggaaggtaatgcatagccagcctaacaaagaaagtgaaaaaataaattcggactaaaataatatttcacaattgtaaatcgaccaaaaacactgaccttgaccatttcgatcagaaacattgcggtgcaaaactcttcaatgcccaagcacccgtccttgttcacatcagacattgtccagatttgtgccaaaatattcgtcggcaactgactttctccaagcacaccacgagcctgaattaattataactttatttacatttttacaatttttgacaacctgttgccccgtcaaaagtcctactcgacttttgtcgagctgattaaacttctgagaaaaccgcaattttaacggctgtggcaggctccagtcgcccaattcttttattcccatgagaaacgggggtgaagttgcggtcactggtgtttgtgctaagtttttatagcttttttaccaaataaaagaattcaaagtgaagtgacctgctgaaaaacttccgtagggacgatgagaagacgaggccatcgccggcattgagccataagtggacattggacgtggatggcttacggaggacggcaaagccgtcgatggaccaccgccattagacagagaatatgacgacggagttgagggaattggcatgccaccgccaattcgaagcatcgactcgggcagcaccgacggaagtgaaatgccggacaagcaattgagcaccaatttcatagcgattgaaaactcgaatcggtccagtttcccatccttgttgacatcagccaactgccatatctgagaacaaatattagagaatgtgtttcatttccttcaaaatctattctttttttaaatatggaaaatcactttgccgacaaactacccaatttaattaaaaaataaattaatcacactcacctgagccagcatgatag

SEQ ID NO: 31972 - DNA, 1267 bp, Heterodera glycines
aattagagtgccactggaccggtaattttgggcaaacccgggaccgagaccttttcgatttgaaaaaccgggaatttttggctgggaaaaccgggaaaaaccgaaactagtcccggtcccggaccgggaccttggtactcagttgtccgcttccaggtcccggtcccgtggcactctagttataaatggttgtatttgaatggtactgaaattgtttcttacttttttcgactttttcaagaaaataacaaattcatcccccaacttttttagaattctccagccataaatagcaaaaaaatttctaattatttggtgcccgaaaattaatttaaaaaagaaattagcattttccaccttgatcacgtccttgtacgcctccatcagaaattcgtggtcgcatgcgatgcggtagtacagttcgttcagcgactgttgcgcgtcagtcgcctgctcgtacaactcgcgggggaacggcgacggcaacagggcgattggaggcgccacggacacatcgttggagtatttgtacttgtcatccccactgcgtccaacgaggcctgaaatttaaaaaaaaacgcatattaaattaaatttctaaaaatccataattttttattttaattttaaaaaataaaaattggaagcgaattaatattaaattgtgtgaaatatttggtttagtttaattgtaaattcattaattattggaatttacatttattgtccccttttatgaacctgatgttcaatttgatcaaattaaaccaaagaattatccgagttttttggaaaattaatataaaaaataatcaaatactcatgtcacggcatttttgagcattaattcttgtaaaaataaagtatttatcaaaaatagtaaaaattgtagcagaagaccaaaaaagttataagtgccatagtgtagaattttgacaatttaggcatttttaactcgtaatgaaattgagtaatctttgtctggccaaactctgttgatcaaaattcattttggctcttaatgtggtgacaagaattccgtttaaatttcagtttttcagttaattgcatgtcagcatcgcacttaaccaattaggcacgaaatttctattttttgccataaaattgggcatttattggccaaaaaccatatttgtcaaactgccaaaaattggtggcgctttaccattgaatgcgcgtagtcaaccgcgtactcggccaacaatttcagcttcgcatcattgcgcaccgcggccaacgcgtagtc

SEQ ID NO: 31973 - DNA, 1529 bp, Heterodera glycines
  unsure (1)..(1529): unsure at all n locations
aatccaattttttaaacacaatgctattacaagaaatgcccaactattctaattaagatttgcttatatgatcttagtcgtgaggaccaaaataaaaccgaaattaaattaacaaaataaaattgaaaaatgaacattttattagacaatagttcccaacaattttgcataattttgaatgaatgttataccgtttttaaatgcattaattcgtccgacattgccaaacttgttaaatttactttggataattttttgataaacattcccattaaaaagattttgcgctgtttttccccgttgtcattcaatgcttcggacagtgccaattcgtcaattttcttgcgaatggcggcaaatgattctttaaattgcgcatttggggcattcatttgactaacattggtaatgtaatcatgcaaaagtattttatgatgaaaataaatggcatcggtgccaatttgtgttaaaagtgattgtgcaattggtcggccctcttcactcaacaatttttggtaattgtgcaccaaattcagctcaaaagcctcttcttaaatgttagaatttggttaatttaggtcaattattttaattagggtttttttcgaccatcggtgagagaaaagccatgagaaaattgcccgataaattttgttgggtatagctggaaaaatttgccgggattggcaacaccttcatcggcgtagaaattttccaaaaaaaaagaaacagaaatttcttaaaaaaagataatagagatttttcttagggcaaatgtttgaacatgggccgaaatactgtttcatttcttcaatttagtttgttataattaaaaattgtctttttacctgtaaataatttttgttcattttttggaatctcaactggtttttgtgataattgtttaaatatttcagtgtttttcaccaaaataagctcaactcgctttggctcaatttcaataactaaaataaatttcataatattttaataataataattttttattattctgatttttacttttcagtttatcaataaacggttggaattgtgtcaattttctgattgctgcttcatgcaaattgaacaaattctctttgatgatcaaatcaaaatcatttgctgatgcttttgttaatagcattttgccattttcaaaaatttcctttttaaatttaattttttcttttacgctttgccactgtttttcctcagtttgccattgttctgtgccttcattgttcttctcctcctgggccccgttcattaatatttccatttcggccatttgatcatccaacttttcctgttgttcggatttcaattggtcaaagttattcatgaacctaaaaattaaattatttattcaaaaattaaataaataaaataatttaccattggtaaatgaccaaaatatcaagaaaatntttggcncttttccgtttgaagtcntctctttcnnccgatagcaattttatgtagctgtaaagaagaagttcaaaaattttttcctcatttaaatctat

SEQ ID NO: 31974 - DNA, 967 bp, Heterodera glycines
cagaatttgaatggccagtcgatatttacactgagcacctgttgaagcgggtgatgcgaagccatagcaaactgtatttttaaattctggccgcaattctaccaaaaaacgtgtttagaccgcagtaactcggctcagagtgaagattaagggacgcaaaagagacgatttaaaagcgattcgaaaattctatcgactgatataataacgatgcagtcgcggcgttgacaactgagatggaaccaaaagttccataatatctttccataaggctggaaaggcagaatttgaatggccagtctatatttacactgagcacccgttgaagcgggtgatgcgaagccatagcaaactgtatttttaaattctggccgcaattctaccaaaaacgtgtttagaccgcagtaactcggctcagagtgaagattaagggacgcaaaagagacgatttaaaagcgattcgaaaattctatcgactgatataataacgatgcagtcgcggcgttgacaactgagatggaaccaaaagttccataatatctttccataaggctggaaaggcagaatttgaatgaccagtctatatttacactgagcacccgttgaagcgggtgatgcgaagccatagcaaactgtatttttaaattctggccgcaattctaccaaaaacgtgtttagaccgcagtaactcggctcagagtgaagattaagggacgcaaaagagacgatttaaaagcgattcgaaaattctatcgactgatataataacgatgcagtcgcggcgttgacaactgagatggaaccaaaagttccataatatctttccataaggctggaaaggcagaatttgaatggccagtctatatttacactgagcacccgttgaagcgggtgatgcgaagccatagcaaactgtatttttaaattctggccgcaattctaccaaaaacgtgtttagaccgcagta

SEQ ID NO: 31975 - DNA, 1170 bp, Heterodera glycines
aaatttagaaaatcacgcctaaattttattaaattaaattttcattttgttattatagatataaaaacatcaaatttacaaataacaatttaaatgtccaatttctggggcttaaataattcagttcaaaaaagtctgaactcggtactttcagcaaaaacatcgctttggtatgtcctgttataatgtgcaaaaattggttctattggactttaggcgtccaatcagtgactatcccttttcttaagccataactttttttttacttgatcaaagccaacattcttaatatgattttttcgtaataatatttgctcaatttgtatttaataatttccgatactttaagctttagtttgataccaagaatgtaagccgaaaatatgtttaacgagaatccaactttaaatatgttagagtcaatttttacatttatataaaaaaccgtactaaaataacccgggaaattggatatcatttgcagctaatttttatgtaaatacttttgtaacattctgtagaaaaaaattgaccaattcagaatcggttaccttttataccagagacatattggaaaatcaatttccgacattttcggagcttggaattcaggttctcgattagcgcaattttttgagccgtaaaaatttgccgatactaatgtccgatacccttcattttttgttcgtacggtaatacggagaattggtgtcccggcgaaaaataaattaaaaatttttcttttctaaaagtcgttaaaaacatatttatagaggttttcagggtcgctgatcacgaatctgccattaattttgacgaatttcgaatcccggaccaagactcgaacaaaaatccaaattcaaaattcaacttaaaaatcaattttgaattgaattggccaaaactaaggcatattcgtgatcagcgactccgaaaactccagaatgcatgctctcatgtttttctacatgaaatttgttttaaaaaatcaactacttgatgaaaatcatagacaaaatcagattttttagatttctgagctcagatccataatcaacgtatttttagcactagaaaactcgaagaaaatttttaaatttgttttcgccgggacaccaattctccggtattaagcgggtaaaatatatttaaaaaacaaaaaatgaataa

SEQ ID NO: 31976 - DNA, 1236 bp, Heterodera glycines
gttgggcgctcacttttgggcgcgcacggttgggcgccagcatgtttttccactataactttctacaacttttttctttgtcatccaaatccaacattgttggtatgattcgaaagcttaatgtatttagaaactttttctaagctattgcttcgcgattagacaagtatcaaaaaagttatacatgaaaattaagaaaaactcgaaattttaaagttttttcttaataaaaatttttctaggcttgaaaatcttttcgctttttgtagactaatagagcatgttaagagctttcgaatgataccaagattgttggatttggataacatataaaaaagctatattggaaaaacgtgctggcgcccaaccgtgcgcgcccaactgacgggttccgttttttttttttaatttaaatttttgaaaatttcgcttctgttttggtcactcaccgtcttccaggaacagaatgggcaaaatcaatggcaaattgtggcacaaaatcaacaaaatgatggcacaacaacgagagggcggggatggcattcggtgatgcctttggtggcaatgctttggacgaaatgtgcccatcggatgagaggataaactgtgaaatataaataaaaattttttaaaaattaaatattaaaaaattaaattggctgattatgaaattcacattcattttgacaaattccgaattgcttaacccgaattgaaacaaaaacgcgaaatttaaaaaattgaggagtttttaaattaaaaattgcttaaaattaatttaaaatgctttttcaaaaataatttaaaaaaatttgtttaaaaatataaaaaatatattatttaatcccattaaatttaataattgaaatgcttttggaaagtaattaaaaatcaaatattcacatgaattaactattttaaatgcatgtaaattaattgaagaacatttaaaattgaattatttttttatcccttatggaaattattgcaattttaaattaataattaattaatttatcaaagtttcgttttaccgcaattatttcagccaacaatgcttatttgttagacacatgtattattattaattgatgaagacaaaaacaatgttttgtacatttgcgtgagaaaatattgcggcaccgccgcagggcacaaaaaaaggaagcggaaaaagatatttttatttgcctaaaatttaaattatttagtgaaaaattaatattcaagcaaaat

SEQ ID NO: 31977 - DNA, 1674 bp, Heterodera glycines
  unsure (1)..(1674): unsure at all n locations
ataaaagtcgacgtatctcagcgggtctaaatcgtacacccactattccaaaggctttcggatcgacttttgcggaccgacattatcgtttttgggcaataaaggtggattctggtgaaaattgaattttnncgacttttgtnntcgagttcgggatttngaaaatgggatgggtcannaattcgtgnannaccccgnannatacccncnntagaanngattttggggcgactatcttatgtaacagtgtttccttttgttgaaaatctttttcgaatgtggtttacaccttctgctttgcattctttcaaattgcgtcatgcatttccatttattcttcggtggtatagaaaaattcccattattataccttaaagaaacatgatgtataaagagaatttgatctagatttttttaccaaattccttcttcaaattgtaaattttattccgcttaattcccaattcattagcaatttcacgttcaattactgatcttttcttctcgtcatatttaaacccacaaattttttcttttctcattttatcaaattttctgatcaattccatttttgtttcttcactttcctccgttttcactcttttttgtcccaattccttcttcaatttataaattgtgtccggatttgtgtcaaactttttggcaatttcacattcaaattgagtatttgtccttttattataaacattttcttttctcaattcattattcctcaaattaaactcgttcacaatttgcatttcatttatttcttctgtattctaaagaaatcctttttaagagaaaaaatttttagaattcagcgaattttttcaaggaatgatattgctttgtctattatattaccaaattattgtaatcctcatcatttccagagttgctctgatcagtagacgagacattctgatcagcttcctcattaaactcattttcatatgattcttcttccaataattccatttcttttcttggcaatttcagttttctatttaaattattattttgttcctccaatgttttttcctttttaatcttttgcaattcttttggctttgtgtcttcaatttcaattttatttgccttttgttggttataaatttcatctttaacaattatttcttcctttattgcatttatttctccgaatttttgttttttgaagttttttgaggtcgatggcttttggtttttccataaatcatcaaataaatcttcatcaattccatcaattagcacgaataaaaatatgaataaaataatcacaaaattaatttgcggcattttttgatgcaaaaaataataataaattttgttttttctgcttatatttgttatattataagtggaatatatgcaaaatctctatttatttttgaaaaatctcaatcaattgcaatctattatatttaatggtaaatagttgattttaaaaatttttatttccctttccgtgtttgtaaatgttaaaaataatttatggaattccaaaaaaataaatatattgaaattaaatgaaatataatcggccaaggaaaagtttattgatcctcgatttatattaaataaaaaattanattanattgggcatcagaanatttgataatggcaccgtcagaattntggacatctaagtcctcttttacagaaataatc

SEQ ID NO: 31978 - DNA, 1290 bp, Heterodera glycines
ttcatggcaccaacataaaattgacagaatcatatatgcatgaacaaattttccgattaaattctagagctaaaggattgtctgtatttaaagcttttgttgatttgttgcattttaattataattttaatgattaatcttgttaaatctaataaaatacacattaaaattgcatgtatgtgtaaattttggtgaaaatttttttcgactttttgttcgaatccgggtccggggttcgaaattggtcgaaatgaatgtcatattcgtgatcagcggccccgaaaacccccggaaatgtattttcaatactttttttttaaattttcaaaaccaacaacttttagactagcgccaacaatttcatgaatttatttgaacaaatttcataaaaaatatctatgtataattttgaaaaatttacaaaatggaaaaaaatgaaaaagaatttcgtaaaatttaaacgaaatgaatttaataacgtaaaggttttgagtttttggcataaaattttgcttttttccaatttagtaattttcccatatttccagtgctttttcgattttcatcgaaaattttacggaatagaccctcaaatttcaaaattttggcgaattgactgcacaaaatttaaaaaattactccatttcaccttaaaaacgccaaaaaaatagtccgtaatacgtatcgtaatttatacggataagtatcagtattacgtacttgatatcgatacggattacgtacttacatactaaaaatacggaaaatccttactacgtaaaaatacgtatcggccgaaaaaaatacgtattacggactacggatccgtaaaagtacgtatacggatctggtccgtatccgatctctagtctgaaatttgaaaaatggaatttttgtgttaaaaattggtgaaaaactcactttggttggcccatcgggcttttgtcgcctttgccattttggttcgtctctgctcccgcttgttctcacgcgtatggcgtgcatttttggtctgtcgcttccgtaataaagttcttttagccattaaatctttaaaaagaataataatttaacttttttatcttataactttttaaaacaacgcggataataaacatagaaatcgatgcagattttttctctatcgatatgcaaaatttggtgcagattgtatggattgaaaaaaagtatatggagagaaggaatggtgtgttttccctataataaaaatatagatagtacgccaaaaggagacaaaaaattagagaaaaaagatactgtttttctctg

SEQ ID NO: 31979 - DNA, 1647 bp, Heterodera glycines
gcttaaaacgaagtgttcgtcccgttctttcaccagtcgctgctgctgctgtctgcttccgtgttctttccaacggtcccaaaaatcgttcgatcccaacaaaagtaaaaaaaagaaaaactctttgtttgtgtctctgtttctctgaattgcctttctccctcacacactctcttttcatatcttttcccccctctcctctctctgctgttctttcctttttctcatttatcttcgtctctcttgtattccatgtgctctctctcttatctcttccataatctcgtctctctctctctcggtttttctcgacattttttgcgccgttttttttttgtctgcccctctcacactctctcgtgttgcccaactatttccccgctcgcataatcgctttgataaatgtgaatgaaatgcgaattcgtaaatgtgtgtgagtgagtgacttggtttgcttgctcaaacacacactcttttcatgttccaccaccacagacacacacacccaacaccaacacaacatcatcgacggacggacgacaaatgggggaagtcgtcggcgaggcgggggggggggggaagagcgaagattaaaattaaaataaagaaaaaagggggaaaaggaaaatggaaggggaagaaaaagaataaaacttagggattgaagagagagagagttggaagagggggaaagacgaattgtaagcatgccgaaaccgaagtcagaatcgctgtaaacaaagaaagcaaaaacaattcgaccgttcacttgggaaaaaacaaccgtctttagcttacattaatgaatagtcctgaaagttcacatctccgaaaaataataaaagaaaattttagtgcgtgcttttgttcattctcccgctccttaaaaaggaatgtttaaatttgttgaacagaaaatgaaagcatttggtctgtgtttatgtgccagggaaataacaataaaaagaccaaagtgttgtggttgcttgcctaaatcgtatttcctcttcaccactcattccttttcaacgacagcgattggttcagggtcgggatcagtgttgtagggaaaatagctgtaacaaccgaagaaagcggcgacaaagcggacgaaggcgttcgacacggggcgaagttcacggccagtgccatgctaaaatggggcaggggacaatcatcaggcagggacggtcccaggtcttgcaggaggtaccagcaaaaaaaaaaatcataaagttttgagcaaaaatataattttgggtgtccaggggtcttggggggggggggaaggagagactgggaccatccctgaaatcagttggggatttctctaaacgttactcgtacaaaaaatttacataagtgtaccagcgatgagacatgacactgatgaccgccaaaatgccaacaaaaatgcccggataaaaaagaacagtgaaaatggtgccgcgagtaaatgccgcacgcctcgaaaccgactcacgctcatactcctgtgaaaacgaccattttaaaagaatgagaccattattggcaataaaaaatttgccgcggcacctatcgtcaccgccggctcctaaaaattcttgtctttaaaaattggcttaaccgcaaaatttatcattttgtggacaaaagcatgcatac

SEQ ID NO: 31980 - DNA, 1556 bp, Heterodera glycines
ttttttttcggttttttttggtatttttcaattttcggtttcggtttttaaccgaaaaaaaccgaccgagaaatttttgagtttttcggtttttttcggttttttaaccgaaaccgttcgaccgaaataattaaaaaaccgaaacaatcgaccgacttttttgacaaatcagtttgccattttttaacaaaattcattaaaaattcttaaaattttcctccggcggcgcctatcggcaccgccgaccccccaaaaagctatcttttcttaaaaaattagtccaaaatttggtatttttagacaaaatctgctaacaaatagcattaaaattacaaaaaaatttcccggcggcgcctttcggcaccgccggccctaaagttatggctagagctggcaattaaggcaccaaaaagcgcaaaatggcactgaaaaaaagcacaaaaatcccgaaaaaggcacgaaaaaaggcatttaaatttttttttttattaatgatttttagggagcaaaacacgtaaaactaattcaaaaaactaaattttgggcgctggcgtttaggcgcggccgtttgggcgccagcatgtttttcaactataacttttttctatgtcatccaaatccaacatttttggtaacattcgaaatcttaatatgtttataggccagcgcccaaacgcgtgggtccagaaaaaaaagaattttggcgaacaatttttgtgaaaatttttcaattcataaaggtatattctctgaatttttttagatcatttcttaggggtgtatttttcagatttttttgaatttttaatggaatttttcgggaaaaaacgccaaaaaagacaccaaatcgctaaaactaatctttgtggtttttttagaatcaaggagcaaacacatgttttttggctgccttttctatcattttccaaacctcttagtacaccattcaatagagtttcaatagctctacaattttactcagaggtgatctttcgctttttctattaatagatagtttattgcttttttgaaaaaaataaacaaattcaaaaaaaccgaaaccgaaaaatcgaaataaaccgaaaaattttcttcggttttttcgatttcggtttttttcggtttttaaccgaaaccgttcgattcagatgaaaattcaaaatgaatttttttttttcacaaataaagggttcgccaattttttgagatttaaaacaagttcttttggaggatatcaatggccaaaattcggccaccatttgccagtctcgagactgtttctgctttttctcgacccaaatttgagtgaaatgggcaatggcactttttgcttctcctttgctcccccccccttcccctgtcaggcgattcgtgctgcaacccgtacagcatgggcttcatccgcaaattgattctcaccaatatgccccatgcttatgtgctttcgctgcagttgggctcctcagttgccgaggacattggccgcggctatttcgccaatatgaacgacgaagtggcggccgtgtgccaacagttggccgaggacgcgcgacttg

SEQ ID NO: 31981 - DNA, 1010 bp, Heterodera glycines
  unsure (1)..(1010): unsure at all n locations
aaaaatggtatctcttttttctcatttttttaccgcaaacttggtaccaacagttgccttcttttgtctggccctatcaaacaatcttacgatatttgaaacgcaaacaaaaaaaattcttgaccaaaaaatggctatctcttttttctcatttttttaccgcaaacttggtaccaacagttgccttctcttgtctggccctatcaaacaatcttacgatatttgaaacgcaaacaaaaaaaattcttgaccaaaaaatgtctatctcttttttctcatttttttaccgcaaacttggtaccaacagttgccttctcttgtctggccctatcaaacaatcttacgatatttgaaacgcaaacaaaaaaaattcttgaccaaaaaatggctatctcttttttctcatttttttaccgcaaacttggtaccaacagttgccttctcttgtctggccctatcaaacaatcttacgatatttgaaacgcaaacaaaaaaaattcttgaccaaaaaatgtctatctcttttttctcatttttttaccgcaaaattggtaccaacagttgccttctcttgtctggccctatcaaacaatcttacgatatttgaaacgcaaacaaaaaaaattcttgaccaaaaatggttatctcttttttctcatttttttaccgcaaaattggtaccaacagttgccttctcttgtctggccctatcaaacaatcttacgatatttgaaacgcaaacaaaaaaaattcttgaccaaaaatggttatctcttttttctcatttttttaccgcaaacttggtacaaacagttgccttctcttgtctggccctatcaaacatcttttttctcatttttttaccgcaaacttggtaccaacagttgccttcttttgtctggccctatcaaacaatcttacgatatttgaaacgcaaacaaaaaaaattcttgaccaaaaaatggctatctcttttttctcatttttttaccgcaaacttgngtaccaac

SEQ ID NO: 31982 - DNA, 956 bp, Heterodera glycines
gggtattattttgtaaagtctttttttcaaaataaactttcaaaccccatttttcgcaccgtgaatgttatttttattgaattctgaaccggtttgagtagattagactagaaaaaattgaaaattttgaaatcatgtttcccactcccttctcccaggggtattattttgtaaagtctttttttccccaataaacttgtcaaaccccatttttcgcaccgtgaatgttatttttattgaattctgaaccgttttgagtagattagactataaaaaattgaaaattttgaaatcatgtttcccactcccttctcccaggggtattattttgtaaagtcttttttccccaataaacttgtcaaaccccatttttcgcaccgtgaatgttatttttattgaattctgaaccggtttgagtagattagactagaaaaaattgaaaattttgaaatcatgtttcccactcccttctcccaggggtattattttgtaaagtcttttttccccaataaacttgtcaaaccccatttttcgcaccgtgaatgttatttttattgaattctgagccgttttgagtagattagactagaaaaaattgaaaattttgaaatcatgtttcccactcccttctcccaggggtattattttgtaaagtctttttttccccaataaacttttcataccccatttttcgcaccgtgaatgttatttttattgaattctgaaccggtttgagtagattagactagaaaaaattgaaaattttgaaatcatgtttcccactcccttctcccaggggtattattttgtagtctttttttccccaataaacttttcaaaccccatttttcgcaccgtgaatgttatttttatcgaattctgaaccgttttgagtagattagactagaaaaaattgaaaattttgaaatcatgtttcccactcccttctccccagg

SEQ ID NO: 31983 - DNA, 1281 bp, Heterodera glycines
  unsure (1)..(1281): unsure at all n locations
aaaaaaaaattatttttttgattcatttttattaataaaaaaatatttttttttgaaaaacgcaacatttttactgggttttttttaaatcattaattttttctaaacaatcccaaaaattcgaaaataaaaatttcggtttttttaatgtccccatttcnccgtcncaggtggacacaatgcggcagaagaagctgaaggtgtggattttcccggagggcacgcgcaaccgcaatggccacgggctgctcccgttcaagaagggcgccttcaacgtagcggtccgtgcccatttccccattgtgccggtggtcatctccgactacagcccgttctattcccatcggggcaaatatttccacaccggcggccgtgtcattgtccaagtgatggagccgatcagcactgaaaatgtaaaaaaaaacaatttttttggctgagcaaaattttaattgtgagattttttcattggaaaacccttcaattaactatttttgatttgaattatgaataaattcatgttcagtttgaccatgatgatgtgccaaagctgtgcgacgaagtgtctgaaaaaatggtcaaagtgtacgaggcgatcagtgcggaggtccgaacggcgtcaaaagaagcggcgcattgatcgaagcgggagagcgagaaagactgggtggaaaaaggagagaatacagacaacgaaagagtattgggaaagaatggcacggcacagacaaatcgcatttctgatcggggagaaggaagagaaggaggaggaggagggacaaagcgaaaatgagagagacaaaaaatgctcaacaaaatcacttaaatgctctccattgctttcttttttaattctctcataaattgtccagactttaatcgtcttcgttttcttttttaccattctcatattaatgccatacaaagaaagcacgagttttttgaaaatgtgctttttttgcattttccctccgcccctccattttaaaatggtttttttaaatttatttgtcgtaatggctttaccgaaaagcttcttgatattatggatatggctataaaaataaaagcaaaattcgatttaagcagttccaaaagccacagaaaattgctctgtttctgtgaaaacagtttccaagcaattttcataaaatctgagacaaaaaaaaccattaaaaagcggtttttacatggggcttgagtgtgccttccttcgagaaaatccatggcgctatgcccttgctcagaccaatttacactaataattattattatttctca

SEQ ID NO: 31984 - DNA, 1001 bp, Heterodera glycines
  unsure (1)..(1001): unsure at all n locations
atttaccgttactgttgtcagtattcaaaaaaaaaacncgggaaaaccagaaagtttaccgttactaccagaaaatcgctcatttgctgaacactataaatcgttgttcatacatgtaaaatgtgaaaatctaagtttcataatctcaaaatgatgttttttgtttatgaatcaagcccccttcaaaaagggggctggctctattcgaggggggggggttctttctattcgaggaaatgcggtaatttgaagtaatttttaatcgaatcaaaaccatcaaatcgtgaaaaacaaccaaatccgaaaatttcaaaatttattgtacctggaaaagtttgttccatgaagcaacaactgaaatttgacctaaaatttgaaagcattatgtcaaatattcatacatttgttcttaaaattttcgccatattcctcttttatttcgggtttcattttttgccatgctctgtccacccgtgccgtcattgcatcggcatttatctgatttttttaaagaaacaaattagaaatgccaatttgtcattttgtaggtcgcgtaacctgtaaattaagaacgacaatttcaataaatcctattttttgaatattccttattttaattttggaatatagccaagtgtgcgatttatggcattaatgttcatcattaataaggagaaattaccaatttggtgcggaacatgcctgaagaaaagcgaattgatattagccaaacccgaaaaatggcaagaaggacctggctccaatatgctacagccgattccccaacattgcagctcaagcctgtgcgttacagaaaattgagtgaccactaaattcttacataatcttgctacctgatcgcatccatgtatgcttcaaccttaaaaaaaattttatatttaaacgatgccgagaataggcttttttgttggaaaaacaattttttaatagttttgtagaaaatctttaaaaataagaatagttaggaaatttccaaggag

SEQ ID NO: 31985 - DNA, 1011 bp, Heterodera glycines
  unsure (1)..(1011): unsure at all n locations
aacattcgctagtctttgagagttttatgtaacaatttataactgtcaaattaacatgaaaattcactatttaaactcggcaaattgcgttcttcgccccattccttcgacattcattccgctcgtttctctttttcccttcaattcttcttaaatcgccttcctttgtcgcttttccaatattttttttaactaataaattttattacatataagtttttgtgaaaatttttgaaaatttattgggattgttaactgatgttgcccaaaataaatttatttggagcgaattttttaaagaaaattaatgattttaattaaatggggtcatccttgaaatttaacttttttgttgtctttcgcacaatgttggcagtgggctttgttcaaagaaaattccaggaatagtggaacgggccggaggtgccattaggcgccgttggggaaatttttgaaaattttactcgattacttagcaaaatttgctcaaaaaatgaccaagtttatatatgaaaacaataattaagtctgaaatttcaattttatccagtctaaatatcacggaaaaccgtgaattgaccccgtgaatagtgaccgtgacagaaaaaaccgtgaaattcaggtaaccatgacagtgattccgtgaatcatggcacaaaataagcaaatcagcatgaaaatgaccattttgtggcacttaagcgttcaatcgaagactatccaaattttcttagtacatgactttttgggtattactgatcaccgattcagcacccatcccgatcaaattcggacccctagtccgaattcaaacagtcaaaaactttgggacacaaattcaaaaaaatgggtttttaaccggttttctgcgngatgtgcttgaaaaaagctgaaccagcgacgcattggcgtgcagtggctttcacaaagtgaaaaaatgtcgctcctcctccattctttttttgattcctttttttgntttaagttgaatatgagtagtgcaacatttaa

SEQ ID NO: 31986 - DNA, 1279 bp, Heterodera glycines
  unsure (1)..(1279): unsure at all n locations
atcaagccatcatacttttcagccatcgntggacacacaatatggcaaaaaaaaaattatttaaattttcttaattttccaaaactattttaggaaataaattaattacagttttttaatatcatttattttaaataatattcagacgtttctccaagtgatcgtcataagtttgtttaattcaattgcctgcgtaatttacgtctcaatgcaacttgtaagaatcagtaaaacctacatcatcgttggcacttatgcatggcttttttcgcatggtaagtcaaaaatttaagccatgaatttgacaactttgtaaataaattttgtaggatttttaattgaaattttgctatctttaaattaaatcattagtttcatactgtataaacaaagatatcaaattattttaatttctaatatgtgggttatgtttggaattgaaaaaatttgaggaatctagtaattttttggtgcttgaaaatgcgtaaattaattaaataatgaatttcatatttattaaatggtatattctctatatttaaaaaatacaaaaataatttttcaaaaggttgtcctcccctggtgtatttgctgctgaacaaacgaattcgaaatgattgtgccaactttggccgtgccattttccgttttttgcacaattgcaacaacaattcggtgtcaaatggaccaattgccatggcatggacggcaccaaattatgccgtgaacaatgtcaacaggaataataataataatatgccacaacgatgaagaccagccgaaagtttttgtgggaccaattcctcagggataaattccctaaaatccagaacattgccgtttttgatactatccattgctgatttattcaagcgggtttttgggaggaggtatgcaatatattttattgtaaaattttttaattttaaatagtatttttaaattcagctttgtgctatgccgaaacaagtgccgaaatgttgttggcaattaaccgatgcatggaattgttgagaccacagttggcacatgccattttcagtggtaaagttttatcttatacagcatttcattgataataattatatttaaatacaattatttatttaataaatcatttaatttgttcaaattccgcttaatctttcgggttatatgaaaaaaatttttcaaatattttcaaggcaataaattgcgatgtttatttgctctgccaatttgttatggctttgcagttgccatgttcactaagccaattctgttcagtgatgtttatttg

SEQ ID NO: 31987 - DNA, 958 bp, Heterodera glycines
tttggggtactcaaacaattatgggggagcaaaaatccaacgcagaattaaagtacaggctatagggaagctattcccgaaggattcggtctccccataaatctgggcgcatcggttcggggggactgccccgaaaacaaaaaaatcgattttttcaagtgtccgtttggggtactcaaacaattatggggagcaaaaatccaacgcagaattaaagtacaggctatagggaagctattcccgaaggattcggtctccccataaatctgggcgcatcggttcggggggactgccccgaaaacaaaaaaatcgattttttcaagtgtccgtttggggtactcaaacaattatggggagcaaaaatccaacgcagaattaaagtacaggctatagggaagctattccggaaggattcggtctccccataaatctgggcgcatcggttcggggggactgccccgaaaacaaaaaaatcgattttttcaagtgtccgtttggggtactcaaacaattatggggagcaaaaatccaacgcagaattaaagtacaggctatagggaagctattcccgaaggattcggtctccccataaatctgggcgcatcggttcggggggactgccccgaaaacaaaaaaatcgattttttcaagtgtccgtttggggtactcaaacaattatggggagcaaaaatccaacgcagaattaaagtacaggctatagggaagctattccggaaggattcggtctccccataaatctgggcgcatcggttcggggggactgccccgaaaacaaaaataatcgattttttcaagtgtccgtttggggtactcaaacaattatggggagcaaaaatccaacgcagaattaaagtacaggctatagtgaagctattccggaaaggattcggtctccccataaatctgtgcgcatcggtttcagggggactgccccgaa

SEQ ID NO: 31988 - DNA, 1458 bp, Heterodera glycines
aaaaagcggagtaggggcagggaatagagcacatgttaaggcaggaggacagagcaatggtcagaggggaagggatacctctaaagtgggggattagagaaaaacggataaaatggagggaggaaaaaatttaaaattggagggacacgcaatggagggtaggggaattaaagccaaaccaattaatggtaggatttaatagggaaaacaaaccaaagaaggacatgtttttcattcattacggttttaattttgaaaaattaaaagcgtatgttaaacatttagaaataatggccacctgaagggtcaacttgttgacaatgctgagacctgaattctgaaaacggttctcgtccattccgtgaaacaccggcagaagaagaccaacccgaacttgaagtccaccagaggaagcaaatgaaacaaatacgggccccaaagagcacatcgttgcgcaacagctgcagtttactcgctgcgaatttggacatgagcaacaaacagctcatgggaccgacccgccgtttgactgctgctgaaattgaacagaaattagcaaaggcaaagagaaacacagaaaaacaaaacaaaactcggtttaaatatttacacatggaaatgcaacaactgacaaatgacaagagaatgaatgagtgatgcgatccttccatttccatttgccacaaccaaaaaggcaaaaggccaacatgacatatttgaatttgttaactaataccttatcagtagggctgggattttgagcaattcccgtgttttttgagtctatgtttcgactctcggggtcaaatatcgtatacagcgtggctagtgaataaaattaccaagtttaatcattttgtaataaatgttaaaactgttgttgaatttactaccgtagtcatttacatttaataaagacaaaaaaagagtaaatcaattgcataagaaatcaaagaacagccaacaaaatcagcaaataaacgtgtaacggtaaaggaggcattattcagtcgattgttcagccagccgtacaacggcccaacaggcaaaagccgggatggcaattcgctcggttacagtctcgcttggaacgagccaaaagccgactggaaaatcaaaatattaaattcaactattaatttcactctgatcagtcttttttgattttttgagtctttcactgatcacaaagcactgattggtccgtttcgaattcaaatccttcgtttgctttgctttttcactgatcaccaactttctccgcccaatgttttctgtcccatcggtcgctgtgaacgaagcgaaggcaattgtcagcagcagaagcagaaatgttgtgagaattgacaacttcatccttcgatttgttaattataatagctcattagcataattaaatgtgcattgatttggtgtgattgcaatacaaatggtaaaaagcaattcgtccttatttat

SEQ ID NO: 31989 - DNA, 1805 bp, Heterodera glycines
  unsure (1)..(1805): unsure at all n locations
ggatgcaattcccgcccaaatgttgtacagtatgccaccagtcgatgaaatgtcattctgttggagttctgtatgaatacgcggacaaatttgttccaaatttcaacaaatacaagcaaatatttttgcttgttttctttttctgtactcgttgtaataaaattgaaaattttcgtaaaaattgccataattttggcaaaatacaaacgaattgacagccgattctcagcatcggacgaaacggttggatttgtgcaaaacaatatggcgtaatccaatgccaattgtttgtcgcagaaaatatctatccgagggaattggggtaagtaaaattaattacctaattaaccttgtcgatttaatggttcccaaaatttatataaaataagttaaattaaacaaataaaaaaatgttttaatactctaaagatagttaataatggagaaaattaccctaaaaaatcatattttattatacaaatgacaattgccaaatttttgaatattttataaattagtaatttctataaattttatgaatatttaagtttagagatatttaagattattttacaatgataatttaatacctaatgagaatatcaaaggattttcaaactccaagagaagtaataattgcatgccaactaatttaccaagagcaattttcgtcttaattaattgttcacactttccattcaaacggcatttatttcccacaattcgcaaaacactcactaattttgtctcacttttgaccatttgatctccataaaattccataaaattccttaattattttttttgcttggcactttctttttgaatttattttaaaaatataattcgtataaaacaaaaaaaaatgtatttaccaaaattgcacaatattctgactcatctgctgctgattctttgaaaattggtgacaatggccattttcacaagtcaatggtttcattaacgttccaattatgtaaaaatgggcaaattcgcaatcttttttaatttctattaggaaatttttcattttttgttcttcaaaagttgtcattttatcagggttttttatttgtttagtaatttcactgcattcaatcttatcattgtccattttagtgaagagttgctcatatattttattgtgtcgttcgattggatacttttgattctctataaaaaattgctttaaaactaatttttattattaataaaagtttaaaaatcatttttattgttaaaattagagcccggaaatttcaaatttggattgcggactgggatcctgcaaaatcctgcgcaagatccggtcctgttccgggctctagttaaaatatcatgtttaactgtatgtggtgattaaatcgcgccaacatttccaaatttggcaatgtgtctcttcatcaattgtttctaattgttttgtcattgcacgaaatttgcctattttttgccgatagatttttgtttgcgattcatttaattcttttaatttaacggcatcaaataaatccgttataaatgatataaaaatagccgtttcaattgtcattttataatgctcatccaaaatgctttctgaccattcataatttcctccgtgtttctcttcttccaatgataattttaataataacatataattttcatcaaattgataagtgtcagtttttatcactanagtttttgtttaaaaattatatttcattaatgagaaaaactaagtcaaagaataaaatatatttctanaagattccatatttatttaaaaccctaaaactattttncatttacttacttgattg

SEQ ID NO: 31990 - DNA, 901 bp, Heterodera glycines
cctaatccagaaaaaatcactatctctttttttggatatccacgtgtcaaagggtgtgcatttaagcgactcgctgtgcttgcccactgcatttcaaatagctggtaatttttatttctccggcctaatccagaaaaaatcactatctctttttttttggaatattttacgtgtcaaagggtgtgcatttaagcgactcgctgtgcttgcccactgcatttcaaatagctggtaatttttatttctccagcctaatccagaaaaaatcactatctctttttttggaatattttacgtgtcaaagggtgtgcatttaagcgactcgctgtgcttgcccactgcatttcaaatagctggtaatttttatttctccggcctaatccagaaaaaatcactatctctttttttggaatattttacgtgtcaaagggtgtgcatttaagcgactcgctgtgcttgcccactgcatttcaaatagctggtaatttttatttctccggcctaatccagaaaaaatcactatctctttttttggaatattttacgtgtcaaagggtgtgcatttaagcgactcgctgtgcttgcccactgcatttcaaatagctggtaatttttatttctccggcctaatccagaaaaaatcactatctctttttttggaatattttacgtgtcaaagggtgtgcatttaagcgactcgctgtgcttgcccactgcatttcaaatagctggtaatttttatttctccggcctaatccagaaaaaatcactatctctttttttggaatattttacgtgtcaaagggtgtgcatttaagcgactcgctgtgcttgcccactgcatttcaaataggtggtaatttttatttctccggcctaatccagaaaaaatcactatatc

SEQ ID NO: 31991 - DNA, 642 bp, Heterodera glycines
caccaccaaacacttccatccctcttctcattcaacccacagcaatgaaattggccaactcttttcacttcttggcaatggcacgtgagaagcgacgggacaaaacaaagggactgacggaggggggggggggggggtaatgcgattaattttccacgcagagaatatgtgacacaacaaatgcgttggagaaagtgagaagggaaagacgagaacaaataggcagaaagcaggcaaagttgggagggggaaattggagaaggcacttggaaatgccatcgccgacgccgttccgccgctttctcgcagaacagacgaacgacgcggagaaaaacattgtactcatttctggaacatatataataaaacaatattaagcgagtgattgttgaacagttctaaggaaatttattttttaaatttagatggcacggcaatgccaatttgtaaatttgatgaatttataaaaagataggacctggctataaaaatgaaaatgtttaaacagagaaataacaatttatattttgtagaagtataaaaaaaattaaataaataatattttatgaattcaatgaacgatttagaaatcgcgattgaaaaatctgggcggaggttgccgctgattttgggaagacctcg

SEQ ID NO: 31992 - DNA, 1201 bp, Heterodera glycines
  unsure (1)..(1201): unsure at all n locations
aatttcatcaaatgcnttttaatttcatcaaatgcctttnaatttcatcaatgcccttttaaatttcatcaaatgccttttaaatttcatcaaatgcctgttaaatntcatcanatgccttntaaatttcatcaaatgccttttaaatntcatcaaatgccttttaaatntcatcaaatgccttttaaatttcatcaaatgccttttaaatttcatcaaatgcctttttaatttcatcaaatgccttttaaatttcatcaaatgccttttaaatttcatcaaatgccttttaaatttcatcgaatgccctttaaatttcatcaaatgccttttaaatcatcaaatgccttttaaatttcatcaaatgccttttaaatttcatcaaatgccttttaaatttcatcaaatgccttttaaatttcatcaaatgctttttaaatttcatcaaatgccttttaaatttcatcaaatgccttttaaatttcatcaaatgccttttaaatttcatcaaatgccttttaaatttcatcaaatgccttttaaatttcatcaaatgccttttaaatttcatcaaatgccttttaaatttcatcaaatgctttttaaatttcatcaaatgccttttaaatttcatcaaatgccttttaaatttcatcaaatgccttttaaatttcatcaaatgccttttaaatttcatcaaatgccttttaaatttcatcaaatgctttttaaatttcatcaaatgccttttaaatttcatcaaatgccttttgttgtagttctttcatttctgatttaattcgactaattagagcatttaatattaaaattaaacagaataaaagtaataaattcatttttcaaagtattctcgaaatgtatttttttaataatatcgaaaacgattaaattttacttatccaaatctataataaattcttaattcttttttaattgtgaataaatggaaaatgaaattgaattttttttaacaaataaaacaaatttacttggttttctgctttaagaatctttaaattattctttttttttaatttatttcgaaattgcatatggaaagccaaatttggagaccgaattttatttaaaaaacaattggattttctcatgaaaacattgcttgcaaatttccagaaaatttcatttagtgacaaattttacttgaattactttgttgtaa

SEQ ID NO: 31993 - DNA, 1005 bp, Heterodera glycines
tacttatttgctttattttggaaacgatagatggtgcgacgttttatggcggaatcgggacaacggtcgattctttttgtgttctcagttcgtaattcgggtgccggattagccagtttttcaaaaattaactataacaaattttatcttcattttcagccaacattttaaaaaattgatttaaaaaaatgagcacaggtagcaaaaaacagaacacaatgaaagaaataaatatataaataaatacatattaggactgtaacctgaggtaggggaatttaaaaaatggcaattttcgcacttcaccactgttgtgcaatagaataaaggtctcgtttacagatgtccgggcccctgtaaacgggaccttattctacttgtgcattttttaaaaagggtgacgaacaattcttatttcccatcgagttttttctggttacagtccaattttttacaatctgttcttttctctgatcaccaccgttcattgacaataagatgacttaagggggaaaaagataacaagtatatacagaataaaagaaaattcagtttattaaaaccctggcggggggggcactaaattgactcactgaaaaaggaaaattttttttaattgggtgcttgaaatcatttttttggatgggggggtaattaattactagggattctttttttatgtaagaaaaatcgcgaaatatgtaaaaatgctaaaatatgagattttttaaatttttcaaaagaaattttttataaattctcaaaaattcccaaaatatgtaaaaaaatatatgttcgaaaaaattgcgaaatatgtactaaaaagtccaaaatatgtataaaaatatgtacatatttaatatgtagaaaaatcccaaaatatgtaaataaaagtcccaacttttgttcgcaaacacaaaaagaaagtgtttttcctgctatttagagcatggagaaaccaggaaaaaatatgtatttacataaaaatggcagccctattaatta

SEQ ID NO: 31994 - DNA, 1311 bp, Heterodera glycines
cggaaaagattcgagcctataaatgaaagaactaataccaatcgtgggagattattggtcccgaaaaaatctccaccattaccctaaattcctttacttctctgttagatagcatgagttaaagacaaaattcattaccatagaaattaataggtaatggtcaagttgtcccttaattacggggagggaggttggacatcactaatcacgaatctgacctcctttttggttaattctaattaagaacaaaaatccataaatctttttataaagttttcaatgggagggtgttgcaattcgactatttcaacaaattagctgctcattgtcagaaatggttatgtccttcttctgttacattttcatatattgcgtacagaaaatggaaagtaccccaaattatagaccggacaaattgcactcatcgaaaaatgctaaatacaatatatggattgtcttctaaagatacttataaattaagttatttagtggaagacaacctccttttgctttttcaacggcagattgcgtgtgcatctgatgaacctgacgaacggcgggaaaaaatgacagccgcatacagtcgcatttcgttaattgtaaaataaattgtttagaaagcattttttttcttaagcaaaattgggtgtaacaacagtctcgaaaaaaaaatttgttttatcttccaaaatcgattcaaatggatggaatgaatttctctggcgtaagcgatttggcgatgatgctttttttcatttgtgggatcaagttcgtctcatttacccatgtgaatagttttcttcttttctcatgtcttcaacacatttgtattgccattccatccatttgaatcgattttggaagataaatgtgaattttgttgaaaaatgaaattttgactttttcttcgaattcaggtccggggttcgaaattggtcgaaatgaatgtcatattcgtgatcagcgaccccgaaaacctcaggaaagacgttttgatgaatttcaaaaaaaaattatttttttttaaaaaaaggggagggacaaaccctactattaccaaaattttaaatacctggatttttccgcaaaacttcaattcgttttggctaaactttttgtagccaaaaaggatcctttttaagcgctaattgaaaaattcactgatcattagggcagcaacttttagtgacgaaaaatcccgaaatagttaactaaaatagtgagtaaaaatcccaaaatagtgacaaaaagtccaaaatagtgacgaataatgacataattttcagccaaaaaacaagccaaaattatttt

SEQ ID NO: 31995 - DNA, 1399 bp, Heterodera glycines
cagagataagtgaatttttgtcggctttcttggaatttcacccagtgattggataaatacatatatttgttgctttttacacgattagtgcacggagttgtagacaaacttaaaaatgaaccatttttaatacaattatttagagaccggagattggtgaccacaacgcagatctcagacagcggtgcctcaaatcactcgaagagaacgcaaccttcgaacaacttttggccgagtgtaagcagatcattggccttcgccacagcactgcagctttggctcgtggaaaggagttcaatgctgtgcagctgcgcccgcaaattttgaaggacaaaccgagggtcagcaaatcaccaataagaacacgaacattttcgaccaacacgcggcacaacagcacttcatcaccatcacaaccaccatcggcttgtacgagatgcggcggtaatcactggaactcggactgccgtttccaaagggaagtgatttgcaataaatgcggcagaaaagggcatattgcgaaaatttgccataatcagaacaacactccccaacattcaggctttaaatattcccgcacaggctcaaataagcaaaatgccaacatcatcgactgcctgcacatcatgccatccgactggaagacggaaaatgaaccgtacattgagcggcatgttcggctcaatggaaaagtgcacaaaatggtagtcgactccggctcaaaattgagaatcgtgagaaagctcatttgggtcaaattgggccaaccgtttctcacagaaacaaagctcaagggtcgttcattcacagggaacattttcacatttatggggaagttcaaggtccaagcagcattggacgatggaatgcccctcgatttggaatgttttgtcatcgattcgacggacacacttgacttgatgggacttccatggataagagcatttgaacgcgcctacaaccaagtggtggcgacaactttgtcaatcgaaaatgtgccgacagtcgttggtgcaaccgatcaaacagcacgtcgacgcaattggagatggatttacagaacacatttccaaacatttttgaggaaacattgggactttgcaccaaaatcagggcccatctcaaaattaaagaaaattcatctcccgttttttgtgcagcacgaccaattcccatcggcgttaagcaagaagtggacaaggaattagaccgtctcatcgatatgggcgtcctgaaaaagaccgattgtgcttcgatttcagcacaggactaaatgccgcattggaaccacaccaccatccactgccacgacctgaacaactttttgcgcagctctccggcgctgaagtgttttcgcaaatcgatttcaaagacgcatacttgcagatcgctgttgatg

SEQ ID NO: 31996 - DNA, 1094 bp, Heterodera glycines
gaaattttgtatgtgaatccttcacagttcgttcttaacaaaagtgttttcattttctgccaaattattcccagtgccgagttatgacgtgcttgctcttgagtctttaaaattttcggtctcgaacttcattagtggtgtgaagggtagtgctgcgttcacaatttttagggtcacagtgaaatttaatttattttaaatatgtaaaaccattgggaacgatcttttagctgctgaggaagacatattttgattgaataattccattcgcattggggagggaggcgactaaaaaaataaaattttttattttattttcattaattttgaattcctttttttgtacttttatatctgtggcttttaaaggctgggattccatgagctaaagcaaaaagcatccatcacagattaccatttcgtgaaattacgatgttgttttccttagaacttgtggggttctcaaaagagagtcagcggaagaattggcactaccaaatgcatcaatggcattttcttaaacaattttttttctcttttcgatgacacaaaaggcagttatggaaaaaatctaggaaaatatagacaaaaattgtttagctgccattcgactctttctatttcttctaaacagatacgaagtgatataaccgactcatttgcttgtggcaaatttaaaagttcattttgaagtgcttcttttatcaatttctcgtttccgaaaagtctttttaatgcatctacgactagagcataattttctgctgtcggttgatagcctatcagtagtataaggctccaaaacggcgctggtaccggaacgactcctccaaaatcccaagcctattgaaggggtgttttcctttgaagatgccgcccgcgcacaatcccgagcctattgaaggtgtattttcttttgaagatgccgccttaggattattaccgcaaaatctcgagcctattgggggatttttaagttgccgcccgtgatattttccacaaaatcccgagccatttaaatgttttgaagttgccgcccgcgcatgattccgccataaaataaagtcgatattttgtgagcacaaatccaaacc

SEQ ID NO: 31997 - DNA, 1147 bp, Heterodera glycines
atcatattttctttataggaaacccacgagtatacattaaaaaaaaattgaaaataaatctaatttctgtagagggattgaaccaggagaaagaagaagggaaagtcaaggagactagccattaggccatttgcacacttgggcagtgttacttttaaagaatatattaattattattttttatttttccctttgactccaatttttttcactaatttttcactcagaccccattcttaccagtgcttgtttttcccggttcccggttgccctaccgggaccgggacctgagcttttcaaaacccgggaaccgggacctcggatgaccgggaattcccggtccggtcccggtcccggtcccgtggcactctagtaaaaatattttaaaatgtgtttttgaatgggcggcgcaaatgtctattttttcttggcggcgcaagtgtcgaggcgcaaattgaagcactttttgacaaaaattttacataatttgtttgattttcttttagttattacagaattatctttaatcacaaatcaataaactaattgaaatcagtcataaaaagcaagcattctcgaatacaatgcattaatatacgtcaccaaatattgacagttttattcagaagaataataaaattcttcaattgtaaaataaatattattattaatagggatggaatttttttaataaatgccaatttttctgtgaagccaaactatgctctaaaaacatattttccactttgtgtgggagcttctagactcaagtttataatatagatagttttacttatttcgatatttttcaaaatattaccattgtatctattttggtacctttttctgcacttttcttacctattttaggatttcgtaaatcctaatcacaaaaagaatacgaagaaaattgtttgtaagtttttctgaatcactcactgataagattatatcgcaaaaattttaccaatatcatatccgggttcaagccactcgccctttattggaacttcaaccaaaattgtccacttgttgactttaaaaaaacccagtttttagattattatttttttctgctaaaaatgctaatgaacttcatgctatacatttttgtaataattctatgtaagtattttaatatgaaaat

SEQ ID NO: 31998 - DNA, 1165 bp, Heterodera glycines
  unsure (1)..(1165): unsure at all n locations
tccgagtttctgacgtcattttggcacagtggttgcaaatgttcgtgtacnncagggaaagatctcaggaattaattgccgactttttgaaaccaccaaagtcacaaaaattaatgaaatggataagcactccgagtttctgacgtcattttggcacagtggttgcaaatgttcgtgtaacacagggaaagatctcaggaattaattgccgactttttgaaaccaccaaaagtcacaaaaattaatgaaatggataagcactccgagtttctgacgtcattttggcactgtggttgcaaatgttcgtgtaacccagggaaagatctcaggaattaattgccgactttttgaaaccaccaaagtcacaaaaattaatgaaatggataagcactccgagtttctgacgtcattttggcactgtggttgcaaatgttcgtgtaacccagggaaaaatctcaggaattaattgccgactttttgaaaccaccaaagtcacaaaaattaatgaaatggataagcactccgagtttctgacgtcattttggcactgtggttgcaaatgttcgtgtaacccagggaaagatctcaggaattaattgccgactttttgaaaccaccaaagtcacaaaaattaatgaaatggataagcactccgagtttctgacgtcattttggcactgtggttgcaaatgttcgtgtaacccagggaaagatctcaggaattaattgccgactttttgaaaccaccaaagtcacaaaaattaatgaaatggataagcactccgagtttctgacgtcattttggcactgtggttgcaaatgttcgtgtaacccagggaaagatctcaggaattaattgccgactttttgaaaccaccaaagtcacaaaaattaatgaaatggataagcactccgagtttctgacgtcattttggcactgtggttgcaaatgttcgtgtaacccagggaaagatctcaggaattaattgccgactttttgaaaccaccaaagtcacaaaaattaatgaaatggataagcactccgagtttatgacgtcattttggcacagtggttgcaaatgttcgtgtaacccagngaaaaatctcacgaattaattgccgactttttgaaaccaccaaagtcacaaaaataatgagatggata

SEQ ID NO: 31999 - DNA, 1393 bp, Heterodera glycines
attttcaagtcattctgtcaatacttttgcattgtacccatccatattcatgtccatttttggcattttcccacaaaacctctatttgaacggcccctcccaatatttagacatttttgaaagttttactttatttacatttagcgaaccggaaaaaattttgagaaattattaaccccccgccccctcaatttggaaaatttaagtccatattttatggacatatttcgcgattttaaatctaaatttttgagatgccctaattattgtacaaaaatgacaatttatttgttaaggatgaagcggacaagggacgactggaggtcagaatatcgctcaatttaatttgaatattttcgtctttttttagaaaaggcttgaagccttccatgattggtaaaaaaaaatgaaaaattttctttttttttttcgttttcagcgccgaaccttttctaaaatattttcgtaaacaaaagcgggtggtcaaattggacttgaaggtgggttaattgtactgtaaatagggttcttatggtacggatcaaatcaactgagcatcagacaatagttgctcgaatatgaatttgatattattcaagacataaaactgttatttattagcctgcaaaatttcaaaaaatttcgttgatttacaaaaaatttattgacaaaaattctcggaaaaccgtttaacttttttgttatgcaatggaatttttttaaattttgctgagtaatacagtactcttaggggctattgaacgatatcgaaatcatttaattcgggcaacggtgaaaggagttaggtcccaaaaactgacccgggatcagttggccgaggcccagcagtcgacccgtccgggttcttaccgtaatcaaaaaacccattcttaataatatcgtaaacatctagattatttagtaaattggactcagagagtatcgggatgtccaaaaaattgagaattcggcgaaaattgaaatttatggcattattccgctcaaaaaagtttccaacccaatacacctatagataccgtacaacgaagatctttcgcgcacagtacgccaactgttcattgacattggcttcggccgcaacaatgactcaattcgtgtggtgcttttcctacaaagtaagaaaaaaaatctgtgccgaatcggacggcacagaattttttttttttagaaagatttttctcgagaattttgcacgacttggattcgggatcaacgaaatttcgttattaaacgggcaaaaaaaaaagccttatagagctgcacgtaatcagttttcaattaaagaaatcctttttatttttcggttacggaaatacgccgtaattttcgcatccccccaaaccaaggggcgtaggcgggggggggggggctg

SEQ ID NO: 32000 - DNA, 1180 bp, Heterodera glycines
aggtccaccgtatcatctctacagtactgaccactttctcctcactttttcgattccaaccaaatagcatcggacgcttccattcctcaaccatcctccgacgattacgctttttacttcgtcgtcgtgcatacgcttcgatcactttagcttcgctttttcgatcgggaagcatcgaaagtgcttcatcataattatctgaattcatcgccacgcaaaacatccttttcaaaaccatttaaatcgttttcattccccgaatcattgtcagaatctgatttcttaaaatgaaaattattttaattataccgtatttcctcaattttaatcaccccccccccccccccaaaaaaaaaaattcaaatttttctccatatttgataaaggtacaaatttgcctctctatgtatgtaaattaaggtatttacaatattaaattttaacctgtacttctggaattaaaaattgtttttccattttttggctcataaatttaagttgaaaattcataattcactataaagcgtgttatttttagtgtttaaaattaaaaattgaaaaaaatatgtgggatgtactttatatgaaatatctatcttcaaaacgatagttattccttaaattttgaaaaattcgtttttctaaaaatatcactctttcttggaaggtatttttgtaaaaaaaatatactaaaaaaattcgcaattttttttcgatttcttaatctgaaaaatattttaattatatttttgacgacttttattggcattcttttgtgatctcaattgaactgttgggaaattattgttaaaaaaatgtaataataaaatcattaaattatgcactaaaattaacttaaacaggtgcaaaaattaattacatctccgtactgtacctggttctgaacaggattactgtaacttgactcggcaatcatttgtctggtgggttttcggtcaaaaaatggtcggaacaaagattggttctccattccccgcataagatctcggtcaaaataactcatttctttttcattcccggaaacattctcagcatctgatttcttaatatggaaaatattaatattcaaaatcaatgcaagaaaaaggaataatttcaaaaatagcgaaataggcacctaaaaaggccacaaaaaaaacccacccatcgaataggcact

SEQ ID NO: 32001 - DNA, 1752 bp, Heterodera glycines
cttaggacacctgcgttacgctttgacagatgtaccgccttcagtcaaactccccgcctgacactgtcatcggcgcgggtcgccgggccaccgggtggcccgacttaacaccaaaatggacaccctttcgggcgcactcccgttttaccgattaagtaaggaatcgatgaaagtagtggtatttcactggcgccttgcggctcccacttatgctacacctctcatgattcttcacaaagtcagactagagtcaagctcaacagggtcttctttccccgctaaatttgccaagcccgttcccttggctgtggtttcgctagatagtagatagggacagtgggaatctcgttgatccattcgtgcgcgtcggtagttagccgacgaggcatttggctaccttaagagagtcatagttactcccgccgtttacccgcgcttaatcaagtttccttggcttaacattcagagcactgggcagaaatcagacacggtcaacgtccacaaggaccatccgtctcctctgttttaattagacagtcggattccccgagttcgtgccagttctaaactggtcgttcagcgccaaccgaagtgcataccctgacgagcatacacgcagctgaagcgctccacaagcagctctcaccactagtccacgcaccatccccgaaagaacagcacgcagccacgggcaaaagccgcctgtttcacgcaacagcccggctgacccgacctttagagccaattcttttcccgaagttacgaatctaatttgccgacttcccttacctacattattctatcgactagaggctgttcaccttggagacctgctgcggatatcggtacgatcaggcaggagattcaaatagcttccctcgcattttcaagggccgtgtggagcgcacgagacaccacaggaaccgcggtgctttacgggcgcaacatccctatctcaggctgagccacttccaggcacgcacaccctaaaccagaaaagagaactctggctcggactccacacgacgtctgcgagttcatttgcgttaccgcgcaaaacagctcttgcgaaccgtcatttccctagcctggcgtgggaatgttaacccacttccctttcggcaaccggatggaccaactgcgcaagcacagaaaagtcgtcatccgtagtgtgttacggcgttagccggtgccttaggatcggctgacccacattcaactgctgttcacgtggaacccttctccacttcagtcttcaaggatctcacttgaatatttgctactaccaccaagatctgcactggtggaagctccggccgggcccacgcccaaagccttcaacgcaaccaccacgaccctcctacacgtcatggccagactacgcgacaagcacgtgtacaagccaatgacggtggagtataggtggcccgctccagcgccatccattttcagggctagttgattcggcaggtgagttgttacacactccttagcggattccgacttccatggccaccgtcctgctgtctatatcaaccaacaccttttatgaggtctaatgagcgggcactttggcaccttaactccacgtttggttcatcccacatcgccagttctgcttaccaaaaatggcccacttggagctcaaacattcaacgcctgggttcagagtcaagcaaccctggcttcatacccatttagagtttgagaataggttaaggacatttcgtccccaagtcctctaatcattcg

SEQ ID NO: 32002 - DNA, 935 bp, Heterodera glycines
gtagacgtggagccgttcgttatccaggcggagatgggcacttccggccgcgcgttttgcttgcttcgctgtttgtaccgtgctcatcacgtgacgcatgcgttgtgcgtgacacgggcactctattggctgagcacatcgatcagaggtggtaattatgctaattattctgacaaacaaattagggttattaggctaattatatgtcatctccaaatcacaatatacatgcacttttaccaaattttatgcattaggccataacgtaattcaagcgacggggggggaaagaaaaaacccaaacgggagaggcaaccgttggtgagcagaagcacaacgaaaacgacgatcagcgaaagtagcatcaaagaaacgagcaccagtgcgaacagataaatgcgtttgtagctgaacgcagtgaaaggggaagagaatcagtgagtgattaattgcttcgccagtactttggcccatcagaaaaaatgatttggtgcggctcttcttgcgctggcacacttccgacgtgtctttgctgctgtaggggctgttgatgagtttgtcgaggggccggcgtgaaaatgggaaagacggctgaaggaatggggacaggggcgaccgaatgttggcgtggacggccgtatctgtgggacaaatgcggagaaaagcggacttacaagaatcaatcggtgtgcctttagctatcaccattaatgaagctaaacaaaagcccccttttgttttgcttcatcgtccgcccccctcggaactgaattggtccatttgtactcactggtctcgattgctccatcccgactgggccataaaatgagcacccgtccccggctcataattgcgccgtgctggtgaatctgattgtgccctttcgcttgcctaatatagatatccattataacaatgtctcatagtataaagaa

SEQ ID NO: 32003 - DNA, 937 bp, Heterodera glycines
gtaaaggtacgtcgtaaaaatcgtcaaaaaatcacgaacccggaatccaactctttaaaacaataaaataattttgtggaagaatgcaaatgatcatcaaccatcaagagaagaagcgcaatttcaacaaaaaacaaatttatctccgtttttccctttgtcgttttaatttgatgaaatggtaagaagcaaaaacaatattccgtccgatcgatcaatcggtcggtgatcagtcgaacagtccgaagcccatgtcgtcgtccgattcttccttcacttcttccttcttcttttcctccttcttctccgcagcagcgggtgcagcagaagcctgaaaaattttttttttttttttagtgaaatgtttggggtatgaaacgggccagtgaaacaggtttcccgcgtggttttcgccaaatttcgaacttcggacaagaatttgaacaaaaggtcgaagcttcatttgatttttgtatttgaaagtgtaacattttctaatggtacaatgttttttatgtaaaaaggttatagaagcaaaaagttaagaattctaaaattttgggctttttgtcagaattcgtgtccggaactgaccgaaatgggtactttcatatttgggatcgaataccaaattttgaaaagtcaaaaaagaggcgcacaaattaacataaaacatgcttctcaagctgatcaatatgccaatattttaccaacaatgttcccttttacatcgcccaaaaaatgctgcgcaagctttgtgatttactcgcaaatttttttttgctgttttttcttccatttttggcgtggattttcaagacaaaaaagtagcccaaaatgatggtcctttcatcattttcaatcgacatcagcatcccagaaaaagatggtttgaaatatttccaagacttttcggcgagttctcatcaaaacatgt

SEQ ID NO: 32004 - DNA, 209 bp, Heterodera glycines
ccccccccccctaggcccctccacacccgaaatttttaaggaaaaaattatattttttggtgaaaaatttcgattttccttactggttccacctccaagaactacctcacccgaaatttttaagtaaataaaaggatattttttgtagaaaattttaactttagtaaagagaattttaacaaatattaaacgatattgattggcgaaac

SEQ ID NO: 32005 - DNA, 1128 bp, Heterodera glycines
ctcgagagtcgaagggaacaagcttctttcaagacgaagagcaaaattcacagagaacttcaaaccagaaggcaaggctttcatcgcattcgggtcgaccaagcccgagggcttctcgaacaccattcgaaggggctttaggcctcctcggagctcgggggaagcaatttccccagccaaatcagccagcacaagttcgtagcagcaggcaccagtggtgcattcagcgtcatcgaacgtgacgctttccagccgataaacattctgcccataatttcttctgagggtaaccctcgagaaagggcctttcgttttaggaagctctttcgagaactttccgttcgaaatgtctttcaaaattcgaaagaactttcaagaaagcacatttaattcggctcgggaacgccttccagagaagtcagttgctcaggagagcaattgacttatcacccaccgtcagatggaaaactcacccaaggggtaagttgagaatttcgaaaaaagcggtttggggatgaaaagaacgatggtagagtccctccaagcggagttactccaccttcccaaaccagcggaatccgttcagtcgctgagacaattctcagagtccattgaacggatttgccatcaattattggactatggagaaaatgaacagaacaagttcatggcctccacaattaagtccaaactgccctaccaccttctgacccaagtggttgagaaagaaatgagggcaggaggagcctttaactgcacagagctccgaagagctatctcttcaatcgttgaagtcaaagaagaagtacagagatgtactcaggttttccggggagaggaaaaaccccggaattttccccctcattcaaatggggggagagccaaccaagggagaggaacaccgttccgtttctcccaaccgttccgacaagaacggcagtggaggccaatggaacgaaacgaaccggtgaggagaatgtctcctcaaccgaatcgttcattctcggccatcaacaaaccacaaacccctatctcagatagggggtcaaatcgcttttgctccctttgtgaagcggaaggggcgtgcaccgaggaggtgcacgaaatacaccacactgggggcgcgaa

SEQ ID NO: 32006 - DNA, 2132 bp, Heterodera glycines
  unsure (1)..(2132): unsure at all n locations
tttcatccaagaaaatataatatcctttctctttctttagacgtaaataatttgaatattctttagccattttaaaaaatttctctgaatttgtcgctaatcctttgacaaattccgaaaatagagcatctgcagtctaaattttgaatttattttattttcattgattattaagtctcacccatgtccatttattatcgaattccgaatgcttaattattaaatgtttgtcattatttattaaattgatttccaatgggtttttttttgccctttcttccgcttttttgaacattttctctaaattttcatcaaatttttgttttattattccgtctaaactttcatttgttttataattattcgctttttcaattgccaattgcaaaatcatttcattaattggcaatttttgtttataatttaatctcttctcattcaacaattttagttcaaaataattattgaataatttgtttaatttatattcacaataattactccaatataatttaaaataaaattgcgaaattttggccagacaattcaccgcataaatcagtggtccattaatttcaattcgttctttaaacacaaattttggcttcactgtggggattccgagatattctctgtacaaatattcgtgcaaaatgtccaaatatttgcgatatttttggcattctgtccgttcatattcttcaaattcctccgcaattttgtcacattgccaattcattctcataaaatgcatgatgccaaggtgtgcttcatatttttgtcttgaatactcactgaattgaatttctttctgtcctttcaaaaatgcaattagcatattgtcctcaacctaattaatgaaataaattagtaaaattataattaactcaccgatgaatttgcaattgaaaatgtaattaaaaattgttgaaaaatactaataaaaaaaggaatcataaaaacggaattaatcaacattatgtctttctttctgaaatataaaattaaaactgattggttttagaagagtcatccaaatttctatttattttttaatttcttttttatattaaatagcgaaatttttacttgaatttatttagaaaaatacgtaaataattaatatgcagaaaacccaaaaaaattttaaaaaatagaaatacaacttttattctgaaacacgaaattgttttctactttttgaacacgtttaaacagggaaagaaatatgaacttattggaatttgcatctctatttaaagcttatttataataaaaattacatattatatgaatttaaaaaaaagacggaaattcattaatacaattttatttcgcatttttgaaatatttccattttctgcaaaaatctttgtaatgtaaccatttaatttttaatgcttaaaaataaaatttcttatatctaaaaagtgtttaaaaaagggatataaaaaataaaatacttttttgaattaagggttttggtaaaatttgaaaatttaaagaaaattaagtttactctatttcatataggataaaaagcaaagtaattattaaaaataaaaaataaaatatctcatcgccttataaatggtgaaaattttaaaaattgggattgatcattagtaggattatccaaatctattttttacttaatataatttgtttattatattaaataatgatgcaatatttaaaaattgggattgatcattagtaggattatccaaatctattttttacttaatttaatttgtttattatattaaataatgatgcaatatttaaaaattgggattgatcattagtaggattatccaaatctattttttacttaatataatttgtttattatattaaattatgtggaaatatttacaaaattgggattgatcattagtaggattatccaaatctattttttacttaatataatttgtttattatattaaataatgatgcaatatttaaaaattgggattgatcattagtaggattatccnaatctattttttacttaatataaaattgttattatattaaataatgatgncatatttaaaaattgggattgatcataagtaggattatccatatctatttttacttaatataatttgtttattatatta

SEQ ID NO: 32007 - DNA, 1046 bp, Heterodera glycines
  unsure (1)..(1046): unsure at all n locations
gcagaaaattccctgattttcatgaatgacgctgacattgaccnattcaatgttctgattgnntcgtccgttggtcttgggcttttgatcaaattgttgaccaaaattcgcatttccgtctctgtttttgattttgcaaccaacagcccaatgcccaattttcccgcattttctgcatgtcgaattctgattcgggcacacatttgcaaaatgtcccggttttccgcaccgaaagcaacctctcgtgcttttcgtcggcgttcttggtcctctttgctgagtgccaacttttgcgacctccggtattgcatttgagccaattgcttgggcatccaaattggactgctccaacaaaacggctgattcgacggcatccttgaattttaggtccttgtcaccttttttgatcaattcaacccgaattgcatcattggagatgccattgataaacaatgcgcaaagacacatgtcaatgctgtcgcggctccattcagccttcgcgatcaaacttctcaattggactgagtagtcccttatcgattggcctgtttgctgcttggctgaaaataattcatgcctgcacgcggcgatcgattttgcttcgccaaatctttccaccatcaattgctcaatttcagcaaggtccatggttcggacatcatcgggctgtgccattcgtcgaagctcttcgtacacctgacccatttcgttgaacagcagaagacgctttgttgcgacatcagtcacgcctttcagctggatgaagaattcgaaccgttcccaccaagttgcccagcacatctctggcaaaaatggtccgggtccttttccgaccttttttaccgctgccattctttcacttttcttaatttgtcccactcggatcaaattcaagatgctgctgatcaactgtaatccgacttggatttacattgacgtcaattgttatccgtaccggattaacaatgaaaattggtgctggtcaactgttattcaactcaaattaacagtgagagttaattgttatccgtcccggattaacaatt

SEQ ID NO: 32008 - DNA, 801 bp, Heterodera glycines
cagtcggcttcggcccatgcccaggtttcgcaatgtagagagcgcataccttctcaggtacagccaaacttcaccatgcgtttttgtaataccgtaaaggccatgagttcctttaattaaaaaattatttaatttttttcaaattttttttcttttaatccgccacaattaaagaaagaaagaattgatttctaatttatttttcatattttgacattattttataattactaatcccacacagatttgttttaatattaattatgcattccaatggctgacccgaaacgaattgggcgatgccaaaaaagtggcgtcccgacgtctgctcattgaaatttagtagaaaaatagaacgaattagctcatagtcggtcacaatcacataaggatcctaacaaaaatttgttttacaattattggtttaagagttaattagagagtaattaatcagttattctctaataatccttttaattgctttatttaaatggtttaaaatggaaattgtagattaaagcggttaattagtgatgaattgaagcaaaggcaccctaattaatgatgtatgataattacttcgcccagccacagcgtgtacactgggccatattccttggcaaaatgggtgtacgcaccggcaccgccatggtccgggaaattggctaattggtgcaaattgcccattaatgggagtgggcttggcccgggcggcaattttcggcgtttccacacaaaattccagaacagaatggcgaacacattgagcagaagcaggccaattagcattttttagtatat

SEQ ID NO: 32009 - DNA, 1842 bp, Heterodera glycines
ttttttttttagttaacatatttccgagatttttccgtcactaaaaaagtaggcgactctacttttgatgatgatgcagggctggatggagtcggagatgggaacgaattgttcatttattagccccttttactgttgaattgagtttcattttttttttggaaaatgtgccaaaaaaattatttaaaaaattctatttatcccccctggcacataaatggagactggtatattatttttcaacctcctcagaaagggggtatataattggaggccggcagattaatggagactggcatataaaaagagtatatacggtaacccaaaatcggtcatttcgcctactgacatttcgcctactttcatttcgcctaccaagccaaaaaccttcatttcgcctactaattagtaggcgaaatgaatgtttttggcttagtaggcgaaatgtcagtaggcgagatgtcggtaggcgaaatgtcagtacattttgcatatcgatagagaaagaaattaggaacaaaatgtaagggtttttaagagcaaaaaaagggttaactaaaaagttataacggtttctcttctaaaattcttattttttaaattttagatgggaaaaagaaaattattacctaaaattcacggcaaaaacggagtgaaagagcgtcaaaagaagcgggaggagaggaaagcgcaaacggccaaggcgacagaagctcgtctggtaaagaaaagtgagtttttccatttctttttcataaaatccataatttttcagtttttagccgctgcccagcccaacaccgatgcagaaatggcacaaccatctgaagaagagccatcgacatcagaggcaccggcgcgggataacaacggacgaccaccatcaactccaacaccgatgacaccgcaggaaatggacgtgccgtcggtggagatgatggaaatcggtgttccgttcccttcaacgcctgccgacggcgaccaacaagccgagcctgtgccgtcaacatccacggcacgctgtgacttgctgtcgacaccatcgacttcaaaaggcgccggtaacttcggtctcgatgatggtgagtgaaatgccatcaaaaatttgatttttaaaattatttaattttaattattttcaagtccatttgacgagctacgacggcgttacgtttggatcgaggaggagctgcaatgacagcgccagtcaaacgccttcctccgaaaacagctcaaggcacagcgcgaccgttcgacgagcctcgagcgttcggcttcagcatgccgccagcgtaaagccctttccgacgtgaccaacaaccaacagatggacatcaggctgagcgcggcaaaggatctgctcatcacattggacgcaggcatctcgttcaaagcccgtgaagcattgaagcggtcgtttaccggccaaggacttgacgtttgggcaccgacaagagcagtgaagcgtctgaagacggagctgtgcgagacggccaattttcattggacgggcgacggggagacgcgtgcgcttgtttgtgtcgacgtcgtgccatgaccgagggccgtcttcaggaattggcgacagtggtgagagagaaaaaacaacaatttttaaaatgttaaatgaatgccgactgaaactccaccagcaattttgtctctcaaattgttttggtgattgcgggtgacaaaggaggcgatggacggctgcaacgacaaagttgggattggtgatcggcaacgttgatcacccaaattccccaaaaaatctgtccattttgggcatttattttgggcatgatgaccgaaaaaagttggagaacaaatttagctcgattt

SEQ ID NO: 32010 - DNA, 927 bp, Heterodera glycines
ttcgtcttgcccaggttcgcctgcaattccgttttgctcatcagttctctgcagccaatcaacctgacataataatttgttcattttcgaattaaaatgaaaaaaaaaaaaaattaagagtaagattggtaaaagtagatgtttctgcccgtttaactgaaaattatggtttttctttatcctggaccgtcaatgctccagaaatttttcaaagatttccccatttcacacctcagctccagcttgccgctgaccgccaacaggttctgcgtctgagtgtacagcaccaactgttgctgtcgtcgctcactgttgctaccgtcattgttgcccgcgttgttaccgtaattggctgccccgctcgccaccgacgtcttttgttgcggcgctgccaccacagtcgccgccggtgttgttgccgtcgcggtggtcgtcattgtgccgccggactcgctgccaccgcttccaacagtcgccgccgcccctgtcgctgttgttgtccatggcgactgggagggggcggaggaagagatcgtcgtcgccgtttgctgctgcgagtacatccagtggtcgccggcaccgccgccgcccgcgtggttgtgctgcggcgacccgctcgcggtggtggacgagctgccaccgtcggaggtcgcggcgacaacggacgccttgcgcccctcgtcctgctgctggtgttgtgccaccaccagctcgcggtccaagtgctcgcgccgtggcgacccttggggcagttgttccctgacaaatgaggcggtaaatgaaacatttttaaaagttttgtgatgaattgcataatttaaagttcctttaaaaaaaatgccgaaaatttttacaaataaaaatgaaaaaaaaatttaattaaaaaaaatactgacgaatatttcttcaacgccagcctgatcaggt

SEQ ID NO: 32011 - DNA, 968 bp, Heterodera glycines
acttacagacggatgatcatactcaccagatcggacactgaaatttgcacgaattttcaatttgttaaagaattttgcgaatttttacctgccaatgacgcaatgaaataattggacggctgccgaatggcacggtcgagcacaaaggacagaaggaccaccaaattgccggcgacggtgacggccgaaatcacagccatcagaagcaccttttgagagggcaagaaatcaattattaaagatcaaattgactatcatctcattagtaagcgatgatcggtcttttgattggacagccaaaaagccgggaatttatcaacccgagaaatgagactttcgaatggtcttccctaatcaccaccaatggcactgactaaaagaatgtcggtccaggcgagcaccaattgatgttggacagtggcggcggtggtctcgtcgttggcggcggaaggattcattgggcatggaagagacaaggcggaagaaggacgaggaggaggaggaagaagaagaggaggagaaaggggggacgaagaacatggcacattttgatcaaaatcaaaggaacaaatgggcacagtcaaagagagggaggaaatgccaattggggaggaggacagcttcttccacccccactgacgcaaaaggcaagcggattaccaatccgtcagagtttggtcgatgggttgggggaggggcagcgaccaaccgacggacaaacggacgaccccttctccaatttcggcaaaaagtggctgaattgggggggggggcaaggaagggcaaggggaggggagggaatgaagagcttagggttgtgtgatggcctaaattttgcaacgcgcccccgccaaagggcttaaggatgagtgattgaatggaagagaaggaggaggaggaggaggaggggcaaatgatgaatcgaaacccgggggggggggctcaaaaagaaggaaatgatgacttaa

SEQ ID NO: 32012 - DNA, 898 bp, Heterodera glycines
ttttgttatttgactttttttattggggatttttatgaattttttcactttaaagctccggcaatgcccttgacagaaaaaaacaaattctgagaaaacgaattgatatttaatctattttttctgttccgttgtccgatttcgcgagattagaacaaatgggccgaatgggaagagattggactaatggagaaacatttctatttgcgttttgtaatcgaccattactcagcaaatgacggtgaattcaacgtcaatgactatttctttttttggtttttgtctctttcacttttcatttattttaaaagtctgacgatcaattgaataaacggcaaaaatgaaaacaaaaataaattacaaattaaaattgtgataaatgaaaatgaatggttcatcatcaaaaaagaaagagttgtgttgattggttttgataatacacaatttaattgatcatttattgtagataaaaggacagcagggagaagagaatgcttaagtgtgtcggaaatgtgtccatgtcagtttttgtgccgtcgctgtgccgttccagccgtcccattttttctctacaacgcctcctcaattttttgttccacggtcctctcagcctcttccgtgtcgtcgcccctggaattttttcggtaaatgaataaatttagtagtgttagtagtgttcacgaacctcgagttcgtcaatgatgcgctgcgctctacatttttccgccaccgctttcctttgctgaagctttgcaaagttgatgagccgtcgggtttccgccatttgcttggtccttctctccaattggcgaattttctgccttgtttcatgttcgtccaactccgctcggcgccgaagccgttttgcatcatatctgaaaattgacactttgttttt

SEQ ID NO: 32013 - DNA, 1428 bp, Heterodera glycines
  unsure (1)..(1428): unsure at all n locations
ttaagccttttcaaattgcaaccgctcagacccaatcttttcatatggttcatgttttggaactgtccaaatgtttcactgaaattaatgccatccattngagaaaagtcgatactctgtttgaatattttgtccaattcattaatttattttttctttggctttacctccaagtttttcaattgtccgatttcagttaacaatgataagcttccataattatggtctccaatcaccaaatttttaaggttgttgagctgacttaagcttcctttctcgatggaagatgaaagcgaatttcccgcaatgttcagtgtctccaactaaatgccattcactataagcttgtcttttgttagttcacctcaccatttcaactccgtcaaagtcggcctttctcagtgtcgatattttgttgtttgccaacgaaatcttcttcagtttgggccctttcctcagcagtttcgttggcactttttccaagttgcattcttcgatcactaactcaacaagtgagtcgaatttggcggtcgaatttgtttcgaattccaaattcggaatccctttacactttttcacttccaaatgcgtcaaatgggcaatttcgtggctcagatgaaaatgctcttctgagtttgtcatttcctcttcagagaagtccacgtggtccagaatcatctgtaaattattattcacaccttcgttcttttttttgtatttacccttccaacgcttttattggcttttgctacaaattcgagcgtttttctcaaatctgtgattttcgtgccataaatgcaagtgatggaaataatctcttcattgtaagccaactccttttgtgccaatgtttcgtcgattgattgttccgggccacagagacagtttatttttgtcagttggggggaactgagaaggtccaatgatgagcttgtctggaaggcttccaagtcagggcatcccggcactcttctcgaattgattgaatcatttgccctgagggtgccgagaccattggagcaaattagccaaatcacacaacagaaaagtgttgaaagaagtgttgttgccgatggcatcgacggaagaatgaatggctttctgttagttttggaaatggtttggctttgttagtcgttcacaaatcagtgttatgttgggatgaaatgtttcgtcgggcggactctccgccgccgtttccctttctccccatcaataaaccgttttccttctcattcacttttatccgtccattggtggtcgatcgttggttcgatcacttccagtttttgcaagcagaaccctctaagcttttagtgaagcgtatcacttttaattaaggtgtgaaagtggcgtttcccggggccttcgctagtggaaaaatttaccnaatactttgaatgagcttaacattgaattctcagctct

SEQ ID NO: 32014 - DNA, 1260 bp, Heterodera glycines
agccgaagcaagaaacgagcccagtttttagaagcacgaagcttgaagttttaaaacataaccccacagcgaccaaatttgaagattcaaatagaagcttcttattttaagttttacactttacatattttggattttttcttgttgtatttttctatttttttattaaaatagaaaggatttggcgatgccaccataaatataatctaagatttagattttaaatgttaaatttaattcatatttttgcttctaaatatttaatagtaataaaccgaaggcaaattttcgttaaatgattaaattaaaatattttctaattgtaccaattttattttaattagataaattatttttaaattattttaaaaaatatgtaatataatacatcattaaatgaccttccaaaactactcattggtcaatgaagtgagaatgaattatttaataaaacaatgaaaaattagtcggaaaatattttcaaatttggaagggcaatttctaaaacaaattatgctttttattttaaggcgttcaatcgtttcggcgttggcactttctcaatggaattgtttttgacgcattttttccgttggctcgtttccctgcccggaatgttgttcaatgcagcccttttgaacacaatcattcgcgaaaagtgataattaaataaaaaatttataataaaaaattcttataaaatgataaatttaataattttaaagtgattaaatatgttgtaaagtgactcccttaatttttttaaatttttcttcttaagcttatattggttttctcattttcgagcgtttcaagctaaatttgtgtgttttcggggtttttagattattaatagggctgctaattttaggtaagaaaaatcgcagaataggtacttaaaaaggttaaaaaatatatcaaaataggcatcaaataggtataaaaattccaaaataggtaaataaaaatttttattaacgattttttagtggaaaaaagcaaacaaagagggaaaattttggttctacatatctctttgtaaacgaaaatttaaatatattaatattttcttagataatattgacattttaaattaaaaattttgtcaatagaaaaaaataaataaatgttgggataaatttttgagaaatttttccaattcttagggtgcatttttgaaaatttttttggtcgattcttatgggtatattttttgattttattgcatttttgttaagaattttttgaaaatccttaaaa

SEQ ID NO: 32015 - DNA, 1726 bp, Heterodera glycines
  unsure (1)..(1726): unsure at all n locations
gtgcttaaaaatgcgcggcgcaccgcgcaaaaaaaaaaaccgcgcccgcgcaccgcgcatcgcgcattcaaattgccgcggccgcgaccgcgggatcgcgcaaaaaaaaacgccgcgaatcgcggatcgcgcatcgcggatcgcggccgcgctccagnccctgattcaggtccaggattcttttttttttgggtttttcgaaaatcgcgaattcgggtttggattaaaagtaggataaaactgttaggcaaatgttttttcaccttttgagcttcaacttttgtcccttcttctgctgacaaagaacacttcttaatttccatgatgatctcttcctgtaatgcgcatctatttctcaaaaattcattctccgcttcgagctccttcatttgttaagcacgcaaattgcacaaactaacccaataatcattctttttcatttaattattattcagaacaaatattgattagctaaaaattttaaaaaatgtcgcaacgtctaaccggggatgtgccatattttcgaactgtgccctcctctccgtcaaatgaagacgacggattggcggacgaggatgagccggttgatcaccaaagtcccactgctcaacagcaaaaagcggcacaaaacggtagctaattaagagccaggcttcgttttttggggaataaaatcttttttttttttttttagaaatacgggccaagaaaagacgattctctgagttcgaattaggtcggtctgggtccaggtttatgcttttttttcatggaccaagacgccaagccaatgcatcttaggccgtcggggtttttctttgggtctgaaaacccaggcccagttaaatccaaaaaacctgagtttcctggaccatcatttatttttctatttatttgttatttaaaatgataaatttttgataattttaagtggttcaacattgaattatttttaggtaatttttatatttttctaaacaaaatatttttggtttctgggcattaaaaaacacaagttctagcggtgggttttttcccagaaagtccaggcttaattcaaacccagaccaagacttttcaagtcccgagctctaatcattatcacttattttaccctacaatttttcaattttatttgacccattttttccttttttctagtggaggatgatgaggagacaattttgcgacgtcgacttttggagaaaaagttggaaaaggagaaaacaaaggcagccgcgactgttggccagcagatgacgaaggagcgcgacggggccgaacagaagggggcaaaggatggttccagaaaggagcacccgcaaaaggttttcggcatttttgtgggcatttatacgctaatttgtggttttggtttcgttttaattccgagtcttggtcctaaaaaatgattttaacccaaaaattacacaaattttagagcatttgtgggtgccaaatttaaaaaatcaacagcatttatttaggagaggccaaagcgtgagaaaattgtgtgggacagagaaaaagtgacggcccctaaatcgtcgcgtcatggccaattggtgtcagcgattgcggacaccaaacatgggcaacgttcacaaagccaggtttctgtccaatgatgcgctcatttttggcaatttttttttgtctaaaaaggggaattcttggtagcttatgccacaaaaaataaataattttttttttttgtgactctaga

SEQ ID NO: 32016 - DNA, 897 bp, Heterodera glycines
ttgctgtctttctgcttcaggtcctgcaaaatgtgttcatatgtggtggagtcgaactcgtaaatgttcggcttgtcctcttttgggccgggcaatttcacgtaattgccggagccaaagctttgcacgttgaacccacgatttctaatggggggagggggggtgggggtacagaaacaatgcacataaaattgaaatttaataaaatttataaattaaatatagaaatttgtcgcaaattttttgaagagcaggactttgattttgattccgaaattagggtattttaccatttttgggttcacagaattcatttttatttttttaatcaacaaggttaggacgatagtttactattgaggaaggaggacttgtggaggagctggacccaggcttggattttcctaggctcagaccaggtttaggtatgaattttattaaagtttacttgaatagccggagtttcaacgctgacaccgaatcggagcgggggaaccccccgggggacgttcatttggatttgtaattaactgtaatgcctccctctgtttttgtccgagtgatcgctcttctgtcgtcccttggggcaatttgtaaattcgaataattcttcagaaaagcgttggatcgattgctcatttggtttggttcaattcttatcacaaatgtttgttgaaaattttaccattggaaaaagaagggcgatttgtttgtgaatttttaattctggtgctgatacatagcaaatttccagggagttgaagaaggccatcgaaaaccggaattcacaacacaaatggacaatggcactatttttggtggcaaactcacagaccactaagacaaaaaatcaattagtttttgaactgggggctcaaaactgactcggtgtgtata

SEQ ID NO: 32017 - DNA, 972 bp, Heterodera glycines
ggggtactcaaacaattatgggggagcaaaaatccaacgcagaattaaagtacaggctatagggaagctattccggaaggattcggtctccccataaatctgggcgcatcggttcggggagactgccccgaaaacaaaaaaatcgattttttcaagtgtccgtttggggtactcaaacaattatggggagcaaaaatccaacgcagaattaaagtacaggctatagggaagctattcccgaaggattcggtctccccataaatctgggcgcatcggttcggggggactgccccgaaaacaaaaaaatcgattttttcaagtgtccgtttggggtactcaaacatttatggggagcaaaaatccaacgcagaattaaagtacagactatagggaagctattcccgaaggattcggtctccccataaatctgggcgcatcggttcggggggactgccccgaaaacaaaaaaatcgattttttcaagtgtccgtttggggtactcaaacatttatggggagcaaaaatccaacgcagaattaaagtacagactatagggaagctattcccgaaggattcggtctccccataaatctgggcgcatcggttcagggggactgccccgaaaacccaaaaaaaaattttttggataaaaattatttaaatgaactgactagataatatttaaaataggttatttctcttcctttcagtatccctgcaaagtttggtgcgcttctgatcagtttctgaaaaaaaagttaagcctaaactttttggcctgtttaaaaaggaattaaaaatttttaaaaattttattcatctccctttttgatagtaaaagcatcagagtgcctaaactaacatgtaaataaaatttggtgcgtttcagaagcctttctgaaaaaatattaagaattaattttgcagataggaataaaaacgaaagactcagattttcgaaaatttttttga

SEQ ID NO: 32018 - DNA, 1269 bp, Heterodera glycines
  unsure (1)..(1269): unsure at all n locations
ttttccaaaacataantgaaaataaaaaagcctatgattttttaaatgctttgcaatcatagaaaaatgtttgattattattatttacttaataaagtacatagaaattgaaaaactcaccatagaagagataatctgttatagaagaaaattgagaaattattagtgaaattaagatttctcttaacagggtaggcgaaaagggcggcaatttgttaaaaatattaatacagtttagttccccgtttttagcatagtcgtttagatgtgatcccagtgcaattaagaaagtaggtatgaatgcttgggaaaattttgttgtttaaaacagagcaaatagagcggtgtgcgaggaaatgcttatcgtttaaagtgggtattgaagaaaaatcgacaaaaaatttaatgagctccaattgcatgggcgtctgtaaattcgaaaccagcacaaaaaataagcctcatggcaaaattccagcgcaattggtcggctataagccatggaattaccacaaatttcgacgacattcaagactgatttttgttaaaatatgaacacatatttaaccggaaataatgaaaggtgtgtgtttgatcagaacttatcttctctatttgttacactatcgattgcttatagaaaaatgcataagatttatacaattaataaaattacaaaaaaaaattgtttatttaattgaccttttccaaaacataatgaaaataaacaagcctatgattttttaaatgctttcaatcaatgaaaataaaaaagcctatgattttttaaatgctttgcaatcatagaaaaatgtttgattattattgtttacttaataaagtacatagaaattgaaaaactcaccatagaagagttaatctgttatagaagaaaattgagaaattattagtgaaattaagatttctcttaacagggaaggcgaaaagggctgcaatttgttaaaaatattaatacagtttagttccccgttttagcatagtcgtttagatgtgatcccagtacaattaagaaagtaggtatgaatgcttgggaaaattttgttgtttaaaacagagcaaatagagcggtgtgcgaggaaatgcttatcgtttaaggtgggtattgaagaaaaatcgacaaaaaatttaatgcgctccaattgcatgggcgcctgtaaattcgaaaccagcacaaaaaataagcctcatggcaaaattccagcgcaattgatcggggctatagccatggaattaccacaaattcgacga

SEQ ID NO: 32019 - DNA, 1230 bp, Heterodera glycines
gaggacagggattgataactgtaatgacggataatttaaaataaaatagcgacattcttccaatgttagcgcaaaaaaaaatatgagtaagaattcagagtcatgcgtctcgagatgccaccttcgcttaccatgtgcattgtgatcagagtgccgtccacaatcgcttcgattgcttctttctgcccccgcaaaggatcgttgaagatttgcttcgtcatgttgaaggcgttcacttgcgcttgagaagatcgctaaataaaatatttaataatttatttttaatccttacagttaaatagggtgcaccccaaaatttcgccgccgaaatttcgccggacggaatttcgccgggacataatttcgccaaaatttttttttaaaaaatttggaaattttcaagaaaaaattcttagaatttttttatatggaaattccaatgaaaaatttttgaaaaaattttttagtgattttttggaaaatttttcgaaaaaacttactaatttatcataaatttcaaaaaaaatccttaaaattttttctaatttttttttgaaattttcttataagaaattctatgattttttcttaaaaaatttctaagtctaattttttgattttatttttttgcggcgaaattttgtcccgtcccctttgttgttgctactcaatgaattgtgcgagtgacgagcagtgccatgagtacgcttgtccaccaccacaaccatcggcacaatgtgtgccgaggtgccatcgctgttcgaagggcgccgcttggcctcggaattccaatgccttcgccctgcggcccaaccgccacgaagggtccgttgagtacgggtgtaatgttcgggttgggcgtgggcaaattgggcggctccgccttgatcacctccttggccactgcgctggggtcctcctccaagtcgttcttgaactccatccgatccccaaaggtggtcagcaggtccaggataactccgttggaccagccgaacccggactgacaaaggaaaagtccaattgcgacgaccaaatccctcccctccccctcaaattacctgaacttcgtattcaccgccaacgcctttgttcggcttgaatttgttcaccgcgtatttctcccacatgttgcccctgggcacttccgagcggtacacccggtaattgctgagcacccatttgggcaaaagcaaaacgcctttttctgcattctgtcggttaaagggg

SEQ ID NO: 32020 - DNA, 1434 bp, Heterodera glycines
  unsure (1)..(1434): unsure at all n locations
cacggaggtgctcactttgttgttgtcagtctgaaagtcgcttaaggctttggctcaattggcgctgccggtggctacggcggtgttcacgtgtacggaggcggggagagaatggtgagacgcaccgatttggtatttgaacgcactgggcagtcgctaattgtacggcatggtaattttgtcattcagatccccggcggcattcccaattcgttggggcgggcgctcgcgggccttcgatggccaacagaggtaaagggcaccgcaacaaatgctgtatacttgcctccgagactcttacacacatttagggtgggactcgtccggtgctggcaatgccaacaaatttgtgcccgaactctccgctgcagggcccagtggcagcggcaatggctcccatcggaagttcacccaattcagcggtccgccgccccctctgaacataattcccccgcggcatccgccgatgttcggccatctccacccgccccctcttttcacttcgctaaaccctccacacgcggcgagcgcccaattcaacccaatgggcacgttcaatttgcaaaatgggacaacggcgagcaacattcagcagacgggcggactgagcgaagacgcaatttggcaaggtgagacgaaaaaagggacacaacgccaagccatgggcgagaaattaatgatttaaaaataaaaaattttaaaggttttaattctgagagttgcctaaagctttcaattagtagtagaagtagcatgcttgaactattgcttttaatcacacagaattcgaatattttttgtgaacttagctgatttgaaattttgcccaaactcggcattatttaaaaacgaaggtaatttcccgttttgggatcgcacaccaaaactttaaaaaatcaacaaagaagcacgcaaatcacacaatatattctcaaactcatccatttgctttttgcatttatttccccaaataatactgtgtatgcgttttgtgaatttgtgcgcaattttgtgattttttttttganaatttaaaagtgttaccccgaaacaggaaaatacaaaaacgagttattatagaaattagaaattgaagcatccgttggattattgcacttttttgcagacccaaacggcgaactgcgcaaatggcaaagggacaccggcacttccatttggggcgacccggcagagcaaagtttgctttcatccgcaacacacaaaacgattggtcattttgcagcgggcccaattcagcgatggcaacaattcactgccgatgaagtggtggccaagtccaatctgttggccaaagaaggcgcagaagtggtggagagcggatggtacgggcacactttcgttattttgcccttaagcgcggttttccctagaaaagttacgttttttaaatgaaaattgggatgggtttttgaa

SEQ ID NO: 32021 - DNA, 1074 bp, Heterodera glycines
  unsure (1)..(1074): unsure at all n locations
ccaaagaagcgagggacattggcataaggttgaaggagcctcctaaccaatgttggggttgcgctttttctgccttcgaatccgcatttcgtacattttattccccttaaaattgaaaattattcaaatttgaaaaatagtcaattattactttgcgcaacatgtccgggttatatccgcgtttgaacaattcgcggaacaccagcaccatatcgaaccgaccgccaaagtgagagaaggcataggtgtcgtaggcgagcggtaagtcgtttatcagccagctgacaagcgcatccaaagggttttccgccaccacttgcttgtcgactgttgtttcggtgaagcggcgctggcagaacgcgaccgtacgattaggaccgcacacttcacaccctcccgatgcctctcgccagctctcattttcaatgcagtcggggcaggcgacacgcgcagcgataaagttgggcaaatgttcacgcttttcgggcttttcagatggcatgtgctgcatagtctccaagtcaaatgccacaattcggtaggggtcgcgttccttgggctcgatgggttggatgtagcatccccgctcggtgttgtggtagttgttgcacatcttacagaagcgttcaccacaaacatgcccctttctgccatttcttttgttatctgctacatcccaaacagcaccgcaatctttgcactttttcgaccgcttgcagaagcctgactgcagatgatgctggtagcagccgttgttggtgaattttttgttgcactctttacattttttgaagaagccggcggatgatggacatggaaaagcaggtccaacacgtgagcacagcacacagcgcgccttacatgatttactgtgtgtcgacattcttcggtacgggcgctcacactccaagcagtatggttgcccaaaaagaccgccctgcttctgcacaccatcaaaatggtccctcattgaagtacaacagcagcggagtgtcgtaaatcttctcaaagtacttntacatcnntttatnctctcccancgatcctaggaagaacacagcaaagcggtgttgt

SEQ ID NO: 32022 - DNA, 1063 bp, Heterodera glycines
  unsure (1)..(1063): unsure at all n locations
ggagaagtttgtagtgactgcgcatgaaataatagcgactcaaatgacggnntttgcacccgtgggaaccgttctttggcttgtgaaaatggctctaaacattcccaataatacggataatttattttaaaaaaacatacaatgaaatgtgatgaatccggatcattcaaagcacaaaattcgccatccgcacagtctgctgattgttgtgagtcgttcgattgggcgagcgcatgggcaaggcaaaagaggaggagcagacggaggccgtgccgaaggtccattttgggaggaatgaatgaacagtttgggaaaggcaaaaagtgacagtcattgggcaacggagcaaatttataccgcagcaaaagctgtgggaggcgtcggtgatcgggcgaataaattatccgctaattgtgccactaatattcacactctgtgcattaatttactcaattcgccgccgcccccttagttttttctacaaaaagcagacgatgctcttcatggcataaattaacacagcattaaataaatgtgcgaacagcacttaaattgaattcaataaatataaatgatgagagtaaacgttaaaatttaagtgaaaaaatgaattagcggactaattaacggattaatgtttaataatttgaattttgcaatcttcagttgttgtagtccctattaattgtgtctacgttcgctggtgcggcatatgaccgaaattaataaaatttcttaatagatttgagaaattttaagaatcttaattattgaaatttttgagtcttcttaagcatcttaaaaatattattttatttgttatagaattatagaaaacattttattttatagtaataattttttcaggtcccggttggacctggtacccggtttaaaaacttgaagcccggcttttctgatgtccggcaatacctgaacccgttttttgcccaaataccccggcccgttaaccctacttcaaaacacaaaaatttccttacgcctaatttcctcctaataatttttagctaaggttttaattcttatcaggcttatttttcct

SEQ ID NO: 32023 - DNA, 1103 bp, Heterodera glycines
tgggacgcataaaagttcttggggacgcataaaaaaaaggccaggggacgcataaaaggccatgggacgcataaaagttctgtgggacgcataaaaaaaaggccatgggacgcataaaaggccatgggacgcataaaaatcaaatgggacgcataaaagttctttgggacgcataaaaaaaaggccatgggacgcataaaaggccatgggacgcataaaaatcaaatgggacgcataaaagttctttgggacgcataaaaaaaggccatgggacgcataaaagttctttgggacgcataaaaaaaggccatgggacgcataaaagttctttgggacgcataaaaaaaggccatgggacgcataaaagttctttgggacgcataaaaaaaggccatgggacgcataaaagttctttgggacgcataaaaaaaggccatgggacgcataaaagttctttgggacgcataaaaaaaaggccatgggacgcataaaaggccatgggacgcataaaaatcaaatgggacgcataaaagttctttgggacgcataaaaaaaggccatgggacgcataaaagttctttgggacgcataaaaaaaggccatgggacgcataaaagttctttgggacgcataaaaaaaaggccatgggacgcataaaagttctttgggacgcataaaaaaaaggccatgggacgcataaaagttctttgggacgcataaaaaaaaggccatgggacgcataaaaggccatgggacgcataaaagttctttgggacgcataaaaaaaaggccatgggacgcataaaaggccatgggacgcataaaaaagagttctttgggacgcataaaaaaaggccatgggacgcataaaagttctttgggacgcataaaaaaaggccatgggacgcataaaagttctttgggacgcataaaaaaatcccatgggacgcataaaagttctttgggacgcataaaaaaaaggacatgggacgcataaaaatcaaatgggacgcataaaagacctttgggacgcataaaaaaaaggccatgggacgcataaaaatctttgggacgcataaaaaaaggacatgggacgcataaaa

SEQ ID NO: 32024 - DNA, 1989 bp, Heterodera glycines
  unsure (1)..(1989): unsure at all n locations
aaaattatttttgggtttntcgagttcggtcaggggttcggaatctgactanatagatgtcaatttcttgatcagcagtcccaaaaacctaaagaaatttttttttaaatgcaggcaggcggatttaaacccatgacacaaaaatccatttttaaccaaacgtacaattcccctttgttgagaatgggcaaaattcaatttttgaggccatgtagcttttgaaggatgccaaatgctccgctaaaattaaacatcacaaaagttgacaaaagaatttaaaaatcgaattgtttaaattcaaaaatttcaggttaaaatttattttaccattaatttatatcgatacatatatacctacaatacaatagtcagaattttgaattttttgaggaaaacatattttttaagcgtacggcaccttggtcaaatttgatggcaggtcaaatgaaaaggtgtcgcaatatttgatgactaactcaaaaaatattcaaatgaagattgtcgtacaatattttggcccaaattgctctcttttatcccgtgaataactgacaaacatttgaattgagtcggatttgtgatcaacgtattttttgatcccagaaaatcgattaaaaaaatttcaaaaatcaaatactcaataaaaaatcatagatataataaaagattttcaaaatccgagttcatatttgttatcagcatattttttaagtctagaaaaagcgctttacgctttaaaaaaattatttttttttcgtgaccacaattccgaaagattgccgaatacctcgaagtgtataaggtttgcaataatgcaggcgaaaaatttgaagaatgagatttttctggttttctatgcataaaactttgattttgccaattttgggcacatatattggcagtatttcagttttaccacatatttcagcatttttagcacactttggaattttgtaaaaatttctttgctgttatgctaaatttattatcattataaattgataagtgaatatatatcactttaaaatatatatttggtgaaattcgttgtctaaagatctattttaagttaataggcgagatattcagtaggcgaaacgtccgatttttgggtgtaggcgaagtgtcagtaggcgaggtttccaataggcgaaaagtccgcttctaatgaaggaatatagtgaacacggcgaaaaatatttcaaaaaaataattgctaagatactaaataagcgtcgtcaataaaattcaaaatatgtctttccttgacaagcatagagctatcaagtgttaactattgagcaaagttatgtcaagtttttgtaacaaatgtctgccaggcggttttaagaaacaaaaccactttttctaactaattttgggagtttagcaattaaaaatcaaacaaacctaaagatttaagcttaataaaatgtctcatttgtgattctaaattacacatttttttatattttttattttttcaaaaaagctgtcaattttctgcagaattttaaaataattaacctcattttgaatttttgttttgaatgcaatcaatcatcacaattaatttcaatttttttgagcaaataaagcgccaaaatgaacaaaaaacgttctctataaacaaaagcaatagaatttgtgaatatttgagcaattactaattatttaaaccaacagctatgaaaacatttaaaatttattaatttgcagaaaatagaaaaaaaaattcacaattacgtaattaaaataataactaattagttttttcactatattttaaggcgatataaaaggaatggcaaaataacagaaaggcatcagtcttacattcatttattaaatataattacagaatcaacattaaagcaaccttaattggcatttaacttataaaataataaattaattaagtatagaaaaaaaattaaaaaatgcactcgcttctgctgcttttcaatgtcacggtttacgtgattattt

SEQ ID NO: 32025 - DNA, 1305 bp, Heterodera glycines
ttcaccattttacgcatttttaattcgtcgatcgcttctttaataaattttgtgtcggaatcgaagtctcgaattcgttttcgggggacacggtaaggagggaaaaagaccctcctcactccatcacattcgcctacgtcttttccctcaaccctcccggatcccaaattcccctcccatcagccactgggaaaaaattcgggagtgacccgaagtagcgccaaattcgagcagttcagtctcccaccagtaggagcagcggaagagacggggagaactcccgtcgtcgtcaagtccaagcagggcagtgaaggaaggaagagccgagcggtgccaaatcgtccgacgaaaggacagggccgttcgtcagcgtaactcccaccagccggagaagcgcgcatcgatcgaagcggactcccaccagccggagtgtccgccgcagggaacgggagtcgaaacccgtggtcgtcgagtcaaaggggtccgacaagcccttcctccaaccttgtcggtggtgccgttaagcaagcagcgatttgctgcacaattctctcaagcaccaatccaaatttgtcacccctcccccctcccattctcgtccccctttggcgctgatcggatcggtcagcagcatcagacccatcaaaaagaacggcaaaaaagggtgcgcttccctttacaacaagcgaacggagtgagcagagagcgaaagggacgagagcggtgaagaggagcgggaaccaatcccgcctcagcttggcccaccccaacccccaagcgcgcggcggaaataaaaagattggcgacacatatcatatttttctaattgtatgcattactttgttttccgctataagtgcaactatgttgccttgcggtttgttcaaataaataaaataaaataaattcttaaattttcccccggcggcgcctatagggcaccgccgggacccccaaattcctatcttttttcttaaaaattagcccaatatcgcaaattttgcttattttttgtacaaaatattttttttaatgacccaaaatccctaaaattggttattttttagacaaaatctgtgcaatttatgtcaaaataaatagaatcgaggcgatcaacgaataaaggaatgtggagccaaagaaatcattcataaaaattaatttttttgtgagattttttgaatctaattcaaagcaaacccccgcccccgccgcgcgggggcggaattatcgtgcccccgccaccgcccccgcgactctgacccccgccaacccccgcccccgcgaaaagccactcctgcccac

SEQ ID NO: 32026 - DNA, 950 bp, Heterodera glycines
agtgattagaagaggtacaacagtgattagaagtggtacaaaagtgattagaagaggtacaaaagtgattagaagaggtacaatggtgattagaagaggtacaaaagtgattataagaggtacaacagtgattagatgattaaataattaaggaaatcgtttattaaaaagtaagattaaatattgaatgtaattaataaattttaaaaataaaataaattattccttttattaattaaaaagaaagtttgaaatgtacaaggattgaatatttatttaaattgaaattaattttacaaattctaatttaaaaaatacaggagttctttaataaaagtaaataaattattattttaatttaaaacatttttcacaaaaaaacaatttaatttaaattaaaaaattttatttttattaagaaaaaaacactcttttaaatgaattaaaacattaaaaataacccaaaaatacatagaaaataatatacaccgcgcggattcgaacttcgccccccccaaaaaaatgatgcctcagaatccccaatcacacagggattctgaggtcttgactatgtcaaaagtaaaatctgatcacgtattcgtgatcagcggcccaaataacccataaagacatatttttggaagaattttgttgaaaaaatttttccactcaaaaatcctggtcacccccctttggactggaatcccaaaatcacttttatttttataacatttttcaaaaaagtgataaaaatgtgaaataaaatttataaaatagagctaaaaattgcggatttttgtagcattgtgtttttttttctttttttcttttttaacaggggagaaaaatttttttttgaaatcgcaaattttacagaatttctagaataacttttttcatatttatgttacaaaagccaaataaaacccataaaattctcctgatttttc

SEQ ID NO: 32027 - DNA, 1527 bp, Heterodera glycines
  unsure (1)..(1527): unsure at all n locations
cccccgtggttgtacctcttcccccgttgttgtacctcttcacccgtggttgtaccttttccaacgttgttgtacctcttccccgtggttgtacctcttccccccgttgttgtacctcttccccgtggttgtacctcttcccccgttgttgtacctcttcccccgtggttgtacctctgccccgttgttgtacctcttccccgtggttgtacctcttcccccatggttgtacctcttcctccgtagttgtacctctttctccgtggttgtacctatttcccgttaaaatctcttaacaatccatagcttgcctaggtagcgaagctcaagaagcgcgaagcgctttatcccaagcccagatccgacggttcacgcacccgctagtttatacatttttacatcaccaaaataaaatgatataataaaaaaggccagtgaaaatcaatttaatcaatgtttaatattaaaaatgtgcatagtcatgtgtattcaatttattattgaattgtaaaatgaagaaagaaataatatatggccgtaaaaaccacaaatttttattttaaacgaaaaaaattctcctgcgctacaaattaccatcaaaattgcaaatattcctttcagcaaaatgtcaattttgttaattttgatcgccctaatggagctgatcaaatggaatgctgccaagtttgaagtgatcacagatgacacaacagaggcggaagacatggaaaaggcaatgaaaattggccaaacttacttttggcgtaaactgatgacagaatggaaatgtcaaaataaaaattttaaaaaaaaaaataatcacaataaaaaattgatcaaaatttgcgaaaattggaaagtgaaggcaattgcggcgaatgcctatgtgaaaagttgggtgtgccaaaaaaaacaattggaacaagctgaagttggtacaagttcatcaggagcacaaaatgtggaaatacagggttaatgaattgaatttttttgaattttgaaattaaattttactttttttagtgtattcatgcctttgtatgaagccaaattttcaaatggtgaggcaaggcgaactgcaaatgagctcagcaatggaagtaatcaaaggagtgtaccgggacttattcggctggggcaatggcaaatggatgcaaattaaggtgaaatttagaattaaaaaaattaactgttaaaaataattagatggaactggaaagaaacaacttgtggagcatgactacttatttgtttgataaattgaaaaaaaaagaagatctcttgggaatggttagaaccatcgaacaatatgctgatattggtgttttggatttcaaggaatttatgccgtcgaatcaattttcaactgagggtttaaaagtgaatgagattcatgacattgtctctagtaagttttcattctcatggctccaaatattttttgaaaaatggtttatttaccttttataatataagcattncttnggtnngtgtccccgagattcatttngttattattaatct

SEQ ID NO: 32028 - DNA, 1295 bp, Heterodera glycines
agtgacgaatcgagtttgattggcgattttgtttttgcctgcgctgatttgcgaggagaaggcgaaaaacgttggccaccgcatggaaaatgcctgaaagagaaaatgaaagattttaaaatatttttatttaatttgaatttaccacacaaaaggccctcctccgcggccatccgtcgtgccattgcaattgcgtcgtccgagtgaacttgcacaattccgccgccgtttttgtacaggttcgtgtccaacacggcgggcactgtgcccgtgccgatgccttgaattcgatgccgtgctccttcggggcggcatccactgagtacggcactctccgccggctcaacggcgtaaaactacaatatttgtggggcatattttataacgatatttcagataagaagtttatcagtttgttgtcaaactgaatcagccgaaaaagacaattcgttcaccgaaatgctataaaatttctcggtatttctgtttgttaagtgcaaggctttagactgattatacctacgacatgtgtaccggcacagcgattttggaaaaatctggattgaccggttttagggaggtagggatccgatccggaaacctgtagtaagttatatagcgacccaacctcgcgcctatatcactcacgtttccctcacttctactcgcatatggacctcttctaataactgtatacctcttttaatctctaatgtatttattaatttgaagagtttttgaaaattatttgaatttatttttttttaaattaaagaataacattattttttctgaatttgtaaaaaaattaatttcattttaaataaaataaatattattaattttcaagttgttttttattaataatttaaaattaaaatgcattcgatttttaatatttaataaaaaaaatttccttatttattaaattttaaatcatgttgacctctttcacgttgttgtacctcttctaatcagatttgtacctcttttaatcacagttgtacctcttctgatcactgttgtacctctattaatcaccgttatacctcttctaatcacagttgtacctcttctgatcactgttgcacctcttctaatcacagttgtaccttttctgatcactgttgtacctctattaatcaccgttatacctctcctaatcacagttgtacctcttctgatcactgttgcacctcttctaatcacagttgtacctcttctgatcactgttgcacctcttctaattactgttgcacctcttctaatcacagttgtacctcttctgatcactg

SEQ ID NO: 32029 - DNA, 970 bp, Heterodera glycines
aaaaaaaatttttggacaaaaaatggttttctctttttttctcatttttttacccgcaaaagttggttccaacagttgcccatcttgtctggccctattcaaacaatctttacgatatttgaaacgcaaacaaaaaaaaatttcttgaccaaaaaaatggctatctcttttttctcattttttttaccgcaaaattcggtaccaacagttgcctttcttttgtctggccctatcaaacaatcttacgatattcgaaacgcaaacaaaaaaaattcttgaccaaaaaatggctatctcttttttctcatttttttaccgcaaacttggtaccaacagttgccttctcttgtctggccctatcaaacaatcttacgatatttgaaacgcaaacaaaaaaaattcttgaccaaaaatggttatctcttttttctcattttttttaccgcaaaatttgtaccaacagttgccttctcttgtctggccctatcaaacaatcttacgatatttgaaacgcaaacaaaaaaaattcttgaccaaaaatggttatctcttttttctcatttttttaccgcaaaattggtaccaacagttgccttcttgtctggccctatcaaacaatcttacgatatttgaaacgcaaacaaaaaaaattcttgaccaaaaaatggctatctcttttttctcatttttttaccgcaaaattggtaccaacagttgccttcttttgtctggccctatcaaacaatcttacgatatttgaaacgcaaacaaaaaaaattcttgaccaaaaatggttatctcttttttctcatttttttaccgcaaacttggtaccaacagttgccttctcttgtctggccctatcaaacaatcttacgatattgaaacgcaaacaaaaaaaattcttgaccaaaaatggtttctcttttttctcattttttcaccgcaaacttggtaccaacagttgcct

SEQ ID NO: 32030 - DNA, 1680 bp, Heterodera glycines
aaaaaacaagggaaaaggagaaaaagataaattgggaataataaaataattttaaaagagaaaagaaaaaatttatagaaaaatagtcaaaaatggaaataattgaagttaaaaattttaaataggacaaacataatgccaagagtcaaaataatttttaaattaaaaaaaaacggaatgcaaagggttgaaataatttttaaatttgaaaaaaacagaatgccaagggttaaaataatttttaaatttgaaaaaacagaatgccaagagtgaaaataatttttaaatttgaaaaaaacagaatgttaagagtgaaaataatttttaaatttgaaaaaaacagaatgccaagggttaaaataatttttaaatttgaaaaaaaaagaatgccaagagtcaaaataattttttaaatttgaaaaaaatgccgactgaaaataattttaaatttgaaaaaacagaacgccaataatttaaataaattttaaatttgaaaaaacagaaagccataatttaattttgaaaaaaacagaatgccaagaatttaaatattttttaaatgagaaaatggggaaaataaatgcaagaaattggcaagaaataaatagggaaatttggcacaaaaatgtgcaaaaatttggcaagaaataaatagggaaatttggcacaaaaatgtgcaaaaatttggcaagaaataaatagggaaatttggcacaaaaatgtgtaaaaattggcaaaagaaagggttaaaaattgtggcaaaataatgcgaaaaattggcaagaaataaatagggaaatttggcacaaaaatgtgtaaaaattggcaaaataaagggttaaaaatttgagcaaaacaatgccaaaaattggccagaaataaattgggaaataaggggcaaaacaatgccaaaaaattgcggcaaaatggcacaaaaaacggtaccataataatgccaatctggcacataaataataaatggcgaaaattaatgggtaaatgggtaaacaaatgccaaagaaggaaaaaattaaggcataaataaatgataatggattattgattggcttttccttccgtaaagtgaattaaatgaaatgaaaatgaccaaatagacaaaaaatcaattaataaattgtttattgtctgaaggtgtcaaattacataatgggcatgcgggaaggagggcggcactacaaagtacgcgaccaatttaaaaaattgaattatttatttggcaccgttccaataaccccgcccaccttcataattgatttgtttatttgacccctcctcccgccttctcgccgcccgctctcgccccctgcccccgctggtgacgtcaattttgccctttatgagagcaaattaatgtttattgtccattgccaatgtggccgagtggttagtgcgtcagtctggccgccccccctggggttcggttccgcttggtgcggggaatttttggagaattttaaatgattttaaattcaacgtcttaagatgttttgacttttaagatgtttaaaatttaatttaaattaataaaataatttgcataaagtcgcgcagtcaaaaaagtcgcgcacccctgcaataggtttgggtttccaagaaaatgtagcgcaataggtttgggtttgcaaaaaaagtcgcgcaataggttttggcttcagtact

SEQ ID NO: 32031 - DNA, 1246 bp, Heterodera glycines
atgaattcaatgaattttcaaaagttttcggtccttattctattcgaaaaaaatttattaagaaaatttcaaggaaacaaaaacaaaacaaagatttttcaatgggttttctttttttctgaaatttagtaatttctttagagttaaaattcatgaaaaatgtaattttttgattttttttcccgtcaactttttgtcccgcgacgttttagggtgcacgagttttatcctatatgcttttgcagcacaaatttcttgaaaaatatatcttttggaaaaaattttagacaaaaatgtggcgatttgcacggcgaactggacgccagcctggagaccagtgccatttttcgacgccgattggacgaaaatgtggcacgcatggacacactgtgcacggaattgtaccagagcaggcaacgaaaaatttttttcaaaaagtttatactttaaaatttagggcccaaacgcagcaagcgttggacgacaaaaacatcatggcagctgaggtggaacggcttaaaggtttgaccatttcttgggtcatgaaaatgggaattttaattttttttttaatttggaaaatcatataccatttatctgcccccgtaacactttcgataattttttagttttcgccttttggggcaatttttgaaggtcttcctttcctccgaaatgatttgggcgcttataactcattgtcagctacagggatattaaatgggagctaatcctgaaactaaaaggctgtcagtgcccaaatttttctaattaaggcattaacagctatttaaaattgcaaaaatattaagttgccaacattgagatcgaccccaaccaaaaatttagtttttaaacccaaaaaaattaaaaaaaaaattctttcttgacagatgccatctttgcccaggacgagttcatcggcatgttggagggcgatctgttggtgtacgaggcccatgtgggcattctgcgcgattcgttgggcgccaccaagcgggaggaccgccagcacatcaagtcgaaggcgttcagcgccaagctgaacgcgctggagatggagaagcgggagattgcgaagcggaacaacggtggggttcaagtttactatttttttaattcgaaaaagattacgaatttttttttaattgcctgtcatatccccaaaattgcaaacaaaatcccaattcaaatccctatcatttcttaaattttaaataaaacgaactcaagggctaaactcccg

SEQ ID NO: 32032 - DNA, 1114 bp, Heterodera glycines
tacgcccttgttctgatttgataaaagttcaatccgtaatttttagttggcttctgaacgtctttcaaatgtgaaaacagtgaaaattttttcggccgaagcgaaggaacttcaatcgtacaaaaacaaaatcatggagatttgggaaatttccaagaaggaaggcacgaccaagggccttatgtttggcgggtgattgtctccgttttccgtccattcgttgccattgtccgtttcagtttccaactcaccggttacctcgcgctcacttcaatgctttactatggcagtgtgctgattgccgacggctgtttgacctacggcgatctctcttcctttatgctttattcggctttatgttttggcggcattactaatttccagctgttttatacggagttaatgcgcggtttgggcgcttcggcgcgtattttcgaacttcgcgaccaaaaaccatcgatttccagtgaaggcgagggttttttccattttggtttctcaaattatttttattttatttaggtggccttgtgattaatgctctgaataaggaagtccgattcgaatccgtcgctttttcttatttgaaccgagaatccatcttcagcgacattacatttcgcattcctaaggcatcggttaccgcaattgtaggagcgtctggaagtggaaaatcgaccattgcgcatttactattgaggtatttctttaaattcttgaccaggactgaagccatcggctggttgctcatcatttttcaactgtcccaacaatttctggccaaaacaaaaaatagaaacacttatttttgcgtggtttgctgatgcagtttggtcgtggttttttgttctcccagtttttaaaaatttaaatgttttgttatttatttaggttgtacagtccgactgcaggtcgaataatggtcgacgacatcgaccttaaacaattggacctttcatgtgaagaatggttttttggtttcatcccaacattgtttataattgtcagcttggcggagaatgatcggaactgtcagccaggagcccattctcttctctaccctcattcgtgacaacattctctacggaggtgagaacagccatttgataaccga

SEQ ID NO: 32033 - DNA, 1599 bp, Heterodera glycines
ctcccggccgaaggccgggagcgccctgaaagtagtctaccggtcttacaactttttgaggcgcatctagggaaaactataggttttttgctccggtggccaactgagtcccggcggctaatttctcacttttgcttgcgtttgaaggcccgtaactttttttaaaggaaagggagcggaaaattcttgctggtaggattttaagttgaagtgttttctaattttcaaaaaaaattccaggcctctagctatacttggaagggctgcagaaattggcaacttttcagtaccaactttgcccagttcagtccccgttgaataactcattaggctttgacctgagcgcagggtggccagcagacttattgtagagctcggtgagctcgatttttccagattttaaaatttcgaaaattttcaaaatttttcgagctaggcctaaaaaacggttttcgggtttttgaattttaggattttttaacgaattttcccagaaaaacgaagaccacttccaaaacatagtttttcgagctctatcgactggtatttttttcggaaaaatttcgattttttcccgaaaatagaaaaattttttggcctcagcgggacatttgagtcccgggcccataactggtcaggggttggttttagccaaaaagtgccttagaccaaaattgtagagctttttaagctctatcgaatggtgtactataagtctggaaaatttcaaaatttttcgagctaggccccctagaaattttcagaatttttttttgggttgaaaatgggggtgtaaaatttttttctggggtattttggggtgctgagcacgaatatgatgtttgtttttcgtttcagatttttttgaatttttttaaaattctttattttttgggaaatttttggccctcaggattttgggttaatattggaaaattcataactcggtgatggtttcatcgatttaactataataaagctttaaaaatagagaaaaataaggagaattttatgggatttatttgagttttttatcacaaaaaagaaaaaagttattccagaatttctggaaattttcgatttttcagaaaaaaattcagaactcggttctgaaaagtcatactgtaaaagtaaaatactacaaaaatccgcaatttcttgctctataagataaatttgcgcgaagcgcccgtcctgaggctgcgatgaattgctaaattaacgcactttctagcgacgcggcgaagccgcgtccctgagcgcgaagcgctttctcacagcaccaaaaaaaaactgttcacaccattgccaactgtgcaccctagtttatatatatatagagaaaaagggggactcgtcttaaaaaacaaaatctcccggccgaaggccgggagcgccctgaaagtggtggaagggtcttacaactttttgaggcgcatctgggaaaaatacgggtttttctctccggtggccaactgagtcccggcggccgatttcttacttttgcttgcgtttgaaaagccgtaactttttttctaaaactcgaatcaaaaaatgctgaagagcgagggcaccccgccaaagtgtcctctacatgct

SEQ ID NO: 32034 - DNA, 1008 bp, Heterodera glycines
tatgagcgctaaaattatcagagtgccgaaaatcgcatgtgatctaagcctagcaaaaatggtgtagtaaaaatcgtattacgctcaaaaagcttctcaaacattttagcgcatccaattccttctacaatcgcctttatacatcccattatgagcgctaaaattatcagagtgccgaaaatcgcatgtgatctaagcctagcaaaaaatggtgtaagtaaaaatcgtaattacgctcaaaaagcttctcaaacaattttagcgcttccaattccttctacaatcgcctttatacatcccattatgagcgctaaaattatcagagtgccgaaaatcgcatgtgatctaagcctagcaaaaaatggtgtaagtaaaaatcgtaattacgctcaaaaagctcctcaaacaattttagcgcttccaattccttctacaatcgcctttatacatcccattatgagcgctaaaattatcagagtgccgaaaatcgcatgtgatctaagcctagcaaaaaatggtgtaagtaaaaatcgtaattacgctcaaaaagcttctcaaacaattttagcgcttccaattccttctacaatcgcctttatacatcccattatgagcgctaaaattatcagagtgccgaaaatcgcatgtgatctaagcctagcaaaaaatggtgtaagtaaaaatcgtaattacgctcaaaaagcttctcaaacaattttagcgcttccaattccttctacaatcgcctttatacatcccattatgagcgctaaaattatcagagtgccgaaaatcgcatgtgatctaagcctagcaaaaaatggtgtaagtaaaaatcgtaattacgctcaaaaagctcctcaaacaattttagcgcttccaattccttctacaatcgcctttatacatcccattatgagcgctaaaattatcagagtgccgaaaatcgcatgtgatctaagcctagaaagaaatggtgtaagtaaaaatcgtaattacgctcaaaaa

SEQ ID NO: 32035 - DNA, 1432 bp, Heterodera glycines
ccgaaggtactcactcggcctcttcgcggccttgtggtgggccttcgcccccccccctcccacgcccttcagagcacgacaaatatttcaacaaaaattttgaaaaattgactagagcaatcgaacgctaacggacgacctaatggaaaaaaatccccgaaggagagaatttaattaaatccattccttcgggggaccgtgccgggtgccgcggggtaagcagtgctggttcgtttcatcacggcaccgaaccttttggctagtcagcaatcgttgcttaacttgccagatcggacgggtgcgcatgattccactgttccaagcaccccaccaaaagcaaaacgatataaccaaaatataaggaaaaattttttaaaaaattttttctccatcttcctttttgatactaaagcatcagagtgctaaaattaagttgtaaataaaatttggtgcgctttagagcactttctgaaaaaaatatttatgaaacaaaaaaatcgattttttcaagtgtccgtttggggtactcaaacatttatggggagcaaaaatccaacgcagaattaaagtacaggctatagggaagctattccggaaggattcggtctccccataaatctgggcgcatcggttcggggggactgccccgaaaacaaaaaaatcgattttttcaagtgtccgtttggggtactcaaacaattatggggagcaaaaatccaacgcagaattaaagtacaggctatagggaagctattccggaaggattcggtctccccataaatctgggcgcatcggttcggggggactgccccgaaaacaaaaaaatcgattttttcaagtgtccgtttggggtactcaaacaattatggggagcaaaaatccaacgcagaattaaagtacaggctatagggaagctattcccgaaggattcggtctccccataaatctgggcgcatcggttcggggggactgccccgaaaacaaaaataaatcgattttttcaagtgtccgtttggggtactcaaacaattatggggagcaaaaatccaacgcagaattaaagtacaggctatagtgaagctattccggaaggattcggtctccccataaatctgggcgcatcggttcagggggactgccccgaaaacccaaaaaaaaattttttggataaaaattatttaaatgaactgactagataatatttaaaataggttatttctcttcctttcagtatccctgcaaagtttggtgcgcttctgatcgagtttctgaaaaaaaagttaagcctaaactttttggcctgtttaaaaaggaattaaaaatttttaaaaattttattcatctccctttttgatagaaaaagcatcagagtgcctaaactaacgtgtaaataaaatttggtgcgtttcagaaccctttctgaaaaaagacc

SEQ ID NO: 32036 - DNA, 1332 bp, Heterodera glycines
tggcatcgaggtgatttttctttacaaaatttttgatacggtaaccatacccccccccccccccacctcgctggtaaatttttatgaaattattttttttatatgcattttaaaaattatcattttttgtattaataaaataaaataatggaaattaaacaagataaatgtcagaatctactgcaatgcttggaaaatgtggcatttgagctgacggagcatgtgtgccaactgccggatgtgccgtcatcgtcttcggtggaaaaggtgggaaatgaattttttttaatttttaaaaatcatattcggcggtgccaataaaaaaaggcaaaggaaaatttaatgtgtattttaggagaattaataaaccaattttttattttgtccaaaaaatggtcaacttttgcaaaaagtgtgcaattttgtgggtgatcgtgatttgtgaaggtttttgtttaacaagtcaaaatgctaaaataactgatttttagatttttttttattttgtattatttttatttactttttaaatttcggcatctttttttaataattttagaagaatttttttgcgaaaattttcgcgcaatatttattttgattttttctcaactcagtccctcttttggcacaggaagcgcctcaggtgcaatgcgtgcgcaaactgcaagcagtgattggcaagctgacacaacaattgcagcagttggacagtgccgaggagcgccgggcagtgcgggacaaatttgttgtaagtcaattataaatatttaaataacaagggaacatttcaaaaagagagagagggggggggagagagagcgagaaacagagagagagcagtcgattttaaattttttttttgctactacaccaaaaatgatcaaaaaaaagtaatcaaagtttcgaaaaaccgataaaagtgatcaaattttcagaaatttctaaaaaatattagaaaggagctgagaaccacaaacttttttaaaaaatgatcagcaaaagattgagcaaaagaaattgccagcaaaaaatatggtaattttaagcattttttttcaagattgcagaatttaagagtgattaatttttttatttttgtaataaaatattaatttcaatttatttggcacaaattacctgtataattaatttacttaattttttaagttttttcatacattgtcaaaatttgtttttaattactttttcaacaatttagtctcgctttgcaaaggagagcaggcaatgtttggcggcgcaaagcgggcacaaagagacggcggcgccggcactgaaacgatcgaaccgccgcgtggagacggtacagcg

SEQ ID NO: 32037 - DNA, 983 bp, Heterodera glycines
gttgattttaacgagaaaatttttggatattttcctccccctttaaaacatttataatttagttagtaaaactaaacgaaaatttatcaataaaaaatatgaataaacgaaaaaaagattaatattagcaaaaaatttataactaaatgaataaaaaaatttaaaaaataataaatataaattaataaaatttaaagaaacgaagattccacattatttaaattcacgaattcataaaacttaactaagatagtgagaagacttacgacaagtcatttgtgctttacaaaccaaagcgtacgaaatgaatataataaaaattcattgaaaaaattatctgaaaaaaaaacttaatcaaagtaaaatattcgacatataatttaattttaaaattaaaaaacattaacaatttaaaaatttattcaaattcaaaatgcattttttattaataaatgctaatagattttttaattaacaaacctaaaataaaaaacaaaaagtactattagatttttggaagttgatttgaaaaatcgtacaaattcgaaaatatttattatgtttatcatttttgttgttgtcgttttgtgctaaattctcaaaacttccaaaattttagtaatttattcatatgtttcacatttaaagataatttaacaataagtgtgttctttttgctcttcatcaattaccttttctgtgttcaacagaaccagagaggttaccaccagagaggttaatcccgaattattgacaagccgaatttcacctatgatcaggagtgattcgacttattaaattaaagcaattattatatgttttctattaaatatgatcgtttttacatttgcattttgacttttgcttttaaaaaattttttttctttttcttcccccttcgtgagggtaattcattaattctacaagtatttttttgtataatataattaattctattattttaaaatcaaacctatctgaat

SEQ ID NO: 32038 - DNA, 1252 bp, Heterodera glycines
aaaacaaaaataaatggaatgtttcaaagtgtccgattggggttactcaaacaatttgggggagcaaaaatccaacgcagaaataaagtacaggctatagggaaagctattctcgaaggattcggtctccccataaatctgggcgcatcggttcagggtaactgccccgaaatccaaaaaaaaattttttttggataaaaattatttaaatgaactgactagataatatttaaaataggttatttctcttcctttcagtatccctgctaagtttggtgcgcttctgatcagtttctgaaaaaaaagttaagcctaaactttttggcctgtttaaaaaggaattaaaaattttttaaaatttattcatctccctttttgatagaaaaagcatcagagtgcctaaactaacatgtaaataaaatttggtgcgtttcagagcattttctgaaaaaaaatatttatgaattaataccacaccagcattatttttttttaattatttttttcattttatcacccaacgttctagactgatcagaagctcaccaaattttgcagggaaactgctgagaaccctacaaatgcttataaattttcttagaattttttgcctggaggaacacagttcttcacacttaccacaccagcattatttttttttaattatttttttcattttatcacccaacgttctagactgatcagaagctcaccaaattttgcagggaaactgctgagaacccttcaaatgcttataaattttcttagaattttttgcctggaggaacacagttcttcacacttaccacaccagcattatttttttttaattatttttttcattttatcacccaacgttctagactgatcagaagctcaccaaattttgcagggaaactgctgagaaccctacaaatgcttataaattttcttagaattttttgcctggaggaacacagttcttcacacttaccacaccagcattattttttttaaattattttttgcatttgatcacccaacgttctagactgatcagaagctcaccaaattttgcagggaaactgctgagaaccctacaaatgcttataaattttcttagaattttttgcctggaggaacacagttcttcacacttaccacacaagcttaaaatttttggcctgtttaaaaaggaattaaaaatttttttaaatttattcatctccctttttgatagaaaaagcatcagagtgctaaaattaagttgtaa

SEQ ID NO: 32039 - DNA, 1134 bp, Heterodera glycines
gagaaattacgggttttataaataaaaggaaaaatttgggaggaatttttaatgcaatttgagcaaatttttgatccattccaattttgaaatttattttatttaaaattcgttctaatcaaattcagaaaaaaaagttcactacaaaacaacacgtaaaagatcaatcccttatatagtattacagtatgccctgctgttgttaccgtttcggtgtaatctaattcctcttgttcctttgaacaattactgtgatcaacagaagaattactttgatcagcagaagaattactctgatcagcagaacaattgcaaagaccagcttgttgttgctcatcattttcattttctaatgcttctccgttccattggtcggattcaatttttggcaattttatttttattttaaattattttcatttccatccaatagttcctttttgattttttgcgatacttttggctttatgttttccgtttcatgttcatcgcaattttcagatttaataataattttgttggcattttgttgttgataaatttcatttttaacagcaatttcttcgtttattgaaaaatttttggtgattttttgtttttttaagtttctcgaagtcgaagatttcaagtccttcgataaatcttcatcaattccttcggtaatgataataaataaaatagttaataaaattattattaaaaaaatcttcataaaattatttttttgcatttttttgattcaataaaacaaattattatataataatgaatattttttgtatgttttcgcatttataacacaaaaattgattttcaacgtgaataattgcgcatgaatacaatatatttatgataaaaaaatatatttaaatcggaattaacataaccaattatctcgaattacacctaattaattatgtgttatttttttatgcgaacttcttaaataaattaaaatcaaaattttgtaagaaaaatttcaataataattattaggtaacatttgttaattacaagagtgtaatgagatggtggttataatgaaaaaacaaagtttagaaaataattccgtttcatttaataaataatcatttttctccagaaaatttaattcaacagaatgcaaattttttt

SEQ ID NO: 32040 - DNA, 924 bp, Heterodera glycines
gcgcccgtttctaaatttgttgggctattaaggccgcttcgcggcctcagacgggcgcttcgcgcccgttttttagcttgttaggccgcttcgcggcctcagtcgggcgcttagcgcccgttatttaaattttgaggtacaaaagtgattaaaagaggtacaacagtgattagaagaggtgcaacagtgattagaagaggtacaacagagattaagaaaggtaaaacagtgattagaagaggtacaacaatgattagaagaggtacaatagtgattggaagaggtacaacagtgattagtaaattcattaaattaaaatgaaaatattttttaacaaatttaatttaaaaaatacatgaaattctatcaattaaaaaaataattcatttaaacttataaaatttattcattaaaaaaaaattaatttaaatataattttttatttattaactcaaaaaatattttaaatgaataaaaattgaaaaacacgaaaaaaatggtagaaaaataatgtacaccgcccggcttcgaacttcgccccccccctcaaaatgatgcctcagaatccccaatcacacggggattctgagggcttaacgatgtcataattgaaatctgatcacgtattcgtgatcagcggcccaaataacccctaaagagatgtttttggaagatttttgtcgaaaaaattttttcactcaaaaaccatgtgctcccccctttggtcccgaatctcaaaatcacttttaattttataaaaattcttaaaaaagtgataaaaatgtaaaataaaatttatattatagagaaaaaaattgcggatttttctaggattttacttttcccgaatagctttttagaaggcagctacaaatttttttctgaaaattcgaatttttccagaaattctggaataactttttt

SEQ ID NO: 32041 - DNA, 1576 bp, Heterodera glycines
aaaaaaatgaataagatgaatcattatgcagagagatttttgtttattttaataaaaaaataaaaataaaaaataaaatgagaaaaacattttcagaattttctaaaaataagatggatctagctcaatgtccaggctatttttcggcaacctgaatttttgtccaggaaatccgggtcaaatagggaaaaaaagctggtccaggttaggtatggaaaatctgaatttccttgacaatattttaattttttttgtttcgattacatagatttaaaaatacatatattatcattgccaattagatgccgtattttctcgattagagcccccggggctctattgttcaacccccccccccccctcagaaaggggctttattcgagaggggattctaattgagaggggggttctaatcgagtaaatacggtacattaggtttaaagcatcaattagaaaaaaaggattttggagccaaaaaaaataaaaaataaatgtttagcaatatttttttggaccttgaaatcgaatgttttttttggaaattgcctattaggcaccgccaaaggaactgaaatatttgtacatagaaatctaaaagacaagaaaaaaacaatgaatttgttttcatatatgtattgtttggtgaaatttccatcaaatacattggggacagtccgctgttgagccctacaaattttttaaaatgggatttaacaactgtgcttttcactccttccttatcttttactaggacacacaattgttaacagtttgggagggggggggtaattaatttttaatttgtatgggggggattaatggggtccaatttaaaattcgaaagggcgaagagacgacagaataaataatttgtttaaagtatgaaattaatgaataatgttcagcaatttacatgaggagcaaaatcattattcggagaaactgtttctttaattcttttttttcttccatttttatttttattttccaatttttgttggaaataaaattggggatttttgttttctgtttgtttcaccttaagataaacaggaaatatacataaattacatttttttttttgttcacttcaaatgcttaacatttatggccaagtgcctttttgggggaattgtccgttccttttcatgtgattaattttttctatttttggtgccccccccccttttccccctttttcgccttttcctctcactgatttttgtttaaaataatctttttttttaatctaccaataaacaaattctgtgaatatttttcaattgaatgtgtttggcttttatctgtccatgaaatgcaaaaatatttttacaaatattcaccagaagagaaaatttgaattggaataaaattggggggggggggcatacagttttaaggaaaaggtttttagggtttttatgaaattaaatttaaacaattattgcatgttaataggtggatatgcaattttgaaacggatcccccccccccccccgaattttacgccgcttcaaattttggttggacgacggcggcgggcggtctttgtctcgctccaaaggcgaaaataaaa

SEQ ID NO: 32042 - DNA, 937 bp, Heterodera glycines
gacaatcccgtgtttttatacaataactttgttcatgttcgaacaaaccctatctttttggtatcattcgaaagcacaaaatctgaataatgtaataatacgagaaaacaagagaattctaacatttcaagaaagttacaaaccaaaataatcaacaatgtgcttaattaatcaaatccgataattagcgcttttgggtctttttatgtggataggtaaatggggagaattttgggtctcgggtgatggcaatagacaattacagagaaaaattaatatatcgatgttttatgaccaaataatattaatgtcaaagttgaaatcaaaatgtgttgtcaagttttattctcattatcagacaaaacataatatttaaaaagaacaaatgacaaaattggaagttggatggatgtgccggccgcttattctttcgtactgttgctgattttgagggagaattattgctggccattgttgttcagtgccccttggaaaagatggatgaattaacagggagcagctcgtttccccacatgaatttttttaaatttaataaattagaaatttcatattaaggaaacattggaaaagtctaaattttaaattcaatttttttgtttgccaaaaacaacatgcaaattcctatttttcgtgttgtgtggtcaaggaaagaactgacaatgactttaatggaacaaaaggaatgacaaaccaccgttctgctggtcgaggggcggctgaagcccaacatcatcaaacccaagcaaagccggattaaaattcggattcggaggcacttctaaaccaatgaatgccattttgacacaaatttaaatgccttttcgggcttaaaaagggtgtcgccaaattttaagtaaaaccggagaaaaaaagaaaatttccgataaaattagtagttttatttgtaaaacttaag

SEQ ID NO: 32043 - DNA, 1242 bp, Heterodera glycines
acaattttcaacgcgataatttttcatccaccgcccctccgaatttaaatcctcttttttaaaatctcttttattcgaaaatcgcagaaaacatggacaatctaattaaaatcttcatcttaaatcttcgttaatttaaacgcaaacatcaattcatcataattcctctttctcggcaataaatcgtaaaaaaaaaattctaataataaatcaagtataaaaaatcgaaggacacaaaaaatacaattgaataaattctttaaaatacaacaaaaaaaattagaaaaaaaaacgataggaaaaaccttaaaatgtttaatacaaaaattttcaaaaatttaaatgagagaaatcacgcaataataatataggatatataatatagaaataatagataaaaaatcacgtaattaaattaaaaaatgatcttattatacccgaccaccacaccacacatacaaaacactaaacacccaccatgtataagtataatggaaaatttaaatgaaaataatctttaatatttaatacttttataaatttaatagtgcatgtaattatgcctaactctaaaaaaaaattttcaatttatttttgtaaaaaatacatttaattaataatacataattataatgaaactagaacttaaataataaaaattctttccttttattagattaaataatttatttttcaattgaaagtttaaataaaaataataaaatctattagcttgacttaagtatatttcgttaattaaataactaacatataaaaataatttattaatgttttttcataatatctattataacgaaataaaaactaaaataatgattttttaaatatattataaaattaaaggtaatataattaaaataataacgataaaaatactaatcgtaaatatttaaatgagaaaactctatgagaataaaaatcattttttaattaaacagtagctttttaaatttatcttttcaaaaaaaaaattatatatttatttgcatcagtcaattcattcttttcttaatataaacggactttacaatattcttaagtttatataaacattaaattgtaaatgacatattaagtttaagactttaagactgtttatacataaaattaaataatattaaagcattgaattattggtaaaaatcgtagaatattatgggcataataataaatattaaaatgaaaagaacacagatgtgacacctccgcgaatggaaacaa

SEQ ID NO: 32044 - DNA, 1751 bp, Heterodera glycines
  unsure (1)..(1751): unsure at all n locations
tccttcttttccattcggacaaatgggccgccgctttttcttcccgcccccgacgccgccgaagggacgcagaaaaacggccattcgcaaccggaacaatcgccgccccctcttcgcaattcggcgtaaaaaggcgggaaaagggcgggcgccgaaattcggagaaggaaacggtcgctcaaagagaagggaaatggggcgggcataacttcacgggccaactcacggataacgaaacgccatccgctccaatcggaccaaaatcggcatctcgtttaaataacggcactccgtccatcccgtccaaagagtcactccaatcaaatgggcactcccgccccccccccctccccccctccctctcttctctcattagtctcactttttctccaacattttgtcgctgtccgtcgccttcggccctttcttcattccaattattttcaacagccgttggtgcgaatcgtccgaaaaacccaccgaagcgcccctctgctgctcctttctcaccggtgccgttggaaaccttaggccaatcgaagcgataaaaagtctcttggctttttccttggcttttccccattttcccactgtttttcgatgaatcccttcgcattatttgtggccacattaagtgatcggcgccttttctgcagtgcctgcgcattttgctggcgaagttcgcgattgatcagcgcgtaaaggacggggttagcggcggaattgaaacagacgagcaaatgggcgacgaaaaacaccgaactgagcgtcaaagtggaccaactgacctgacaaatttaggaggataggcagaggatcatttttattttattttattagataaaatcatttaaattccattgccnaacatggctcagttggtaatgccttccctttctgcgtatcgggttcaaaccccaaccaaaacagtgactatgatgatacttttctgcagttatgacaatttgattgattaaaattaatcgcacagatttctgagtcaccacaattaaatgaaaaaatattttttaatttatgcgaaaatgccgtgcctaatatttttcaatttttaaatattgaagttcaattacaatgataatgccaaattgggacataatgttcagcgtccagtagggagtccaacctaaaaattagagggagggggtaattaagggtaaattaattaaataattattggctgacttacaaaggaaataaaatagaataaccgccacaattcgtttagttacctaaacaaaaagagtgaatattttttagcattttaatttataattttggcgaatggcaaactttgtgaaaccgcgcggaagacagcgcccaattttgcccgtcggaatgctttcgcacggaaatggcatcggcacggagtttgaggatgacgcgaaggtaaaagaaagtgatcagaagggcgggcaccaaaaagccaacgccgaaagtgtaaagcataaacagaggcgaattggtatctgttggggggacttttgaaacattcaaattttgaagattagcaatctctccaaattatgtcccaattcccccgaaaatccccggagtatcaaaggcattctttgcaaaaattccattcaaaatgattaatatgcaatcccaaaatgtaatgcaattaccgaaaacacatttgtgcacaatcggctgttgttcaacaacaaatggctccgaatagcgctcactttcagactgaaaagaatctgtggggggggggggcggggggg

SEQ ID NO: 32045 - DNA, 1166 bp, Heterodera glycines
aacacacgcaaattttacctcgctcattccaaaaacggacgtaagcaaacttttgggaatgacaaaggagaagagaaccttttccgcttattgagtgaatgaatatgctaaatgccggcggcgatgctttttgggatgaaggggaaaaaggtgggagggagaggaggaagggaggaggggggattccgtttccatttccttccgttagcactttctaatttaggccttccttccattttaccctcccttcctaatttaggctttccccttaccacccattgttctgcttcccttattgtccccccccccttcccttcgttttctgcttcatcctttaggctcttcctatttctcatgttcttccacttcaccttttctctctctctctatccgtgcatcctcttcttcctttccctctcttcccatgctttccccttccttcccctcctctcttcccatgtgccctctcttttcctcacttcttttcttcctcctttttgccccctcccctccccttcaaatgtttgtgtaaatgtgtggcggagcattattttatacaaataaataataaatacgtagtcgtcccggcgtctcctcgtctataatatggaagtgaaagaagtggttgactgacaggctgatagataaaaccaaccctccccacatcctttgcctcctcgccaattttgtcggaggccagaaaatagtgaggagggcgagtttggggttaagtgaaagaggaggaagaggaagaagaagggaggagaggaagtgatgaggaagaagagaaaggaaaagggaagggcatgaatcggtcggatgaattgagaagggacttcacttcgtctaatccattggattaacgaattgattaattaattactaattaatttgctaaccaaaacaactaattgtaaaagttgcaatatttctttatgctacttaaaaattttaattaattaatgtcttcattcttccatgcacattttcgatctgtcagatcactcactctcttactaccacattgatcactccgaccacttcacaaatcctttcaatcgaatcaatcgccctccccaaatccaattcatccgccgaatccatctgttatattcactgcgccaactcactcattcatctctctcctatccgtcaatccatttcca

SEQ ID NO: 32046 - DNA, 1782 bp, Heterodera glycines
tgcaggtctttatgtatttaaaattcaaactcataagctccattttgctatttatgataaaattaattttcaaatttaaaatattaatcaaagtaaaaaaaagtcagagataaataaatagttacaggaacctcatgagaatcattatcttaacacattattactcaataaaataatagagaaaattttagtttgcaatcgcagaagaattaatttgaatttgcattgatattgctttgtccgtccgtggtaggccgaactgacaaaagtatcaagatagtaatatttaaacttaattatttattttaatttatttgctaaataataaatcatatctataaaatttagtttggggtaaaatagtcaaacataaattgccagaaataacaaatattttcaagtgctgattaattcaaaaaaatataaattgaattcaaaggtaaataaaattattagttaataaaaatttaatcatttttattctatatttcatgtggtttaattttattacttgcaaataaattaacaattgattcttcttttattttcatgtacaaaaaacgggttacaaaaaacggctttaattccagatgaacaagatccttcaattgttattaatatgtaataatgataaacttttttcatttttgaattaagcttaattttaatttcaatgcaattcatttttttaaaaatcaatgatttcataatagaaatgccaaatgcaagtaattttcaaaacaattaagaattaatttcttattaatttacatatatgaaatcgttaactcatttaatttgtaaattaaattagttaataaatttttattcatttttacttaaagttgtcttattgaatttataatatgattttattttggtcgttttaaacaatttatgtgtttaaaaatattttaagcagttttctatttttattgctatataattgcctgcgttgtttacaattaatgaaaaattccaacattgttcttaaaaaatttcagcatttttaattattctttatggcattatattattttgcttaatgtctttaaatattgaagaacttaaatatttcaaaactggtattttttaataaaagatccttagtatactttccataaaaattattgttagttattcattttaatataaaatttaaaatgggtatttaattattttaatagttttagtaatatgcatttctgaaataaatactttataaatttaaatattaaataatatattattagtttaaaaagttgtttactttcatttttattttgattataatttttctcattcttaaattaaataaataataatttacaaaaaagggatataaaatgtatttttttacttagtattctcgccggatttcaaatttaattcttttgaagtaatttttattaattaatttttcatgatcattatcgagtttttttcattcatcaatgcgtttttatcttcatattgatgaagaaaaagtttttattacttttattttcaataatttctcaatattttattataaaattaaatttcttattattttctcaaattctttgtactaaaacacagaatatttatattatttttaattaatatattaaatttcttttaattctttaaaaaacagatttattatttgaagtaaataatgtaatccatttaataaataggtccaaaattttcacttttaaaaattttatagcttttaaatttttaaaatttaaattaataattcgttcaataaatcaaaaaacaacaaattaaatttta

SEQ ID NO: 32047 - DNA, 825 bp, Heterodera glycines
gccgtcgttttcgcgctgtcgttttcgcgcgggggtcgttttcgcgcccgcgcttttttagcactaaaattgcgaatatacttaaaaaatacttagaaaatttattaatagtctattaagtttaaaaatacctaaaaaaccaaataattttttactccgcgggtggatccgaacctgacctcaccccagccggcttcagaatctcagatacgcagggattctgaggtcatagcgatgtcctaatggaaatctgattagagattggttatcaacggcataaattttctaaaaaaaactattttttgaaaaattctgagtgaaaattatctactcaaaaacaacgtgcctccccccgtggtcgaaattcgaaaaatcgttttattttatttcgtacataggctaggcataagctttagacctaggcttaggcctaagctaggcttgtttgggcctacataagattaggcattatttagtaaaaaaaaaaaacacgaatacacatatttattttacatatatgcaaccgcgcgaaaacgacagcgcgaaaacgacggcgcgaaaacggcggcgcgaaaacgaccccgaccgacattttcaaacttattttttctttataaatttttaaaatatgttaaaaaaatgaaaatatgtacaaatatgtaagaaaatcccgaaatatgtaaatatgtataaaaaccccgaaatatgtaaataaaagtcccggtttttgttcgcaaacacaaaaaagaaagtgtttttcctgtatttagagcaaggagaagccaggaaaaaaatatgtatttacataaaattggcagccctagt

SEQ ID NO: 32048 - DNA, 1641 bp, Heterodera glycines
cccaaattttttttacagcttacttaggcccaaataagcttatttccagaaaatctcgcatgaattctcattttaaatttttttatagatttttaaatgtttggatttttttttggcttaacaaaacttcatcgaacctggttctttctatttctctttcaaatcgccccaaatttttttttacagcttaactaggcccaattaagcttatttccagaaaatctcgcatgaattctcatttttaaattttttatagatttttaaatgtttggattttttttggcttaccaaaacttcatcgaacctggttctttctattctctttcaaatcgccccaaattttttttacagcttaactaggcccaattaagcttatttccagaaaatctcgcatgaattctcatttttaaattttttatagatttttaaatgtttggattttttttggcttaacaaaacttcatcgaacctggttctttctattctctttcaaatcgccccaaattttttttacagcttaactaggccctattaagcttatttccagaaaatctcgcatgaattctcatttttaaattttttatagatttttaaatatttggattttttttggcttaccaaaacttcatcgaacctggttctttctattctctttcaaatcgccccaaattttttttacagcttaactaggccctattaagcttatttccagaaaatctcgcatgaattctcatttttaaattttttatagatttttaaatgtttgcattttttttggcttaccaaaacttcatcgaacctggttctttctattctctttcaaatcgccccaaattttttttacagccacgaggccgcgaagcggccgagtgagtaccttgggcgcaggaaaattattaaggaggagggttcattatttatttatttttgcaaaattaattcataaatttttttcagaaactgctctgaaacgcaccaaaatttatttacaagttgaataaggcactctgactcttatattatcaaaaagggagatgaataaatattttaaaaatttctaattcctttttaaacaggccgaaaaagtttaggcttaactttttcagcgggtttaaaaaatctagaaaaattagtaagcatttgtagtgctccgatacgtatctctgcaaaatttggtgagccgctgatcaattacaaattatttatggacgatcaaattttttgaaatttttttaagtgcaaaagtggtgggtgtctgcaaaaaattttcaccgggtttaaaaaatctaggaaaataagtaagtttttgtagtgttccgatacgtatctctgcaaaatttggtgagcccctgatcaattacaaattatttatggacgatcaaattttttgaaatttttttaagtgcaaaagtggtgggtgtctgcaaaaaattttcaccgggtttaataaatctaggaaaataagtaagcatttgtagtgttccgatacgtatctctgcaaaatttagtcagcccctgatcaattacaaattatttatggacgatcaaattttttgaaattttttttagtgcaaaagtgggtgggtgtctgcaaaaattttcaccggggttaataaatcctaggaaaatagtaagcatttg

SEQ ID NO: 32049 - DNA, 1298 bp, Heterodera glycines
agaccaattctagcctaaaagtagaagtcctactgattcagtttattcaaaaatttgtggtcaggaattttattttcttaaacatttgaacaaattaatttgattacctttttttaattaagaattccttcatgcttttaattttgacatttcccatggaagaaattttgtgttttttcaaaaattccgagtccctaaaaatggaacctgcatcatcatatgtagatataccaacaaatgaaattcatagcgaaattccaattttaccaatgtaaaggtgtaccataaaactatttctgatcaggtccctgataaaatatgactaataaaacccgtccaaaaattaatgattgttcagttcattcattagttaattaggtctatttaaactaattaaattaattgttgatcaatttgtccgataataaatcaaggacaaattttcgtacgatatatcccaaaaatccagtctgtgtaatagatcaaaatctcaactgattaccacacacacccaaagcccaacattccccattttaattgccatgccactaaatttgtgccccgttgttttattgcctccgccgccgaccaaatcaattatatgcaaaattgggtcctgcatcagcagtacttgcgcaggtagcccaataaatccccagttttattagctttgggctggcaaatttggcatatttttggacaaaagtttttgaattaaatttattaatattttaattaaaaagaattaaaatattttttatatttgaaattatatttccaaaatattcagtttttaaattaatatatatttaattaatttaaagcgatgaatctggctaatatattattgttttttttatttctgaaatttaaaaacattcatataatgtaattaggcagccttaataattagctgattctttttttttcaagtttctaataacattatatatttgtcttactaattaaaaatttattatttatttctcatattaacagttttttatttttaaaatatgattttatcaaatacaattcactaaaacttaaattaataaattgctaattatttgattttgctttatttgaaatgctaattatattttttgttttcttaactaattaatttttaatttttttaattccttcctcttttctccaaattgaataagatcaaaaattccctaaaatttttatccattttccgctcaaatttattaacggaattttgcacttcgcccactgaactttcacacctaccccacatcatcaacaacagcagaaatgaaaactcgtct

SEQ ID NO: 32050 - DNA, 2284 bp, Heterodera glycines
  unsure (1)..(2284): unsure at all n locations
aaaagctcgggaatatgtttcattacttttgatgacataaaatgaanattttntcgacaataggagatgccnaaggcttacggttactcgctctaattttggtttttccatctccaaaaacattgcatttcccgaaaattgccttttttttatcccatctctaaaaaatgccatcaattttcaggcgcagaatttgtgagcgcatgaaaacagtgtcagtggcgctggtgctgtgcctgaacatcggcccccgacccgccccgacgtgcagaagccgcagccgtgcgcgcgcaaggaggcgtgggtggacccggcggagccgagcgtggcccacgcgcagcagcggccggcccaacgcattgcgcaaagcctgcagaaaatctacgaaaaattgcatccccgagcaaggttcaaatctttatttgttttttaggaaggtggacaacataaatatgctttatattagagaccggacgggatcgggatcccgcgggatttcttcgggatcccgcgggattaaattcgggatcccgacctcgggatccgtcccgaacgattttcaaattcatcgggattgatcgggatttcatcgggatcccgaagcgggatccctcccgaccattttaccaatcccgcgggatcccgcgggattgaagtcacgataatttttggaaaaaatctcattttttaaattaagaccttaaattttaaattaaaaatttgcttattttttctttaaattcccttaaaatcccaaaaaattttcatgagtctcaaaatacttgtgaaaattttcaaactttgacacaaaggttggccattttgtgacttttattcctttaaaaaaagaattatcaaaaattattttttttaattccttaaataatattttaaatcttattaggtagtttcatgcacaacaatttctaagaattttgtctaataaattagattagaaattgttgtctaagtatttttccttcggtgcataacggcaccgccgggactctaaaaattcttaattttaatgaaaaatttgctcaaaatcgctaaaaaaattggggttttatggacaaaatctgttaacaaatctcatcaaaaattacaaaatttttcccgtcggtgcctatcggcaccgccggggcccccccttgttcccctaaaatttttgaaaaattctcaacaaacaattctttaaaatatgattttttgattccgatgcacttttggatttgctaattatcctcacattgttaaaactgatcataggaggcgaaaatacaaaaattgatattaattaaattgtaaaaactatttaaagttatgttaaatgttctaatttttggtcctaaaatctgatttttaggcatgatactcgctcgaattttgaaaattttctaaaaacgctataattcccatccctatttttcttcaatcgaattgatcaattaggaatattagataagcatttgaacaaaatttggcacaaaacgtaaaaaaaaattggattttagcaaatcccgataatcccgcgggatcccgaaaaaaaatcttcgggattgatcgggatcgggattcagtcgggatcccgactcgggatccctccgaccccagtcgtccggtctctactagcaacacacaaaaaaagcattttgattttgtttaaaaaaaatcaatttgcacttaatttaggccattgtctgcgccagaagaagagaagtaggacaaagcagcgaaaaagggacgtcttttattttttctttgatggcaccgcccgtcaaaaaaatgaaaatgttttcttccgacaaccgccgcctcattagtgaaaaacgacagcaattgttggggccacttattgaatcagttagaaatcggtgaagttcttgatttatggggaaaattaactggaaaatgagtcggtaatacctatactaactaattaactcaacagacaccgaaagaaaaccggtgctaggtcgaaccaaaaaaaaactcagtaattgataaaataattaaatttaattaatcgtttcaccaaattcatataattatagtctcctcaattatttgtaagtatattttttaaattttatattgataaaaatttaaaaaatgaataaaatttttaatggaccaaaatggcgatttaaaaaaaattatttatttatttatatttaaatattaatcatataattaaatttattgataccaatttaaataattaaaaataattattttatcaatcgctgagttttctggatcgactcagcacgaagaaaaacat

SEQ ID NO: 32051 - DNA, 989 bp, Heterodera glycines
ttttgatactaaagcatcagagtgctaaaattaagttgtaaataaatttggtgcgctttagagcactttctgaaaaaaatatttatgaaacaaaaaaatcgattttttcaagtgtccgtttgggtactcaaacaattattgggagcaaaatccaacgcagaattaaagtacaggctatagggaagctactcccgaaggattcggtctccccataaatctgggcgcatcggttcggggggactgccccgaaaacaaaaaaatcgattttttcaagtgtccgtttggggtactcaaacatttatggggagcaaaaatccaacgcagaattaaagtacagactatagggaagctattcccgaaggattcggtctccccataaatctgggcgcatcggttcggggggactgccccgaaaacaaaaaaatcgattttttcaagtgtccgtttggggtactcaaacatttatggggagcaaaaatccaacgcagaattaaagtacagactatagggaagctattcccgaaggattcggtctccccataaatctgggcgcatcggttcagggggactgccccgaaaacccaaaaaaaaattttttggataaaaattatttaaatgaactgactagataatatttaaaataggttatttctcttcctttcagtatccctgcaaagtttggtgcgcttctgatcagtttctgaaaaaaaagttaagcctaaactttttggcctgtttaaaaaggaattaaaaatttttaaaaattttattcatctccctttttgatagaaaaagcatcagagtgcctaaactaacatgtaaataaaatttggtgcgtttcagaaccctttctgaaaaaatatttaagaattaattttgcaaaaaataaataaaaacgaaagactcagattttcgaaaatttttttgagccagctagctcggcgctcatttcagtgtaagttagtcctttaccggggagtatccctgca

SEQ ID NO: 32052 - DNA, 1448 bp, Heterodera glycines
tcgatcgaattttcggtgtcggagagggcgacgatttaatggatgatttattcgaaaatctttttgaaaataattcacaaaatttgaaacgattgaaatctgacgaacaaccggaaaagcagcaacaaaaactgagtgtaaaagctgaacaaaacaaaaaatgggatgaatcatcgcaaaaaatgacgaaaaaattaaaaattgaaattaaggaggaagaagaagaagaagaagaagaatggcacacggataaagtgccaatgggcgaacaaattcacaaaatcaaaagcgaaccaaattttgatcaaaatgaaattgccaatcggacgcaaaaattaaaatttgtaaagaaagagccaaaaatggaaaatgatgaccattttattagcaatgatggcactgttcaagctgaaaatgaaagtgatcagcaacagaacgagtgttcttcaccctctcaaaatgatcaaaacgcctcttctgatcaatcaatggacgaaaagcaagacgaatcggaagatgaaagaaagttgaagcaaattgaaaagtttgacaaaatgagaaaggcatattgggccaaaaatggccataaaagagaagagcgaatgaaagtggaacgaaaaattgccagagaaatgggcatttatcgaacacaaatttataaatggaagaaggaattgggccaaaatgcatatgacaaacgggaaagtgaggagacaaaaaagcggacaatttatttgttcgaagagataaagcagcaaatgaaggacaacaaattgtacatttgcaaatatcggaggaaaattgaacagaaaattgccataaaattgggcacttaccattgccaaatactgaagtggaagaaggagtttgtgatcagcagagggagaaaagtgattgaagaatcggaccaagatgatcagtcttcttctgcggatgaggttttaatggtactgggaccaggggtgggcgaaacttcggcttcggcttcgaaaacttcgggttttttgagcttcgaactttgtgcttcggcttcggctattttactcgaagtttcgggaaaaatacacccctaaagattgagttttcaatgtgaaaatgcacccttagtgatgggcttttgataaacttaaattaatatatatttattaattttttgttttgatttttttgttcacacgcatggtcgagtggtagtgctctttgctcttttcattatgtttctttggatcagttcccatccaagtactttcttttcttctaatttttcaaaattattcttttttcgacggaaatttaatataaatttaacaattaaaatctaaaaatcttttcatttttgaactaaatctgtcactaaaatttcaaatttttcccgtcggcgcctatcggcaccgccggagttccaaaattccctttattttttaaattgactcaaaaactgtgagtat

SEQ ID NO: 32053 - DNA, 599 bp, Heterodera glycines
actgtaaagaattcgaattgttttattcatcacacgaattccaacacaaaaaataaactaatgaaaggagaatttctcaaattttatatcttcttaaatcagggttcggatttgaaatgctataactttttttttgaggttttttggtcataacttttttgtaaactgacgaaattttttgaaattttacaggctaatagagaatctgaagagctatcgaatgataacaaaaatttttaatttggttgatcaggaaaaaagttgttaccaacggcgccgaaaaggccggcgccgaagtgggcggttccctttaatacagggatgcgatctgttctgatttatcagaaatgttctgatttggagggtccaaatctgataaaataaaaatgttctgatttgcagaaatgttctgattttggggtagcgaccaaaatttgttctgatttcttaaacaaactcataattttaaaattttatggcctaattaatgtcactattttacaaaaaaatataaaatttatggcaaaatttggtcattttttggacaaaaatctgttaacaaatcaaactaaaatcacaaatttttcccggcggcacct

SEQ ID NO: 32054 - DNA, 1696 bp, Heterodera glycines
catgaatgcactgattgataatgcttttccatccaaccattgttactgttttcttgttttgtttgctgatcattcgtctcccgtccgtccaaaatggactgtattctccccaataaattagcaccaggtggacgatgacgatgttcaaaacatcatttattccccaaaaatatggactgatggaccacccccccccctccaaattgaccaccccaaaaagtccattaatggccgccccaccatcattttggctcccgaccactgcctttgaaaggtgcggcgctaattgacgctaatttatgccattttctgctcatcggcagatgatgatggatgatggaatgtaaaaggtgtgctgctgacgtgtcgcatcgcacaatgaaaatttgaataatgcctttaatgagttgttgttgtccatcacagcagaggcgcaggtggtcatcgttgttttgtgagagactcattaattcataataattaaaatttcaaaaaattaatcgacttttcaagcaactatgtaaatagaagacaattaaattaggtagcacaatttatttgatttgctgcttttattaatttatcatgaaacttaattttgctttttttgtcacccaattttcggttttactttacttggaaaacattagaaggatgtaagttctaattaacatgaaaataattttacgtaaattcataaatttttatgatcttttggaaaaacccaaagggtccccaaaattttggattttgtctaggcgcctatgcatacaagcaataattataaatgaatttttcttttttaaattaaaattaattccttttttttctctcaatattgcaactcttaaacatttccaaaacctctcatttattatctttttatgatcatcatcattcttcttctctctgtcatccattgttgtcggcggtgcacacacacatcaccatgttttgtcggttatatcttttggtcttggccaacagattttaattggagataagccgccctcgagggaggggaggcgggctaaatggccccgacggcacagcaacaacggcacggtaaatgtgggtcatctccccccaaataatgagtgagagggacagaaggattagcggcgggaattggaaatggacaaggcggaacatcttcaaaaaaagccatattttgggagtggaacggagggggcacaaaccttaatgggtctcataatcccgaactaaaaccaaaaatttcgttaaatcaaaatccaacttagtttagctaatttggtacatcgtgaaatttgatattcctgctggttttggaaccaggaattttgtcaaagaaaatccatttgccctaaggcaagctggccgcaattaacaatatgccgatcgagctttacagtatcggctaattatgtatatctatttgttatgcccagaaaacgtggctaaaaaatcgggtttttgttcgaaaattctaattacctcaaggaagctttcatacttagataggtgacgaaaaatttagtaaatttcattaccatataatttttaaaaattcatttaaaattttttttgactttttaatctcttttgcgttaaaaaacacgaattatatttgttataaaaataaatatctttataaattaatggattgttaaaatttccatgaaaattttgtctcataatcctttcattaaaaatt

SEQ ID NO: 32055 - DNA, 1349 bp, Heterodera glycines
tcttccagagccaacaaccgcaccagcagggcaagaaaacggtggacagcggcttctgctccggctcttcagggctggcactgtgcagcggagggggcgtgttggcaaggagtccgcccggcgccaatttcatgtttggcagtttttgatccccgactcccacagcacacaacatttgcacttcgttctttggttacaatgtgccttcccttctctcttctcacaaactctgctttctcttgacgacttattcctccgccgatcccttcgcggcaatcaacgggccagcttctccacttttacagcaacttgtgttcgcgtggacgcaattgtggctttccaacgcggcgggggaatacgtctctctttctctcgccccttttgtttccatccctcgctctgttctctcgtgggcgtcactctctctctctctctcgccctttgttgcctgtctttcaatcaaatggtaaatccttttagctgatcaaaaagagctttttttcttccgtttcatgctttccttcccctctctctctttttctcatacatgctactgtacatctgtcctacctccctttagatcacaaatcagatcagctacccttttcgtgtgaatgtgtacataaataagcataccctcccttccgttagcccccctcccaccctccgtaactcatatcttataattggttgattgcaataatttcaacaatgtgtacatatttacatttcaaatcacaaatttattccatctgattaaatcttttgtacataataatatttattggcggaggcgatggaaagattaaaataacttgagattcgcaattggttcgctttctttccttctcctccccaagcttcgcacagaatgctcagtgcccgtttggatattcttttctttcgaatcccacaccttatttatacgtttttgttgttttcagtctatgggacaaacccattaaatgatgatcgaatgaataactatattatttatacgttgactttttgattgtcaagttataaagacaaattcggagctcaatcggctttttgttagtagcaaaatgttaattaatggatgtgctcctaataggcttttatgtggggaagagagaagacattctaaattagagaaagcaaaaaggcatacacatcatgtaggagctaacgaataagcgtatgcaaagggtggagtggttttttgcacattcagtagcggagagatggacggggtcagctgctgaaaaggccgtttcactcccctgctgctgttttttgcgaggggagagaatgggtgcgtgggggagagggggcggtgggaggaactcaatagacaattttttata

SEQ ID NO: 32056 - DNA, 1599 bp, Heterodera glycines
aattttgcagggaaactgctgagaacccttcaaatgcttataaattttcttagaattttttgcctggaggaacacagttcttcacacttaccacaccagcattatttttttttaattatttttttcattttatcacccaacgttctagactgatcagaagctcaccaaattttgcagggaaactgctgagaaccctacaaatgcttataaattttcttagaattttttgcccggaggaacacagttcttcacacttaccacaccagcattatttttttttaattattttttgcatttgatcacccaacgttctagactgatcagaagctcaccaaattttgcagggaaactgctgagaacccttcaaatgcttataaattttcttagaattttttgcctggaggaacacagttcttcacacttaccacacaagcttaaaatttttggcctgtttaaaaaggaattaaaaatttttttaaatttattcatctccctttttgatagaaaaagcatcagagtgctaaaattaagttgtaaataaaatttggtgcgctttagagcactttctgaaaaaaatatttatgaaacaaaaaaatcgattttttcaagtgtccgtttggggtactcaaacaattatggggagcaaaaatccaacgcagaattaaagtacaggctatagggaagctattcccgaaggattcggtctccccataaatctgggcgcatcggttcggggggactgccccgaaaacaaaaaaatcgattttttcaagtgtccgtttggggtactcaaacaattatggggagcaaaaatccaacgcagaattaaagtacaggctatagggaagctattcccgaaggattcggtctccccataaatctgggcgcatcggttcggggggactgccccgaaaacaaaaataaatcgattttttcaagtgtccgtttggggtactcaaacaattatggggagcaaaaatccaacgcagaattaaagtacaggctatagtgaagctattccggaaggattcggtctccccataaatctgggcgcatcggttcagggggactgccccgaaaacccaaaaaaaaattttttggataaaaattatttaaatgaactgactagataatatttaaaataggtttttctcttcctttcagtatccctgcaaagtttggtgcgcttctgatcagtttctgaaaaaaaagttaagcctaaactttttggcctgtttaaaaaggaattaaaaatttttaaaaattttattcatctccctttttgatagaaaaagcatcagagtgcctaaactaacatgtaaataaaatttggtgcgtttcagaaccctttctgaaaaaatatttaagaattaattttgcaaaaaataaataaaaacgaaagactcagattttcgaaaaattttttagagcaagctagctcggcgctcatttcagtgtaagttagtcctttaccggggagtatccctgcaaagtttggtatgcttctgctcaattagcaaaaaatatgagtgatcaaactttcactaaaaagttaagcctaaattttttggcatatttaaaaagcaattaaaaaatttt

SEQ ID NO: 32057 - DNA, 1080 bp, Heterodera glycines
gagtcattggtattctgagcaggggcgacccgtggatttcgtggtccgcgatgatgttgttgacacgtttgatttcggagacatgacaatgagagaaatatgcgatgacaaatggacgaaatgggggcacacatttccatggctaaatttgtaagtgagtgaacaaaagttcgtcgattttaagggttcggtggcgactccaacaaataatttcagtttaattattgcaaaaactaaaattttatgtccaacaacgaaccggcactgaatattgcagcgaaatttgcatcagactttccccgttcttcaccacatgttcaattagtggcattctgccgccgtttccgccactcgtcgtgcaattgtcgttccgatacgccatttccgttccaccgattgggccatgcattttggtgtttcgcgaacgcaattcaacgctttccgagtggacggacgcgtcatcgaccattgcaatgctcattttaggcaaaacagcggaatgggaataattgttgggcgaaaacagctgaaaaagtaacggaagcggtggtcgatcggtttcgttgctgtccatttgggataattggaattaggaaaatgatagacgattaaaggagggagggagcagaagaagaaaatgaacgattgggacaaacggaggagatggaggaaaaagagaagggaggggggggggacatctttaaccattttttgacatcttcattcattcattcattgaatgaatatgtgttatttacctattccgtcttcattttctctctgctgaatgaacgataaaagtccggtttcgttcttccctttccttcgttttttctttttctttgcattgggaaacagtggagaaaaagagggaaagggacaacaaattgttacttttttaaatgagggaaaaatgcgaaataaacgaaagattcggagaagagaacagacgaacgaaacagaacaacaaattggttgaaagtgaaatgagagggttctgaatacgaatgtgcagcgtataataaaataaaagcaattcctttccattccttttttcaagtaaccaaacgctttttttgc

SEQ ID NO: 32058 - DNA, 910 bp, Heterodera glycines
attcgtgatcagcgaccccgaaaaccccaggaagacgtttttgacgaattaaaaaaaaaattatttttttttgaaaaaagggggggggggcaaagcacactattacccaaatgtctggggcgcaattctggggtaaaatgcattcttaagtcattcggatcaacgaagtatattcgatggtttacccagcagtaatcattgtaaaaaacaaagtgaaacttataattttaactggtgtaaaataattatagccgggatttctagtgaaaaaccttttttttttgctcaattgttttgctcaaaaaacgcatttctgcgttgaaattttcttgtattcgctaatttaaatctttcgaaaccattagccaagatataagcaaaaagatcgacccttcatgaaatcggtcccagtcccggattatactgctttactttgtgtatttgcaattttaggctgacagtttgaaaaataaaaattgggctcaaaactattaaaaatgattggactcataaagtgcattagagcccagtttttttggactttatgagcatttaatttttttcttagaatttcattcgaattatttttaggatgggactcgacccgaaagtgctcacttcggtgatcaactccagctcaggccgttgttggagcagtgacacgtacaatccgtgccccggcatccttccgaatacccccgccagctccaattacgagggcggattcggctgcaaattgatggccaaggacctcggactggcgcagaattcgtccactcagttcaaagtgccaactccgatgggttcgctggcaccaaatttaccttttgctctccgctcaaccaaaattcgcgaacaaagacttcaccgtggtctaaaaaatgttagagggaatggcgacggaatccaa

SEQ ID NO: 32059 - DNA, 1524 bp, Heterodera glycines
  unsure (1)..(1524): unsure at all n locations
gaaatatataatattggaaagatatgttttctctctgtctttaatgtaagaacctgttaacgaatgatgatgcaaaaatcaaaatggcagcattcncaattttagcataatttattcccccctttttcagtgcgttggcggaaaaaaatcattggctggagggaccaaaaaggaaaagaagcacaaaagatcgaatagcttcagcagttagaagatccaatgatgccgcttcagtacgacgaatggaatggccaacaaacagtccccccccccctcacaaaccgttgatatcccccaaaattatcatttgtttatcacttccttaaacaaagtttttgcgccttccatacgatctgttctattgtgtgcacatgtatgtacatatgtctggtccaatgtaactccgtttcataaatctgtatgtaaacttgaacaataaatgtttttttatcgcgatagatattgtaaattttgatggtttataatacccaagacttttctcgagcgagactagagagtcttagcactgccccgcacatcgtctcttcgcggcactgcctttttaacaaatgctctcgatttttcaagcaatttttttcacaaaattttgccaaaaaaaaaattattgtaaaaaaattttcggctggccttacgacagattttgggtaaaaacaattttggagaagggatgactttaaaagacaatctaccatccaatttttaaaaattttctcagtgacgaaatgatagggagccatttttactgggggacattttgactaattttggcttgggggacatttcgacgcagggacattttgacgggcagcgcgttcatctagccaagagaccgaaaattttcaaatcacggagattggaactcaaatttttttttgggatgagatcccgcgggattaatcccgcccgcattttcaaaaaatttcaaagcagatttgtattcatttattgtgcactcataaatacattacattaacatatagggagggtacagatacaatttatgagtggttgcgtcaaaaggcattcgatacattgttgtttgattcatcaatcgtttatatatatatacaagcatacacagcagggatgggccgaggtttcgcttttcgcatttcgcctttcgcattttttggcgtttcgcatttcgcttttcgcatttcgctttttggcgcgaaatgcgacttttacacccctaagaattggattaaattcccacaaaatttttcaaaattttacctataaattggctaattttcagtgaaaacctgtttataaatgaccaaaatttccaattttttccccggcagcgcctatgggcaccgccgggcccccaaaactcctattttttcttagaaaatggcccaaaatcgcaaaatttggtaatttgatgaaaaactgttctcagcggcgcgccaaaactcttatttctcattagaaaaatgatacaaaaatcacaaaatttgatgattttttggtgaaaatctgtcaacaaattttaatcaa

SEQ ID NO: 32060 - DNA, 2170 bp, Heterodera glycines
ttgactaaattttaatgtaaatttttaaaatgttgatatgcatatttatttatatagataatgaaaacaaaaaaatattttttaggttttatataaagtttttttgcagtgaaaagtgtatatctgatggaaaataggtccggttagcaccgcgaaaaatttcttcttatttcttttcttcaggatgaatggatgggaagaagcgataatggactatgaaaaaaggaaaacaaagcgaaaaaattggtttctggaatttgaaaggcgatggatcaggatgcacattcgtatgatgagtaataagataaagaaaaaaatgttaaaaaataatgaaagcaaaaacaaataaagtgaataaaaaaagcaaaaaaaaatccagaatatgaaaaaaagtacaatttggtagatgaatgaattatttttcaaattctaaaaaataaagtatttttttatcgaatatacatatcatttcatggttgcttaaggcagttattttttaaagaatctatcatttttaggttagaatgaaactacacggaaaaaccgataatttaaacaaaaatttgcataagaaaaacctcccggctgaactactgtttcaaatttttacttttgttccaataatcttattatttggagaaactagaagaaatgcaggttaaagtatttggtttttaaatgaattaatgcttaaggtaataatgtaacaaaggtcattgaaattatttgtcggcaaattgaaatatttcgaacatatcgcaaacagcaattaaaattcatggttaattttcattattacaaaatcattttccattttagatgaaaattattaacaaagttcaaaaaatgtgtcaggtgaagactactggattgattgaatatgaacaaaaaattggttatttctatttaaatgaagaaatatttaattcgagtgaactctttttatttctttgttttgtaaagtgttttaaaaattatccttatggtattatcttattgacagcggtatgtatgtattgataatttaatttaaaaattatttttttagtactgtaatgtctagggcttcgatttttaggtgctaaaaactgccaaaataagtaggttttaggttctaaaaaacccccaaaataggtgctaaaaatgggaaaataggtgccaaaaagttccgaatttaggggtgtaaaatcgaaaattttcatcaaaaagcaaaaatattttgccaagtcattaaggatatacataattttcaaaatcaaaaattatcgtcaagaaaataaaataaataaattttggagataaatttttgagaaatttttcatttcttaggggcgcatttttgaaaaattttctggtcgattcttagggatgtattttttgaaaaaatttttgggtcggttcttaggggtgtatttttcttttttattgcatttttgttaacaaattttgggcaaaacgccaaaataggtgaaaataagtttttttaaatttttttaggttttttaggtgctaaaaataaaaacctagaaaataggtgctaataactcgaaaagtagcttaacaacagcccaaaaaaacatgtttttcgtgcgttttaggccacggggagctcaggaaaaaaatatgtaaaaacctaaaaatcgaagccctactagaaactaatgaaatctcgaattcattaattcgtcattggatttcgaagttctctgctggaactttcaatttatagaaatgatttatcaaaaaaagacaattttaccccaaacacttcgaaatgtatttgatttgcgttgtatgggctaaaaatgataaagaatgagatttttgggaatttttatgcaaaaacacacttattttttcaatttttaacacatattttagcacatattttggcatttttgggggtttttagcacatatttcagcattttttagcacatattttattacatatttcaggatttttagcacataaaaatcctagccctaataatcataaaccagtgcctcaaataagttttgcaaaaatggacctcctccataaggataatggtgaaaaacgggctaaaaaatccttcccaagatgtggatgatgcgggaattgaccaaaactccctagccaaaaaagacaaaaagtgaaattttttttaatttttttttccaaaaatcaa

SEQ ID NO: 32061 - DNA, 1450 bp, Heterodera glycines
tgccacaggacactttaggagtacaaaaacaaaatccgccccctccgggtgcgcactttggacggaggggcaatcaaaacagtttttgtggacgaatcgcagcccgtttcgcagctgatggtggtgatctgctccaaaatgggcattgccaaccatgaggagtactcattggtaaggggagcatcgccggaggggacggacagcggagcggagaacggaatggccaagggcgaaagggaaaggacgccgtactcaaacggcggaacggacgaagcgcggccgaaacagcgcagcgggttggagcacacgttcatgaacacaatcggacggaagaaggagcggcaaattcagcagctgaggtgcaaagccatgccgaacattgggccatttcgccgccttaattaagggccaaattgcacacggacgccgaaattaattgggtggactattccaagaccctcagggaacagaacatcggggaggaggaggagctgactctgcgcagaaaattcttcttctcggacacaaatgtggacaccagggacccggtccaactgaatttggtcagtttttgttgccgtcggcatcgaattcttggccaaatggtgacggactgattaagctgtacattcaatgccgggacggcgtcttgcgggggcttcatcccgtctcgagggacacggccatcaaattggccgcgctccaatgctacattgaatacggcccttacgaggagggaatccaacggagtgttgagtcagttggccaaatgttaaccgatggaggaccctcgcttttagtgccaaaaatctgttgccgaaagaatatgcgaaggccaaggaattggagaagaatattatccaagtgagcggaagaagggaatggcggagaatgaattggaatgactaatgaatgaatgacctcctaatggactgacgaatgaatcccctcccctaattagactgactaatgaatgccctccccctgaaggagtaccgcgagttgatgtatgaagactcggccgcgcccaaaaagaaatactgcgaattgtgccaatcgttgcccacttacggcgtcactttcttcttggtaaaggagaaattgccaggcaaaaaccgactgataccgcgactgctcggcgtcaacaaagattcggtgatgcgagtggacgaacggaccaaagcggtgctgaaggaatggccgctagaacaggtcgcccccccccctttttaaattggtaattattggacatttcttttttaggtccgtcgatgggccgcctctttcaaaacgttcactctcgactttggcgactataaagacggatattattcggtgcaaacgctcgagggcgaacgcattggacaggtaaaaaggggtaattaaagagaaacaaaggcactgttatttaacgaataagcggatatatcgacatcattctgaagaaaaa

SEQ ID NO: 32062 - DNA, 2137 bp, Heterodera glycines
ctttggcacttctctttgagaagtccacgggagattggtgccggcactagtgaggcatcgccgtcgtccctgctcccatccctcgaccattccctccagcaacactcgacaaccgcctcttcctttgcgattgcccccgcggcgatgactctcccccctcgacccgaacgacgacttatgttcaaccaacagatgcaaagaaacgcgtggagagcaaacacggcaatggtggtcagggaaaaatcgttgatagatttggaatcggagggaagcggaacggaagggcacgcggaagaggggggcggacggaggaagaaaagcaaaataacggagacgaaaccgggcaatgtttacaaaaatgtgggcattggggggaagactctcttttcatttatttatcagctccaagcaacacggtccaacgaatatgccaatacgccttcgccttgttccccgacggcactttctccgcttcaccaccgtttgggcccgtcctcctcaaccgatgccattccgccctcttctggtggctgctccgactcttctcagcccatcaaacaaaggcccaaaaagtcggtggcatcggagcacaaaatgcgtgtccaaggcgcactctttaccggaatttcacagcaaaatgccaatttgggtgggttttccgtgccatgtttaaaactggacgagggttggccaaattttaaagcgtcgggagagtggccaagtcgaagacaggagggcatgggcaaaggctcagtattcggcaccggcacttcctccactaatttgggccgttcgccggtcgttggctcgtcgtcggaggtgcgccttggcgattggcgaagtcgttcagtggactcgtcgagctcgggccacggcggttcgtcggcgatgagcagcgcggagggccttttgggcggcggcgcagcgtcggaagaaacggaggcatacgagggagccgagcaaacgcagctgtcggggcacgaagaaacaacggcggccgtcaattacgttagcatcgcaccaatcggacaattgtccctggggcaataggaaatattcaaattgtttttttttgtacattttgccaaacattccattttcagtgcaaattgtcagtgtattttgtgaatgttgccattatatagtcagtcaatttgttgttacgacaatctttcacatttataaggtgttaaaatgagatccaaggcaatgagtgataagcgaattttgcgggagggaaagcgaagcacaaaaaaaggggagggaaaaggaagaatgatcaatcaaatcacaacgcaaagtgacgtcgtcaacagcagaagtctcagtccaaagtcacaacacaacattgagtgtttgctgctcacaaatcagcggcgatcccttcatttaatggcacggcaccatctcttcggcactttcaatccttccctttgttgccatttcagtccttccctctgttgccatttcagtccttccctctgttgccatttcagtccttccctctgttgccatttcagtccttccctctgttgccatttcagtccttccctctgttgccatttcagtccttccctctgttgccatttcagtccttccctttgttgccatttcagtccttccctttgttgccatttcagtccttccctttttcgccgtttggcaccaaaagtcgcatactttgccacccttttccattttctgcgttgtttatttcactgctgctgtagttgttgttattgttaatgatgttgttgttgttcgtactttttctcttggccgaccctttcggactgaaactttcctctctcagacagttcagcaaattcgccattattcggctgaacgccctccgaaagtcgcggttgaaaatgccgtaaatgaccttttgagaagcggaaattcaaaagattatttaatttaattcaccggattaagcgacgaattggcgtagccgagccaagtcacagcctaaaaaaagtaaaaacatggacagaaaaaggcaatttgcacctgaaaaaggaaaggggtgaacagttggggttggaaggagcgccacacattgacgacgaaaaagggcgtccaacagaacagaaaagtgcccataatcacccccaaagtgacgcgtgccttctga

SEQ ID NO: 32063 - DNA, 1318 bp, Heterodera glycines
  unsure (1)..(1318): unsure at all n locations
tgcctccaaccaatcgctgcgataggtgtgccgtgttcgtcttcggcacaaagtgcgcttcncaaggggcagcagagaaaggcgaacaaagaaaaggaagaaactgttcaaactgtatctgatgaagtgaattattgagtttatataattaatgttattaaaattaaattgagaagattctgcccgagtccgatgggtcagagaaaggaaaaagggagggaaagagtacgaaacggagaggagagcggcagagaagcagagaagacagaaagaaaaggggaggacaacagaaaggcaagggaggagagcggcggagggattttgttctctgtccgcgtctacagtatccaattttgcatttccctactctacagtatcctttgggctgacaaacgaagaaaaggcacaaatccgcgcgacggaagcgaacggcgaacgcgcggaagggtacagctgctgtcgatgcggcaaagtgttcagctacgaatattacaggtgggcagagtaaacaaacttatcattttggcttcttttttttttgcattggctttcccttcccaattaccctaattattcattaattaagtgttaatgacccatttaagggacaaacatttgaaattcactcgatgtgtggacagcggaaatcggtgagttttgtacggtcgaaggccgatcaaattcatacggaaaattggacaaaattaattgacaacaaattatcccaacaattattaggcgcttcccctgctctctgtgctcacggtaagcattaaaattcacccctaatgaggggtggggggtagttaggtgattatatgccattccatcggtcgctcagttccttcgaaaaacgcgaccgcctgcgcattcacattttgcacgtgcacgaacgctaccgaccgcacgaatgttcaatgtgttcgaaggcattctcacaatcgtcgagtctaaacaaagtgagaaaagggcaaaaaaagcaaaagaaacgaaagccgagtttaaaagaagatggttatttatggtaatgaccatatgctttaacttaatgataagtattttattaaaacccttttaacaaaaaattgtcaaaattggaccaaaaaattagagagacaaatatttttacaaaaacaacaaataatcaactaaaaaaaccgctataaataatctttctcaattcgcaattaaatttttgagcaatttgaaaagatttaaatttaataaaaaaataatttaactgtaaaaactttataacaaaaatttttatgaatttaaataactttggtcaataaaaagatgggtacttttccattat

SEQ ID NO: 32064 - DNA, 1251 bp, Heterodera glycines
  unsure (1)..(1251): unsure at all n locations
tttattcatctccctttttgatagtgaagcatcagagagccttattnnactttnnaattacatnntggtgcgtttcagagcacgttctaaaaaatatttatgaattaattttgcaaaataataaatagttaatgaaaagtcagaatttcgaaaaatttaaaaacaacaagcgttggcattttttcaggttaagttagtcctttacaatggagaaggcctgcaaaatatggagagattatatcgattttagtgcgctaggttcgatgaaactttttaaaatataagcctaaactttttggcctgtttaaaaaggaattaaaaatttttaaaatatttattcatctcccttttgatagaaaaagcatcagagagccttatttaacttttaattaacatttggtgcgtttcagagcactttctgaaaaaatacttatgaattaattttgcaaaaaataaataagtaatgaaaaagtcagaattttgaaaaattttaaaaacaacaagcgttggcattttttcaggttaagttagtcctttacaatggagaaggcctgcaaaatttggagagattatatcgattttagtgcgctaggttcgatgaaactttttaaaatataagcctaaactttttggcctgtttaaaaaggaattaaaaatttttaaaaattttattcatctcccttttgatagaaaaagcatcagagagccttatttaacttttaattaacatttggtgcgtttcagagcagtttctgaaaaaatatttatgaattgattttgctaaaaaaataaaatagtgaagctttaaaaattaataaaaaattttaaattcagaattactggagttagcatcatagcagtgcttttccttgtctttttgatgctctcgcaaaatctggttcgcttctgaccagtttataaaaaaaaagttaagcctaaaatttttcgcatatttaaaaagcaattaaaaatttttagattttttattcatctccctttttgatagtgaaagcatctgagtgcctaaaataacttgcaaataaaatcggttcggggggaatgccccgaaaacaaaaaatcgattttttcaagtgtcctttggggtactcaaacaattatggggagcaaaaatccaacgcagaattanagtacaggctatagggaagctattcccgaaggattcggtctccccataaatctgggcgcatcgggtcggggggactgccccgaaacaaaaaatcgattttttca

SEQ ID NO: 32065 - DNA, 791 bp, Heterodera glycines
tattttctatttaggccaattctttttcactgaaaattatcaacttataggtctactttgtaactgttgggggaaacctatgggctggtggtgccgctaggttaaaaatggccattttgagatttcttttccaaaaaacagcaatttttaaaaattttgcgctttgaactcataaaagtactggaaaatggagaaattaattagttaataaacaacctaatcaataaaatttctaaggaataaaaaatcacacacagaaaaaccaacgtgtcgcataaattgaaaatttgtgagttttttgtagcatttttacataaaatgaccagttttgagagatattcccaaaaatcagcaaactctctcatgaaagcatcaaaaatcatcaaatccgcatttcaaaaacatcatcacagcagccaaaaatttttgaaaagataattttggagaaaaatttatttataaattatttaatagtaaaattttattaaataaaaattagcatttttaatatttctagtcagaatgggaatccgctttaatgttatactttattaaaatttattcaaacatattttttctattttagtttaaaaatttacttaattcatgacaaacttttgatatatcacatcatataatgcacccgttttgcaattattatttgttgcgtcttacaataaaaaatttattccactgtttttaagtttgtataataataatttatttataaaagaaaattaatttttatgttttatataggacatgcaagttattgcttttttcaatttttt

SEQ ID NO: 32066 - DNA, 986 bp, Heterodera glycines
atttggcatttttagtccatacaacttcgaaccctacttttattattttaattaaagaaaaacatagtgtttttaattttatgaacatttttactcatttttttgctggacttttttttacccagtaagtttaattttatttacatttctgaacataatcaaataaatgtaaatattttgtaaatactttcctatcattatatatttttatatatagtgaaatttttaattttatttcgagattcatgagttggcacgccgttcggcctttactacatatgcattttgtattaaaataagtactgacaagattaatcaattttatgttttaactgccgtaattaaatatttttaaattttaattggtgctaaaatttaaaatttttaatatgtttttttgtttaatagcttccagcgttttacattaataaattttttaatattttaaaatatttttgtcaatattttcaaatcagctggcacaacttgagtttaaaaaataaaaattcattcaatttattcaatacaattataagtttatttttaatgccttctagatttacatcgttaaatatgcctaggaataaaaattgaatccaatatttaatttaaagtaagagatggccaattttttaaagttcttatttcgttcttaatctgttatattatttaattaataatttcaatattacttaaattataagtagctgtgtccaaacttttgttgatttcgtatataaggtatgattttatttgtttatttatttaaaatataataaatataagcattttatccttaatttgggaaaattagtgtgcattttttcactttttatatgcatatttttctcatttagatttttaatcttgcaaccaatttcttgatcttgttgatctgttaaaaaagttatttatattttattctaaaatttttaattaaatattctattatattattatttttaaatgtatattcattttgttta

SEQ ID NO: 32067 - DNA, 1444 bp, Heterodera glycines
  unsure (1)..(1444): unsure at all n locations
tttttatttaaatggagatccccgaaacttcgctttttattcgtttttcgtacaatataggtagttcggcttcgttcaaaaaatttcaggaataggggaggaggccggcggtgccgataggcgccgccgggaaaatttttcaaaattttgctctgtttcttagcaaatttagcccaaaaatgaccaaatttctctatgaaaacaatatttatttcgtaaatattcaattttatcccgtgtaaatttttcacggaataatcgtgaattagcaccgtgaaacgttaccgtgaccgtgagcgaaaaaacccgtgaaattcacggtaaccgtgaccgtgattcacggcgcacctctagcgctcggcccttttcaggctaaaaagtgccgggacttaagtgccaaaaccagccggcactcaactgaccacgctataaaaagcgcttaaaagcccgtttgaatgatttttttattgcttatcgatttagaccgttgtttttaggcattttttaatttgtggactatgatcaatgttttcccaattttcttcaaaatatttttaggctttgnttgtttttttaattttaattttaattttttgctnatttttaggagtttttctttaaatttaatgaatttaaaaaattgaaaaatttatatgcatatttttcaccttttaagtgcatattttactattttagtgcgtattttgcgattttatatgcatataatttttggaaaaggcgggatttgctggattaatcccgatggatccggacccgaaaattttttaaaattccaatccagcagagggatccacaaatttggtttttttctgcgaaatcccgccgaatccgcattgcattttttgaaaatctcaaagacggaatgccaaatattttccaaataattttatgcatgaaaaacaacattttgtccaggaaggctcccggacatttcgacaatgaccgtttcgccaataccttttcgacaatgccgtctcgacaataaaattaaatatatatttttaaataaaattcaaatttctctaaatgatatgagatagtgctggtatgggatcaatataaaatagttttttttcgtttttgttcaaaattgcattatgagaatggctttagttttcaaacctaaaaatcactaatttattttttttttcgccacttacaaataagataattaggtcattatttttaattatctaattatttttggatttttcgccactaaaaatacccaccctaatacataaaactgctattctttgcaaaatataataattatttgcaaatccaatatccctttgcgatcaatattattattttattattactattcataataatggaaaagatttttagatttcgagaaaattctagaaaatcaaatgaaataaaatttgttttatttaacatttattgaaaattcgta

SEQ ID NO: 32068 - DNA, 1063 bp, Heterodera glycines
  unsure (1)..(1063): unsure at all n locations
atggcttaaacttaattggggtgtttttataatttccttaccgggattggccttcgggaaataaatgcctactcaagagcggattctgccttgccctttcaacaaattctttgaatgccgttggctctttattttcacgcttgtccttgttaaacaggtgactaacaatgtcatcaacactgctggttataaatggacgcccaccggctctcaaaacttgcccttcctccgacacccctagagattgggcgtttttataaattaattttaagatttccgtttgtgtgggttgtcgtttatttgaacttgacgaccgtgggttttgataatcatcatcatcagtatcttctaattgttcaacattttcttttcgcgcacgtccaaccttgagatggcgtcgcgtagaaacaacaattggccttgtaacgttgactggttttggcatggcgtcaaccacatcactcaaattttctaatttaacacccacgggacgttcatcttcgtcctttgtgagcttgttgagacgcttaacttcctgctcatatttgactgccctttccgcctcatttatggcgtcatcattttttatttgtttaattcgggtacggaccagcccaattggtgtaccgtctgacggtggcggtgctgccaaactctgataaatctcttcggggactagcaaatagcgctttgtatgctgcattttttcttgtttttaatttttttggaaactatttatatttttctatgacatcagcaataagcgggagagcaattgacgcaatgagccccacaatagcgggaaggccgtctccgtgctgtagcaaaacctttttggctgagcgcgagcagcgtgtgcgggcgagacgacgaagcacctgtgcatgagctttcagcttattcaaatgccggggacgcaaagggactcggccctttagaatgtttaggcagatttcgacaaggcacaaaagttgctcatcggatgcatctcgaataagggcattcgcctttttggcattacgacaatgtctccaaaanagtatttatttattgttattatttg

SEQ ID NO: 32069 - DNA, 978 bp, Heterodera glycines
  unsure (1)..(978): unsure at all n locations
caaaattacgaaagcggcacgtattttatgcatcgacctagtacatatattccgttatttgaataaactttaattggttgggtcctctggaaaaagacccatagaaattttcaggttcagagaatccgtttcttatattcatttcgagccttgaaaatccgaactcgaacaaaattcgaaaattcattccgcaactggagatactttttttgatgcttacttcctcgagacgagcccatttgtataccattaactatcctcaataatttcgcgtgtttagccaatttttgaccatcaaatgaaattcaaatttttgttggaattcgtttgattttaaatttgcttgagatttgttgtcttccttttcctgtatgtgcatttttctctttaggcgtgagtttctccactgctgttgatggttacggcacagttgacaattggaaacacccgagggcgacgatgggagcgtcgactttgtccagcaaactgttttaggaagaaaagcaaacaatccaaccttcgtttaatgcaattattaaatcggattagctccaataaactttttgtttgtcaatattaccaaaatttcattcgttattttttctctatttttatgcaaaatttaaagaaaatctgttagagaaaagaagtgtttcttagagaaagtaaatgttatttttttctataacagagacaaagaaacagtttttgacttaaagttcgaatcgggtcctaggttcgaaattgcttaaggatgtcattttcgtgttcaaagcatttagtgaaattatcagattaatgcttaaattctgtatatggtaattgagcaggtcctaatctgtgatctatataaaattttgatttgaaatttccgtgttttaattttactatatgggatttgcaaaaattgaaatgacgctcatcacaaacagacggaaattntaatgaaaaaaataaattactatactataatgagat

SEQ ID NO: 32070 - DNA, 1230 bp, Heterodera glycines
  unsure (1)..(1230): unsure at all n locations
tcagcatcaacaaaccccttttacaaatttttcagtcgtttgcaggaatggggattgcaagtcaaattcgagaagtgtaaatttctctgcaccgaactgaagttcctgggtcacatcatctcagcggaaagcattcgaccggaccccgaccgatcgcggacgatcaacgagatgccagcaccaacggatgagcaaacattacgctcttttctcggcgcaattaattattattcccgttttgtcagccaaatgcacgagatccgtgcaccgctagacgaactgcttaagaaggatgttcaatggcgctggggaccggatcaacagcaggcatttgaaggggcaaagaaaatcatcacttcagatttgctgctcatgagttacgacccggccaagccaatcgtcgtcgcagcggacgccagcaacaaaggactaggcgctacgatcagtcacacattcgccgatggcagcgaaaaagtcgtcgaacatgcgtctcaatcattgacgccagccgagcgcaattactcccaaattgagaaggaggctctggccatcatcttcgccgtacagaagtttcatcgcatgttgtatgggcgaaaatttagccttttaacggaccataagccgttaatcagcatttttgggtccaaaaacgggatccccatttacacagcgtctaggctccaacgctgggcattaattctgtcaaattatgatttcagcataaggtacatctcgacaaaaaattttggccaggccgatgtcctctcgcgactgatcaaacagcatcgcgacacacttcaagaggaggacaaagtcattgcttctgcacagatggcacaaaatttggactattccgagaacgctaacattgagttttgtgccgcagcagtcgactacatgtttcaaacaacaattgatcaactgccagtcacggccgacgaaatcgcagaacacattgaacgtgacgaagaaatgaaaaaggtcattgaacattgcaggaatggatggccaaaaacagcaaacgaattgaccatggcagcattttatacgcaccgactgcgaatcagtgaagtcaacggctgcctgctcatgggcgatcgcgtcatcatcccatctgcattgcgttttcgcattttgaaggcacttcatttcacccatcccggcatggtcagaatgaagagcctggcgaaaacatttgtctattngccaaaaatagacatggacattgaa

SEQ ID NO: 32071 - DNA, 1312 bp, Heterodera glycines
aaatcaaattaccgttcacgccacagaatcacaaatcattcattcatttgatttgacaaacaatttttaattaacgaaaattaatggccaaatttctttgtcaaaattggcagatgcatttcttctgactttgtgagtaaaggcaaattgccatgttagcattgcaataaaattgcatttcaagaaaacataaggacacagtcactttagcgtaaaaaatattataccatttattatcaatgagaaattccaacaaattattcaactcaaaattggcatgtgcattttctaagagaatgtaaataagcgaattgtcacactagcattaacataattcgtagaaacatcgtcgaagtgtaattagtgagtgctatagttctaattgttcactagatttttcagtgcgggaaaaattcgatttttaccatttaaaaaaaaatattttcttgaactttgtttttatattttcttaaacatttttttagcgtcaaaacataaatatgaaaatatttcatgtttcaatatatgaattttcggctttaataggagttctaatctcaaagtttcatgtaaaaaaaaagtgaaagaattttaatttttttttcaaaaatcggatccacgtttagacaccttcgtgaacgtgttagttaaatcattaaacgatggaattctatttattaatttaggatactaatcttaatgagttttttatgaaattttcacaatcgatttttcagtctgaataattcttataaaaaaaattttaatattcatgtctctttgtcgacaggtgaaaaattaaattaccgttcacgccacagaaaggaatttatattttttgaaaaaaaggtttaaaatatttacgaagtgattcagaaatggctgattttaataatgatacagtaagtgaagaataccaaaattaattttggcgagtaatttgttttttttagttttatttgacgttcaaagatgcaaatccaagctggtcgctcattgggtgcgcttcagtacttggattaatcgctttatttggaatcatttccaattcttctgtaatttatgtaaccattatgacaaagtgagtacaaataatcattaattagtgtattaaaatcagttaaatttaacttaattaggtcattgcgtggcaccgttaattactttttggcactttgcagctttttcgagttgattcatcaacccggccattttctgtttgtttacaccgctttttctggaaagaatttcattgagtatcgtttggccgtaaagatcacttttatttgctggtttggaattggtaaaaata

SEQ ID NO: 32072 - DNA, 1470 bp, Heterodera glycines
gcccatttgaggggggggggtgaaaaacaaagcccccggggactctattatacgaaatacgggtatacatagtaaaattaggtttgcaacccttattttttaaaatttgctcgagaaaactttttgtttttttcgtcttggtttcgagtctcggaaaattttggtgtgcgggcgaaatgtcagactttggcttagtagacgaaatgtcgtcgtgccaaatttttctctctattatcagatcacgcactaacaagctttttctgcgtggacgtacccttctttgttttatgaacccgatgcttttcatatcatcatcgaatgtaactggtactgactgtgtgtactttaaaccaaacaaaaatactaaactcgcttttgaaatgtgcgctggcggtggggttaaaaaaggatgtacatacaaaatatataacattcggtttaggggggggggcggagagcgcgggggatggattaggaggggcgacaaacagcaccccttgaaaattgagtcggtgaaaggacggctaactgactgaccaaagtgagtgcacagtgtttccccacgccgttcccccctcattctcccgaaattaaaaaataaattttaaattagaaaattttgaaaaaactctttcataagaaaattgtaagaaaaattctttcgagcgattttttaaaatttttttttcatttttgaaaaggctaacgagctgcttccgaccgatgctgctgctgctgctgtcgttttgtacggctggtggtggtcgtagtgtcccgcttcttctctctcccctcactcacacgcactcactcacactcattcgatgataatgatgattttgaagaagctcatcatcattattgttcgtcagtcatcctccgtccgccgccggtgtccccgccggcgtcgtcgtcattttgcgatgaattccctcccaccccggcccaaagagacgtgaaaataatcataatggaccgtcagacgccggagagaataaatgaacaatgatcggattgatttgtttaaatatcgtccaattgccatcttacgttttctcaaccggtgctgatggcatccattctgtctatccatggtgtgtgtgtgaccgcgtcaattgttgcggagcgctgaggaatgggattttttttcaaataaatagtaaattaaaaaaaaataacttctttatttaatttataaatttttttgggcttttctcgagtcaaagtctttgggactaaattccatagagttagcgcttaattattcgtcggatgattctcaattttccatgcttaaatccacgccccaaaaatgcctcggacagtgacgagatgcggccgtgtccgtcgcgatagctcggaatgcgttgggcaatgcagcgacaaaaatgggtgtaaaaatttgcgtttttccggcgacggcatgacgtacaagtgatcattcggtgagggggaaaggatgctccaaaa

SEQ ID NO: 32073 - DNA, 942 bp, Heterodera glycines
cagcgccgaaacgcgtgggtccccgcaatagttatgacataaatttcaccgaaaattatttggcgtcatcagcgcttcgctgatggaaaaactgttgaatgtgaaattttggtgaaaaactatttttagattttttgttcgagttcagacatgtgttcgtagttgaccaaaatggatgttgtaatcgcaatcatcgttcacaaaaatccggatatttttttcaatttttaaaaattcaaaattttctcaaaacgatgggatacaatcggcggcacagtattatccaatttctatgatgtattaattttgtacattaaatgaactgtcaccttttttcgattttttgttcatttttgtatacttttcagctttttgtgcatgcctatactttagcctgcaaaatttcttaaaaaaatcgttgcgtctacacccgaagagccaaaaaatgcctaaaaattttctcttttttcagttagacaaaaaattcattttcgcaaattcatttgctccgtcagttggcagacaaacggcttccctgggggccagttccacgtcttccctgggggccagttccacgcttaaaattgtagttgaacccaaattttaatacaaaatatcttaatatgattcgattgtcccaagaatcctctgttagtctgcaaaatttcaaagaattagttctgttaaattttttatggtcttgtattttttatggtggtttaaattacattagagcagggaatttccactccgccgaaataaaaatttaaaaaaaggctaaaattttttaaaatttgactcactttattaagtgcattaaagttttcaaaattttcctgcgcttcagctgcccctccatttgggcagtgatttgcttcagctcgcggtccaacgcctcctgcttcgtgtcgacgagagtctgaaatggaaatggcaaaaaaa

SEQ ID NO: 32074 - DNA, 1375 bp, Heterodera glycines
cttgatggtagtataacctgttttttaagaaattccttcttctattgctctactttctaatatttttccgatgttactatatgattctttacagatttccttttggtgtatttttatataatttaaacgattccattcaatccgagcagcttgatcgaccacccattgttgaaatagttttcgagcaaaatgatgtggtaaaaattttccttcatttcggtaaaataatttgtactttgtaaaatcacataaagaaattggatttcctttttgatcttttaatttataatgccatccttcataataattcggataaaaaataggataaattaagggttcgactaatttatctaacggatatatatttttaatttgtttttgtccttttgagtggacaacaatgtttgccgcaggaatttcttcatttgcatctctaaacaaaactgcacaaacttcattcgatcttggaatgttatatcttcttaaatcaaccccttctcttacactaaaaagcattgtcacatcaggaatttcaaattcattttctgttttttttgatgactcaattacgtctttcatcatttcataagatttggcgaaaatgtaattttcccttaaataattttcaatgtaagacattaaaaatcccattttctctttttcttttggattttcattacacatttgcattctataattcaaagattgatctgtatcaatgaaatacaattgtccattggtaggaagatcttcattttctggaaaagcagcagtattgtatgagtgataaacagccccttgaattttaaaaattggtatttttttattcgggtaacaaaatctcatacaccctaaggatgcgcaagaaaaacttgaattaaacaatcgtatgtttttcataaaaagctcgtgtgtttttttatcaaaattattttgatcaaataaaagttcaaattcatgcggatattcaggaattgtttcttccaaatttgctaatttaccataactacaacaattcccgaattcaacattaatttttgacgtattcctctcttccaaaaaatgaactgctggacagtgaaggcatttaaaattaaaatcactgagttcataaaatttcacatcactattttgtttgttagatgttccaacaaaaaaatcatttgaaacttcatccaaattaatcagttctctatctacttttcttcgcttaaacaaacaatcattgacttccaattcatctttattcaattcaattgagtcaccaatttgttcaaattgcttttttagggagcgtttaacccttttattcagttctccgctttttccgggagcttttaacccgtcatttctttgtgtatttgttgaagtggaa

SEQ ID NO: 32075 - DNA, 777 bp, Heterodera glycines
aaaaatgaggacggatgagagtagggggaggagcccccttacgaattggcgaatgaatttgaaaatgaaaatggccaaattacgcaatgacaaagggagggtgaggagaccgggggagcgcccccgaacaaatgttggcgaattacaaatacaaagacggcaaaatgaatcggccaaaggccgatcagataaacaaatggtaatgcagaagaggggggatgaatgaatgaatggaatgaaaaatgtgcaaaattgggacaaaagaaatgttttcggataaatgacggccaaaggccagcgcaaaatgggagattggcaggttgggaaaatggtgaagaaatgcataaacaatttgcaaatcggagaagtgagacgattggatacgataggcgaagagaagagagagagagagagaataataaatgtgaataaaaataagaaatggcaaaataaatgtggggaaattgcgagggaaatggcggaaggatcgaaattggctgtcgggagtggctctcccggtgaagtgtgggatccgtccggctcatcggcgccatttctttcgttttgcgtcctccggtgcgcgccgcggcggcgctgcggggtgatcaaggacgccacctccccattcgttctcctcttcttcgtccaactccaccggcgtgccgtcgtcccgattgaacaccaggaacccgaggtcgcccacaccgcgccccgggagtgggtcgcctcccgcttccctcctccgctctctcgttgccgaatggaaaaattggcgac

SEQ ID NO: 32076 - DNA, 1321 bp, Heterodera glycines
agattttcgaaaatttttttgagccagctagctcggcgctcatttcagtgtaagttagtcctttaccggggagtatccccgcaaagtttgttacgcttctgctcaattagcaaaaaatatgagtgatcgaattttcactaaaaaagttaagcctacattttttggcatatttaaaaagcaattaaaaaatttttaaaatttaataattttcctcgcaccgaaggtactcactcggcctcttcgcggcctcgtggtgggccttcgcccccccccccctcccacgcccttcagagcacgacaaatatttcaacaaaaattttgaaaaattgactagagcaatcgaacgctaacggacgacctaatggaaaaaaatccccgaaggagagaatttaattaaatccattccttcgggggaccgtgccgggtgccgcggggtaagcagtgctggttcgtttcatcacggcaccgaaccttttggctagtcagcaatcgttgcttaacttgccagatcggacgggtgcgcatgattccactgttccaagcaccccaccaaaagcaaaacgatataaccaaaatataaggaaaaatttttaaaaaaatttttctccatctccctttttgatagaaaaagcatcagagtgcctaaactaacatgtaaataaaatttggtgcgctttagagcactttctgaaaaaatatttatgaaataaaaaaatcgatttattcaagtgtccgtttggggtactcaaacaattatggggagcaaaaatccaacgcagaattaaagtacagactatagggaagctaatcccgaaggattcggtctccccataaatctgggcgcatcggttcggggggactgccccgaaaacaaaaaaatcgattttttcaagtgtccgtttggggtactcaaacatttatggggagcaaaactccaacgcagaattaaagtacagactatagggaagctattcccgaaggattcggtctccccataaatctgggcgcatcggttcggggggactgccccgaaaacaaaaaaatcgattttttcaagtgtccgtttggggtactcaaacatttatggggagcaaaactccaacgcagaattaaagtacagactatagggaagctattcccgaaggattcggtctccccataaatctgggcgcatcggttcagggggactgccccgaaaacccaaaaaaaaattttttggataaaaattatttaaatgaactgactagataatatttaaaataggttatttctcttcctttcagtatccctgcaaagtttggtgcgcttctgatcagtttct

SEQ ID NO: 32077 - DNA, 890 bp, Heterodera glycines
atgccaatttgcccaattggttttcggaaatttcaattgcaggcgcaagtaacgaccaaaaagaaagcggcggtcatcacaccctccaagcaaaaccccaagctggaatctgaggaaggagtggaggaaaagccgaatcaaacggaacgaaccgagaaacagtcggttgtttgacggaagcacaaaaactgttggaaaatgctatgtatcatctgaaaattattgacaaacccaaagaagcgccaagagcagtgacaccccaagtgaagagagaggcgaacaaagcctgaagcacggggtcccaattcggaagcattttgaaaaataaaagcacttaaaatatataaaatgttaggcatttgttaagcaattaagactcgctccaaatatgcttcagctaacatttgtgtcaaattggtataaactcaaattagtcttttagaggtgtcatgactactcgtacaaaaggcaactcgtacaattgcttaggttatgccaaggctttaggctcgtggacggtaaaaaaggaaaaaaagtggcaaaaaatcagggacccacgcgtttcggcgctggcgtttcggcgccagctcgtttttccacttaagcttttttctttggcatccaaatccaacaatattggtatcattcgaaagctcttatcatgctctattagccttacaaaaagcggatagattttcaagcctgtaaaaaatttgattaagaaaaaacttcaaaaatttcgacttttcgaaattttaatagtataacttttttggtaattgtctaatcgcgaagcaatctcttttaaaaagctgctaaacatggtaagctttcgaatgatatcaacaatgttggatttggattacatagaaaaaagttataggccaaaa

SEQ ID NO: 32078 - DNA, 818 bp, Heterodera glycines
tttttagcttgattagaagcttctagagtggatttccatatgcatattttgcatatttgtgcatatttcggcatttcatgtgtgcatattgggcattttttcaataaatcctctattaaaacggccccctctattaaagcggccatttgggctctaatgaccgaaaattttttcaaaaatatcagattttgggtatattttctgataaaaaaataactttttaaaaaattgaaactttatgccaaaaatagtcagaaaatagaaaattctccattttttgctcaattttcttcaaaataaataaatattacttttttggttctaacaaataagataatcattcatactatttttagctattttcgggattttatgcttataatttaacaaacttgaagaaatttgaaaatttgccctcaatttggaaaaatttatgtgcatatttttcactttttatgtgcatattttgcaaaaaatgtatgtaaaatctgccccctaaaccaaacaagtaccgtttactcttataccacttatttgggagcttatactcaaatgatcagatccgtttttctacggccgcgaacggccgtaggcgaaatgcttaataaaaatattattttaagtcgggttcatcagtattactagggattacatttataggtgctaaaaattgccaaaataggtaggttttaagttctaaaaaactcccaaaataggtgctaaaaatgggaaaataggtgccaaaaagttccgaatttaggggtgtaaaatcgaaaattttcttcaaaaagcaaaaatattatgccatatcattaagg

SEQ ID NO: 32079 - DNA, 1659 bp, Heterodera glycines
cacacgtgctgttcagcgcgcactttgttcccgttgctggcactgttcagctgcagttgcagtgccgccacgaccaactcaggcgccgctgaggaacatgccgaatacggggggaaatcaacagccacacttttgcgcgccatgccaacgctggacgcagcagcggccatggagggcgcgggagtgttgggcacggacagatgggacacggacagggaggacatgttgctgagacggtgttgctgctgatggtgttgctgttgatcccactaaaatatttacataatttatgtacataaacattttcaaggcggactaactattttttgaaagagtattgcttgttttttttaaagtgatgtcgattccttagttataatatccgatttataataggcttgattcctaatatttcaataaaaaatccccggctacagcaatgtcatggattaagccagttgtaactaccccaatggcaatttggtcatatccatggggagacaataacagatctttcccaaaaataaaaagttgtgtgggttaaaaaaattgctaattgcgagaaatgccacttcattgtgccgttgttcgccattgccgccgccggcgttcatcagagcgtccagccattggcagtgcaaatcttcgctctcgttgaagtcgatatacacggatgggtcgtctgatcaaaattggatgaaatcgcatcgtaccattcattttattatgtcatttgacagaccaaccgaaaaacatgtccaccagtttttttgtatgccaacacggcaaggaaaaaggccaagggaagtttgttcaatggaatggacaaagtctgccgaattcggcaccaaatgggccccaatttgggcgtacactaaaaatgccattttttatgaaattatattgttaatccatttaattactgactttcccgcgtgaaatttgcaggattgcccaacaaattgaacatgctcagccatacgttcttcgcaatactcaaatggccttggaaaatgttcgcagaatcgtcgacggaagtgccaaaaatgcgagtttcatctaaatttgattgtagtaaggttatgtccaattcggttagcagtaataaatcttttattttacctttgttctttttttaaaacatgaaattcaaaaaatggaatggagagaaaaaacgggtgtccgtattgtgtccccaccccgcccctggcagaagcagctcccaaattttctttaaactgaaaatttttgttttctaaatttattgaattaaaaattgaggttttcaaagcaaatttcttcaagaattttttttctttacaattaccaaagaaattttttatataccattggatagagcagatcgacttctattgtggatttttaatattatgcgcccctagcgagaaataaaataagttatgaggcctcaaaaaaacgacattttggcttagttttacttaaagttgatggctcagttggttaaattaggatttttggagctcgggttcaaatccaacataaaataaattttaattaatgtataatataaacaaacaatttaaaaaatcattttttagacttaaaaattgtatgatagtttttctttagtaaaaataagcaaaaaataataataaaagtaaaggttgagaattaata

SEQ ID NO: 32080 - DNA, 673 bp, Heterodera glycines
tgtctgtgccggtccgcctcctccatgtggcgcctgccccgcctttggtgccgctgccggttttgctggcgcgttcttcgtgaagatgtcggcgtccaagttcttgagggtcccgtagttcgaatcagtagctgaaaggggatgaagaattaaaattttaaaatttcggcattttttcacttggtgtctgtgccggtccgcctcctccatgtggtgcctgtcccgcctttggtgccgctgccggctttaccggccgtccgcctccccactgcgaactcatgttcaggtaatccagaggaaaatcatatgtcaaattttgcgatgcggtgcccagtgccgatgttcctccagccggtgccgctgcggtcttctgcgatgcggtgcccagtgccgatgttcctccagccggtgccgctgcggtcttctgcgatgcggtgcccagtgccgatgttcctccagccggtgccgctgcggtcttctgcgatgcggtgcccagtgccgatgttcctccagccggtgccgctgcggtcttctgcgatgcggtgcccagtgccgatgttcctccagccggtgccgctgcggtcttctgcgatgcggtgcccagtggcgatgttcctccagccggtgccgctgcggtcttctgcgatgcggtgcccagtgtcgatgttcctcc

SEQ ID NO: 32081 - DNA, 992 bp, Heterodera glycines
ccgctgatgtatgggcacttcaatttcggtgtcttcaaaaaataccgtatttcttaagaaaatcgtgcattttacagtaaaatgatcaacattgaaattgaagtgcccatacctcagcgggtttaagtcgtagagacttgcggtctttttcatattgtagcaaattttgtcccctttccaaagggcttactcaaattttccaaaaaaattttcagaaccccctaggaatttttttctaaaattttcccgattttaagtcatttttgactttacagatcaccatgaaggagtgatctgatcaggttggtgtaaaagacttttttgaacagcataaaaagttagcttagcaggaattttttcagaattttggcccataaaatattgattctatttacaaataatctaactgtccgtacacttttgagcaccaaaaattgggggcatattgacttaccaaattgtatcggcatacaaaaagcatttacaaaataatgaatggtgcggcaatcatgtcgatcattggtcccgaaatttttttttttttaattttttctgaaaattcttataaaatgtttctaggggtgttttgaggcgctgagcacgaatccgacctccatttcgtcctatttccaatcccgaacccgaattcgaacatttttcgaattttcttttttaatttcaaaaatcatgaaaacatgtttcggggggttttcggggtcgctgatcacgaatccgacatccatttcgaccgattccgaacccctgacccggattcgaataaaataaaaaatctattttttaacaaaattcacatttattgctaaaaatcgattcaaatgcacgaaaaagaaaataatcaatgttcgcatggataaaactcagagacgtgcatttgacgaatggcttgaacagctaggacttctccatgctcgtcgtacatgcccacgttgcggaggatccacttctattctagctattattggtcaaaaata

SEQ ID NO: 32082 - DNA, 1488 bp, Heterodera glycines
ggggtagagtgtggacggttggtcaattgactttaacccgaaaattggggacccgaacagaagacctaacccccctgttttaaacaggctaagaaaacgggctcgaagcaaccaaattagataaaatgccaaaaattagaaatttttcggtggaatggatattttttcattcataggtaaaattctgattcccaaggacatcttggaagcaagtacgcagaacaaggataatcgattttaaattataaaataaattttttacaaaatgatgccaagttacattttttgtttagctatcagacattaaatttttagtgctatttcaaaaatttctgtgccgatatgggccaccggggcactgtacgatttggtacatttgcactaataattccatttttgggatttttgcggaaatttttaaaaattatttaagatttataattaaaaaatacattatggttaaggactttttacaacaattatcaaaagaaaaggagcaaactttatgcaaagagaaagagcaaaatttcccgaaaatttttacttacaaaaatgctaatagatgacaaaatctaatcagttgggaaattttttgggaaaaaatgagttagcaagcagaaagagcataaaattctctacaatatgttaaagaccgagaatctctactatttataatcgctgagatatgggcacttcactttcggtgtcaaaaaaatattgaaatatgaccatgactgtatgctttacgtttttttttaatttgcattcattgtcctaatgtccactgtccaatgtccacagtcgaaatgtccggtcacgatacgaaaagaggaaaaaggaaggacaaaatgtaacaaaattttgtgagacgaaatcccacgcgaaaatccgcaaaaatcccactgggcctacaaaaggtgtgggagaaggaattggaagtgtcgccaacatttggcaccgtggttggccacttcacaaaccgtgcaaaaatcaaaatctgacttttcctatgattttttatcaataaactttcagtttttggatttcgaataaatattgactaaaatttaattaatgttaaataaaatcattggccagtttaatttaaattttaaaatatttattaaaatttaaattccaatggccagtttaatttaaattttaaaatatttattaaaacttaaaaacccgggaccgggaccaaccgggacttttcccaagtgaaaaatttttttgaaaaaaattgaaaatttaagtgcactttgttacgaaaattgccaatattcaaaaatgtacccataaaattttgtatttacgttttgggggacgagttcgaggaaaatttttaaaaattttgttttcagggggggggggggtcttggaattttctgagtcccaaaattctgtatttttttaaataaattaacaatcttttaaattttttgcttttaaatcgctgtttttgtagcaatgttttttccggaaaaa

SEQ ID NO: 32083 - DNA, 1611 bp, Heterodera glycines
  unsure (1)..(1611): unsure at all n locations
taaatgataatgaataaaaatagcttttggaaaaatgatacaaggttataatcccagaagcattgctttttctgaacattcatttggcccaccggttctgtaagtttccagcgctccgttcagcaaaatcaccgaaatgcccaaactttggtcgcttttagccttcgcaacgactccccggatgatcaggaaatcgccgtttacaaagtgtaattggacgggaaatgccagcacaattggcaatgaaatattggcatttgccctttccaatttgctcaaatcagtgatcactgccgggcccctttttcgggttatctttggctcaccttttaagccgctttcgatctaattgaaaagcaaatttaaaatcaatggcaacaaattatcataaaaacataagtaataggaagatgaaaattggatggcacgggagggataaccaaaccaaaaacgaatcagagggagggagaatcatacaacattaatacatttaatgatgatgatcaattaaagctaaaacagcactacttcaaatgcagagttcatttttgacattttccttacccgtactaaattcgtaacccatggcggcactctgtgcgtgtaattcttcacataggcgccgtgaatataaagttcgaatttgtcctcttttaccgtaatttcaattttgaattcttggtcggcgaaaatccgtgaattgcttctttcagagtcgtttaatttcttagaacccttttaaataatacaaatttcaatgttttattttaaatataaaatttcaatatttggttttaaatacaattcaataatttttttaaatataaaatttcaatagatatttgcttttaaatcccgagtcgggattcccgactgacccatttcgtcaaattgctgcttagccacattaaattcttctcatggatttcgttgaattcaaagtgaattttgaatggaatttcattttctgaaaaggcaaaagattaaattaggtaattaaattaattaggcttctgtacaaccgtaaaattaccattgttttttggctcgagtgtattatgaaggaaaaagatgcttaaatatgtggcatttttttccaatttgccttcaaaagttagcgtatcgcctgcagctaaaggagggttggccacaaccactctgtagttcaattcctttatgcgctgaaagaataaatacgtggtgagtcttccacaaaaaagctcagtgattgatggtcattttccggaagcctatcgcaccactttcgggcaccaaaagtgcctgatccggaacccggaccgcccggttaagaacaattttttgttcagtttttcaagggctatctcccaggccgggtccggttcttgatccattcacttggagcccgtcatgggtcgggcacatctgccggaggaccctcagcctcgcccccgacnctgtcgatggccaacccaagctaagcttgccggtacagcgggcttttttgtacagctcgatgagctctacaaaacggtatcaatgggcgtcaggnntgtgtttactancaatgtagaaaattggcgagaagtgatgccaaaaattgaaaaattaaaaaatttgaaaatgacttgc

SEQ ID NO: 32084 - DNA, 1607 bp, Heterodera glycines
  unsure (1)..(1607): unsure at all n locations
aagatccaattcatttccttttattaggtaaattgtttaggctcaatggagaacaacaaaaacaacaacaggagactaagaagcacgaggacggattggacgagttcaaacgaccggaaaaatggcgtgcaaaggacgaaggaaatgggcacgcattttgaaaagctttacaattttgacatttgttctaaaaacctaaaattacagggacaattctgccgacactgctccgcactcctccacctcagacagcaacggttggtcaaaagagagagagaggcatggatttcgatacaaaacaaaaattttttttgacaaatttgccgagaaaaatttttttaaaaatgccatttcgcatgagtgagtgtctccctacctagcttcctccctgcctcccttttccaagtgccccaaaatacgatccctgaaagtggttaccatttatagggcgccaattttgcaatttttggaatggacacaaccatcccccccccattttcaagttgaccaaactgctgcgtccactgctggagagaacgatggggaggaggaggaggacgacccggactacaaagaggaaaatgatgccaaaatggacggggaagagaccacctccacggaggaagaggaggcggaagaagcggcgggtgaaacggaggaagagcatgaggaggaggaagaagaagaggaggacgaagaggaggatgacacgggggaggacattgacatgttgctcaactcgtccgaagggaacaaagcgtgagttttcaattacattccaaaaaacatttcgaacttaaaccgaaatgaacaaaattatagtaatataggaattaattacccatgcaattttttggtgaaatttcttttgcgattgtattttttggagagccgatgccattagttggcactttctcattatcggcctaattttgagggaaaatgttcgtttcagcttagaaattagtcaatattttccattaatttttggtttttgggtttatttgaaagcctcaatttattttaattaagtttaattattgatatgaaaatttgtttcagtggcttcgattccggttcaactgcatgtgtcgtactgctcttcaaagtgatttgtttactcttctttaaaaaataataaattttcaggacaaacttgtcgttgccaatattggggacagtcggtgagtgaaattttatggcatttgtttaaaggtaattaacttattattnctctcggttgtgttcaacagatgtgtgctttgtcgcgcgggaaaagccgttgaattgtcggccgaccataagccggaagatttgaaggagaaggaacgcattgaagcggcaggtatgcaaggcgctcagcaaattagtctatttttatgaccatatttattcgttgtaatattctttatttggcacaacattttcaggcggatccgtgagcgaagatggccgagttaacggaggtaatgagagcctttttatcaaaaatagagtaattggactgaaatttttgaagtcagtttgggaaaacccgttattattatttcatccgaaagaaccacattattgaccttcattagcatttttaagccaatttttaaaat

SEQ ID NO: 32085 - DNA, 1592 bp, Heterodera glycines
aaaaaactaaattttatgaaaatattttaaaaataacccttattatatttattataattatggcacaaaaaaaaaaatcagatttgggaccgaaaatcaaaacatttttgggaaagtgtttcaaatcagttcctttacaatttattcgatcaaattaaactaaattatatttttcgtatcccatatcccactacaaacatgaacagattaaagccctgattataatccataaattataatatcagaaaaattcgaattctcaaaattctgaacagcagcagcaaaattttttttcacaatttttaatttttgatcatttcccccaatttgtctgattgaatttttaaaatttaacaccacttttttaatttgtttgcttattttgttgcccccgcccgcgcgttggtgtcaaaaagtcaaaaagcgtgggtgcgggcggcgccgcacactttttacagccggcgacgaaattcgatcccttgacgaactttttttttctcattttttattcttcgaattttacgtacatccacatctcttctcccaaatctttgaacctttgaaaacaaacattttaaaaatcctccttcattttgtaaacccacgcaattttaaatgcatttatttatttctttttaatttaattaaattataggaagtaaatttttggaaaaaattgtttttttttaattaatcgcctttttcagtagagcttgatcgggattagctggattttactgggcccaggtctaggtccaggccttttttcggcaacctggttatttactggacctggatccagactttttttcaaaatttcgaatttatcattttgcaataaaaattaatttttaaattgacaaactaaaaaataaaattaattttgttttaccttcttattttaaaatatattctttaaatctatttttttcttattttttaaatcataatttaaaatagttttcaactattgtcgctatttaaattccattttccaaaatcttaaaaactgccatttgatgagcctctcttttctgctcctcatctcattcccgcccacattcatccacaatttaccacttaaatttgattatcttttcttcaatttgtttacattttcacaaaatttccacccctttccgcctctggtggcgctgagttggcaattttcgccctgcacatttcgcctcaggcatttttgcgtggaagggccggcccagccgagcgctggccagcccggcctcagaacaaaatgccaatgaggagctaacattagcaaaaaaaaacattatgcaaataagaggacacattcaaagggcaaaaaaggtgagaaagaatgggcagggaaaggaaggggcgggcatcacgagaaattggccaaattgacttggactgatgaggggtcgtgtggggcggcactcgtccgtcatcgatgaatggcacaggaatgtgaataatgaggtgccatggaagggggggggggggaaggggaatagagtttggctaactttttatttgttgaaaagtgtgggcggttgacggacgaatgaataacggacggacaaattaactgtaaaatggtcaggaaatgc

SEQ ID NO: 32086 - DNA, 1361 bp, Heterodera glycines
tactcactcggccgcttcgcggcctcgtgtggggccttcccccccgcccttcagagcacgacaaatatttcaacaaaaattttgaaaaattgactagagcaatcgaacgctaacggacgacctaatggaaaaaaatccccgaaggagagaatttaattaaatccattccttcgggggaccgtgccgggtgccgcggggtaagcagtgctggttcgtttcatcacggcaccgaaccttttggctagtcagcaatcgttgcttaacttgccagatcggacgggtgcgcatgattccactgttccaagcaccccaccaaaagcaaaacgatataaccaaaatataaggaaaaatttttaaaaaaatttttctccatctccctttttgatagaaaaagcatcagagtgcctaaactaacatgtaaataaaatttggtgcgctttagagcactttctgaaaaaatatttatgaaataaaaaaatcgatttattcaagtgtccgtttggggtactcaaacaattatggggagcaaaaatccaacgcagaattaaagtacagactatagggaagctaatcccgaaggattcggtctccccataaatctgggcgcatcggttcggggggactgccccgaaaacaaaaaaatcgattttttcaagtgtccgtttggggtactcaaacaattatggggagcaaaaatccaacgcagaattaaagtacaggctatagggaagctattccggaaggattcggtctccccataaatctgggcgcatcggttcggggggactgccccgaaaacaaaaaaatcgattttttcaagtgtccgtttggggtactcaaacaattatggggagcaaaaatccaacgcagaattaaagtacaggctatagggaagctattccggaaggattcggtctccccataaatctgggcgcatcggttcggggggactgccccgaaaacaaaaaaatcgattttttcaagtgtccgtttggggtactcaaacaattatggggagcaaaaatctatttttttttatttttctattctttttttttaaggattcggtctccccataaatctgggcgcatcggttcggggggactgccccgaaaacaaaaaaatcgattttttcaagtgtccgtttggggtactcaaacaattatgggaagcaaaaatccaacgcagaattaaagtacaggctatagggaagctattcccgaaggattcggtctccccataaatctgggcgcatcggttcggggggactgccccgaaaacaaaaaaatcgattttttcaagtgtccgtttggggtactcaaaacaattatggggagcaaaaatccaacgcagaattaaag

SEQ ID NO: 32087 - DNA, 906 bp, Heterodera glycines
  unsure (1)..(906): unsure at all n locations
gttttcttcttctggggcaatggatttctaacaaatccattttctaaaattctaaataaaacaacgtnttcttaatgggggcaattaacgcaaaaataaatattcgacagaaacaaacaaacgcacgaaataaacgaaggaactattttcagtgacaacgcaatatcgatcaaaaataacaaaatcgcaagtaattaaatgacaataatcatataccgcgagtcaatattgggctcccagtttgagtttatcactttcatcaccgttctttttcatccgttttgtaggcggattgctcaaaaaaatggaaatttttctgccccttatctccgttccgtccgcccccatcaaagcggcggaggcgctttgttcgtcggcaaaatcgacgtatgcacaaccctcggagcgaccgttccatttggtgacaattcgcgcgtccactacagttccgaatttctcgaaaaatttcttaaaaagcataatcttactccatttccctttttcttacttactttgagttcctcgcccgtacacgaccaatccaatttcttcacaaacaatttgttcttctccagtccggcgttgtatggaaaacttttctcggacaaactcggcggcctttttcgcttttcactcgccattttgttcgtttccaaggtcattttctcgtcatttttctccttctttttcatcacttcgtcctttttattgttttggccaatgcacggaagaacggggcccattgggatggaagaagtctgaaaatattaggcgtttcataattatttataccgcctaaaaataattggcataattttcgatttattattggtctcattctagccaactttacttcagcaggaaaatcggaggtactatttccgaatctgccacagaattgtcata

SEQ ID NO: 32088 - DNA, 1800 bp, Heterodera glycines
tttttcaaaagctattcccgaattgaagtcgaaaagtacgaaaagggagaagaggacggtgaccataagctgaagcgagtcggcgatgctcaaagcgaacattaagcgaaagcaaattcgggagcgaaattcgcgcacagacagaaaaagcttacaaatagaaaatgcacaattaaaaatgaatatttaaatcaattaaaataataaaataaaagaccggaagggtgaacagatgaagcaacaaaagtgggaatgccacgagcaattggaaggaggcgaccagttccgccttcatttgacagtcagcaggatgccaacttttggcttttcacctgaaaatctgtgcacggagtgccgtctaaattgtcaaaatcaaagaatgcaaacactccgttcttaaaaagtgaattattagcatttaatagaccgcgattaataaatcaaaaccaaattatggggaatggatcgtctagttcaagttttttggcaattttcatgttatacattgctggcactaaaaattgctcctaattatgccgccacccttctgaaaagaattaagaaaaataaatgaatcaaaatcaaagaatgcaaacacaccgttcttaaatgtgaagcagccctgttcatcggtttacttcaattgggcccccaggctgagccccgaagggtcttggactataacgttttaagttgtcgcccaaatccaataatcggtatttccgaaagcttaacatgtttagaagctatttgtaagctcacaaagtacataaactgtatttgccttacaaaaagcataaaagtttttctagcatgccaaaaagttactaattaaaacccataaatatcgagctttcgaaattcgaataataccaaaattgttggaattggtcgacaaagaaaaaagttatagtgctggcgccaaaacgacccccattccaaagtgtgcccccccactctctgtcaatgtgtgcatactgtagttgatcaagtactgtgaaatgtgcttacacttaggaatagaataagcaggatttttaaaacaattaagaaaaatgaatgaatccaaatttggtgctaatgactcggtccgtcaacatttccctagttgggaggagaaagtcaaatgtaattgaccaaaacaaattcaaaaataattactctctacataaagaaacatctgttggctctcatttctccttccgttggcaatattttccatttctttgattgcccttttccgaattgctaattgtctgtgccttccttttttggcacttttgtcccattgtttgttacgattcggcaaatagccgcaagtgcaatggattaagagttcaattcagagaattttattcttcatttttacagtttcttattttgtctattggtttcgagcaataaaatccgtccaaacacatcgattacaaagcttgggtaaacaataattctattatatgaagaaataggcaaagtctctatcttacaattagttttttataaagctaaaaatgttttttaataatttcacgaaattaaaaaaaaatagttaattctttttgaattctcacattgatagttggttagactgattcaatgttgtcgtagtcctacacaattcgaaatcagcttccgtgggttccgaaaatcactacgaaactcgatgatgagttgaatttggtcgggaacctaccgttttaaaggatctatgtaccagggtttccgcaggtcaagaaaagtctggtctcgaatcggtccaaaaaaaaataaaataaaattttggctataaacattggcata

SEQ ID NO: 32089 - DNA, 1537 bp, Heterodera glycines
gaaaagttttcatgcctaaaaaaatccttacaaaaatgcaaaaaaaaaattgaacaaattttcccaaaatttatttttttttattttttgataatattttttgttaaagagttatccttattcgaagaaaaactttaaaatttttaataattcatttaaaaagtgaaatatagccaaaataagttttttgattaattttttgtgttataaaaacaaaaattttgcctatttttatgcctattcgaggggtttttatgtctatttaatgccaattttgttattttttcagccttttttaggtgtctattcgtgattttttatgcttaaaaatggaagccctagaaataataaaatgggatagtaacaggcttttgtcttacccattgtctgttagatctacaaatttgagtgttcgaattagagtgccacgggaccgggaatttttgccaaaaccgggaccgggacttgccgggacctgagaagccgggaccgggacctcgattttttttcgggaccgggaccgggaccgcaagaaaaaccgggaaccgggaccaaccgggaaattttaaaaattcaaaaaaattttaaaaatttaaaaaaaaattcaaattttaatttatatcaagtgaaaataatacaaaattatttggttttttatttaataaattaaattaatgaaaattttcaaacaaattttcttcaattatttcaaacaattaatcatttttggactaaatcatcgaatattaatagaaattcagatttgattttcacatcactttttttcggagcgctttttcaaaaaacttttgggaaagaaggggtccggcggtgccgataggcgccgccgggggaaattttaaaaatttgggtgcaatttgttaacagattttcaacaaaaaaaggttgttttttgcgattattaagctcaatcttacatttggcataagaagaattgtgaattttgtcaaaataaaaccaaatagagtctttttcgttggtcatttggtctaaattacaaagaggaaaattgtctataaaatgaacgatgaatgtataaatatagtgaaggtgctgatgtccagcccagaatatgaggaagggaacgagtgagaacgaggattggatttggggggaaaacggaataagccaaaatccgggccctggataaatggcctccccaaattggtaatcccttgggcgcccactagatcgaatacgcgtgcggggatgggcgagaaggagtaaaatataagataaatattggccaatcacataaaataataattccgccgcgctttgctctcggctctcgctcgccgattaactgctcgcccaactgactccttatcgagagaatgctcccgattaaatagttggacttatggaacggaaaatggaatggaagagagcgtggatatgtgcttgggaaagagataaaacggatgtgattaattgcgctttacacgtccacccttccttaagtttgtccgcgaagctttgatttacttttgagttggaatgaatcaaaaaataa

SEQ ID NO: 32090 - DNA, 1025 bp, Heterodera glycines
aggatcttttttaaagaattagattcatactctactgatcatcaaaattgtaatgaaagtagggaataaaaaaataaatattttatgatcagtaggaataaaatgtttatttaatcgtagaatactttagtttttatttcattataatctttttaaaattaatttattgtatattctatttacttatgtatgtatttgccatgaataatattctgtcatataaaaaaaattcatttttaatgttttaaattaatttgtttttaggaatatttcatctttgaaatgaaattatgcctaatattttctttaattttgtttttgctcattatatttgatcaaatcggagcagaaaagaaaaagctacaacaaaaaacatttgatgaaatatttggagaaaaatgggaggaaaaagaagaaaaagaaagaaatgagaagaaaaaaagagaaataatcagaaaattttataaaataaaagaaaaaataaagcaaaaagaaagaaaataaacaagaaaagaatgggataaaattgaaggaaaaatagcaaaaaaattgggaacaaatcgccaatatatttatgaatggatcaaagaatttggattaaatcagagaataaatcattcgagattaaaaactgatgaagaaaaactcgaaattattcgaaaattcaatgaaatgtcaaatgaatataaacaaaaaggaagaaaatattcaaaaaaagaatgggacaaaaattatgaacaaattagcaagaaagtcggaattggctataaattaattaaaaaatggaagaaacaatttggaattagccgaaagataatagcggaggaagaaaaaattgaaaaaatgaaaatttattggcaaataaaaggagaaaagccgaaaatgagtgacaaattttgcctaaaaatgactgatgaaagtgtgatttaatggaactaaaagaatttctttaatttgtaacaattaatgttgagtagtgaacagggcttggcgtaattatggattacggaaattacagcattttt

SEQ ID NO: 32091 - DNA, 1073 bp, Heterodera glycines
ccctcaatttggtggtcctggttggtgtattttttattaatatcgattacttctcgcggcatcagcgtcggcgggtgggtggtggacgttattattgatttttttcgcgcgaccgacaacgatggggagggtgggggtagtgtcattatcgattatttttatcgattaatttgcgcggcgatgcatcggcggggagggatgggcaaaaaaaaaagcacccgtgcggatttgggaaattggattgggtgggcggcaattttaaagtggtccaataggtttcgattctgtgcggtaacttcaaagtggtccaataggtttgggttctgggcggcaaattcaaagggatgcacccctcccataggcatgggtccatgggcggcaacatcaaagggctgcacccctcccataggcatgggtccacgggcggcaacttcaaaggattgcacccctcccataggcttgggttcgtgcggggcggcaacatcaaagggctgcgcccctcccataggcatgggttcgtgcggggcggcaacatcaaagggctgcgcccctcccatatgctttgggttctgggcggcaacatcaaagggctgcgcccctcccataggcatgggttcgtgcggggcggcaacatcaaagggctgcgcccctcccataggcatgggttcgtgcgggaaacacccgtgcgcaaccgtgcgctttgctttatctgctcctgatcccctaatcttcaacttttatttctcgactagccgccagctatatatgtaccgctgaattataactgataatatttatttaattttctaaatgaactcattaaaatgcaagtacttacaattatctaattgtaagtttatattaaatcacagcttctttaattgaacaattttcttctcttcttttttattatgttaaggaatttgatgcactatttactgggtgtttgtatctttcacttgtcaaagcaaaaggaaatttaaaaagaataacaattttttttgttttattttataaagtccccaaaaacgaaaaatccgcttaacattgaggacaaaacatttaattaaaat

SEQ ID NO: 32092 - DNA, 1739 bp, Heterodera glycines
tgattttgtatttaatcaattttatcaaattatctgcaattttaaatattcaccataagcgacaagaatcataatgattgtcattatattttgaattattttcgtcaagtaaaggtattgactttgggaaattttgtcccaaataaatatcgctttcgtctccgtgtttcactttcacaagctcaagtgggtagaatcgttcgtgtccatttctatcgcttctcaatcacgcaaggattattagcgtagcgaagacaaatgcggtgccgtacataaaaatgctggtcgacggtcacattcttgaaaccattgtaagccatttgcttacgggcactttctcttgtaattccaccgtactcaaaatctttgtattcatctagttgatttttgtatgttgtctgtagagttttccctttgaggtatttttctactttttgtatctcatccgggtgatttaagcagtcgcacaagttacgtgcgggacagttcagaagagaagcaattattgtgtctaaacggtccatttttataaatgagttaatgataaattccttaaatagtttttatcatttttttaacaaaattcacgacaaacaaatctggattatcttatcctattaacttttttgtcattttttcaaaattactctcataatttcttcctcctaatgagcacatacaataaataaaataaatgcaataataaccgcaattctcactgaacactgactgaatagctggcttattcgaaatcactttttcataattccgtaaaaactggctgatacatctgttcggtttcctaccaaaactatcaaaatagtagacggtcctatcgtcaacgatgaacattgctatccaatgcgttccttccttattcgaaggatcattattcgccaccaatgttgaagggtacttgttgattatgtttgggagtttgtcgcaagggaagcatcccaagtagagttctctggtctttgtgtttcccgctagaatccgatttatcgtcgttgtgtccattttcgtctctacatatatgcataagcttacataaatttctaattaatgaattaaaatagaggaaaattcctgtcataacaagagctatccacaacaaaaccaaaagcatacagtatacccatctcgataatgacctcgtttcttctacattacaaagttgaaaattttcaacaatttcatcaatcattgagaataattcagattgattaattttattcaagtaggaatggtcaaaggaggctattttataataaatgtcagtcatttcgatgtccctggatcgttcagggtagagaatagggctattataactcgaagaaaaatttattaaaaataaaacaaacaaaataaacattttaaaaaaattataaaatataaataataaatcactttaaatacattaaatggttgtatcggtcattactgttcgatttttatccaatatcaaaatagagtccatttcactcatggctattagggtgatcccacccgatgggacaggtgatctaaattgaatgcacacggtagtcgtcccttctgtaataagatcaataccctcgttgtcctcctggtattagtcatattaaacccaaaattgttcaacccttttcatacttcccaaaaaaattccgttactgtctgttgaactggccataccctaacgccctcattccttttctggaatggcccgtgtatattaaggtttttgcggaaattaa

SEQ ID NO: 32093 - DNA, 1117 bp, Heterodera glycines
gtgctccaggaccaatttttcgtacgaagacccccaattttgcccggcgacgaccttttttttttgctattctgaacactttttctgacgaccttttttttgttgctattcaaaccacctttttttgcggcgcgttctttccaaaaaactttgtgggaaggggtggagcggtccggcggtgccgataggcgccgccgggaaaatttttttgaattttctatgggtttcgctacggaaattgttcaaattttaacttttccccccttcgttacgaccccccccccctcctttacagccgccccccttacgacgaacgaggggggggggggggttgaaattcggagatttgaataaaaatgaatttttttcaacaatttttctcgatgggtggtgggatgaaatcttcccctggtacagttttccaaacaaaaattcgctaacttttctccaaaaatccacaaattagcgatttttcggagaaaaatctattataaatggtacaaatactcaccacttttgaccgtttgttggccaccactccgtcctccttcccctcctcgtcgttgtcattgccaccgtcttgcgtctgttggtgccgtcgcgtgtcaatgtggtgctgctgggcctgcacaaaagtgtcccatggcggaatcacccaatggtgtgagtccttctgaacagggagaaaaagtgaagtgtggagatgaggcattattgaacaatgaaaagggcatagcgattggaaacaaaaaagagacgaaaaattcggaggcagttcctttcccgccccccgtgtcgttcccccccccccgaaattttttttatttttttcaaaaaaattttccaaaaaagcgctgaaatttttttcttggaattttcttactaataaatttcctaagatttttttgattaaaatttttaggtttgaaaaatattcgggggggggggggggaacgacccgggggaaatgaagtgcacccaaaaaattcatgccctggcggcccgaattattggtattgtacaagtcgattgtgccccttctgaggaatttttcctggttaatgaactgcttgcccatgttgccgcaccggaattttacaataatctagcatcggaa

SEQ ID NO: 32094 - DNA, 1020 bp, Heterodera glycines
atagttatgcgttttgggggaaacccccacatggtacaacggtgtagaaaaaaagagatagccatttttctgagaatatctattcttctgagaaagcaattttcaacccgacattttgtagggctcaaccgcagatagtaatgcgtttttggggaaaccccatcatgtacaacggtgtagaaaaaaagagatagccatttttctgagaatatctattcttctgagacagcaattttcaaaccgaccttttgtagggctcaaccgcagatagtaatgcgtttttggggaaaacccacatgtacaacggtgtagaaaaaaagagatagccattttctgagaatatctattcttctgagacagcaattttcaaaccgaccttttgtagggctcaaccgcagatagtaatgcgtttttggggaaaccccacatgtacaacggtgtagaaaaaaagagatagccattttctgagaatatctattcttctgagaaagcaattttcaacccgacattttgtagggctcaaccgcagatagtaatgcgtttttggggaaaccccacatgtacaacggtgtagaaaaaaagagatagccatttttctgagaatatctattcttctgagacagcaattttcaaaccgaccttttgtagggctcaaccgcagatagtaatgcgtttttggggaaaacccacatgtacaacggtgtagaaaaaaagagatagccattttctgagaatatctattcttctgagacagcaattttcaaaccgaccttttgtagggctcaaccgcagatagtaatgcgtttttggggaaaccccacatgtacaacggtgtagaaaaaaagagatagccattttctgagaatatctattcttctgagacagcaattttcaaaccgaccttttgtagggctcaaccgcagatagtaatgcgtttttggggaaaccccacatgtacaacggtgtagaaaaaaagagatagccatttttctgagaatatctattcttctgagacagcaa

SEQ ID NO: 32095 - DNA, 780 bp, Heterodera glycines
atcactgcccaaataaatgaaaaccatctgcccattgttttgagcttctttcttttctcgcacaatcccatttctgacagcgcgccgtcgagtggattcatagagtgtgcatgtctctcacatttccttctgtctgtgcctccccctcaaaaaggtgcgtcagccgtcgtcgttctcccaaagccttccgccggccaatcgatttgtgaccattaaattttgtctggttctttagccccttgcccacttctcatcctttaatctaaacaatcccttgattcatccatccatcttcatcttttctggttttctaaatgggaaaattcggtcgcattgatgcatggaaagaagccgaataaagaggttgaatggtggagatgtgtgtggaagtggaagggttctttatacatatatgtgtgatgggatgagttgagtggattggatgttcggctgtcatcccatcccatttcttgactccgcttgcctctggcgcatcctcaattcgccagtcgaccggcgtctatcatcaatcaagcgtcaaaatgggcacaagaacaaataatactgaaatctccgcttcctgatgattttattctttgacataaataaataaatttaactacaatttgtcattttcaagattaaattcaagattttcgatggcagctgttgtcgatgaggaagattctgctgagtcaattgcactcgcagaaagccaacttttgcagacgtctgcgcattcgggcgttctcagcacgggcggacgacaaacccaactgt

SEQ ID NO: 32096 - DNA, 1418 bp, Heterodera glycines
ttgttcgaattcgggtccgggatcccgaattgatcgaaatcgatgccatattcgtgatcagcgacttgaaaacccccggatacttgttttcaggactttttaaagcaaaaaaaaaattaaaaaaaaatttcgacccaaaaaggggatacaaactgaattagtagtacccagctttgcttatatattgcagatacaaacgaacacatatttctttcacaatgtcccaccccctttggcggcgtgtctcgagaattggttacgtttccgttttggcgggtgccaccgccggtggtgcttatgtcggcacagtaatctttaaattatgtggtgcatggtttttcacaaattagttttgtttcacagcaatattaccgccacgggtctctgcccgagttgccccaatgggcgcaacaatttgccgatcggatgccacagaatggtaagaatcaaatgcaaatcattgcattttttgtgccaattcggtgcccgattcaactttttgtagccaattttgtgaggaatgtatgccatttttaagaccagcgaccataaaatctcaaaaaaacgcaaaattttacgagttgcacaaattttgttggtaaaagggctgttgttatggaagacaaaaagctgtaaaaagaggggggagcaatggcattggcacaaagcttggcactttttgtaaatcccctatttagttgtttcacttcgtccgcaaaatgaaagtgtggccaaacaaagtggcactgagcggcaaaaggcggaggtaattaatgtaattagaatttgctgtaaaacaattaatttcacacttaatttaggctgtgaacgcccaaaagattgccgaactcgagaaacaattggcggaacagaaagtccgattttccccacattttttcactgaaatttgttggcattttaaggcattggaacggcaaaaaattgcggcagcggtcgaagagcagcgcaaaaaggacgaaaggtatgccatttgggggcttattatcaatttgatggaattttgcgaatgcaataggcaaattgattcgatggcattacaggcgccgtcgggcaaaatattggcgcaacaaatttttagaatttctattttttgtcacgagaattccccttccgtcatcccttttattaagggtctttatgggctattagctgacgcttaattcaatgacttttgcattcaaaacaacttttttgtccttccagaaaggccttcgaatcctccgagccgaaacgaacccgtgacagtgcagcaattgacccggtcgacctgaaggtgtgtttcaaaaggaaaggcttacaatttgtgtccttatctatgtttttttaagaaggcgatgggcgtattttcttgaaaatgaggagtttataggtttttttggaatttttgagtttttttt

SEQ ID NO: 32097 - DNA, 825 bp, Heterodera glycines
  unsure (1)..(825): unsure at all n locations
cgtaaaaaaacctcccgagaagaatctccacggaccaaatccaaattcgattttcatcccggaacgagtagtacattcttcaccacccactcgcaatccgcctcagagagaacgtcccgctcagcccggacatgtgccatctattaatcgaaagttggctaaaaagaggcaattgactgactgacttgttccttctccaacatttcggacttcctcaaaattttcattgcataaatgtgaccagtatcaattttctgcacaagtctgacttcaccaaatgcgcctctaccaatcacctacaaagcaatatgcaaagagaacaagaatttgattaacctttaaggattgaaaatcattcgctgaaagttttgttcttcgctgtcgcaaaaagtcgttttctttggcagcgtggattttcctcctgtcctccttttctaactcgtttagcccttcctccgccatttgtttttcgagcttttctgcacgttgttctcgttcggccaaatggaccaccgcttgggcataataactttcgattgacaagcgcgttctgtttgctttatcccgcacatattgagaagcggaagtcattatatttgagtgctctatcaccagcagaatgagatcggaattcatcaaaattgtgagtcaaatttttcaagtcccgggttttgaattagggttggacccctaccgtcggggttggaaaagtcggggtcgaccaaatcgttcggggtcggggtttcggggtttttcaatttttaccttatgcctaatagcaaaatttggtttctagtcggttttatgcgtnccatgtcatattat

SEQ ID NO: 32098 - DNA, 1062 bp, Heterodera glycines
  unsure (1)..(1062): unsure at all n locations
atgcaaaaattggtcnaagtggaattttgaagcccgccgagaaagaaattgtttntaatgaaatttgttaagaaaataacattttaaattttcttttcataataaagttttttagagtcgcccgtcgctgcgaaaaggacgggtttttgaatttaaatttaattccatttcattttccaacttaaaaaatccaaaatttggtagttaaaattctttttttgttaaaatctcattaaatttcgaattgacactaactctcctcccttccccagaaatccaatttaaataagctgtcactcttctaaaattatgactccagagcatagtatcatccccaaaaattctttaaaaatttgagtttttttaataaataagaattaacgaaaattctcgtcctttgatttcctccaccttttcatacgtcgatgaccacctccttcggctcggctgttattgctgcgcgaccttttcctgttcgctttacgctcgtgtgacttagaacgcgaccgacgctggcggcgctgccctcctccgctggttgccgacatcggactgcgactggacaccgtccgttcgggcgtaacttcatcgcgcaatttcaacttaaaatgaatgatacaaatcctttccaaaataataaatccaagcatttctccacataacattaagattaaataccttcaattccgccaaagtggcagtgatttttgcatatccgaggtgttgtctcccctgcatgtggtcatcaatgcttaattcaaaataattgcaacataaacaaaatgaggttttttaccgctgctgaacatcgccaatgatcaaaaaacttccgcacacttcgcacacgcgcatcggtttcggcgcgttcgggtctttgtagccggcctggtaaacctcgcgttgtctcgcttccgggtcaagcaactgaacatttgttcaaaggcatgaaatttcagcgtaaattttattggaggaataaaattatataaacgcacgcactttccggacgttctccaactccgcngtgacttcctccgcccgtttcacatatttctgagattt

SEQ ID NO: 32099 - DNA, 738 bp, Heterodera glycines
attaaaattaaaaatctagcattaatcatttaaaaaacccaaataatgttttgtcacaatgttcactttatcaaaatctcaaatgcactaatgggataaaattaaaggatgatatggaatattttgttataagttcataaaaaaattcataaaaatttatatttaaaacattactaattcaaaaatagcgaattcactattcataaacaaaattacgtagaagctttttcaatttttccacaaaaaaaaacattagtaaataatgagattaagaaaaattttgcgagagccgaatgaggaaccaccgaattttgttgtttcggaggcaatccgtcccgcaaatgaaattttagagagcgggagcattctcggcggcgagcaatttcgacaacgacatttggaagtgaatgttcatgaatttgaaccggcagcaaacgaagaaaggatgagtgagcacttagcgttggtggcaccaatggttaatgcaggttcggggcatctcgaaaattttggaagaaatatgggagaacggaatgctgtcgaaataagaaatttgccaccgaatggccatctttttggagacaatggaaactttgaggatggttgggcccgatcaccgaactcaccgttattcgaatcaagtcgccatgcttatctgaatgtgggtagagctgacaataggggaaagcatttaccgccgaattttccatatcgtgtcgtcaattcgtatgtcaccgg

SEQ ID NO: 32100 - DNA, 1691 bp, Heterodera glycines
tagggctggaaatttaagtcaatgactttttttttgttgactctaaatgaccttcaaatgactaaaaagtgttctgaactccgtttgaagcttctaacatgcattgtttgtgacttttttttgactttttacactttttgggatttttatgactttttgaggcaaaatttgaattttatcgaagaaaatgccgaaaaatacaaagaaaattccgaaaaataaaatttcgacaaataaaaaggcaatagaacctggatgaattttttcttaattgttggaagaatctcttttttatgcctattttaggtacctatttataaaattaagtgcctaaaaatacgatcaaaatgttattctataaattgttaaaaatgggattttttttaactttcacctaatttttcaggacttttttgcattttttacgtgcttttttggattttttcgtgactttttgaagattttagtgacttaaattcccagccctaataataatttgaaaattaaattttttacaattgtctaaataactcctttacaaattttaacaattttgtctatggtttttcatcaaaatcataaagcgcagccaagcgggatcgaaccggcgaccccgtcttatatgacccctaagggatcaataattaaatttcaaaaacttgacttctcagaagattcaagagctcattcgaaatttctttttgagctctacaatatctgtgtatgagttttttacttaattttttttaatgaaatacttgatgaaaccctatttgaaatctatcatttttttaaaaatataacttcagatttaggatcaacgacttttttaccccaggtttattgagaaaatttttaactttattcttccatcgggacaccaattcaccagtattgccaataaatgtatgtttttatattcgaacgaaagaaatcacaaagcatttatgagagaacatgagcatcaaatccgtttcccaattggtgagatcggtcatttctcaaatataattaattcattttcgcgcaattagacgacattttcaaaataatcactcattccgccgctgttccacttggccccgggagtcgtcgagaacatttcatcgttgctttgacccgctttttcttcttcgtccgctgggggcgacaatggcctaaaattaaatacaatttgaatttggtgaatgaattacctatcttttacacttacccaatgaaattaactgcgatatcccacaaaaaaaattggacactgttcaaattgtcatccaaatgttcgtcgttttcccattgaaccgccgccgccatctccccaacaattattggacatcgcttcaacatcccataataattaatgacttcaccgtcatccataatcagtgtcagtttctcattagtccgttcgttcaccaattcaaatagctcaatttgcgttgaattgttcaatttgaaattcatttggtaactgactgaagtggtggcacggagaaatgtctaaacaaaataaaagaaacgtaaatcaaaggcaatcagtcaatcaatccgccaaatcccacgccggggacaaaatcacgccgctagaaatttttaaaaaaattttcaaacctagaattttttcatgaaaaaattcttagaagatttcttataaaaaaattttaaggaaaaaatttgtttttggaaaattttca

SEQ ID NO: 32101 - DNA, 1285 bp, Heterodera glycines
  unsure (1)..(1285): unsure at all n locations
aaaaagagatagccatttttcggcaagatttttttcgttagcatttcaaatatcgtgtgagtgtttggtagagccagactagagaaggcanatgttggtancaagttgcgggtcaaatccncaagagaaaaaagagatagccatttttcggcaaagaatttttttcgttagcatttcaaatatcgtgtgagtgtttggtagagccagactagagaaggcaaatgttggtaccaagtttgcggtcaaatctagagaaggcatatgttggtaccaagtttgcggtcacatccacaagagaaaagagagatagacatttttcgacaagaattttttcgttagcattacatatatcgtgtgagtgtttggtagagccagactagagaaggaaaatgttggtaccaagtttgcggtcatatccacaggagaaaaaagagatagccattttttgggcaagaatttttttcgttagcatttcaaatatcgtgtgagtgtttggtagagccagactagagaaggcaaatgttggtaccaagtttgcggtcaaatccccaggagaaaaaagagatagccattttttcggcaagaatttttttcgttagcatttcaaatatcgtgtgagtgtttggtagagccagactagagaaggcaaatgttggtaccaagtttgcggtcaaatccccaggagaaaaaagagatagccattttttcggcaagaatttttttcgttagcatttcaaatatcgtgtgagtgtttggtagagccagactagagaaggcaaatgttggtaccaagtttgcggtcaaatccccaggagaaaaaagagatagccattttttcggcaagaatttttttcgttagcatttcaaatatcgtgtgagtgtttggtagagccagactagagaaggcaaatgttggtaccaagtttgcggtcaaatccccaagagaaaaaagagatagccattttttcggcaagaatttttttcgttagcatttcaaatatcgtgtgagtgtttggtagagccagactagagaaggcaaatgttggtaccaagtttgcggtcaaatccccaagagaaaaaagagatagccattttttcggcaagaatttttttcgttagcatttcaaatatcgtgtgagtgtttggtagagccagactagagaaggcaaatgttggtaccaagtttgcggtcaaatccccaggagaaaaaagagacagccattttttcggcaagaatttttttcgttagcatttcaaatatcgtgtgagtggttgggagagccag

SEQ ID NO: 32102 - DNA, 1404 bp, Heterodera glycines
cagtagcaaaaacagaatttggtaagtgataaaatgccctttaaaataaaaattgacctgaacaaccaaatgacttcgctccacgactcgccacaactgacgccaaatttccaaattacgttcaaagggtgtgatcacaatattacgctaaaattgggacaaaaataccattgatattacttgatatttacaatactaacaatacgacatatcattggagcaggccatttccagaaattaaatgccaacccatcaaagctaacctcgctcagtttggccaattgtcgacgccaagcaacaaattcctcggcttccaacgcgttcagctgttctgcatcttcgtaagtgttgggccgaggacgacgcgggattcgcaacaaatgaccataatcggcgttcaatcggtcaagcgaattggccaaatccatttgttttgtggaagaaattgccacattgccattgctgaaattgtgccaagaacaaacagtatgagaagttgagaacaaaaaagggtgaatgccaacccggacaacaatttgatgtccccgcgttccgcctcaaatgtcgaattggccaactccgcgttggtgagcagttcctgcacgtccgactcgtgcgttttcgactcgagcagcggcttttgcgtggccgtatgtcccaccgattgtcttgcactccttccccgtcctgtgctgtgtgtttgtgcgcgtgctttgctgttcaacaacgccttggccagcccggcgttgaacccagtcagctcacatgttttgtgtcgtcgtttcgtcataattctggcaaacaaaaaatttaactaacaataaaatcaaaattatttaaattgtatataagcaaaaaaaaaaattttcagtacttctatgcctatttgttagggggaggatttcatggtagattttcgattttttttaaatttagtcataaaaagtgtttatgtaattttaggggccgctagtcctagtcactgatcatgaatagaattcgaaccccgaacaaaaagccaaaaattaaaactttcttattttgcgttttttcgggcgacctttacagtcccagaaaaaatcttcaatttttagagttcatattttattttccaataaatttttgatgaaacaatagaacagcttgaataaatgtgcagaacaaatcagcaaaaaagaaataagtttttcgtcgccgctaattggcaccgtctcgagggtcctcctgaacgataaaatccggcaaaggttttttctggggctgcgcctgctgcgggcccggcccgccgtcattttccgcgtcctcctcgtcctccggcgggggcggggcctcgccccccggcggcgcctcgtcccccggcggcgcctcctcctcatgttcctcttcctcctctcgcatacgcat

SEQ ID NO: 32103 - DNA, 1332 bp, Heterodera glycines
aattttcttttatatgaaaactggtgtaatattcctctttgctgagaaattataaatatttgtgctactcatttcttattatcaaatatattttattatttttataattttagatttatgttcttttgtaattcaactcaatttgtcttccttgcattatatgtttagtatttgtttgaaggcattaataaattaaatttctttttattcatattgcattgattttgaacaaagatgaattttcttggagcggacgaagttcggccgatttttgtttgctccttttggactctccgatacaaatcccccattatcaacgtcttccgattggccttttcctataattgatgaaaattggattgatatttttaacttgaataaaatgtttatttaaaaattacaattaaatttcgtagctaaatataaaaaatttgtattgcttcatacgactttaagaatgatgctttcttttctttatttgattagttagttaatttggtactttaaaattataaatttttattttattagtcattaaatgggtcatttttcttgctctcttcgtattgctcttcaactcattttgtatggttttttaatttttatatgtttcattggtaaaacaaatttgaactaatttattttcaatcttgctaaaaattgttgtgttttttgtactttaattattcttaatgtgtattagtgtttaatatatttttagctgcaaataattaatttttgtttaatttataatgttatttcactattctatttgcataactttacacccttttgtattttatgcgttgacactcctttatatttataacattttacaatttttaagcatataagcttatatttactttatatgcctctattatgtattcataaaattttctcgaattattattttgttttaatgcttgcttttattttgtttttttaatgtttaaaatattaaagttaattgttttaaatttttacatatatttaacggaggattttctatgcaacaaatgcactgatgacaaaccttaatataaatttatttataccagctaacttatgaaaattaaaatttacaatataaagtttaatttcaaatttattattttatccattaatatttacgttcattatcatcttttattattcttgggcttctagtttaaaacttttaatattataaactttatatcaccgtttaaatattgcttcagttttaaatcatgtgctgtcgaagcaaagctccatcaatttattctgcttgtttttattaaattcattttataattatttttgcctttctgcacattttcatactaggaa

SEQ ID NO: 32104 - DNA, 1150 bp, Heterodera glycines
  unsure (1)..(1150): unsure at all n locations
tgttgatancatttggaaatgtcgagcccgcctagcgccttttaagaacacaaaannngnnngcatnagccaccaaacaatctttttatgacgcgccgaangaaaangcacaaaaanngggcaccggaaaaacggcanancggcaggggccagcanaataaagtaaaccaaaatgtaaggaaatttaaattggtcatgagagatgtttagttttttatttgtcccatcctttttctgggaaaaaacttttcgagaaaagctgaaaaattttccacttgcatcagaagcagactcaaattcttcaacacacaatataaaaatattacgcaagaacttatttttacatcctttttagaaatgctacataaatttttattgtaaatagttacaaacaaactttttttcactgccaatttctaccagttgccaaacaaaaaggcgatagttaagcattgagatataaaaaaatcgtctagaataattatctcaacaatttgtcgggaaagctgaataaatttctgttgcaataggcatattggcacaagacataaatgtagagcaggcacaaaatagaggaaataccaaagattaaaaaattcttgtttatgccccactctgctttggctggccatacctcgccagagagtggagatagaccctttgttgatacatttggaaatgtcgagcccgcatagcgcattcgaataacacaaaatttgtttgcatttgccaccaaacaatccgcttatgacgcgccgaatgaaaattcacaaaaatttggcaccggaaaaactgcattttttcatgggccagcataataaagtaaacccaaaatgtaaggaaatttaaattggtcatgagagatgtttagttttttatttgtcccatcctttttctgggaaaaaacttttcgagaaaagctgaaaaattttccacttgcatcagaagcagactcaaattcttcaacacacaatataaaaatattacgcaagaacttatttttacatcctttttagaaatgctacataaatttttattgtaaatagttacaaacaaactttttttcactgccaatttctaccagttgccaaacaaaaaggcgatagttaagcattgagatataaaaaaatcgtctaaaataaattatctc

SEQ ID NO: 32105 - DNA, 1465 bp, Heterodera glycines
  unsure (1)..(1465): unsure at all n locations
gggaaaattctgacccaaactattaattgaaacnccaatcaaaactnggaaaaattgaagtcaaaaaattattcgaatttctccaattttgtttccataatttccgaatgttattcggtatcataatgccaaaccaaaacgaattcgttttaaaatattcttttctggacttgacttggtttctcaatatcgaagcttttttctccgcaatttctaaaacgcttataccaaaccctagatttttggttccgatgggtttcagaaaaaatcccgtgtggtgaaaacatattacacatttcacttcataactttttgagttctgcacggatcgagaccgggataagaccattggaaagagcagctcgagctctacaagaagctatggaaagaaaaaatcgacatttcagggactttttcagaaatcatatttaattccccaatggggccccattttgggtccccagccacagacccatgcttctcccaattgtggcgaaaacaatatttcacatttcacttcataactttttgagttcggcagggatcgagacagggataagaccattggaaagaacagctcgagctttacaagaagctatggaaagaaaaaatcgacatttcagggactttttcagaaatcatgtttaattccccaatggggccccattttgggtcctcatccacagccccatgcttctcccaattttaagtcttggatttgtcaaataaattaacgatttcgaattaataataaaaaattctattataaattttttttgtagaggggaaaattctgaaccaaactactatttgaaaacccaatcaaaactgggaaaaatttgaagtcaaaaaattattcgaatttctccaattttgtttccataatttccgaatgttattcggtatcataatgccaaaccaaaacgaattcgttttaaaatattcttttctggacttgacttggtttctcaatatcgaagcttttttctccgcaatttctaaaacgcttataccaaaccctagatttttggttccgatgggtttcagaaaaaatcccgtgtggtgaaaacatatttcacatttcacttcataactttttgagttcgtcacggatcgagaccgggataagaccattggaaagagcagctcgagctctacaagaagctatggaaagaaaaaatcgacatttcagggactttttcagaaatcatatttaattccccaatggggccccattttgggtcctcagccacagccccatgcttctcccaattttaagtcttggatttgtcaaataaattaacgatttcgaattaataataaaaaattctattataattttttttttgtagagggaaaaattctgaaccaaactactattttaaaacccaatcaaaactgggaaaaaatttgaagtcaaaaaattattcgaatttctcccaattttgtttcccataatttccga

SEQ ID NO: 32106 - DNA, 1354 bp, Heterodera glycines
ttagccccatttttaaactgtattttctgtcccccctctaaagtttcgacgtttcttgactttgtccgttcctcttgtcctccgcgctgacttttcgcattcgattggcagccccattcagccgaaacaatggctttgtgccgccttcagcgatgctcggtggatgcgacaaaataaattggtgcttaatgccatccacggagatgccaaaggccgttttttggacggagagcgtagaacgacgaaattttgtggaggaatttgtaacgggttggcactgaaatggaaaggaatgattggcaaaagctgttttggctttggcctactgttccacgatgaatcggcatgccagcggcgtaactgcgcctgcgttgtgccgttactcggttggccgtgccaattatgcccttgtcgtcggtgcgactttggtgtgcacaggatgaactgcagttttggaagagtacgccatgacgaaggaagcgtcatttacttgtacaaattggcatctgtccaagtgggccaaaaggcattgcccgtcggcggattggtgccacggcggaaaggcgaaagggcacaaaaatggcactttaaaatgcggagaaacatttcgcggaagcgtttgttgaagattgtgtagatgattgggttcaccttgagggggaagaaagtgtggtcaaatgccgcgttatttatttgcattttacggtggacgagcagtagccgaaccaaagggcacagagcgaagcccaactcggaaaaacgcactgctgcaacccgcagaggcccacaacgatgttgaggacgaagaacggagtccaacagatgaaaaaggaagagaacacgacgatgagcacctcaaaggggccgactcattgccagcctaattaccccctaatactcaccctcgtcgccttttgttccgatgccaattccgccgtccgttttgccctcccccggcggactctgcgccggcggcgctgccgcgcgttcgccgtttgcgaatcgccgctgatacttccggatgattttcgcaataaacttttggaccaaagagacgagccgaaaagcgaactaattaagaagaaggcattttgttggtctgatcagtgagtaataataatctgatcactttttacctttttctctgtactttttgctgattttttttttgcaaaaattcgtcgcattcattcgatgaactttttgagaccaaatgacgagaagcaccgttatttttactggacaaattatcctaaatttgttgactattataattccgctttttttaaattatttgtgcctcttttctcattttttcatcggttgcgactgggaaaaatttgatgatcggtga

SEQ ID NO: 32107 - DNA, 1790 bp, Heterodera glycines
  unsure (1)..(1790): unsure at all n locations
tctttctctctctctctctcctcttttctatctctctcctcttctctcccttctctcctctctttctttctccctcttctcttttttctctctctctcttcctctctctcctcgttttctctctctctcttcctctctctccttttttctttctctctctctctctcctcttctctccctcctcttttctatctctctcctcttctctccctcctcttctctctctctcccttctctcctctctttctttctccctcttctctttttctctcttcctttctctcctcttctctctctctctcctctttctatctctctccttttttctttctctctcccccctctctctcgcttctcttatttttatctctctctttctcttatttgtctctgtctcattcactcccatactttctctcttttttcctgtttctctaatcatttctctctcctttactctccgctttttgttcctaactgtcttcatctctctctctccttcactctttcttacaatacaacttatctctattatctctgttttttcacttcatttcttccatccaaataaaaacaatcgcgtcaaactttatttaaattttttgtttactttgtgacatacattacgaaaattaactgcataagtgacccaaaagtccttagcgaaatattcgtgagtacatcttataggtatgtcagcctttctggctgttttgttgttttcgatttttccaataatgaagaaatatgtgctcgctcataacacaaaaaagacgtaaacaacaaacagaaaagaaaaaaagactgaactattttccaaaaggaattcatttcgataaattgtttacttttaaatgtattagttacagcgcaaaattaatatatagatggcaaaatcgtttattttggtgaaaatctgttaactaatttcactcagtttttcaaaagttttcccggcgaagtttttggaaaaagagcactgcaaaaatgaacgttcttaatgagttttcttcatatggagtaaaattcaccaaaatgatgatttgaccctatatgatgatttttttttgtcggccaaaagctgattttgaaaatttaagttcggagccctgcatatgctcttgtcaacgatgtgaaagaattgtgaaatttgtgactactcatttttggaaccgatctctgcttgggcttatttcaatttgcctcatattactgatgagacatcatatcactgaccagaccaaatcattttatcaaaatgaaatataagacatcagccaaattccgtctcagttaaatttaaatttcttttttccatcaatttcctgacgtcttaatttgctgtggtgtcagaaatatttgcaaatagaaacagcattatgaaaaatatgacgtcaaatcagtgattgatcataatgttttcgtcacagacggcaatttctgtagatggatatcaaaggaaaaagacaaatcgcttttaaatgctttatgcatagatatatgacgtgtaagcattttaatctgtacggcacttccaaggggggggggggctattggcagtataatctaaaaggtattttttgtttgtttgaattttggtatttaaaatttattaatgaatttattgtcaactcttcaatttaattattcaaatttgtatttctaagttctttttttcaaaaacagaaaagaaatatttggaanaacattgtacactagagcccgcccggtgcgggactggatcccgcgcgggattttgcgggatccaagtcatcaaagtcgcatttttt

SEQ ID NO: 32108 - DNA, 1435 bp, Heterodera glycines
ttttttaatttttttccatgccattccctaatttttctccttggcacagaaatggaaggcggtgacacggtgtctccgctggacaagtgctttcgccgtgcccgttacattcgggatcaggcattggcattctcagcctcggcagtgttcgctgaccccaaccaactctttgctgccgattgtgaggaggaggaagaggagaaggaataaggggagagcgagccgagtaacccaccaataattcaccacacacatattttaaacacatatttttttttctgaaattttgtgtcatttattatacaagaaaggaaaatacatcatatacccattatttttgtcgaatttataaatttcaactagggctggtcaataaacattccagaaaaatggctatctatttttttgagaaattttctatgcaacaaacgctctcgaacatgaaacgaagtgcggtgcgccgtggccattttatttttcaaataatttttaaatttaatagatattccagaaaaatggctatctatttttttgagaaattttctatgcaacaaacgctctcgaacatgaaacgaagtgcggtgcgccgtggccattttatttttcaaataatttttaaatttaattgatattccagaaaaatggctatctctttttttgagaaattttctatgcaacaaacgctctcgaacatgaaacgaagtgcggtgcgccgtggccattttatttttcaaataatttttaaatttaatagatattccagaaaaatggctatctctttttttgagaaattttctatgcaacaaacgctctcgaacatgaaacgaagtgcggtgcgccgtggccattttatttttcaaataatttttaaatttaatagatattccagaaaaatggctatctatttttttgagaaattttctatgcaacaaacgctctcgaacatgaaacgaagtgcggtgcgccgtggccattttatttttcaaataatttttaaatttaatagatattccagaaaaatggctatctatttttttgagaaattttctatgcaacaaacgctctcgaacatgaaacgaagtgcggtgcgccgtggccattttatttttcaaataatttttaaatttaatacatattccagaaaaatggctctctttttttgagaaattttctatgcaacaaacgctctcgaacatgaaacgaagtgcggtgcgccgtggccattttatttttcaaataatttttaaaattaatagatattccagaaaaatggctatctatttttttgagaattttctatgcaacaaacgctctcggacatgaaacgaagtgcggtgcgccgtggccattttattttcaataatttttaaatttaatagatatcccagaaaatggctatttatttttttgaaaattttctatgcaacaaacgctc

SEQ ID NO: 32109 - DNA, 1597 bp, Heterodera glycines
caaagagaaaaagaatagacaacccgaatgttattgattttatttaaaaaggacagtaagggatgagagaagatacagtaagattcagggtaactatcggtgtggagatattgccgagtatggaccacttcagtctcaaaaatgattaaacacaaattatggcgattgtactattttcgatatttcaacatctttttggaaaatttattaactgaaatgaataagaaaaaccaaaaatacacccgccccctaagaatcgaccaaacttaaaaaatcattctcacattatcaaagcggcaccaattcctatcgcatccttccattgttggtacccgtcctttggcactaaacaattaattaataatcaagcaattaaaactagggttacacgagtccggaacccgaccgggtctcagacccggatgcccggttttttcaagacccgacctgaactcggtataatttaatttacgaatacacaaattataattttattaatatgtatattataaaaattataatttattaatatatatagcttataaaaatgtattaataatttaatttacgaatacaaaattataattttattaatatgtatattataaaaatttattataatttaatttacgaatacaaaattataattttattaatatgtatattataaaaattataattttattaatatatatagcttataaaaatttattaataatttaatttacaaatacaaattataagaccgcccctgctggtcccgaatatttttcatgcttttttaaaagtataagcatttcttaatgaaaaaatggaatttttttttggattcttttaggacccgataccctggcctggaaatacccggacccggcttttctggacacggcttttctggacccggcaatacccggacccggcttttctggacccggctactatccggacccggcaatacccggagccggcttttctggacccggcaatacccggacccgtgtaaacctacttaaaacatttgataaactacactattatggtaaaattattacgagctctttcgtcgaatgtgattttgatcggggattcggtccatttttggcgtgcgttgtattgtcgttttttccgctgactttctatttcttcgggcttaagcccacaaactgtgaattttaatttggatttgtaattaatttaattacttaattaattaattatttgttaaatttaactcactctccctcaatctgttgtactgttctcgcagcgtttgtttgtcacatgccatgtccccatcgcatattaatgtttcggatggctttttccatggcatttctggcggaagtggggcccagtctggctttttgaaaatctgaaattatttttaaatattattttaaatttttattttaccgcattgttttcgctttcgttctttccacagtttgccaatgcctcaattttcaacaacaaatttctgatcggcacgcaatctgcgccgtattcatcacatgggtctagactgtcttaaaaagtgccgaaattaattttttaaaaattaaatttattttttactgactgaatttgttcgggtcat

SEQ ID NO: 32110 - DNA, 926 bp, Heterodera glycines
caaagctctacaataagtctgctggccaccccccgcccccactggccctggcgcggtattcacttggtactgaagtctattttttgagcacgcttcagttgccattttttgcaggccaggggtttgctcaaaaaaaattttaaaaaataccagcatttagaggacactttggcggagtgccctcacagcgggcactttttgattcgagttttacaaaaaaagttaggggccttcaaatgcaagcaaaagtgagaaattagccgccgggactcagttggccaccggaccggaaaacccttatttttcccggatgctcctcaaaaagttgtaagacccttccactactttcagggcgctcccggccttcggccgggagaaaatggttttagcaacgaaactccttgtcaatataacatatatagtaactagcgggtgcgtgaaccgtcggctatttagctgggaaaaagcgcttcgcgctttcggagcttcgctacctaggctgtaaagcgattcaaattgatcgaattggttggagatttttttttgaatttttaaaaaactatcgggttgtgaaaagatttggaatttttaaaaattattagcgatttttaggccgcttcgcggcctcgaacgggcacttcgcgcccgtttctaatttttgttatgcttttcggccgcttcgcgccgttttttaaattgtgctgagtcggacgggcgcttcgcgcccgttattaaattttgatggactcagaaggacgcttcgcgcccttttttgtggcctttttaggccgatttgcggcctcgaacgggcgcttcgcgcccgtttcagatttttgttgtgcttttcggccgcttcgcggccgttttttaaattttagaacagatacaatagtgattagaagaggtacaacaggtattagaagagg

SEQ ID NO: 32111 - DNA, 974 bp, Heterodera glycines
tcactcattggacgcgtaaactggaatagagcccttgttaggtaaaacgaaaaaccctgaatccttaaaaaaaattcacgacaaaaaaatgatttcagaatgatgaaaaatttcttactttttttggtaaattttttttttgtttaaaaagtcatttttcagtgaatgtttgcctagtcaggaaacgggagagagaaatgcggtcgggttgggtttggcggtcacttagtcaatagtcgatggacggagttatttggagacggaaggacggattggggagggatggaacatgaggaagaaatggggaataagacaagatgaatttttgcactgcaaatttttccatttttattcaataggtatttttgaatttttcaattcataaatatttacgggccaggacgttttcgcgtgagggccgttttcgcgtggtagaataagctagctatttttgcccacccttgcgatttttgtccaagcgatttcgaaactgcttaataggcttgggcactattgagtagtaggcttaaacttttgagtatagctctgctcattctgaaccaaatccagaaccgatgacaccattagaaagagctccttttctaggttttaatagattaagctagctatttttgcccacccttagcgatttttgcccaaccgatttcgaaactgcttaataggcttgggcactattgagtagtaggcttaaacttttgagtatagctctgctcattctgaaccaaatccagaaccgatgacaccattagaaagagctccttttctcggttttaatagattaagctagctatttttgcccacccttagcgatttttgcccaaccgatttcgaagtatatgggggtttgtgggtgtgctgaacacgaatttggcatccattttgggtcttgttcgacttttagaccaaaagtctaaaagtcttacaatggtcgaacagggaaaaaatggatgcca

SEQ ID NO: 32112 - DNA, 1281 bp, Heterodera glycines
ctcgacgagaaatgcacgaaaaacacatttttagcccttaaattcttcgttttaacgccactattcatcactaggaatcactattttggagcttcgccactaaaaaaaactattttggaagttggccactaaaataattttttgccactattttggcgtttcgtcattatttttgccactattttggcatttttggaaaatttcccaaaaaatgcaataaaaacgaaaaatacaccccaagaatcgacctaaaaattttcaaaaatacacccctaagaattggaaaattttcacaaaaattcttccccaaattttttttttcttgttcaatatttgctaagaaaatatttttgtaactgcaatcagtgaataaaatctttttccttaattttaaattattttcaaattaaaaaacagcctatttaaaaaattacacccctaaatttggaactttttcgccactatttttgccactattttgccatttttttgtcactatttagttaattatttggggattttttatcactaaaaatccgggccctagtggaaagtcaggagaaagtcagcctctgaattttaaatttaactgttttttaaatgttttgcgccaaaagtgacaacttttgcctgcgcccatatttcacgagttgaacaccgagaatggtgctctcgaacatgatactcatttaaaatctgaaccacgagcctaagttctaattaaattataaatttcaattgcgtcttaagaaaaacctagtcaaattgagaagaaaacgcagtgggcaaatcgatgcatgagagagagagagcgaaagagagagagagacaaagagtcagagatacagagagagagagagagagagcgaaagagagagagagacaaagagtcagagataaagagatagagagagcgaagagagagagagagagaaagagtcagagataaagagagagagagagcgaagagagagagaaagagtcagagataaagagagagagagcgaagagagagagagaaagaatcagagataaagagagagagagagcgaagagagagagaaagagtcagagataaagagagagagagcgaagagagagagagagaaagaatcagagataaagagagagagagagcgaagagagagagaaagagtcagagataaagagagagagagcgaagagagagagagagaaagaatcagagataaagagagagagagagcgaagagagagagaaagagtcagagataaagagagagagagcgaagagagagagaa

SEQ ID NO: 32113 - DNA, 969 bp, Heterodera glycines
gctccgctttcaattcgttttgtgtatatccactttcggctcattgacccgtcatatcgtctactggtattattatgcgctgtacaacaatccaccaattgtcctagaattctgaataaagtgtgtcctaatttattagtatttatttgtttttttcgtgattttgtcaatttattttgaataccgtgccattgataatgaatggtaaaacatcgtctttttccattaagttttgatcggcaaatattgtgcagggttgacttaatacaatcatcagtcataatggacacgaagcaaaaggcgaagcagttgatgaacgaattgggggagatcgacgccctaattaaacagcacggggccgttctcgcggaggttgacacaatttatgagggttgggagattattcatcagcaaggacgtatccagacccttggcttcgtgtggtggggtggagaaattgctttttagggtgtatttctttgggctttttaatttgttattgaatgccacttttaaagaatcgtattggtatgagcgagccgttggtggatgctaatgggtttccgcgagatgacgtggacgtccgcgctgtgcgaattgcgcgtcatgaaattaattgtaagtgttcgaaaacgctctttcgcgttttgttcactggggtttctcccaattcatgtgatatgttgcaacccgttttaaatttcactagattgatcaggacggaaccctgtcaaagtcaaaaaagttcgtatccaggaggaaattgttgaaaaacctttttggaatcaaaatcttaggattgatttttttgttttgttttttttttgaaaaatccttggtcctgtatacgatcctggtacttaaaacaaacggaaccagcagtccagttactctattattgatctctctcgaaaatctggcccggttttcaaactttaccacgtgagtatttcctggagaaaaagaaaa

SEQ ID NO: 32114 - DNA, 1389 bp, Heterodera glycines
  unsure (1)..(1389): unsure at all n locations
gatgaaagtgncaatgcgtcggatggccaagcggtgaccaaatggctgttgacgcctcgtccggatggtctgccgaaggagcttatatgccctgttaattcaacggaagagcaatggtcgtcaacggtggaacactttaaagcggtgattatcccaatttaattgtttttttccatgattttttgtcccatttttaggcattttccaatgcttcttctccggttacttttcgcattcattttctgccgttttctccgcttgactcggttgtgccatttgatcagatcaacgaagtgactggggagaaattgacactggaacaaattgagataaatcatttttggctcagccgttgtccaattggatggaatgagcgaaattttgaaaatgtgagtgcggaaatgtatgttcgaccgaacccaattcatattcggatcagagacgtcggattcgacaatgggtgaacaattttttttaaaacaaaaatgcacggttaatggacaaaattgtgatacaaaaaccatgtatggttaggttgattggactcataaaatgcaattgaactcataaaaatttaatttcttataatttgcaatggaatgaatcatcgttttttcagtcttctcgacaacgcttctcccgggtctagtgatcagcagaagaaatgaattaatcaattaattgatgcgattatgatgagcgaaatgatgttggcactgtgccatttcaatattgtattgtgcataatttgtttgtttgtatttgacctttgcttgctcgcaaatgcgtccatttccattgtatttatgtgcatttaattaattaattgtgagtaattgttgataaaatggctaacaataaaacggtaaaaacctgtggatattcgcgatacaacaataaatgccatggcacaacatttttttgctgtccttaggctgtaaactttttagtcaaaattacgatcgtggtgtcacacaccccaccccttcgatgcctttgaatttccgtgttattttaattttttataataatttcaattttttggatttcaaaaattgctgttgatcaaagtcacagcacctcctgtggttattgttgttgttgttttttgttgctgacagaattccattttcatgactataaaaatgtttgttttttctagggttgcgaccccgccccgaaccccgacatttttggccattttcggggttaaccccgacccccgacgcttccaaccccgaccccgaccctaaccccgagtcggggtcggggttaaatatacacccctcaaataagaatgacatttttgtgggggaaaggcaaaaaatttatacaaaatttgaattgggaggaccaatttgccaaattttattaaataaagtaaatttg

SEQ ID NO: 32115 - DNA, 1226 bp, Heterodera glycines
  unsure (1)..(1226): unsure at all n locations
gtttttgtggtcttntgaaaaattaggtatattnggcaaaatgttcgaacttttcttcaaatcttaaacattttttcgtaaaatcctcattttgcaataaattttaattgatttcctttagaaaattttatacaaaaaaataaatgtcatcaaaacgaaaatttcttctttcttacgaaaaagaatttaattgagtaattatgcgggccaaaaataatgcggattttcattgaacttacttaaaaaaagtagctaaagcaaaaatattccataattataatttagccgaacctttttgccgaatttaataattcaaattaaaatattttaatttattattagaaaataaagagtcaaaagctacataaattaaattaaaatactaaaaacgcaaacatataatataaactcaaataaattatttacactccattaatatagaaggtttagaattatataaataaatattaaatatttttaaaataaaattagaaggaattttcgtaccaaattatataattattatcgtaattttattttttatcaaatcgacattcaagcaaaatgcatttaattcaaaaaaaaaatactcaaaaatacacactaagtaataacccgaaaattttcagaaaatacacccttaaaaattgaaaaattttctaaaacaaaattgaattttttttcttgataaaatttttaatctgaatttatttaaaaaaaatattaaattctataacctgcaaaaaaataaagaacatttattggcaggatacttacatcaataaaagaaataataaaaagaaaattcaaagaatctagataagtaatggaatattaagcacgcaaaatttttgcaaaagttgccaaaaaaatttataaaaaattaagaaaacaattgctaaaatatccaatgtgaactagagggtgctcgagacaagtaatataaacctaattaatttgatataatttatcttaatcttgaatttaaaaataaaatttaaaatcacaaatttgatggcagagttacaattaacaaaataaaagtttatttaaaaaaacatcaaatgggctttagtcaataaaccatcaaaagaaaatattttttgatatatctttgctcaaaagcaaccaaattttaaaatattgataaattcgatagccctatgtttgttcaattctcctgaaatgtatcaaaaaaaatcgataagtttcaaaaaattatgacc

SEQ ID NO: 32116 - DNA, 442 bp, Heterodera glycines
  unsure (1)..(442): unsure at all n locations
aaaataaaatagtgaagctttaaaaattaataaaaaattttaaattcagaattactaggagttagcatcatagcagtgcttttccttgtctttttgatgctctcgcaaaatctggttcgcttctgaccagtttataaaaaaaaagttaagcctaaaatttttcgcatatttaaaaagcaattaaaaatttttagattttttattcatctccctttttgatagtgaaagcatctgagtgcctaaaataacttgcaaataaaatttggtgcgtttcagagcagtttctgaaaaaaatatttatgaattaattatgcaaaaaaaataanatagtgaagctttanaaattaataataattttcaattcagaattactggangtagcatcatagcagtgcttttcttgtcttttgatgccctcgcaaatctggntcgcttctgatca

SEQ ID NO: 32117 - DNA, 947 bp, Heterodera glycines
  unsure (1)..(947): unsure at all n locations
attcggatcacatnaggagcattaaaaatttgttcgaattttggtcgccattagattagaaattaaaaatttttcctatttcatggttatatttgtgtttagggttaggcaaggggctatataaatgtcgtattcgtattcagcgaccccgaaaaccctaaaatagacccattttccggctttttatgagctttttagacttttggacaattcgtgggtttttactcttttggacaattcgtggcttggacaaaacgtggcttggacaattcgtggcttggacaattcgtggcttggacaatttgtgggtcagcggtattggggttatataaaaaaatagtgaaaatgaaaaaatttcattaataatgattagccaaagaaaatttcattaaaaaataattgagatttggcttgaaatagacgatatacacttaaatttcattaaattaagtttttctttgatttattaaatatccttcatattttatggtcattttgtcactatcgcccccattcgcgctgttataagtagggctgggaattatatgcacatgcatttttttttcctgaactatgggaggcatgaaatatacgaaaaacatatttttagcttgttttgaagcttttacaacttatttccatatgcatattttgcatatttgtgcatatttcgcgatttatgtgcatatttgcatatttgtgcatattttggcatttcgtgcatattttatgtgcatatttgagtattttttcaacaaatcttctattaaaacggtcccctctattaaagcggccccttgggcctctaatgaccgaaaaagtttcaaaaagtatcattttttgnggcattttctaataaaaaatttaaaaatttatgccaaaaataagtcagaaaatagaanattttccctttttacccnattntctttcaataaattaattttact

SEQ ID NO: 32118 - DNA, 1706 bp, Heterodera glycines
  unsure (1)..(1706): unsure at all n locations
gaaatgttattaataatcaatttcctacgcccgnttgtcctctttatgttcgtgtggtctcaaattggcatcgaatgtggtctaattcagtcattgtcagcacattcaaagggaaagagagaatattcatttgccactgaaataaagcgtaaatttattaaataattaaaaggttattaattatgcatttaatggcaatttaatttcaagagagcgaaattagtgataaaatactcaaaaaattgaaaaagcaatgcgcaaaggtgaaaaagatgaataaatgcgcaaaggcaaaattcaaacacaacagcacgaagtacacatgcgcatgggattacgtacggacatcgccaaggggagggatcggctgctgttatccgtccgtggaaagctgcgaaaatctgcgcagcatggggtaaggtaattagcaaaaaggcattggcacaattagcgaaagggcattggaatcctcgctgggggaaacgtaattaattgattacggattacgcacctttaaacctggacctccaaaaattcgaatttaaccaactgagctaccgattatgctcattttcctcaattgggcactatctttgaagggaaaacacagcgaaaatttcgacttttgaggccccataacttttttttttgctatggaacttaatattaaaaattcacaatagaagtctactttttgctgtttttgacgccttttgttttccaattttttaagaagcatttcttaattatgcacttattagacctctgattgattccatttaataaatttattttatttttgttggtttttccttttcttttaggcaattcgaaatgctttatctttttttaaggcatccaatttaagtttttgggccaaaatcatgcagcccgtacccattctcgaacgatcggacacggtggtttggccagaacgcttttggtcctcaaccccgcgacagttgtcgttcagggcctgacaggataaattttaatccgatttcctcattattggctaaatttgtaccaaacatttatttccatttcacttttctattgattgttgcatttttaatggattaaaatctgattttttttttaatttgaagtgtcatttaagcatcagtgcgttggtaagaggagcagtgactgaactgaaaattgagtccaaccgttggaaaatgtaattccaattacatattcaatttgtgtatatgatttatttagtttgttacttgttattttggaattaataattattattcccttttggttgattggttagcctactaaaaatggactgattaaaactgatcaacatttcctccgctttttctgctgatcggaatgtgactgaatggatggatgggttgggatgttcgtccccccctccctgctgtccgtccacccgttcattctttttttctacgctttgctcagctgccaaatgaaacattcccttcccccccaccccaaaagtactgcttcaattcgtgctttcccttttcctgaacatgttctcctcctcttctgcttttgcttcttctttggctgttcgtctcgacggcgtttcattgcctttaaatttatttgatttgtccgtcttccgaattggggtcgtcgctgacaaatgattgtggcgcaaaccgaaaatgaattgctgcaacaaaaatgcactcgctcatccgtcggaattttccggttta

SEQ ID NO: 32119 - DNA, 1214 bp, Heterodera glycines
atttaatggagcgaaaatttgttcatttcatggcaatgattccattttaggagaaacactttaaaaaaacagtcattcaagaagaaatgatctggaatcataacagggccattcaacaaatcgcttttggcaattacttcaaattggccattttgccatctttggccaattcgaatggcatttaccgcgtggtcattaattgtgccggcagcagagggctagccgaattcacttcgttcacccaatccgaaatggtggtggtaatgaacgcggaggagcccaaatgcaacgagaacaaattcgacatttccatttggaaaatgaaaaaggagcaaataaaaaataaggcaacataaaagggaacaattaaaatatttaattaataatgaatgattaaggctgggatttttatgtttttacatcagtgatggcgagagaagcccaaaaatagcattttctccgaacaattttttgatttaaagcaacttttaaaacataaaaacgcatagttcggggtttgtcatgtattttacacatattttggcatttttgagcaaaatttgtaagaagaaaaaacatttgtattttttattcgaaataccattgtcccttaccgaaggaaaaagcactatatctaggcgtccaagtccatttagttcaaacagaggccaagatatcccatgaatttcattcagaaactccatgggcacttggggcggtccggtacaactgggcaccaccgactggacgctgactaactgggcaaccataagagcaatccataactagcttaatcaccatttacactaaagctttcatcttcaaaatcgagtgacaaagactgcaaggaaaaggtcagccaaaccgtatgaattgcggttatggcgcccagttggtcgcgctcagttagtcagcgcccagttggatcggcgccgatggcgtctagttagtggcgctcagttacccgcccaccgcacttggggttcatttttaggtattggcgtggcattgtgtgttactaaactaaaacgggtttactactagagtagagcgggaccgggaattttgagcaaaaccgggaccgggacttgccgggaccagagaagccgggaccgggacctcgatttttgtccgggaccgggaacctggaccaaccgggaaattttaaaaattcaaaaaatttaaaaaaatttaaatttatttaaagtaaaaat

SEQ ID NO: 32120 - DNA, 1065 bp, Heterodera glycines
  unsure (1)..(1065): unsure at all n locations
acgactttctccgctgagacacccgacgaataaatttaggtcaccaaaattagtaaaaatcacttgggttaaattnggaagaagctctcaaaatactttggaccgctcgaattgataattaattactttgcacaaaattgactgttggctattgattttttattccgcattttatgcttgttttcgggatttcgaaaaatccttatgacaaggcccctggtttttttattaacaaaaaattctagaggttggttgttcgcgccttatttccttcacacaattttttccctgccctcaaggcattcattggtgagggttttcgctgtccgtttaattttaagtcttcaaattggaggaaatgctttaaaatggtagagaccaaattaattgtttggaatcatttaacgaggcagaaaaaataattttttgatttggcgaaattgacttgggttcaatacactgtgttaatttaaaataaagacaccctgttttttgggagtttgaccacttcccatgaaccgatcgagctgaatttttaactgtacgtagcaattctgaaaatattaagattctaaaaaggagaaggcgaaatgacgatggaaaaaaattttatgaattttttcccgaaaaaggggtgttaatttaaaatagagacacttgataaaaacgaatcaaatctcaataactaccaaaaagaaactgataaaataagctaaataagaaagaacaaatcttttttcacatttctatttcttttgcagacagaaatctgtcttttaggcggagttgtgttgaattttccaagttttccggagaaattaagggccataaggcttaaatcacctcaaacatgtgacccactgaattaaactggaagcacttaacactaaaataacttatagacctcccttaagcattttctattcactttatgtaagaaaaaattcattaaacacaaattttttgtgggcgaaaaaatgtaaaaatctgggtaaattcgaaaaaaaaaaattctagggggttgggaaaaattttccgtataagatgattatgacgaacagaaag

SEQ ID NO: 32121 - DNA, 964 bp, Heterodera glycines
ggtctcgaaaacctttggaaacatgttttcatgacttttgaaaacaaaaaaatttctctaaaaaatgggggcgaccatctttacctatttaccaattggccaatccgtgcaaatcatccctggactttggcatggattcttttaactgctctatccattttataaaagcttgaaatgagaaaaaaaattgctgacaaaggtcaaaaaggtcgttcttggtcctcaattcccatggcttttcaatcaatgcaaaatccttttttgtttgtgtgttagaatttgagaataaatggaatccagctttatcagtcccaaaatttgaacagttaaggctcatataagttccgtctctgtcaattgcgatgggtctgtcattgcctttgccactaatacgccgaatggaccgtttgtcgacatttttgacattgttacctttacgccgactgttcccaatcaaaaggttaattgctccgataatcggaccaaattctaatagcccttacaattttttagttgtttccgatcgcgaccattcgcttgtcaagcgaaaacagttcgaaatttgttgaaatgcagtggaacccggtggagcccgagctgttcgtggctttggccagcgacaatactctgaacacattcaaatattctttgcaggcaaagccaatgcttaatagggcattcgttcgttaattgtttcgtctgtcatttcagatgggctcttccttttctctgcttggttcgctgaatgtctgtgcgacttgtctctgttggagtccgaagggaaagcaattggccattggcgatgcaagcggaagggtccaccaactgaagcccgacctttcctcggttcgcgttgttgacccaccagcgcaaattcccattttcggtgtttattggtgttttctttgtcattgcctaattaattcgtttgcttttcatgtgcctccttctaatttcgccctgt

SEQ ID NO: 32122 - DNA, 1191 bp, Heterodera glycines
  unsure (1)..(1191): unsure at all n locations
ttgaattttcactaaaaagttaagcctaaacattttgctcttgtttaaaaaggaattaaaaatttaattcatcttcctttttgatagaaaaagcatcaggagccttatttaacttgtaaatagaatttggtgcgtttcagagcattttctgaaaaaatattcatgaattaattttgcaaaaataaataaatattgaaactttaaaaattcttagaaaatttaaattcataggtactactgctaaatcaacgcagagacgcctttccttgacctttttaggcccatgcaaaacctggtacgcttctgagcactactcgaaaaatgagtgattgaattttcactaaaaagttaagcctaaacattttggcctgtttaaaaaggaattaaaaatttaattcatcttcctttttgatagaaaaagcatcagagagccttattaacttgtaaatagaatttggtgcgtttcagagcattttctgaaaaaatattcatgaattaattttgcaaaaataaataaatattgaaactttaaaaattcttagaaaatttaaattcataggtactactgctaaatcaacgcagagacgcctttccttgacctttttaggcccatgcaaaacctggtacacttctgagcactactcgaaaaatgagtgattgaattttcactaaaaagttaagcctaaacattttggcctgtttaaaaaggaattaaaaatttaattcatcttcctttttgatagaaaaagcatcaggagccttatttaacttgtaaatagaatttggtgcgtttcagagcattttctgaaaaaatattcatgaattaattttgcaaaaataaataaatattgaaactttaaaaattcttagaaaatttaaattcataggtactactgctaaatcaacgcagagacgcctttccttgacctttttaggcccatgcaaaacctggtacgcttctgagcactactcgaaaaatgagtgattgaattttcactaaaaagttaagcctaaacattttggcctgtttaaaaaggaattaaaaatttaattcatcttcctttttgatagaaaaagcatcagagagccttattaacttnngtaatagaatttggtgcgtttcagagcattttctgaaaaaatattcatgaattaanttttgcaaaaataaataaatattgaaactttaaa

SEQ ID NO: 32123 - DNA, 1035 bp, Heterodera glycines
ttttctatcaaagggagatgataaatttttaaaatttttaattctttttaaacaggccaaaaagtttaggcttatatttaaaaagtttcatcgaacctagcgcactaaaatcgatataatctctccaaattttgcaggccttctccattgtaaaggactaacttaacctgaaaaaatgccaacgcttgttgtttttaaaatttttcgaaattctgactttttcattaattatttattattttgcaaaattaattcataaatattttttagaacgtgctctgaaactcaccaaatgttaattaaaagttaaataaggctctctgatgctttttctatcaaaagggagatgaataaatattttaaaaatttttaattcctttttaaacaggccaaaaagtttaggcttatattttaaaaagtttcatcgaacctagcgcactaaaatcgatataatctctccaaattttgcaggccttctccattgtaaaggactaacttaacctgaaaaaatgccaacgcttgttgtttttaaaatttttcgaaattctgactttttcattaattatttattattttgcaaaattaattcataaatattttttagaacgtgctctgaaacgcaccaaatgttaattaaaagttaaataaggctctctgatgctttcactatcaaaaagggagatgaataaatattttaaaaatttttaattcctttttaaacaggccaaaaagtttaggcttatattttaaaaagtttcatcgaacctagcgcactaaaatcgatataatctctccaaattttgcaggccttctccattgtaaaggactaacttaacctgaaaaaatgccaacgcttgttgtttttaaaatttttcgaaattctgactttttcattaattatttattattttgcaaaattaattcataaatattttttagaacgtgctctgaaacgcaccaaatgttaattaaaagttaaataaggctctctgatgcttttactatcaaaaagggagatgaataaaaaatctaaaa

SEQ ID NO: 32124 - DNA, 1267 bp, Heterodera glycines
acaatgcacacattgtaaaggagaggaacggggagggggagggcaggaacgaaagtgatcagctgatcagtaaagagggaaagccgaaaaaaggaaaataattagaaattctgatcactgatcagaaccaggggaaatagttaaaatgatcagacgggtaataattgtgatcatggtttagttattctcttaaaaagtgatggaaaaaaatggaaactgttgagaagtgataggataatcagaatggatatttagccttctgtcagccactggatgttatcgttctgccaccatcgaccttaaacaggtgtgctaatattgggaattttaattagcaattaattaattaatcgaagggcgtccccattggcagtgaaatgatgcgtgatcagtgccccttggtggagaggtgtcggcgtgccgtgcctttctacccatcctcaccaatttcttccccattttcacagctgttcaccaaatccatgccgaagtggtggccaatgcgttcagaacggtttcgcctcgttcagctgcgaatgcgagcaaaactacacgggacgattttgccatatttgtgaggaattttaacattttgaagaatgaatttaaaaaagaataataaattccagccaaattgccacattcatgcgaagagcatttcgcgtccggcgccgtttccaaacgcgtgttaatcgatttggacggcggtgggcccctgcagccattcaccgtcgaatgccgtcgcggaggacgagggccaaaaagtagagctaatgggactggaaatttgggaaaaagggagcgggaaatgccgaaatcggaaatgggatttgcttaattctaggaaagcctgggattttttctagggaacaatcagtaatgatcattttgcttctctaaatcaacaaccacctatttcttcttttttttaattgcgaattaaatttcaaatatattttttgtgtgatcataaaagcgcaaaaattgaaaataaaattttaaaattaattttagaaaaaagatttcaagccaaattcgacatatcagaggatgaagtgattacggtgataagacacgacgcaccgccgcaggggataattgtgagaggtgattaacggacaaatgagttgccaaaaagcaataacagcaatattagaggcgaaggatgaactcaataatggtgctatgacgttactcaaaaaacccaccaaaacgaaaaattttttgatataactttttgctcaaaagtaacaaagttttaattctt

SEQ ID NO: 32125 - DNA, 1091 bp, Heterodera glycines
taattttgcaaaataataaataattgatgaaaaagtcagaatttggaaaattttaaaaacaacaagcgttggcattttttcaggttaagttagtcctttacaatggagaaggcctgcaaaatttggagagattatatcgattttagtgcgctaggttcgatgaaactttataaaatataagcctaaactttttggcctgtttaaaaaggaattaaaaatttttaaaatatttattcatctccctttttgatagtgaaagcatcagagagccttatttaacttttaattaacatttggtgcgtttcagagcacgttctaaaaaatatttatgaattaattttgcaaaataataaataattaatgaaaaagtcagaatttcgaaaaattttaaaaacaacaagcgttggcattttttcaggttaagttagtcctttacaatggagaaggcctgcaaaatttggagagattatatcgattttagtgcgctaggttcgatgaaactttttaaaatataagcctaaactttttggcctgtttaaaaaggaattaaaaatttttaaaatatttattcatctcccttttgatagaaaaagcatcagagagccttatttaacttttaattaacatttggtgcgtttcagagcactttctgaaaaaatatttatgaattaattttgctaaaaaataaataagtagtgaaaaagtcagaattttgaaaaattttaaaaacagaattactggagttagcattttttcaggttaagttagtccttgactttttgaagctctcgcaaaatctgagattatcgcttctagagcgctaggttataaaaaaaaagttaagcctaaaatttttcgcatatttaaaaagcaattaaaaatttttagattttttattcatctccctttttgatagtgaaagcatctgagtgcctaaaataacttgcaaataaaatttggtgcgtttcagagcagtttctgaaaaaaatatttatgaattaattatgcaaaaaacaaataaataatgaactctcttccttaataattttcctgcaccgaaggaacctcactcggccgcttcgcggcctcgt

SEQ ID NO: 32126 - DNA, 1023 bp, Heterodera glycines
tgctcggatcggcttcaaacaaaatagaacagctgttttttaaggattctgcatcgaatggtgaaaagtatttttttaaagctctaaaagaaaaaaagtttcttcagaaaatttttgaacatgtttcagaaaaatggctgtagcgggtcggtgtgcggatagcgtcttgggcttggagaaagggcacatcagaagactctgacggttcaaatgagctatagagcatgattatcagggctgcaaaaaatatgcacgaaaaatggccaaaatatgcgcataaatatgcaaataaaatcgtgaaatatgcatcaaatatgcacaaaaaaacttgaaaattaggggtgtaatataatttaaaaaaaaagtttcttcagcataaattttatcggttatttttgcaattgtagatcaaaaatttttcaagattttcggcagtaaagctcatcctattgtctgccaaaatattcttataaattgaaaatgaacgttcaacttcgcaggattgatccatcagtcgtgtacgttatttttccgtcaatcctattgatccactcgcgtatccatgcagagttggatttaattttaggcataagcaaatgtttttctgagggatattaaaaatcggaaaaaaatataccgaaaatggcaaaatatgcaaaaaatcggaatatatgcacaaaaaatggctaaatatgcacgaaatatgcagaaaaagccaaaatatgcacaaaaacctcgaaatatgcaaaaatatgcacataaaagtcccgatttttatacgcaaacacaaaaaagaaagtgttttttcctgctatttagagcatggagaagccaggaaaaaaaatccatttgcatattttttgcagccctgatgattatagtcttggatatgaattgagttacgcttccgacacgaattcgcaaaattcggtgtttttccgccctgattttcagaatccggctcaggggatacgcagtgattcagggagttttctgagtgaaacttggaaaactaacacataa

SEQ ID NO: 32127 - DNA, 1297 bp, Heterodera glycines
  unsure (1)..(1297): unsure at all n locations
gcgttgatttagcagtagttcctatgaatttaaattttctatgaatttataaagttttctgtaatttctttaagtgcaaaagtggtggtgtctgcaaaaaattttcaccgggtttaaaaaatctaggaaaattagtaagcatttgtagtgttccgatacgtattcctgcataatttggtgagcccctgatcaattacaaattatttatggacgatcaaatttttagaaatttttatttatttttgcataattaattcataaatatttttttcagaaaatgctctgaaacgcaccaaattttatttacatgctagtttaggcactctgatgttttttctatcaaaaagggagatgaataaatttttaaaaatttttaattcctttttaaacaggccaaaaagtttaggcttatcttttttttcagaaacttatcagaagcgccccaaactttgcagggatactgaaaggaaaagaattaacctgttttatcacattagcttgtcatcagtttttataaaaaattttcaaaattctgagtctcctattattttatttttttttcaaaattttgaagggcggagggggggcgaaggcccaccacgaggccgcgaagcggccgagtgagtacctcggtgcatgaaaattattaaggaagagagttcattatttgtttattttttgcataattaattcataaatattttttccagaaaatgctctgaaacgcaccaaattttatttacatgttagtttaggcactctgatgctttttctatcaaaaagggagatgaataaaatttttaaaaatttttaattcctttttaaacaggccaaaaagtttaggcttaacttttttttcagaaactgatcagaagcgcaccaaactttgcagggatactgaaaggaagagaaataacctattttaaatattatctagtcagttcatttaaataatttttatccaaaaaattttttttggggttttcggggcagtccccctgaaccgatgcgcccagatttatggggagaccgaatccttcgggaatagcttcccgatagtctgtactttaattctgcgttggatttttgctccccataattgtttgagtaccccaaacggacacttgaaaaaatcgatttttttgttttcggggcagtccccccgaaccgatgcgcccagatttatggggagaccgaatccttcgggaatagctacgctatagcctgtactttaattctgcgttggattttttcgtgggggtaattgtttgagtaccccaaancggacactgaaaaa

SEQ ID NO: 32128 - DNA, 1076 bp, Heterodera glycines
  unsure (1)..(1076): unsure at all n locations
cctccctccattnccctctcatatttgttctctgtccaattccaatttctctctctgtgtntacctcccttttttctttgtctctctccgttttctcctctcaccccctcttctctctctctcccccttgtctctnttttatttctcttcccctcaccactctctctcccttgtctctttctattttctcttcccctctccacactctctctctctctctctctctctcttgtcctctctccgtttcttttcccctcccaactctctctctctcatccctctttgttctgctgcgctgatcagccagctgcgcggctggctgatcatttttcatcaatttatcccccgctgttcgcgcccatcagcagcagaaagttttgtagaaaaaaaagctgtgtgcgcgacacgtcctgaatccattttatatatttatttctcaaaaaaaaatcttccgaaaatccttcttcactgacttaatcctcttaaagaaaatccattacttcactttatttggaatcatcccatatgtgcgcaatatagtttatatagctttacttaattcataaaaatggcatttacaatacaatttcattcggcatttttttttgccattattttatattgtaatgcctgaaaatgcccgcatttttgtcaaaaattggttaatccctttaaattttaattataattattttttaattccgtggaaattttaccttataattttaaaattttgccccaatttatgccgcccgaaaaaatgtgttcgaataaattttggtcattaatattccatggacctcgagaacccatccattcatattcattcagtgtttttgcataattttgtttcctttcgtccgttcctttcgcatttttttttgcatttttaaaatttttccggccataatttattgatcagaggagaaaacaagttttcggagatgtcttttatctaatcacattcagcaatggtcgtgatgatcagcaggaattttggaataatttcaatttagaaaaaatttggtgttaaaattttatgtattgtatgtctgcaaagggaccaggcgaaggag

SEQ ID NO: 32129 - DNA, 1091 bp, Heterodera glycines
  unsure (1)..(1091): unsure at all n locations
atcattgttttttcagttgatattacctttctgagctttttaattctgaaaaagaggtaatactgaatgcttgctacaaatgtaaactgcttatttcttgaaaaccttaataaaaaatatatttttaacgaataattaaattctttgttgaaaaataggttttaattatctttcaggcgaattgtaaccagctgactaatccagcagaagccatagaaaagtgatcagaatttaaaaagggaccgaatcacgcaattctgtcattttttggcatattgatacaaattggcatttgcagctcaaatgtccgctgttgcgatgtatataaaccgtccttttcaacaacgcttctcattcttgagcagttcgtcagttccattcgtccacgacttccgttggtttttgctcaattttcttttttttttgaaatttccgttccaattaagtcaatgcaagttcatcaccaccaccaccacaagagccaccatcaacgccacaaacgttcatattcttccgcccgccatgtgttgatcaatttcggcttccaatttccgcatgatttcaaacttggcagtggtcgttacagcaaagtgtacaaaggcgagttcgctgatcgtctcttcgccttccccgtttcagtttttccattttcaggattttaccgcgaagcaaatcgttattttgcaatcaaaattaccgacttggaagccgtttctgacagattcaagcataagtttgtgccccgtgaactcaaagtctggcgcgagttgagtcacccgaaccacgtccgtttgtacaaggatttcatgaagaatgactttctgttcgagatcatcgacttggctgttggcggtgatatggtgggtcaaagttaaagtttagtgcgttgtccataccttctttcagctcaattatttgcggaaccatggaccggtcaaagaagcggtctgttctggctggatgcttcagctcgtcgacgctttgagttacctgcaccaaaagcgaattgttcaccgcgacttgaagctggagaacatcctcatttttgacagagatgtgatcaaaataactgactacngattctgcaagca

SEQ ID NO: 32130 - DNA, 1500 bp, Heterodera glycines
  unsure (1)..(1500): unsure at all n locations
tacttgtgggttttgtgtcaacaaaaaaatttttttttgttaaatttatttgaaatttataaaaattgtttctataggttatcggtgtcgtagaatgcgaatctgatatccatttcgaaccccgaacccggattcgaacaaaaaaatcgaaaatccaaaattttaaaattttctcctaattatgattatcagcgcaggaaattatattgccgttgttctgcagggaccaggtcgttttggcgccaacgttttggcgccaagccaaaaatgaaaaaaaaggcaggaagaaattgtaaaaattataaaaaatgaaatttttcgttaaatataataaatttaacaaaatgaagaaatggaaacaatttatttggtagaacattggaggtgccaatgagaatgtgccgtctccgaaacattctttcattcgatcagcccaccggccgaagctggccttcatgcgttattttaggcttttgtttcttcgtatcaatttgacgattcattacctaaatacaaaattaagagaacataagccaaagcgaaaaagagtaaatgaagaattaaatccggctctttaatagacttcgtcagaaaaattataacgatttcatcatttctaccccccccccccctacatggcgtcaaaacatcggcgccaaaacgttttggttgttttaatctattttagaaacaaaaagagaattttgaaattttttattttcgattttttgttcgaatttcggctccgggttccgaattggtcgaaatggatgactgattcgtgagcagcgaccctgaaaaccattggaagcatgttttcatgacttttgaaaacaaaaaaattttcttcaaaaaaggggggcaaccaaccatcggcagtattaccttcgcgaaaaatacgttttttttgttgttttacaaaatttttaaatttgggtgtttttctttttttattatagcttggcgccaaaacgtcggcgccaaaacgatatggaccccctaaaacatagacggtgtgcaagaaacggatcaatcataattaaatcgattagtatgcacaatgattgaatgattctttgctcaaaaaaaatccgttcattgttatacacataacagttatttgtagtatggtggacgtgctagaaaattgacactaatagtgatgattagggcctgaatttttaggcaccaaaattttcaaataggcacctaacgtatgcacgaaaaattggaaaaggtatatgaacaagttcacgaaaaccctaaaaccgtaccaggtgttttcgacagtgattagtttcgacagtacttttanattaattttctacaagatttattgtacagatgaatttatatgaatttacaatttgcatatacaanatttataattgaagtaagtaatanaaaataagacttgtatgattttttttgtcaaaattatcgcttttatttttctanaaatatctcctgctagactgtagtcaaaaatacacaaatttc

SEQ ID NO: 32131 - DNA, 1309 bp, Heterodera glycines
  unsure (1)..(1309): unsure at all n locations
agaatctgtcgtactttccggtgggctgaattggggatttttgggtcggggacagatcaatccgcatttgtcggtcgagcaatttcncaaggcaattttgcagttcggcacgcacaccaaattctccgactgattgtccaaacactcgcggaaacaatctctgaacgcgacgtagcatttgtggcaacaggcggcggtggacctttgaaattaaattaaattaaaattaaatttaaaaataattaaataaattgaggaaaaacgcactcatcggcattgttggcctggttaaaggaagggaaaagaagaaaaagggcgacgaatgtgaagaaaaacattgtgaaatgatctgaaattggggggaaaggggggaggggagggagagaatggcatttggaaatggaaaaataattaatcattaatggcatttggaaatggaaaaattatgtatttaatatcctccgatggaattaaaattcataaaagaaaaaatttacccaaagggacaaatggtaaaaaacagaaaaagcattgagcaaaatgtgagcaatctgctgatcaaatgaatggtgctttgtttaatgattaaatattcatatattccacacacacatttatgtgatggaggaatgaactgaaaaatgaaaagaattaatgggaggacgacgaaaaaaactaagaaaatggcagaaaattacgaaaaatgtatgctaattgagaaaagaattaaccaataaagagaacaattcctcaatggtgatcaaatgtttgtcacttcatttttccatcgtttgcctttcatttcaatggcatttttcagactgatcattgatcattgatcaattcgtttcctttgttcttctaccgttcgttgattgttaattcgttaattcgacatttcaagagtaattaatttatgttaattacggtattatactgtatgttaaatgccgattgccctcccttcagataagggcattcattcgtcatttggagggcgttcctttaattgataatggcggtttacttttttgaagggaatgatggtaattgataatattttccgtatgcatacaaaataagtgattattaattaacagttatcacttaaaccaatgcgaaaactaatcgatttgttcattttctgtgctttttctgttttaatttaggtaaataataaaatattaaatacacttttataatttcactcaccatttttcattttaaatggcgagtggcgaacgccaaaagttggtcaacaattcgacagctgaagtaaatatttacttgaaaagaattaattatttat

SEQ ID NO: 32132 - DNA, 1330 bp, Heterodera glycines
ttgcgcctatgttcaaaaacggattcaaacctacatttttcaattccagatggactaaatagctttaaataagagattgaaagtgattatacgcgataatttgatcgttagcaaattttgaaaaaataactaatctttcaaacaacataattattgttcctaataaaccaaaagaataagttttcttatctttaatgctgcttaagctatcagggcttgaaaaaatctaagtttgaacccgattttggacataggcgaatgtcaagagcgcaaattttggacacgagaaattttttttttgctaagtttagatccacttcaatttttttgaaaaggttattcttttctagtgaaaaaattgtacgaaagcctactgtgcgaactgccactgtacgaatttttgtacgaactcccattgacccagaagctgttactattcgcagaaacgccagagaacccatcgaacctcaaatccgttcctcctcccattttgactgccaccagcggatgacggaatgcgttacggcattcgtcgtttgttaaatttccattgaaaatccaggcatttgaatcaggtgaaaacatgtctggcgtgataagtgttaatttaagattgaatatttctcaattctcaatatacataatgatgctttaaaataagtaagaaattcaatgatagaaataaacattcatgaaaaactatgaattcgttcgaattaaatcattttttatcgtttacgtaataaaaataaataaatatcgtagaacaattaaagaaatcatactaaaactaagaggatatcaaggataagtggttttacattcattgagtatatgacaaaaacaattgttacaaatgtgaaaagcccattccgattaagaagtaagtttataaaattcctcctcgaccaagctacggttgagcatggttcgacgtttgatctccgaacgcggcattcacagtgagagacaaagaattgcacgggtggttgtgctggaacaactccgactcgaactcgaagaccggaacgttagaagccgttgagaactgaggagtgttcggcagattcgaagggaccgaacgcagttccttcatggttatgggcaaacaagcagtcggaaccgaatctaaaagaaaacaaaaaatggctctgaccggcattttcttcaattttaatattttaaacaaacttgcaaaagcccagcgtttgaatattatggcacatttgcgttttgtacagcgacatcttactctgacgcgcattattacagtgcgaacgctgcttgtagccgcagcatctgaaggattcgcggaaacattcgtcgcact

SEQ ID NO: 32133 - DNA, 1261 bp, Heterodera glycines
  unsure (1)..(1261): unsure at all n locations
aagaatgatggcgttggcacagtgtntaatgacatcgcaccgcagatgatcaatggcaccatggcaaaactgcttcatnttgtgccaccatcatcagatcacaaaatgcccgtgtttttccaaattgaagaccccgaattttcgaaactgatcacgtcaaatcattggcttagtccaagcgaaaatgatccgagaatgtggagtatgtgaaaatgagttaccgtatttgtaaatattaagactagttcattttttcaaaaattgggatgaataagggagacggaaatcgctaatgctaaacaggcaccgccaaggaaaactgatctaagaaatttatgtaaaaaaatattttttataaagtttagacatttttctttaaaaaaatgggtgggggtgggtggtagtgctgttctcgagagtctcgactcgggaactctcgggttttttggtctcggggtttcggtcttggtataggggtcaagactaatctcgagtctcaagtctctggaaattttcggtctcgaacagcactaatggttgggaaaatacacccacaaatcaggccccgttcccccctcccccttggctatgccctggcttctaaatcgtttgtttttaagggaagagcgaaaggtgtgatatgtatggcaaagattgctacagggtaaaaggacttttgaaaaaattggaggcactgatcggttgcaaacggatgaaaagggcctcctccaatgagacggtagggttttgaattttttttaaatttttaatggtcaaatttattacttaccgccagggttgtgccaagcctatggctaaatcataaggcagggactctttttttgttttattcaagatacctaaaaattttgactaccctaagttcataaaattcaaaaaattcgcatttttatttacaaaaaacattaaacctgcaaattttgaaaatttttttacaaaaaataaaattttaagcaatttttattactaattcgtgaatgatggggcctgtccattccaacaccgtaacctacagtaactattgcatttaaaggtgccgtctttggctaatgagggccttggttgttacgatttaaagccaagcgaaactttgctgtgtgattgtgatattgtgtgcgacaaacatgaacttcagcaacgattagatgcgagaaaagaaagttagtttcgaaaagaaaacaaaacttttactattaaaacaaagaccaaatttttcaaaattcgagatcagagcagaatt

SEQ ID NO: 32134 - DNA, 1662 bp, Heterodera glycines
tctgtacaaaaacaaacaaaaatctgttaaaactatcaatttttttaaatccataaatttttcttttaaatgcactgccaatattcgctttcagtctctttgggcaattattaatcatagcaaaggctactgcctaacaaatccccctgcccctctatctcaagccccaagaaaaagacaaaaaaaaagcgaatgaacaactcgtaacaaatttattattaaaagacatcatcgggattattagcaagggaaaatttgtacattgtgaatacaaaaattacaaatcaaaaaataataaaatagcgaagacaaaaaacagccaaaagttcattggattgaatgagccccgttttccgaattcaaaaaaagaataaaaaaagttagtacaaataaatgaagcagtagcaaaaggacatatttgtatggcaaataaataatgaaatgccgtgtcagaaatgaatcaaatttagtgacttaaacaagcatttgctactgctttaacactgacacaaaacaactttgcttaatgactcgatttggcgcattactaattaggaaattaattagttttaattggtttgtccgctttcaacatgtccctccgttcatcatcccgtgcccgtggctttgctgcagagtgatcggtggcactgcgctcgatcgccgtctgcgcgatactgtgccgcgccgggattcctccgaccgcagcaaataggtggtcattagtcccttgcccttcacattgatttcgccccggcactcgaaatggaagccttccctttcaaggatttgcttcgtctcatccgtcaccttaacaaaatgacaaattaaaatcattctaatgaaaataaaagaaaaaaataaataaatattctaatttaatattaatcgaataaaatatttggattaatattctttgattagaaaatttggttttgatttgtggaataaattcgtatgctaatttaaatttatattttgattaaattactaaaaataaaattctatttctccacctgaattcgtcccggaattcccgatgagtccattcggctggcaacattcacagtgttgccccaaatgtcatagtgcggcttttccgttccgatcactccagcaactaccgggccaacattgatgccttaaggaaaattttatcagtgatcacaaacattaaaaaataacaattgtgaaaaaggcataaaaaacggagaaatcccccccccccccctccaatccgtgtcatcgaatttttaagaattatttttaattttattcaaatttttgacaacatttttaaaaatgtttaaaaaatgtcaaaaaaaaaatttttataaaattttgttgtaaagcaaaaacttttcaacgacagcgaagtgatccgttcgaaaaaatgagaaaaattttaaaaatattatataaatcatttctcaaatcttgccttttcttttttttcgttggcatataattagtatctaatttgtgaaccccactccccagtcactctccaccaatttccctaccgattctgaggttgaaattgccgaacgagttctcgttgaactcctccatccagccgaacagtgccagcgcgaaattgaccaccgccaccacgtgactgtttgtgccggtcgaattgccagttaatccgctggccgccat

SEQ ID NO: 32135 - DNA, 1413 bp, Heterodera glycines
  unsure (1)..(1413): unsure at all n locations
cacaatttatgacncaaccgaactcactcttcaatatttcacgatattctttgctaaaaaagtttatttattaaagataagatttatttattaattctaaattgncctgcaaatatataggattggtgcattgatcgcccctgcaattgtgaccatttgtaccactaatcgtgtgatcagaaattgagatgacggatcacttgtgatcagtccgcgccccacaatgttaaccaccagacaactggtgaaccaaagacagaagatcactgccatgatcacagccaaaaatttgaaaatgcgacgagtgatttcaatttgggactgggacgaattgttgcagttgttctgatcacttctgatcactgagaaatgaaaagctattgttttaataatgaattgtaataccgtcatttaaattttatatagtaatatatttttaattgtgtaattaaatttaccctttagcataatagccatgataatataaattacagttgtagccaaagtaaaaataatcattataagagaagcaaacacaattaattcgccttgaaccatatcaccaggctcacaatagatcattcttttaatttgaaaaatttattaaatagttaattaattaattcattcattataatttgctacatttcgggatgttgtagagcaaatacaaacgataaataaacaatgtaaaatgcaattgacaatgaaaaaacattggcaattaacacatattttccggaaaatcttgagatgttacgaaaacttaaagaagattagattaatttcaagaataaaaatttataaaattacaaaacggggaatgccaatgccacaaaacgatcaacgcttatccaaaacagatttataaaagtattaatatttgcagtgacagcaaagaattgggcataaacgcaagtcaaaagaggaatccgcacacgaagaaaaacgaggactaaaataaatgaaaaattgaaaaaataataaaaacaaataataaaatattttatttttatttatttattaccggtagctaatggagtggccaattcagtgagtgcgtcacaaaaagaacagatggccaacagaaagccgaaactccggtgaagtttcctaatttcataattaaaaatgcatttttataatatccaaaagtaaagtcaaaacaaaattaaaattcaaaacaattcctatgcaattttcaaatcttctcttttacttgtgcttgatggtgatgtaaacgatggcactgtttagggcaatgccaaaaagtgacaaaatttgttgaatgattgtcacccaaacggtgtacacgtaaatttggtcggattctccaaattcattaacggacgaagatggtgatgaattaccgttattactcatattattagtctgatttatttagaatgttat

SEQ ID NO: 32136 - DNA, 1571 bp, Heterodera glycines
tgaaacaaaaataggcctcttgagcctgcctgtacgtcctgaggcggaggcggtggcatgggtgccgccgctggctcggtctgagctgcatctgcgatgatctgagccggcgtttcaattccgccaccattgttgcctgtaaaaaaagatttatataaaagttgtattttcaagagatatggacattttgtcatgcctgtctacactttgtccgttcaccacaaaaaggcctaaatgtttgtgttcgggagacaccatttgaatatgtgtgcattatgtttttgttatttccccctccgcacattcattgttgaccccttatatttttgcatggagattggactcaacatttggcttcaaatttgcgagtttgaaagccaatcggtttttcagctttcagggaccgagaatattatcttagaaacaccgaaattttctatttaacaataaatattgcttatatttatttaaataaatattgcttatatttatttaaataaatattgcttatatttatttaaacttttagtgatgtttgatcacgcgggattggtggatttgaaatttcaaaaaaattagtatcaatttccgacggtgccaatacagctgtccaaaatttatagcgtcaagaaacttttcgtcactttacctacttccccaaaactttgaagacaggtaacttattttataggcaagaaaaaatctgaaacatacttacttattttgtccacaaatcactaaaattaaaattttttgagtttttccccttttttcagacatttcgcttaaaaattaattttttgcattttccattttgtcccaaaaggtgtcactttgttggttgaaaattttcctattttttgtgttttttgtaaaaaaaaaaatcgaaacttgtgtttttatagcgaatattctataaattaaatccttaagatattttattataaatatttaatttattatttgcgaaagaaaatgatatttatatttaatcattattttaattttttaaataaatattagttatttatgaatatggatattaattaaataattataaactactctactcttgtaattaatttgcaatgaaagtagggaataaaaaaatatattttttgatcagtagggataacaattttatttaatcgtggaattattttattttttatttatttattatcttcttaaattatttattctaagaaaatatatgaattatatacatttatttgcgatgaaaatgctgtcaaattaaaataataaatttattttttaatgttttaaattttatttgtttttagaaatatatcatctttaaaatgaaattctttttaattatctttttatttggaaaattggatcagtggataaaaaattgcaacagcaaacttttgatgaaatatttggagaaaaatgggaagaaaaagaagaagaaaatttggaagaaaaaagagaaataattcaaaaatattataaaataaaagaaaaaataaagggaaaaggaagaaaatattcaacaaaagaatggagtaaaattaactcaaaaatagcgaaaaaattgggacaaa

SEQ ID NO: 32137 - DNA, 1244 bp, Heterodera glycines
ccatgtggcagataaatgcgctcctttcttcgtgtccttttgcaagtttgatgtgaaaaaacccgcttgaacagtccgccactgagaaatattttttcccagagacttcgtcaaggatcgattgaatcctcggcaaataatatgtcgatcgtttcgtcaattggttgagcttctggtagtcaacgcaaaatcggtaagaggcatcaggttttcaaacaagcacaattggggatgaccatgccgacgtggatggtcgaataacattttgacgcagtaattctttaacttggcgctctatctcgggttgaagtgcgacaggataacgatagggcctctgttggaccggccgtgcgccatcgattaggtcgatgcggtgtatcgtttgtcctttgaagagtccgacttctccaggtttcacaaaagcgttctcgttctgtcggatgatgtttttcagcttttcaattccgtctcgactcagaatggtgtcgtttaatcgaattcattccagtattggcgcgactgcttcttccttctttggaaatcccaaagtctggtccgtccagtccgcctctggcgaaattttgtcactttctaatttgaatttcatccactcctcgtcagtcattatcatttccgggttttctttctcatcttccttcagtgcattaatttcagtgccatcggctattgcttccagtcaccaagtcgcgatccctcatacacttttattacgctgtttccgaaattaagcaatcgtagtggcacaattcgcgttgagcctggacttgttagacagtttccgactcgcagcgggaaataatcgtgctctcgctcaacagtgatgaaaacttcgtctagtcccaaacttcggttaatttttccccaaacgagcgaatcagacagcggtggcaatgtttgggtctcaataagttgtacttcaatcggttgcttctcgatgctgacagcggcgatcattggtagttgcgtgtttccaacacgtaggagtcctcttttgaagttcaatccaatttcttcttcgccttgttcactgatgaaatccatcaaatccgttccaattatggctgtgcatggacagctatcgtcctcactgacgagaattgggaatttgccttcaaaatctcccagttttatgttggcgagtgccgagataaaacgaatgggagttgagttcgctgctcttgcttgtggatagtccccttttcggaccatcataaagcatcttt

SEQ ID NO: 32138 - DNA, 1218 bp, Heterodera glycines
tctaaaattatgcaaaatgacataaaaaaaagatttagataaaatcatgaataatttttcaagcaaaatattcaaatataccaacaaaaaaaaattgaaatcaccttttacttggttaagaattaaaaaatttagcctattaaaatgtttagaaaattttttattatattttatatttttgaaaaatttccgatttccgatttccgacgtttttggggtcggaattccgatttccgaaaatttttggggcctcagaattccgatttccgaaaaatttttgaccctcggaattccgatttccgaaaatttttggggcctcggaatgccatccatccctggtgtggtccagtttgctgattggagttgggattctggattagaaaaatctttcaccgaaatgccttttttgttcactgtgcttttcattgtctgctttatcccaagttagaagcatactcacattttttctttttatctataaacttttccgctctctcgtgaatgccttttcttttttctctctgctttcttttcctgcctttcgtctcgcctcactatttctgctccattgctttctctctgttttcttttccctgtcctacacaattacgcactattttttctgtttaattaattacaatataataattatttgattttatttttttgcgcaccaatttcagcaatccgatctgccattctcattcaaaaatggtaccggcgctgtttggcacgtttggaagcgcgaagaagaggtttgaattatggcttatttaaatttatttatttaattttaaccaaaaatatatttaattatttttgaaatttaatttaagtttttttagcaaataatgtgtataatatttattgaaaaaactacaataattataaacaaatttaattgttttttatttaataattgaatttttatttaaatttaatttattttcattttctaacaaagacattttcaataataattaattattttattttagcaacatggaacatttttaccgctttggaatacgcgggagagcaggaccaattaaaggtaataaactaatgatattatttaagaagggatctaactaaaattcaatatttttatattattgtttggactaaaaaacggtaatcctcttaaaatacttttttcccgcatcaatcggctttaaatggttaaggacctaatacaattttctttttatttcatca

SEQ ID NO: 32139 - DNA, 1967 bp, Heterodera glycines
gcccaccaatgtgtcggtgtcgcgttccttcttccgtgagctgttgccgctgtccaccatcagtcaggagggaccgtatctgttccgcatgttcaatgacaacctgtgggccgacatgtctcgtgtctacctgtttctggagttgtccatccaaaaggaggacgctggcggacgatgggtaccaattgaagcggcagaccaacttgtcggacctatccaatgcattggacaaacgtttgttcaacaactcaaggtcacacatacaacatccgaacactcttcacttgcagaaaattaccaatatttaggttgaagtgcaaaacacagttgtatgacagcggcacattgtacccctacaaagcgtatctgaccaacgagctgtccttcccaaacagtgcaaagggtcatttcatggccagcgcgggctaccatccctcgctgaagcatgacagcgcgacggatgccggcttcttggcacgctgtgctcgctttgagggaggacgaaaggctcgcttcctttcccgcctggactttgacctgggcaaccaggagctgtacctattaaacaacatggacgtcctgttcaccatctaccgtgcaaagaacacattcctgttgcaaaacctggcgccagcgccggcggtaggagcagcggccaggcagcagtatgccttgtatctgcacgacataaagctgtacatgaaggtggtggaggtgcaaccctcgctgaacctgtccatctacaaaacgctggagaagcagccggccacctacgcggtacggaagacggaggtgaagtccgtgttcctgaccgccggccgtaccgagatggaccacaacatattttccgccgccatcccccgtcggttgaccattgcgctggtggcaaacggggcgttcaacggacagctggcgcagtcaccgttcaacttcaagccatactccatccgtgagatcagcgtgcacgccggcggtcaaatatacccggcggtgccgcaccgcatggacttttccggcgccgcctacattcgaccctttgtcgacatgtacgaggcgctgggcatggccaactctgaacgctccatggacatcacactggaccagttccgcgacggatggacaatttttgtggtgcccatgacctcgacgctggatgacagttgcggctttgaactgctccgctccggcaccaccagcattcggctcacattcaacgaagaaattccggccggcggcgttgagatggttgtgctcggggaatttgatcagttgataatgatagactacaaccgtcacattgtatctgactcgaaaattgcataaataaacatggtgttgtgcaaaagaccattctgttgtttccaaaaaatcgtaacatcatcatcatcatcatcataaacacattgacatcacttcccaaatttcaaatttaagctggatgattttgtatgagccgcgtgcgggtggtcgtatggtaccccacccgctgttcgaccccggtccggaaatgtcggcgcgcgtcattgccaccgcaccgctttattcgacatcatatttttgtttgttttttattatcttttaccttacatgtcatgacaatgcgcgcatcacaccgctccgtgaataataataatttttaagccacccaacacgctaatgaatcagacgaaagcgtggcagatgctgtcatctccggcggcggtagcggtgtagcatacactgtaacagaagctgcgttgctgaacaacaccaccagcacactaataggcacgacgtcaaccaccgccgtgacatcaacgacggcgatgaccacggcgggggcaagagtggatggggctgttcagatttggtccaccctgttccttttcgccaactacgcaatcgtgctgccaatgttcctactgtgttggatgatggttgtacactggctccgccgctccggcctcatgccgccgcctcatcagtca

SEQ ID NO: 32140 - DNA, 1936 bp, Heterodera glycines
cctcatccaagaaaatggccgattatgggtggaccccccgtacctatctgcacaccgaggagacgaaccgcgcgatccgacgcacaaacaattggccaaacattggcgagactcgcaacaacgacttgaacatttctggcgacgatggcaccgggaatacctcatggccttgcgagagagggccggctggcatcatcctcaacgacgggtgaatgcacccggggcaccggaagtcggggacgtcgtgcttgtagaagacaaattccacccccgcaacttatgggccatggggcgaatcgaggcgctcagaggttcagacggtcacacccgcagcgtgctgatcagaatggcaaatggaaggatttgggggagacccgtaagcagaatttgccccctggagagaagtacagaaatgggggaagcacaggaccaacgagacgaagcagtacaggaagaggaactcggcgcggttgctgggacagaagccgaaggtcagcccggggaggacaacaatgctccccgtggcttgagtggcagtgagggagaaaaaactgtggaagctgaagaagtcgcgcaagacgaagcagaggaagggcccattccaccgagtttcgttcaaaacgaagtcgggagcacctctcccgtgtcgcagacaaatgagcagatacgggaaaccgtgaaccaaaagacggaagcggagaaagctgactcaccggagggatcgaacagcatgcgagaagttgaaccacgaaggtcgcggagagtccgacgaactcgagaagtatggtcaccggaacgatgtgccacgaaaaggagggggattggtggccccctggtcagcttggccatgatgaccatgttggtctacccgactctgacgtcagggtgtcagccgactatccgacccgaaattgttggacaacagtcacaggaattgccaacaacgatgttgccgtgccatatgcggtgtacggaacgtggagtgaaagtgctgagcgggcagcgactcgaaaaaatggaaatttgttgccctgatggatgctgggcaattgtgcccacttcgacggagatcagctacgagctaccaactgaactgctcgtccacgattaccagtgcagtggtcaatgctggagggggtctggccccccttataacatcacacagcgatgtccagcgagagcagaatgcgacctgatcaattgctccttctgtgggaagcagctggccaacccgacgtgcaacccgcgatgggcatcctcgctcttcgggtttggagctgcaattttgctcgccatcatcggctgcttctgctcaatttttgggcggtttttgtcaggagccaagctgctctcgagagccgtggcatggggagttcgttgccccatcgggctgatcaattgggcaaccggacgcgattttcggaaaccgaccacggagcaaatcgaacggaaagtgaggaaaggagcgagaaaggcacgaacggaaatacgtgagctgcagcagcaactgcaattgggaagacgggctcgggcgatggccagagcgtggcaaaatcccgacgggactcgaaaagcctttcccgcaaaggcagtggcagccctcatcccattgctgctcatcatcggcccggcaacggccaacaaacctttgtccgtcatggtccgatcggaggactgttcgaggacggcggcgggactcaaatgtgcagggacagcagcgacggtgctgacgcttctgccggcggaccagacaaactcattcgtcatacggactcaacaggacgaactgctcggggcagtgaggctcagactggcctccctcaccatggtctgcgtgccaaagacggaaagctggctacgatcatactcaatttcgacgacggcggtcaagcggtgaacagcggcagggtcatgccgcggcaatatgtgcaactca

SEQ ID NO: 32141 - DNA, 981 bp, Heterodera glycines
  unsure (1)..(981): unsure at all n locations
gcaaaaaattcgcgaaataggggcgaaanagtttcaaatgcaggagcgaaatttttaaaatttactgtttttatataaaaatattttcaaattaaggcaaacaatttttattgattgattacagttgccaataataaaaatattctaaaattttcaatactttttcaaaacaaataaaatttgaaaaaccaaaatttggtcaagaaaggaaataaaattactaaattttaggcaaaaaagaacaaatttatgtgaaaaatttttgaatttgccaaaaacgtgctcgcgtcaaaaagtcttttttaattgcattttgttaaagaatttgaattttatgtgaaaaattttaaaaaccgcgaaattagggcgaaaataggggcaaaacgccataatatggataaaaagttattttaagggcgaacatccgaaataaggatttctaaggtcgaataagggcgttaaaacgcaaaattttcgaacaaaaaatgtgtttttcgtgcatttctcgtcaagttaaagccgcagaaaaaaaaataaaaacctaaaaatccgggccctactcataagccatcccttaccgtgcataataccagcagggtctcgcagcagagcggcagagagtcgagtagcggcaggcagaggaacggcttggagttgacgagcggcaggcagaggaacggcttgaagttgacgagcggcagggagaggagctgcttggagttgacgaccggcaagcggagcggcatggtagtacggagcggcatagtagcgaggagcggccgcatatggagcagcggcctgccgttgaggagcggcagggagaagagcggcttggagttgacgaccggcaagcggagcggcatggtagtacggagcggcatagtagcgaggagcggccgcatatggagcagcggcctgctggcgttgaggagcggctgagagtcgatggtcgcgtcgtacttgcgaaaacttgcgagcgca

SEQ ID NO: 32142 - DNA, 947 bp, Heterodera glycines
tgtaaaaataatttcttgcgtaatattttttacattatgttgttgaagaatttgagtctgcttctgatgcaattggaaaatttttcagcttttctcgaaaagttttttcccagaaaacggatgggtcaaataaaaaactaaacatctcacatgaccaatttaaattcccttacattttgggtttactttattatgctggcccataaaaaaatggagtttttccggtgccaaatttttgtgaattttctttcggcccgtcataagcggattgtttgggggcaaatgaaaacaaattttgtgttattcgaatgcgctagccgagctctacattttcaaatgtatcaacaaagggtctatctccactctctggcgagttatgtccagccaaagcagagtgggccataaacacgaattttttaatctttggtatttcctctattttgagcctgctctacatttatgtattgtgccaatatgcctattgcaactgaaatttattcaactttcccgacaaattgttgagataattattctagacgatttttttatatttcaaagcttaactattgcctttttgtatgataactggtagatattgggagtaaaaaaaagtttttttgtgactatttacaataaaaatttatgcagcatttctaaaaaggatctaaaaataatttcttgcgtaatattttttacattatgttgttgaagaatttgaggctgcttctgatgcgattgaaaatttttcagcttttcttgaaaagttttttcccagaatttatacagctttcccgacaaattatttagataattattctagacgatttttttatatctcagtgcttaactattgcctttttgtatgataactggtagatattgggagtaaaaaaaagttttttgtgactatttacaataaaaatttatgcagcatttctaaaaaggat

SEQ ID NO: 32143 - DNA, 1196 bp, Heterodera glycines
tccaaattaataaggaaaatattccaaaaacctcaatttaagcaaagaatttatattttaaaaattcactaaaaataagatgtaatcacacacttcggcatggtcaccaactgcagcaaaatggagtgccgaatatccttcaaagggcggggaaaccctagggcgtccttgaaaaaaacactttcccagtgtattcattcttaattagccctcacactataaaaaacagagcatatatgtgaaaaaaattttaaattcaaacactcattaaaaattaaatatctattcattatgatattttttaaattttttttgcaaatcccttaaaagatttttttgtcgagaaatgttaaattttaattgttcaaatacataaaattttttgtaattgaataaggatttggtggggccgaacatattaaagaaggcttttccgttgagttaatttgctaactttaagcagtgaagaaatttttaaaaattttacataatttagaaaataattttttagaattttcattaaaattcttaattggacctcaaaatgcgtcagaatccgtaatttaaaaatgttcacctccctttttgtgatcatttttggcacctaccaagtttattcaggtgaccagttttggcaccacgggaaagcaaatagagcacaatgtcggccttcccatccagcgacacatggatcaacggcgtgtttccaccagaatcagtacattcaatgtccgtgccaagtctttccacgagaaattttgctaaatttgatttctcgaaaaacatttaaataaaaggaaatttttaatttaaacctagccctagccctcaggcaaaatttttaaacagaaaactttctttgtcatcgaaaattgacagggataaattgccgatcagtttgagataataagcaaacaataattaccagtttctaatttgcccttaaaacacgcgaccaaaagcaatttttggttgtcaatttcttcttgagtgtaatgttgtgcagcttgtgtttgtaaaatcagtagcagcagacaaactgcgaagcttgcacagtgctaaattattttaaaagcaaatcactaatgatcagttggtctgggcctctatacaggcctgaggggctatagtaggcaccgtccggcaagtgccagaaaggtacggtacgacaggcgccccccggggggggggggggg

SEQ ID NO: 32144 - DNA, 1070 bp, Heterodera glycines
  unsure (1)..(1070): unsure at all n locations
aaatcggaaaatcattggcaaaaaaacaaacgccgcagggcatttggcgccgtcctcgcccgccgaggacataattgtccctttccttttgctctttacgcatttcctctcggcgcccttttcttacttttccgatttgattttttcgcccggaaaagcgccttttctttccctcccaaagttaaaaaaacaattggacaatgactaaaatcttttcgcagtattttccgtcgtttcaatttgtaaattcctaaaaattaaaattccaattcaaatatttattttccaattttaaaaaccttttaatagaatcaaaggcaaaacgttaaagtttaagaaaaatggcccaataattttcggaccgcaaaaatattgtcacgcctttgaactaacaaataagggtttttggctttttcaaaatgatcggttccgtagtatcatcattcatctaccatgccttttgtccatgccttttgtcttttgccgattggctttggcatttgccgtctccgcctggccaatgaaaagggcctaattcgtcgggcattgaatccctccgtccctttttcgcgtcatttatttgcgcagtttactgttttggccttctttttcccccagagtctttccttcgtccgtccaattaaaagcttcttccgcttccgtttcgctttggcattcgttccattaaaggccaatggattttaatatgtattaaaattcaaattcatcgcttggcaaaatccaaaagtgccaataaaaccctcggatttgttcatttttatgagtgtttccccctcgattagtcacagttcgctttttcgaaaaattcagcaaattattcggcctcagcaaacaatccccccccccatcaacagattgctttgcccgggttatcacttcccagtgccaatttctcatctcattttgccattttccctctggcaatccttccaactntccctttaaccctttcattttccacttttcgcctcgtattttccgctccgacgctttgtcattgctttttttgtgactgtcccttgnnagcatgacgaaaaagccaattgaaa

SEQ ID NO: 32145 - DNA, 1541 bp, Heterodera glycines
  unsure (1)..(1541): unsure at all n locations
ttttcagcgggtttaaaaaatctagaaaaattagtaagcatttgtagtgctccgatacgtatctctgcaaaatttggtgagccgctgatcaattacaaattatttatggacgatcaaattttttgaaatttttttaagtgcaaaagtggtgggtgtctgcaaaaaattttcaccgggtttaaaaaatctaggaaaataagtaagcttttgtagtgttccgatacgtatctctgcaaaatttagtcagcccctgatcaattacaaattatttatggacgatcaaattttttgaaatttttttaagtgcaaaagtggtgggtgtctgcaaaaaattttcaccgggtttaaaaaatctaggaaaattagtaagcatttgtagtgctccgatacgtatctctgcaaaatttggtgagccgctgatcaattacaaattatttatggacgatcaaattttttgaaatttttttaagtgcaaaagtggtgggtgtgtctgcaaaaaattttcaccgggtttaataaatctaggaaaattagtaagcatttgtagtgctccgatacgtatctctgcaaaatttggtgagccgctgatcaattacaaattatttatggacgatcaaattttttgaaatttttttaagtgcaaaagtggtgggtgtcttacagcttaacaaggcccaattaagcttatttccagaaaatctcgcatgaattctcatttttaaattttttatagatttttaaatatttggatatttttttggcttaccaaaacttcatcgaacctggctctttctattctcattcaaatcgctccaaattttttttacagcttaactaggcccaattaagcttatttccagaaaatctcgcatgaattctcatttttaaattttttatagatttttaaatgtttggattttttttggcttaacaaaacttcatcgaacctggttctttctattctctttcaaatcgccccaaattttttttacagcttaactaggccctattaagcttatttccagaaaatctcgcatgaattctcatttttaaattttttatagatttttaaatatttggattttttttggcttaccaaaacttcatcgaacctggttctttctattctctttcaaatcgccccaaattttttttacagcttaactaggccctattaagcttatttccagaaaatctcgcatgaattctcatttttaaattttttatagatttttaaatgtttgcattttttttggcttaccaaaacttcatcgaacctggttctttctattctctttcaaatcgccccaaattttttttacagccacgaggccgcgaagcggccgagtgagtaccttgggcgcaggaaaattattaaggaggtgggttcattatttatttatttttgcaaaattaattcataaatttttttcagaaactgctctgaaacgcaccaaaatttatttacaagttgaataaggcactctgactcttatattatcaaaaagggaganntgaataaanttattttaaaaatttct

SEQ ID NO: 32146 - DNA, 960 bp, Heterodera glycines
caaaattttttccattcccgtaagagctgcggaaatgtgaaattaattctcagaaaaatggctatctctttttaagacaattttctatctcgtaaccccgatgctaatccgttccggagagcctcttcaaaattttttccattaccctaagagctgcagaaattgtgaattaattctcagaaaaatggctatctctttttaggacaattttctatctcgtaaccccgatgctaattcgttccggagagcctcttcaaaattttttccattaccctaagagctgcggaaattgtgaattaattctcagaaaaatggctatctctttttaggacaattttctatctcgtaaccccgatgctaatccgttccggagagcctcttcaaaattttttccattaccctaagagctgcagaaattgtgaattaattctcagaaaaatggctatctctttttaggacaattttctttctcgtaaccccgatgctaatccgttccggagagcctcttcaaaattttttccattaccctaagagctgcggaaattgtgaattaattctcagaaaaatggttatctctttttaggacaattttctatctcgtaaccccgatgctaatccgttccggagagcctcttcaaaattttttccattaccctaagagctgcagaaattgtgaattaattctcagaaaaatggctatctctttttaggacaattttctatctcgtaaccccgatgctaatccgttccggagagcctcttcaaaattttttccattaccctaagagctgcggaaattgtgaattaattctcagaaaaatggttatctctttttaggacaattttctatctcgtaaccccgatgctaatccgttccggagagcctcttcaaaattttttccattaccctaagagctgcagaaattgtgaattaattctcagaaaaatggctatctcttt

SEQ ID NO: 32147 - DNA, 2185 bp, Heterodera glycines
agaaaggctaaatcgttcgataattgaaatgttacggaaaacgatcaccagtccttgggaatgggacaaacgaattccttatgttgtattttcatataatgcaaccccaaatgagtcaacgggacattccccttttactatttttttcggacgtactattcagtttccaaccacgttaacagcaccaaaaagagttaatcctgcttatacagtagatatggatgactatctccaatttttccgagaaaattatgaacaaattctgttagagacgtctcaaaatattgctaaggcacaggcaattcaaaaagctcaatttgatgcaaaaagaaatgtgaatccagaaaaatacaaaattggagacagagtaatggtctattttcgtccttcagtcaaaaccgatcacaaaaaattaggttggaatttttatgggccctttttgataaaaaatctcactcccactgcttcatttgtcattcccataaatcatttggatgatgtacctattaaagtgccaattgaacatttggtttcggcaccaattgaaatttccgatgaagttttcctaccaaaccaaaaaaggaaaaaatttctaaacaaaatgccatttttaccggaaaacaaattagaacacagaaaaatccaaatcaacttatttacaaagaaaccatcaattttagacccggaggagaccagtggaatgtgccacaattcgttgtgcagtggaatcgaggagcacagcaattgtgcggcaatcactttggcggatcttcaccctgctttggccgtgatggacaaacttcgaaatgtcaaaattgagatgctcggggagctgatctcacttatgatcgccaaggatgtcccaattgcgcaaattcgaaattgggcaacaaacagaaacacacatggacctgattttcttttaaaattcagttcaaatctgtccccatcttcccaggaattcatctcaatcatttctctttggattgaccggtgcgactttgcttttcacaacctccaggcttcagggtgcaaaaaaataaaatttttaatccccaaagaaaataagagctatccattccaaaaagcgattgaaattgctattgaggatgtgaaagctcgatctgtgttgggtctgtctaaagtaattcgaagtcctttcattgtgttcagtgattcggttggagaagtaatgaaaaataagttggaggcggaaatatttttggagaggagctacacggcactctcaaacgaaattgtcaccacctattttggtgaagaagttaaaaaaattttgattatggccggcaccgatgacattattggaaatgtgccaattgaagaaacgaaaaaggccattaaaaaaatttcatttcatttatccaagttttccatcaaaacttttattattcccctgccattcatttcaaaaaaatcgatggcacatgaaaaatttcttgatttgttggatgaaattgtgccgaaaagtggtaatgtgatcttggcactcacacgaggccatagaagcattgcagaaataactcgttatggagataaagaagagaaccgaaatgtcgatgagagcggtaaattgaaagacggtggcgcaaaaattacgctcaaatttctttgaggcggtatttggtatgaaaacgccgctcaaaatttcgccatttcctgatccacgcggaaaggaaaaaaatgaaaatgaatcccaacaaccaccaaacttaatgaccattcaattttctcatcaacaaaaccggcaatttcacccaaatccgcgccaaagttatcgcggacgaccatttggtggtaatcagcattggcgtggtaatcgcggaaatccccgatttcagcaaaattctcacaacgatttccgttttgggacccatcatggaggcccatacccaccaaaaaggggccgcttctcataaattattgttttattgtcctaatctctcaaagatattgttgctaaatacctcagacaaaattatttttctcccatttgcttctcaatttattattgtattttgcttaaatttgcttaaaataattagcgaataaattattgactatattgctttcattattagcaccagctatcgccctttcacgtcccttttcatcatatccctctcctcattatatcccgcccctacccgacccccccctcccttcc

SEQ ID NO: 32148 - DNA, 1368 bp, Heterodera glycines
tcatttcctaataattccttcactttttctttcgctgtccgctgggcccggcattcatttttggacgtttttttgcgttaatttggcccgctttttgaggagacaacggcctaaatgaaatggaaattaaatgtgacggcaccaaaaaagaaaatatgttctcacttacccaatgcaattttcaaaaagttcaaaagtgattttgttcaatttttcgtcctcccattgaattgtcttcccaatttgccatcgcttcaacaccaaatagatatgtttaccatcatcatcatcatcatcttcttcatcaatactttcatcatatttttcttttgccagtgttagcatttcgttggtccgttcgttcttcaattcaaatggctcaattggcgttgattcatcaaatagtagtacaagtcgaatgatatagctggcagaagaaatagtggcacggagaaatgcctataaaatggaaaacgaaaagcaaatggcatttaatccaacattttacgaaagtggccacacacttctttgaaattgttgatgaatccaatggtttctgacgtaccaacacgacaactcaattgctttggctttccatcttttgtcggagtgttcaaccatttggacaatgcttggccaatagttgcatttggcccatcatcagcaattgcatcgggcaaatctccggaatggattgaaataatgttgaaatcggtgagaactgtcggcgatgtgtggcgacgtaaattgtccaaatcatggagatcggaaacggtcaaatagcgaatgtttgtcgcaaaaattggccaaatttcacgagcaaaaacatcccaaattggttggacatcattggcctcaacataaaaatccaaatcgatgcctttgtcaaagatttgttcgttggcacggagaaattcgatgacggaatgatcaatgtaactgaaaggaaatacttttatcatttaataattctttgaattttgtttgtttaccaaatccaaaggtcgttaaaccgaattttgttgtgcatcggatgatcgggcaacggaaaatgcacagatttgccattgcttttctcaacatacaattttgcttttgttccattcttggcaattctgatttgtctccaaattgtcagttcgtttttgccgtcaaaatgtttgtccaccaaaacattgaaacgtggcgaaagaagtgccaatttgaggccgagttgagcatggtcaaaagatgggagaatgtccatccaaacatcgctgcacatccaactgaaaatgtggaaaaaattaataaatgagaaatttgcgtgctattaaaaaattctttaccgtcgtttcatttttttcacatttagccgttttcaaaatt

SEQ ID NO: 32149 - DNA, 2041 bp, Heterodera glycines
ttttgtcgtcttcaagaagaccatgcattattgcacctcctgggaatgaggtacaaagcaacccattaaccatcttaagatggtctgggtctccaggaaagtgacgcataagtgaatagagcgcgaacctttccgggtccgatgggggtacaggaacaattcggccgataggtggccttttaatttgctgccttttgtacaggacccatttgtcctttgcccatcggaaccgctctgggactttttcgaaaagaatgtccttaaactttggatcattcttccactcattttgccattgtttccaataggctgaacactgcgtttctggcagttcgccttgctggatttgttgagctttgctcaccagctggaatgccctatatacaatgggctgttggtttggcaaatgaattgccaatttgacaacatgatgcgaaagacgggcaaatggcattgaatgaacaatggcatatgcttccgttgcaccacggaagttcatcttggcatattgagccggctcatcaattccaattttattgccggactcttctttgcactcgacataacaatgtcctggccctttgaaagggtacttgagtgcgtatttaatatttgctttgttaccatatgcaaacagtacattatggtgtactcggtaacgcagcagaatataaggattatacggcacgacatgtgagttgtcgtatatcaggccgtttacctctaattgggcaccaccatcagatggtgaaggccggaaatacatcgcgggcctgtccgggcgcaaaatcgtacattttgagtaaggggctgggaaccccttcttgcaccgcccgtaaattgggtcgctaggaccacaccaactgtcactgcatctgtgcagttgcatatgcattgtttcgcggatttcgcgatgcatttttgcaatgggcgtgtcgtcatctttatcaggcaaagatggaatgtgcgcccatatgtattcctgaatgacatatggaactgcgtccaggtctgtttgcgccacaatgtgggcatgtgggcctcctcggccttggaactccattgattcaccgtaaccaaggattgttccgaagaactttttgtcataaagttcttctcggaactcagcgattttgctgctccagactcgcatccacatgtcaaaccggccagtaaatactggaccgctcttcagtaaattagtcttcgggctcgagagccgcccgtctgaggccgcgaagcggcctaaaaatcgctgataattttttaaaaattccaaatcttttcacaacccgatagctaatctaggtagcgaagctcccaaagcgcgaagcgctttttcccagctaaatagccgacggttcacgcacccgctagtatatacgttatattgacaaggagtttcgtttcaaaaactaatttgagcttaacggctaatgggacgggtctgaaagtagtggaagggtcttacaactttttgaggagaattcgggaaaactataggttttttgatccgagcgccaactgagtaccagggactgatttctcattttttcgtgcgtttgacggcccctaactttttttgtaaaactcgaatcaaaaagtgcccgctgaaagggcactccgcctaagggtcctctacaaggaggtattttttaaaattttttttgagcaaacccctggcctgcaaaaaatggcaactgaagcgtgctcaaaaagtacacttcagtaccaggtgaataccgcgccagggtttgatctgagcggggggtggtcagcgaacttattgtagagctttcaaagctcgattttttgaaattttaaaatttcgaaaattttcaaaatttttcgagttaggcctaaaaaacggttttcgggtttttgaattttaggattttttaacgatttttcccagagaaacggagaccacttccaaaacatagtttttcgagctctatcgactggtatttttttcggaaaaatttcgattttttcccggaaatagaaaaaaatttttggcctcagcgggacatttgagtcc

SEQ ID NO: 32150 - DNA, 1470 bp, Heterodera glycines
  unsure (1)..(1470): unsure at all n locations
aaatttttacgttacttatttgaaatattttattgtttattttaccattttgaaatctgtcttcaaaatgccaataaattgtccactacgaaaaatttgtcgcaattttcttatgctgtctgtccaacacttcaactatttgttntggtggcatttgccatcatatcaatttccatcttcaattggtgcgcgaactttgaaaaaaattattaataaaacaatttttcaattttttttaagaattattttcacctcgtcaattttggcataaatttccgtttgctgagcattttgcatttgagaaaacagatcaactaaacaaagagagaataattagcaaataattacaagttaattagtaaagcaattagtcatttccgccaaattttactcaccaacaaaattttccatcgacgccattttttcacataatttttgttgtgcggtgtccaactgttccaatttctgcttctgttgttttagcatttcgccgaattgaccaaaagtttcttctaatttctccacagtcgcttaaacataccgtaactttatttgtttgtgttcccaatggctaccgtaagttttcctaccgtatttggcggccttcgcttcctgtttttgttgctgctgcatttgttttaattgtttctcgagtttttcagttctatccaagactttctcaaattgaccagcagacactgaaaagggaattcgaattttttggtttatttatggcattttgtttctccgttaaaattatttgggaattttaaaatgcgacaaatggccaatttttaattttccaaatttatttaatgatttttccttttcaaattttcttatttctaccatatgcgtttcttaccgtattttcctttttccgacttcagtcgcttctcaatttcgcccatccgtccgttagttgcttcgcatttttccacaatgacttaaccatggaaacaattttaattttttcttttttttcaatttgtttcactaattaatttaattggtctctccgtttcattaattaattaactgacaatttttcgctgctttcatcatccctttctgctgctcctcttctttttgcttcgtaccttccaagtcactgattttctccaaaatggcgttgaattgttcggcgtaaactgaaaattgagtcgttattttgaacaaataaaactcgaaataatacagtaggttttttaaatacaaatacagtagtaattttcatagaaatacagtagtaattgtccatttccctaccgtatttgctctgttcctccctttccttttgctgccttttttcctcttccattttgtctactttcgactgcagtgtattaagctggaccatcagttgctggagctttaacttttcttggagttctttctttaaatcatttctnngtaaatgcgctttatcccaaatgatnttttgtatctttcacaaatgcaatttttcat

SEQ ID NO: 32151 - DNA, 1218 bp, Heterodera glycines
tcccctgcaccggcattggcattctcgtctgcgtctctgtcgagaaatacatcgccggtttgctttcccaagtgtgccttccacttttaaagtgccaacattcattttggtgcttcacccgcttttggccctcaaagtgctcaccccgcgcttccgcgttttgctaatggcctccatttgggctgtttctctcatgttcaacttgccctattacattttcaccaaatacatcttttacaagaatgttgcggtgtgtactcggttgatgcctttggctaattcgacaaaaagtgccgaaaaaaggtcgaagaatgccaaaaaaagagaagaggggcgctttttgtgccaaaatctctgataaactttcaaattttccccggatttttttggcctgaagaaaagtccttggattctctctccaaattttttctgcttccgggcttggtctcaatgatttagtggtgggtgactgtttcgaattttgctgcttcatctgctgactgatcagaattgtcacaggttagcactgtccccttcttttgagcacacgtgaccgaattttcaattattattaaattttagttgtcattgtattccaattcccttatctcaaaaaagcaaagtatttgtttggaagggtttgttgtgaatgatacgataatgggcagatgaatggtgcaaaattggaaacttaattagcaatcggaattggccaaaatgggaaaatgggcccagattgaagggggcgggaaaaacaatcgctgtcattcgccgctttcactggcattctccgattagtctgatgagcacccgcaacatcgtcacctcctccttcgtcctttggtactgcgtcccgttgctgatcatcctcttcctttacactcgcatcggtttggtcctttggcacagtgcgccgctgaagaaactgacacaagtgggcaaattgcgaaccaacagcaacggtgggttaagagaagggaaagcaaaagcatcagcagaagaagaaagcgattgatcattgttcagagacgacgacaattgttgcctcgggcaatggcagtgccaaaactagggccaaacgaagtgcgacgcatccgccgccgtcgccgccgccacaatcgacggacggcgccgaggagagggccaaacggacgaacagtgccaacgaatttgtaatggcacattttcgaagggcgacaatgagcagcgacagcgaaa

SEQ ID NO: 32152 - DNA, 1183 bp, Heterodera glycines
  unsure (1)..(1183): unsure at all n locations
atggcaaacgcagtgtcttgtccagaaaatccacaattttgtagttgcgaagataaatgtgatgaagaagccatttaattccgaggaaaaggacaaatgtttttggttctattggccaacaaatactactagaagatgaatcaatggtggttcgtcggctggtcgctcgggtgaaaaggtcgttccacccacccatcccaccccctccctcgttcaacacacatttgcatcaatttacataaaaaaacacctgcatttcatttacacccttttcaattctataattcgtaatttaaaaaaaacatcgttaaacatcgttggcgttatgcacatcgttaaaattaacaaaacgatgttaaatcgtttcttttttttaaacgactaaaacgtcgttttgtcgttcactagaaaagtcgcacagagttcggttcgttcgtcaattatcagtcgaatcatgctaaatgaaaacatatacattggcaccgaatgcttttggtcaccatgaattttgctggtcccatccgatgtccatcaaatagcgcgtcgctgtccatccaaaatgttctctcagctgcgcaatttcgaccgagtcgaaatagaacgcaaattgttgaagaggcatccaaaatgtgcccggaccagccgcttcacccatggcgagttcccttctcagctggtgagtccaaccaagccattcgctgctaaattcaccgcgccaaacaaagtttactccccaagggttgcgcaacagtatcactctatgtgggacagagacagagatattttagactttttcctaagttaccgatgcccatcgctggtttggcgaacatccaacagcgaataggcatgttccggcgacagtccaacctgccgatattccgcctcctcaataatgcgttcacctttaattctggatttaattttcacagtaaggacattgtatttactttggaaaatgggacaacgaagggtcgaaataaatttgcaaaaaaactgacctgcaccacaagaacatgtcatcaaaaagaacagctgtctcgcacttaacagcttagcccanacgatgtcaaagtcggagtcactcaaaaattcaagggtctataaaaagggttggctgcccggtgagggttgaaaatcctaaaaaaaggcatgtagtaactgcccaaacccactaaattta

SEQ ID NO: 32153 - DNA, 1708 bp, Heterodera glycines
tttttttaccaggctggaatgaccaccgtggaaaggtcattaacccacggattttggttcaaatttgcgaaaaaaaggatctcattttgctccaatgagacactgaaccatgcttggacataggaaaagcgattgttgtgctcgtcaacaaaatttgtggcagttatgtcgacaaaaaactgaaaagcttaaatttgaattatgaatttatttaaaaaaagtaaatcaatatttccagcttttaagcattcattaattaatgaccatatgtatcgccatgagcagttggccaaagaaagtggccaccgcataaatagtcattttgcgctcaatggccaaatcttggccattttgttggtaatagctgcgcaatttgtaggccaaaagggtggctaaatttatcaaaaggcaaacaatgaaaaaaataagggcagagaaagcggcgagttcgctgttatttatctcctaaaaaggtgaatttagataaatttaaattaaaaataaataataattattattaaagtcaatacatttgcggtcttatgatcgtcaatagtgaaggtgacattgtcattttggatatggatgtacatgtccaaacgaaaaattggagcggtaaaaggcagcggaaagatgaaagagaaagcgacaacaaagggcaggccgacacgccataactaaatgaaatgggaatttaaaaataacctttaaaatagctcaataaaaccttttcgtagttaatcaggaaaagaatggcgcttagtcgatttaatagcaaaaaagcggtcaacaaattctccaagtgaaaagcataatgaagcataaaataaagaaatgccagtaaaatccgcggaaatttgaggtaaatgggcaggaaaaggccaattttgcaaaatcggatggccaaaaaggtgacaacataagtgatcaaactctgaataattgaaaatcaattaattcttggccattcattaattgccataattattggccattcattaattgccaattttgattatgttcttactaaaattgcacggataataatgaggatgaaaaatggtgaagaaaaatgtttgaagttggtgacaatggccagcaacagcgagcagtacagcacggcagacggaatgccaatggccaaaacgaaaaaaagggggaacaatttcgaattggccaaaatggtcatggcggagaagaacggagcagagacggaggagcccattgggggaggatgaaatggtgtaacggggaggaaataataaattttaaaataaaattagaaaataaattataatgtggcattttgtcgtttaataaaacatattaagggtgctattgttaagctttgttcggctttttagtgcactatatctaggtttttattttatagctaaaaagcccaaaaatcgatttggaactttgtcaaaaatattaatttattgtcaaaatttcatttcaacaaattataatatacaggctgagaaaacattactagaggcctatttgccatttttactgcatattttgagggttttttaaagccttgcctaaaaatattttcggagtcatggcaaaagatacaaaaggcataatgtacaataaaaattatggaaaaatcattataaatttttcaaaaaaaaaaaaactgaaaaacctaaataatatatttttttttgcaatctcttattatattttttattcttct

SEQ ID NO: 32154 - DNA, 1699 bp, Heterodera glycines
  unsure (1)..(1699): unsure at all n locations
ggatcatttntgggtccttgaaaggctttaaatcncagtttttagggaccgggctttttaatcatncatttcctaatctaccacacgctttcacagctccacgacgntggccttggctcgccccattgttcggccgatcgggaggaatggcggaccatgttggaaaactcncaagacacatccatgttgtgccagggcaactgcattccgttcatccgatcgtcgacaccgcctgcaacagcgttgggcacaatgccaatgccgtcgtccgaccatggcactgttgttggggatggagcagttgaacatgaccagcaacagcagatgatgtacacgcgagaggagttgagcaacccaaacttggacagtgtgcaaatgttggtggattatggtggaaatgaattattagacaatacgccaaatgtgtccaagcaggcctattgattttggatgccaaataattttaattaacgcctttctcaaactgccattccccaatttaaaattattgaaaaattttgaaaagctgaaaaatatttaataattccataattaaattttacaagaaattttctgaaatttccaaaaatataatcatttttttaaattttaatatttttatctagaaagttccttaagaaaatttcaactttctctgtgaattttacgttgaaaatttttcatgcatttataaaatgaaattttctcaaaaatttttatagtattctcgaattttttcaagaatttttcctgttgtgaggatgcagttttaagaaacgcgccacacggatataaataataataatttttgatttatttaaagtctaatcgctttttcagcttgggcattgcgctgatgcaattggtccacggcattcggcgtgactgcttctacaacacatttatgatgactataaaaaagaataatggcacgggttggttggtgttggcatttttgcattttgaaattactcatggcttttcagtgctcaaaaggccgaccccctcatttatggaatggcaaaaggggctcaaagcgtgccaaagtccgtcggccgttgcactgttcgaaacgacgctggaatttgccatcaattgggacttcaaggcggaggatggcacgacggttagccaacagcaaaaagcggtgagaaaacaaagggaaaaatatccaagtattctattctatccggatttttccctggtttttttaacagaaatccggcggacgccgtcgacagatgccccgagacggaagtgccaaaacggacgacgaaaacaccgaaaatgaaaacaatgcctcaacatcggcggcgatggcacaaaagcagcagcagagacaacacacgcgacagagggaggtgaacaatttgttggtggaggcgggattcttgggcggcatggcgatcggagcacggacgcgcaagccggtgaccaaatacggtaattattcaaacacttttaggggcaaaacatatcaaaatttttattttccgaccattttttatatttacgtttgtctgttggatacatactaatttccggaacacaatgtttaggtgacgtggaaatggatgtggacaagctgaactttgacgaggcggaggaggaggaagacgagcaacagcagcggagagaagaaaacgcggaagagatggaggaggagtacaaggaggaacaaagtggcgacgaacagcaa

SEQ ID NO: 32155 - DNA, 635 bp, Heterodera glycines
taatcatttaccaatgcatatcaaattccacatttactgtgcgaaattgaatggcccattcagcgttttgactggtacaattcgcttggttgcttctgcaatgataaaatttttttttttttttaatttggctatttacaatcaaggtaattaattcatcataaaagtttgaaaaaaaaattgctgaattttttttcttttagttttcttattgaaaaattttctaaaaattttttcattgtaaaatttctgtttgaaaattttttttttccaaaaaattttccggcgactttttggggtgctcgtcaaaattcaaagcctcccccccccctcacgtcttacttggccatgccagccaatgcttcgcatcgtttgttcgccttttcggcatccggaaacacgtgttggccacatttgagcaatgttggtgccgcgcccgcataagtcatgtacaacatgttgcccacctgtttttcccaaatttaaacgaaattttttttaatttttgaaaaaccgtatcccctgcaaaatgtttggggaaaaaatacgcaaattttgattttttgaattgtaatggggaaaaatttgcgaattttccctaattgatagtttgttctaaaaaaaatgagggtgaa

SEQ ID NO: 32156 - DNA, 1103 bp, Heterodera glycines
  unsure (1)..(1103): unsure at all n locations
cccataaatctgggcgcatcggtcggggggactgccccgaaaacaaaaaaatcgattttttcaagtgtccgtttggggtactcaaacatttatggggagcaaaaatccacngcagaattaaagtacaggctatagggaagctattcccgaaggattcggtctccccataaatctgggcgcatcggttcagggggactgccccgaaaacaaaaaaatcgattttttcaagtgtccgtttggggtactcaaacaattatggggagcaaaaatccaacgcagaattaaagtacaggctatagggaagctattcccgaaggattcggtctccccataaatctgggcgcatcggttcggggggactgccccgataatattaaaaatcgtatttctcttcatagtatccaaagtttggggcacttcagaacaattatcggaaaaaaaaatcaaacccaaaattaaaggacaggctaaaggaattaaaaattccgaaaaaattcagtcatccccataaatctgggcgaaaaagcatcagagggactaaatgccccgaaaacaaaaaaatcgattttttcaagtgtccgtttggggtactcaaacaattatggggagcaaaaatccaacgcaaaaataaagtacaggctatagcgaagctattcccgaaggattcggtctccccataaatctgggcgcatcggttcggggggactgccccgaaaacaaaaataaatcgattttttcaagtgtccgtttggggtactcaaacaattatggggagcaaaaatccaacgcagaattaaagtacaggctatagtgaagctattcccgaaggattcggtctccccataaatctgggcgcatcggttcagggggactgccccgaaaacccaaaaaaaaattttttttggataaaaattatttaaatgaactgactagataatatttaaaataggttatttctcttcctttcagtatccctgctaagtttggtgcgcttctgatcagtttctgaaaaaaaagttaagcctaaactttttggcctttttaaaaaggaattaaaaattttttaaaatttattcatctccctttttgatagaaaaagcatc

SEQ ID NO: 32157 - DNA, 858 bp, Heterodera glycines
aacgacatgtcgggggtcgggtcgggggattggtccaaaaaacgtctcgggtcgggtcgggggccggggggctcggggtcggggcttaaccctaatacaaagaaccaaattttgtaaattttcaaggaaaaaaatgatttatatggtcgagcagcgccgacaggcgccgctggggaaaaattggaaaatttggccatatttcttaacatatttccacaaaaattgccaattattgggtcaaattttgtaaattttaagcaattttgtaccaaactaaaagaaataagcaaaaaataagaacccatgttgcgcaataaaatggaattttataaaataaatttttgaaatatataaattttggaaaaatagttcggttcttttacaattttactagaaatttttctttaataaaaattcttctcaagtgatgatatttatactttaattggtaggccgtcccatttttgaaaaaaaaatttcaaatttcttctgacggcgcctaccgatactccggtccaaaaaatcatttatttatttttttaaatgttaacaacgaaaaatctttcgtgagaatttccttaatcatgaacagtcgaaattcgtcggcagttagctaaattaaatgttatgcattgactctcttgtcatagagttgaaaatcacaaaagcatagggaaaaaggagtttatgggaatgataaaacgagaatatttgacactcttccagcttcgtgtcgcaacattttcgcttgttgcaatggcaattggtctttgctttgtgacagtagcaaatgtcgtccaaatgcatttgcttactgcactttttgctgacgaactgactccaacgccttaaaatgga

SEQ ID NO: 32158 - DNA, 1717 bp, Heterodera glycines
  unsure (1)..(1717): unsure at all n locations
ggattttnttgaaatttgtcttagaaatgagagaaatgttgaaaaaccaattcggttttaggaacatctcaatttatctaatgacaataataaatatatttttaattctataatccttttcttgataaatttaactaaaacattggtcacttgaaataacaaattcccaaaatattatcctgaaaacccaacttttcgtgactaattttaatatttgctattacatttctcttttaattaaatccgacttttggggatccgacacttagtgaacccgaaatttggggatccgacacttagtgaacccgaaatttggtgactcgacatttggggacccgacgtttaaggatttcaataaaaaaaaaaaaaaaaaaaaaaattaattttaggcccaaaattagacagacttacgtctgctttagccagtgttaataactctgtttccggactcactgcgaggagatagcagaattttgagcccatactaaccacaagacaatagacaaatcacaatacattttttaagtagtacacctctttccgatttttatttaaaatacctttcccaaggccaacgggaacagaattcgtcaagagccttcaaaaagttcgagacgactttgctgtctaattgcgtccaacaaatgccgagatcatcttttctgtttcttatctttcgagtgactttgtgcggtgctttaaattaattttttttttgactcacttgcaaagaaaatctcagtccggaaaaagagttatttaaaaaatattattattttttttcttgcaatggaatgaaatctggctaaagcagacttaaatttgtctaattttggatataaaaataaaatttaaaatttttttttgttttattaaatccccaaatgtcgggatccccaaaagttggatccccaaatgtcgggatccccaaaagtcgggtccccaaatgtcgggatccccaaaagtcgggtccccaaatgtccggatccccaaaagtcgggtccccaaatgtccggatccccaaaagtcgagtccccaaatgtagggatccccaaaagtcgggtccccaaatgttgggatccccaaaagtcgggtccccaaatgtcgggatccccaaaagtcgggtccccaaatgtcgggatccccaaaagtcgggtcccaaaatgtcgggtccacaagttgcaaatccccaaaagtcgggtagccccgttctcttccgttgctaatgtttgtcctaatatatatttttatttatgcgaccgaatagtagaatgagcgaggaataagaagtttttcattgaattaatttgaacattttttaaaatggtcatttcaatatacatttattttaatattgtttttattccattttttggtttttatttttaatttgttcgttaaattaaactctttccaaagtttctttaatttttcttttttcaaatctcatttttaattaaatactcgtcacatcaaaagaattattatatttttggcgatttttaagaatggagagtccataatcgaaatttaatttttcgctttaaaataggcttctgctgtggattttcaatggtcatgttcacgaatttgaatcttttttaataaaaaggcaaaaaaaaaagtcaaaaacaattatttttttttaattattttctaaaaataccttaatatttattgaaaaaattaattaattatatttatcttttattaaaat

SEQ ID NO: 32159 - DNA, 1113 bp, Heterodera glycines
attttttcaaaaaatagcttaaaatttttcaattttttttctcgaaattttcttggaacaatttttttctaataataagattttgaatttcctattttggttttttttaaaatttttctatgggcgagagctgttcccggcaaaggcccctacccaaaaatagattttaaattgggacattttaccaacaacaaaaaaactatcaatttttgatgacgaaactaattaatattgcctataaaaaagttgaattgaattgaactgttcgtccttgaaaaagggttgactgtgaaaaaaaaaaattatttgtaagaggcgagcgaaaatttacaaaaaaaatttaatttttaacgtgcaaaatccaattaatttattgcgtatcaataaaatgcgaagtaaagaatttttcactgattatttaaaaaatgatttcatagcttttgtctaatcttaattttttaaaattttacgcccattttatctatttttccgaacttcttgttgatcaattttttctgatcacatttcaatgtgcatataatctatttttttaaattttgcctattccgaatttttaaaatttttttgtgtttatattcgcttgtgtttgtgtgtgagctgctgatttttttttcattccatctcttaatttgttgctgactaatggaaagaaaatatgagttatccctttttggactagcttttgtaagtgcgaaaaagtcgaaatttgttaaaattttgattcgggatagcgaccaacttgggggtttaggattttcaggctgccttgggtgggtgggggatgggggctgtgcccaatcgaaataaaaaaattttttagatcatgtttaagaaatttacccacttgggggagggggtgtgtgtactcagtgtacataccctcggaaattgatcaaaaattttcgatcattttttgatcaagcaccccctaaacagcttatagcgggagaggaattcacgattttgtttgaaacaaaattattttcaaaaatatagcaggcggacggcagacctgaatgaattagctaacatataaatcaaatgggttttcattgtttacctcgcacaaaaaatatataatcaaaaaaataa

SEQ ID NO: 32160 - DNA, 1936 bp, Heterodera glycines
  unsure (1)..(1936): unsure at all n locations
ctatagggcgaatagtcggtggaatattagtcgtagcgattgggcgaaatgtcggaggaatattactgatagcgattgggcgaatcgtcggaggaatattagtcgtagtaattgggcgaatcgtcggaggaatattagtgatagcgattgggcggattgtcagaggaatattagtagtagcgattgggcgggtcgtcgaaggaatattagtcatagtaattgggcgaatcgtcgaaggaatattagtcgtaataattgggcgagttgtcggtggagtatgagtggcgattatgggaattgtcgatggaatacgcgttgtagagacgggacgaattgtcggtggaatattagtggtagtaatagttggacgggttgtcatggcgatttcagcaatttgacctcttcgcaaattcggccttcttgttggttcaattctcggcacatttggttttctttgtccaggttttagactcgcggtctctcgtcttggacgcgctcccttggttgagtttactttaccaatgacatgcacaaaaacattgttgtccgtttttagcgcatcttcaggcactccaaacacaggaaattttctttcctgatttcggcttattggaaaagtgtattggagctcgtccacgatcactgccttttttggccaaatttccgtgattactgggccaatcacaaaatgtgaatgccaaaattcatccgatggaattttccacatgagcaattccacagctcctggcagtctgatccagctgccgtcttcccccaggcttttatcaatttttaaagagtctccccacgaagttatcagccttttcccatccaaaatctctgcttttccttcttcaatcactgtctgtacattgttgaaacaattcacgccgtaccatccgtactcttttcgaattggcgccaaactttcccatcttgtctcgctcactctgttcattggcgaatggtgtattgaggcctgacagtcctcgactgaagcttcggcttcaattttcttgtcaggatgatccaacgtcatgattcggagaaaagactcggtgcatgtgactgttgtcacattccagcatttaaatgtgggaaacactcgcgaaatccgaattggtatgtaaagatttgacttcaccgtcagtggaggcttttccaccggaagagtgcaattttgttcctccggaaagctcatagtaacagtaatcccttctgtcggtttggacgggcataattggtattgtccgtcagcgggtaagaacatcgccgccatgatggtcatcagacaaataaatggaaaattcacttcgttgacgcgccagccagtccgtcctcgattggcatcacttcctccgcgtcctctgttgggacctgttggtccacttcctcttggccaattttggttttggttgatgttcggttgaaaattgccattgttgtttgttgttgtgcccgcctgggcttgggccacctgctgaaagcacctccacggatttcgtccttcccttctctttccaatctttctatctctctctcgtgcattactctttctctgattgctccatcccaaatnatgttgccattgtccccgtccccgcccctttccccaatcgctctaatcagatttaaggggaatgatgttgggatttgagtcagttgttgatcactcggccttttcgatcattcaccatttccctggctttttgctacacattctggtcaataaaccttttgttattggcttgacattttggtgagcagctttttgggggagggatgcgctctcccacatttcaggttctgcctgaaatgctgggagggcccaacacccctcgcgtaattccccgcacattatggcgctcctgngtggatttggaccattacaccgtaccactcgcccatatatatatatttgtttcgcttttatttt

SEQ ID NO: 32161 - DNA, 1229 bp, Heterodera glycines
cattctacccaatcaaaaccagtcatcagaaagaaagcacgcgagaaatttttctggagtatttttaagagtaaataattataatttgtcaatcctaacattttaaaatatattaagcgcatttaaatcaccattctacccaatcaaaaccagtcatcagaaagaaagcacgcgagaaatttttatggagtatttttgagagtaaataattataatttgtcaatcctaacattttaaaatatattaaacgtatataaatcactattctacccaatcaaaaccagtcatcagaaagaaagcacgcgagaaacttttctggagtatttttgagagtaaataattataatttgtcaatcctaacattttaaaatatattaagcgcatttaaatcaccattctacccaatcaaaaccagtcatcagaaagaaagcacgcgagaaatttttctggagtatttttgagagtaaataattataatttgtcaatcctaacattttaaaatatattaaacgtatataaatcactattctacccaatcaaaaccagtcatcagaaagaaagcacgcgagaaatttttctggagtatttttgagagtaaataattataatttgtcaatcctaacattttaaaatatattaaacgtatataaatcactattctacccaatcaaaaccagccataagaaagaaagcacgcgagaaacttttcttgaatatttttgagagtaaataattataatttgtccatcctaacattttaaaatatattaagcgcatatagatcaccattctacccaattaaaggcagccataagaaagaaagcacgcgagaaatttttctggagtatttttgagagttaatgattatgttcggggatcgtggcgtaatcagtatagttaggtctattcaaagccaccattactcttcagatctagtcacgagtcatctatgaaatgaaatgcgacgaggatgagaattgtgtgtcgtggcaagtgattttctgatgatgtaaaataatctatcaatttagtcaaatcaatagcattatataacatatatataaggacaaaatatattaacattttttttaatcatattcagtcatcagaaagaaacctcacgagaaatttatatggagtattatagagagtaaataattataattcgtcaatcgtaacattttaaaatatattaagcgtatataaatctccattctacccaatcaaaa

SEQ ID NO: 32162 - DNA, 1316 bp, Heterodera glycines
  unsure (1)..(1316): unsure at all n locations
tgcctttttgtatgataactggtagatattgggagtaaaaaaaagtttttttgtgactatttacaataaaaatntatgcagcatttctaaaaaggatctaaaaataatttcttgcgtaatattttttacattatgttgttgaagaatttgaggctgcttctgatgcgattgaaaatttttcagcttttcttgaaaagttttttcccagaatttatacagctttcccgacaaattgtttagataattattctagacgatttttttatatctcagtgcttaactattgcctttttgtatgataactggtagatattgggagtaaaaaaaagtttttttgtgactatttacaataaaaatttatgcagcatttctaaaaaggatctaaaaataatttcttgcgtaatattttttacattatgttgttgaagaatttgaggctgcttctgatgcgattgaaaaattttcagcttttcttgaaaagttttttcccagaatttatacagctttcccgacaaattgttgagataattattctagacgatttttttatatctcaaagcttaactattgcctttttgtatgataactggtagatattgggagtgaaaaaaagtttgtttgtgactatttacaataaaaatttatgcagcatttctaaaaaggatgtaaaaataatttcttgcgtaatattttttacattatgttgttgaagaatttgagtctgcttctgatgcaattggaaaatttttcagcttttctcgaaaagttttttcccagaaaacggatgggtcaaataaaaaactaaacatctcacatgaccaatttaaattcccttacattttgggtttactttattatgctggtccataaaaaaatggagtttttccggtgccaaatttttgtgaattttctttcggcccgtcataagcggattgtttgggggcaaatgaaaacaaattttgtgttattcgaatgcgctagccgagctctacattttcaaatgtatcaacaaagggtctatctccactctctggcgagttatgtccagccaaagcagagtgggccataaacacgaattttttaatctttggtatttcctctattttgagcctgctctacatttatgtattgtgccaatatgcctattgcaactgaaatttatttaactttcccgacaaattgttgagataattattctagacgatttttttatatctcaaagcttaactattgcctttttgtatgataactggtagatattgggagtgaaaaaaagtttgtttgtgactatttacaataaaaatttatgcagcatt

SEQ ID NO: 32163 - DNA, 1731 bp, Heterodera glycines
ggggacctctagagtctgctcattttggtgagcatttcggcacactgacatctttaatggcttttatttatgtaaatgtacattcagatcagctggttccacttttgggtgcacagctcgtggtccgttccacgcactttgagtgccgccattccctttttgattttcatttgtttgttggtacgcacgggtcgagactctcgagagtattgccaattcgtcccccccccgttcagctgcttgctcccgcccagtcggctgcgcttcgcacttggtttctgctctgttccgtgttcgcactgctgtccctggtggagtatttcctggtcatccgtcattacaccaccgtcgccatggggtgatgacattattcttttttaatgccatcgaaagtgtgcccttttcacgctccgttccctctcagtgggaatcggctggccacgctccaacgcttttcgcggccgttgagcgcattggaccacccgcagcaacaccaagcgcagaacggacacagccatttggaggaggagcggaaggcgacgccgacaacgaccacaacggtggtggtcactcaggacgaagtgagtgccgtgccgaaaggaccttcagcatccgaagaaactccctcctttagccgctcattcaacacggcgaatcgaccgcagtgctcgggcacggcgcgtggcactccaacaaattggacgtcgtctcccgcgtggcttttccaattgcctttctgctggccacttgcatttacatccttttctatctgtacttttaacttgcaataaaacaataggcacagcagggtgtcctggagaataaataaatgccctcaggcgcctgagccgtccgtcggtctctttgatcgttgtactgtatgtgtactgtgtgtgtatttgctgataaatgggagagggaacgtgatttttgggatttaacactttctaatcaccaatttgtgtagaaagcgcacgtaaaagattaacgaagtttggagatttgcacaaatcaattttaatgaattgagcgaagcgaaagttagggacgaaccaatgacgacgcttttgttatcgacaaacacatttatatttatcaatattgggacaaccattaacagtgcgtagcgagcaaattgggcgggggaaaaatgggggggggggcgccggagggaaaatgcggggaatccgttgccaccgccaaatttaatgttttaaacagaaacactccatccctctctgcacggaattgtcctttttatgtgccttataagcatagtggtgtactattaatacccgtctccctaattttaattgctttcgatggagaggcggcgaagtggaaaaggtaattaattaattaggtacttatttgattaattaattgcctaattaattgatcggttactcgctaatcgatttctctcctttccctttccgttttgcgccgttccctcaaactgtgccgtgcccatttgctcctctcgctgacaatttcctccgtttttgtcggcctttttctcggattcgctcttcgcattttccaactttcccctgaaaccgttcgtctcgtcaattttcccggtctctccttcgcctaatgaatgcccttttcaatccgtccgattaaaggcgaaattttcatgcaagtgttgaaaatgatgattttgccgttgatcttttcgtcgctcgtctccggtaaatttttattttttggctcggcacaagcgat

SEQ ID NO: 32164 - DNA, 1381 bp, Heterodera glycines
  unsure (1)..(1381): unsure at all n locations
aaatgtgataaatgtactacnatgtataatacaaataaaatgtaggcacaaccaaacatagtatgtaaatgtgatgtaataaatgaacccctcagggtgggactgatcaaaggaaatggggggaaacggcactgagcaaaagaaaatgtgtgccaattgatcaaaaggggaatggcattgatcaaaagagaatgtgtgcctaatgatcaaagaaaaattggggaatggcactgatcgaaagagaatgtgtgccaaatgaacaaaaagaaatggggaatggcactgatcaaaagagaatgtgcgccaaatgatcaaaaagaaatgggggaatggatgatcaaaagagaatgtgtgccaaatgatcaaaaagaaatgagggaatggcactgatcaaaagagaatgtgtgccaaatgacaaaaataaatgggtgaatggcactgatcgaaagagaatgtgtgccaaatgatcaaaacgaaatgggggaatggcacgatcaaaagagaatgtgtgccaaacgatcaaaaagaaatgggggaatggcacgatcaaaagagaatgtgtgccaaatgacaaaaagaaatggggaaatggcaatgatcaaaagagaatgtgtgccaaatgatcaaaaaaaaaattagggaatggcactgatcgaaagagaatgtgtgccaaatgacaaaaagaaatggggaatggcactgatcaaaagagaatttgcgccaaatgatcaatgaaaaaatagggggatggcactgatcaaaagaaaatgtgcgccaaatgatcaatgaaaaatgtgggggatggcactgatcaaaagaaaatgtgcgccaaatgatcaatgaaaaatgtgggggatggcactgatcaaaagaaaatgtgcgccaaatgatcaatgaaaaaaatagggggatggcactgatgcgcacaatataatcagtgaaaaatgggtaatggcaggacaaatgatcaacttgaaatgagggacacttgatcaatgaagggcagttgatcaaattaaaataagggacaaatgatcaaattgaaatgaggggaaaatgtgagaaaataagtgggcccctcagggaatgccattgatcaaaagaaattgtgcgcaatttgaatgggactgatcagaagaagaagcaatgaaactcaccaatagagttgagacaaatgatcaagtgaaaatgagggacaattgatncaagaagaaaatttatcagattaaaattagggataaattgatcatgagggacaatcgatcaatgagggacaattgatcaaattagaacgagggacatttgatncatgaaagacaattgatcaaatcaaaatcagggacaatttgatcatgangngcaatttgatcgatgaacatga

SEQ ID NO: 32165 - DNA, 1835 bp, Heterodera glycines
  unsure (1)..(1835): unsure at all n locations
ccatccaacaaagaggtgctccatcatcgactcttcttcgttggttcacttttcatcatttggcgaacgagaacgggaacgacttggagttggggagcgagaacgagatcgggaacgagaccgaccattttcagctagaagggatataacaattaaaaccataaatgacctaaaataaaaaattattcatgaattgcgtggtgcttattacgaatctgaacttggacttgcccaattccggaccccgggtacgaattcgaataaaaagttgaatttttttcgaagatgcatttttgctttggtaaaagtctcgaattcatttaaaatttatttattttaaagcaaaacaatgcttcaatgtcaaatgaataaaaatgtcagcaccctcaaaaaccccaggaatttgatttttatcacaaaattaaaaaaaagttaaatagggaccacaattttttaccattgcacctttatttatttttattcatatgttataataatcctaagaaattaatcacccagtatcatcagaatttctaacactaaaatgccatgggtcagttattaccaggcgaagcgctgcgcgaacgaggagagcgtgaacgagaaggcggtgaacgagtacgagaacgcggagagcgggaacgcgaacggggcgaacgagagcgactaagaaatttgcgagggaatggcattggtcaaaacgtacgtaccttttgcgcccggcatagccttcggagtcatctacgagtttgattctgcgcccgtttatatccttgcctcaaagaaaaacaattattatcaatttttacatttttatttcttaccctgataacgttcgactgcacgtcgcaaatcctcatgggtggcgaagcagacaactgcttcatttctcacttttttgtgtgcgtccgcataagtgacttcgccggcatttcgcatcagatccttgaggtcctgaatgttggaaagcaatgaatagcattaaaacaacaatcttaggaagaagcggactacaacatcaaacccattggggttgtaatgtacgctttaagttagtttttcaatggaaagtgaacacaccatcctgctcatttgtcagccctactcttcctccctcttcttcttcctcctcctcttccaccactgtttttctgcagttatgccctcttcccatcagttcttctcattgatgagcacaaaaaaggggccatttgtgtctcatctcttccattcggaacccaacagaaagagggggacaacgctctcatcacacggagaaggtgcccataaattcattagttcatcttcgattccttctcgaagagacttcccctccgaaagcgaagaatgggaaaaacatagagaaaggcgaaagtggtgaagagccatcgaagaaaccacccaaagagcaccgacaagagcctggatttttgttagacttcgaaaataatttattgatttgcgcaaccaccagcgcagcttaagctggtttttaaataatgaattggatgcatacaaaaaaggcaattgggtaatttttgaggaattttaacatgttttttttacgtttggaaagtgtaaaaaggcaacctgccatgaacagcgtgttgacaaattagtcaccaacattcgataacgcgtctgtataggcggtccataacgagaacttaatagaaagctttcttcgttaaaaaatgaatttattgatagggcaccagaattttggtcgtttattaaaacataacagttaaaagcactaaccttaaaatgtttttaacccaaaacaattagtgtgcgtcgtgaaagggggaatttttaacccagactcgnaagaa

SEQ ID NO: 32166 - DNA, 1259 bp, Heterodera glycines
ctgtcctattcaatgcaatggtcggccatcacggcgcattccaaggcgtaaccatcgggcgcaaaattataattgctttgattttattaattaacaaattccatttagggatgagttgtcattgcgaatttcttgcaagttcctcgcacttttcaacttcgcaggcctcagagtttgtcactttttgaacagttaaatttgttgcaatttgccattgccttcagattgacgccgcattgcgtgactttctcggccatgtccaattgtgtggggacatttgccagagggagcgactgttggagcattttgccaagcgatatttcgaatgcaatccgaccgtgttcaattcggccggtcatttttattttctgactttccaccaacttatttgcaatgttacactgcactttgcttttagacgatgtccgattgttggcctcggcactgattttgctgagcgcggatttgcacggcacagttgtgagtgttcaagtgacagttcctttggcacagtccgtccgtcctcatttagcgcagattttttatcttaaatactaaaaaatgttccataaaggtgcgaaatgcgtctgaaaaggcgatgagttgtcgcgaattcatcgacaatttgtcgcattctgaacacaaatttgacacggcgatgcttcgggaattgtacgtcgtggtcagcgaacggccgatcaattggcgacggacggaaagtgacgagatggaggggtcggttcaggtgcggtgccattttggccaatgggcgagccatgatttcttttcagaatccaattttttttccttccaccgtttagtcgtcctccaccgaccatcacaacttcgagactcgctttggtcgcattctgtcctcaaaacgacgcggttcttccgtaatttctgagttgagatcggacagtttggccggcacgatggtcgacccggagcatcaagtggactacaaacacgggtggctgtttaggaagtccatttacgacgcggacggaaaacgaagtcggcacggccaatggacggagtcggcaataatattcgcttgttttagcgccatttggaagacggaaatggctgatgcattatgtcactgtccgaggaatggtacaaactttcggtttttgcccctttttttgactttttgccatcgttcaggtgctttacctccaccaaaatgaacacagcttctcctcggtctgccgttacgtcacattccgcaattgcattctcctccaccacgcctt

SEQ ID NO: 32167 - DNA, 1354 bp, Heterodera glycines
  unsure (1)..(1354): unsure at all n locations
aaaaaaaactccagtttgggcgatgcaaaaaaactcnagtgatgataaaataanttaantttaattattntattcattaaattttatatntaatataatataatatatggggaagtattttntcataaattattatntaaattttttaaaaaagactaaatttttatttacctattcttgaacaaggaaattatagaattgaataaatcattgtctatacggctatcttaaggcctaacaagcggattttacatggattaattgcatcttacaaaataaatccattatacaaatgactttttgactgcaaaaatacgtgtaattgaaattttcatatggtataaatttttttttgattggagatagaatgctgtaagcatacccttttgtttgcatttcccgcgtatagatgaaaaaagatatttgtacaaaaaatttagaacaaaaatggctaagttttatattattctttttaaatttatatttaaatattaatggtataattaaaggcattacacagattaatattattaaatttaattattttatcttcactgatttttttttcgcatcgacctagcaccgaataaaacaatggaacccgttacttaaaaccaaaaacatgttcttacataaaattattaaatttgatgaatacatattaaattttaaatataaaatttctctttttaagaaaataacgcatgtttcaaattatttaaatctaaaaaattaatgaaatataaaaaataatttttatttttgtaaaaaattaattttttgttttgtcaacaaaaaaaaactttattgaagcagttatttaacggttgttttaattttattttttaatatttatttaaaacaaatgaatttggccatattaagagaaagaaaaaataaaatggtaattctgaatttaaaaaatataattgtttaaaagaaaattttttaaattaaacttagttgaaggcagtatgtctttaatgagatttgcattaaaattatattttaataaataatctacatatcttcgaccatttttgttttagacacgagcatttttaaatttgaaaggagtatattatacagactactatttcaagaattttaaaagaaataaaagcagtcaaaattcttactttacttgttttttttgcggaacaactttttgtataataatatttaacggatttttttctttaacccttgcaaataaatatgtttttattagtttaattttgatttaattaattgaccgaattattaattnngaaaaaattaaaatcatntttgattatgaaaactgaaaagatttatttattttcaannnttgtctgaagtgcgtgtttttttt

SEQ ID NO: 32168 - DNA, 1182 bp, Heterodera glycines
catcaaattacagtattattagatagcttacataggatgaacccaaatttttttagacgatttttttaaagaattttaaaatcagtataacaatttcatgatgagctttggcaatcaatgattagcacaactttccgcgaatgcaccacaccgaatagacgggatcaaaccccggcctccttagatatgagaatttctcgaaaacctatcctattaggggggtggaccaatcccaagaacgtatgaatgctggcacatacatccagcccggtctcggaccgcggtgccgcctccaccgtgtcggtgtcctcggtgctgttgtcggaggcgaagtagtcaaagtcgtactggcgtgccaactcaaaatactcggcatactcgcgcaggtaaaggatggtgaactgtttacctgtgaatatagcaaataaaattccaaaatgctaaaatattcaaacatatcacccccccccctccccctaaaaaattgctaaacaattttagtgcggcaaacagaatgctaaaatatgtctttttcaatttatacaaaaaatccattaatttattaattcatttcaccatttatttttttaatcaaatgatttccttaattaaattttattcaacaaaattttcaatcctttcatttcgaaaaaaaatatccagggccagcggtatgacgaaaaacttgcagacttattttaactatgattggcacgtttgctttcttaagcaagttctagtccgggtcgcagttggaggggcatgattttttaaaattcgggaaaaaccccctaaaattttgcaattccattttccatttgccggtgcttctgctgcacaggggcccacctttgcactgccgaagcccctcgaactcgtccaacatggcgttgagccgggccactgtgccggatgtctaccggtttgttgaccaacacggtcaacgggcctggccaagttgcgagaatgagagtcagttatttatttttgtgccgacgttgcgcaatgaatgccgaaaaattgcgccaaaaggggggaattttttttttgcagtttttaaaatttatttttgccgttttttaaaatatttttatttgaaattttgaggaaatgttaaaaatgatttaattttgttttttgcttcccatttacccagtagaagagcacgccgacgagaagtag

SEQ ID NO: 32169 - DNA, 1225 bp, Heterodera glycines
cccaggtggaattatggccaccaatccactcccgccacccgccggcggtacactaccaacaccgcccatgcccatcatcatcatcgcttgctgatggctcaacaaaatgcaattgccggcaccaccggcagtgccaccggtggcaaaaacgggacgaaaagctccaccaacaatggcattttgaccaatgaatgtgggaccagcagcgccaacaccaccaccacttcctaattgtttacagcggtacaaatccggcagaataattgcctaatggtttttctatgcttttggcaatgttcgagaatggaaacagaaattgattggttacattgccgggaaacattttgaaaattttcgcgattttctcaaatttttcaaaataaattacacccgaattctataggtttgactttaaaacctcgacaattcccaaagcccggagaattgggaggcgaaatttcacaattaatggtctaaagcatcattgtgctaaaaagccaaattatcgaacattgccattgcactcagtcgatgagtttgtaccggcattaaaagttggcatttgttgctgttgctcagcagcaacaacaatgttttgtgccgtacgactaacaacgcaactcgttggggttacggtggctgtgttcaccaccacattttgctgattggtgctaattgagcctgtttgtccatcagttgtgccaacagtgacattcgtattgctattgttgttgttattgtccccgactgtcgccgttggtgttcccacgctgcaaatggtaatggcacatggcgatttggcaaaatgccatggtgaaagggggggggagcaatggatgtgcctatcccgtggaaatacaacagataggcaatgatcgatcaacagacacaaacagtgagaatgtcaaaaaaaatggagtcattctggacaaaactgattaaaaaaccactagcctatgtccaaaccatgaagtgaacggcaaatgtttatcattcactcaaatcaatcgcttattttattaaatttattctctcaagatttatgaataccctaagcattttcaaaataattttttatttggaattttttaatttaggaaattttctttttatattatatatttatatttttaattttgttttattaaggaaggtacataaataaacccacttcatcattggctcggaggagtcaacagtttctgttgcatttgaagctgttcat

SEQ ID NO: 32170 - DNA, 1372 bp, Heterodera glycines
ctcattttcattcattcattctttctttcactcatccgttttccttttggtcccccctccccctcggggcttttcatttttattcgcgctatttttgtgccaaactctttttttttatcataaattgatcgatgttgaaaacttattttccattcaaatgcattttattcaattatttagacatatttaacttttttaacactttttttctcaatttgaattttcttttctcttttctttggtagtcaaaataattatttattcccaatttttatgtaaaaagaacaaacaatggcattttttggcacgaaattcaggcaaaataattatttcagcggaatcagaaaaattccgccacacaaaaattgaaattgaaataaataaatctagtcaaaaattaaaatattagtattttaaacaattcgaaaaggcaattttatttctttaatggtccttttttaaatttttaaatgcgtttaaattttattttaatttattacatttttaaattaatttccgccaattgcctttttctttccgtctgtcactagcaaaaattaaaagttaaactaaacacccaacatgccaattatttttttccaccacaaattttcaattgttaccaaattccggaagagccaacagattgtactgcttcccctaatatttgcgtttctctgcttcttttcctctctcttcctcattgtctttttgttcctctcttttcttttcctgtccatttccggtttgtgtgcctaattgcttttggcacggtaattagtggaaagcgaacatcaatttgtgctgttttgtcaatggaaatcatacgccccttttgcttggttggttaatgcattcaattgttctgaattggcactaaaaaggcatttttattggtttcttagaatctaaaccattccatatattaattagtaactaattaattcggatataataaagagggaggagccaaatggagggcggaggacatcgaaatggggaaggccaactattcttatccgagactattcctggcatttttttttgctttttcttcgtaaatgtttcgtttcctattattattaattgacggacattcctttcaaattcataattattttacatcaataaaagtcaatttggacatgataatcttaagaatttgttcctcatttgccccccccccccttctgccgtaaaattgggttattttgagcattttttgagcatttggccaattcgtccatcggtcggtctttcgttcgttcgttttttgagttgacacaaaaataacattgaaaggatcaatgcttttttgctgctgctgttactaatttattttctcaataatttcctcccaaactttgcttaa

SEQ ID NO: 32171 - DNA, 1483 bp, Heterodera glycines
ataatcattcgctaaagcccaacagtcgtttcgctcacaaatcagtgattcgattgtccgccctttggtacttacgattgcccggcatatgccccaatttgtctctgatcagtcggcacgcgtcgtgcaccaaagtgcgcggttcgaattgcattgtctttttgacgcccttctcgcgacattcgatgttcaaagtgagcacgcccatctcgagaagagaagaggggaaaggagagggcggctgagaaagaaacaaattcggtggaataccctaaggcaaaattaaaccattggcaaaaaataatcacgcaaaagcgaatatgaatatgtaaaaacgaacagaatgccatggcagaatgccatgaatgaatttttcgtttaaaaattgtttaattgatttaataaatcgacagaaaaagaaaaatgttctaagaaatgcaaaatttaattgatggattaaggaggaaagaaagaaggggaaaagtgaacagaaagagagacggggagagagaggcaaaacgaatgtttattgtttgaagggtaagcgaggaaagtgacctctaacaataagcaacagagggaataattggatcaaatggggggggggggattttgatcagtgatcggaatgaaaaagcgcatggggtgacgaggaatgttcagccattccccgaacgaatgctaatctgaagaataattagcgatgggtgggcgaggaacgaaaagcgcagcagtggaagaggaaaagcaaaacaaactgagaatttgagaggaaaaaccacggaaataaatttggctaacgtctgatgaaggaaaaggaatcgattgctgctgatagacaattattcttcaattggacgatggctgagtataacacattttaatatttgcggttttgaattatgcaaagctcagataaagcaaagcggaaaacgggggaagagcggggaagggacggcacagagggagagggtaaaggacaggaaggacggcatagggggagtaaagttaagggaaggaagtacggcacaggagagggtaaagagagggtaaaggggatggagtacggcatagggttgaggaaagttatgggaagcgagtacggcacatttgggaaggggcaaacatcgtcccaaaaaatcttccatcagcaagcagcaacagaggcagaagaaggaaaggctgcttttccggctcattttcggccaattttagcggacgatgcgaggccaattggccggccacgacatttgcaacgcttttcccgcctctgttggagtccgtcccctgggggtatggcgacgggcgtctccccccccccccaagtccatcgtccctctcccttcccctccccctcccttcgccgccgcttcggccgtgtccattgactggccaatgtgtgtagtgcaagtgcattgaaagagaaggggaccaccgacaactttcgagatttgcttcttagcattcgccagaagaagaaaga

SEQ ID NO: 32172 - DNA, 1067 bp, Heterodera glycines
aatgcggtgtatagagaacagaaacagaaaatgccaaatttttcaatttataatatgattattatgactaattttcataattttaattaactttttctctattttttatatatatatcaggataaatggaaatcaaatgagaatttgtagtgactaattgcgtggatgtccattctgctgctggagtggtatcacttgattttgattggaaatttgtttgaaggcaaatgggaactgcgtttggaatgccagtcgatactccgtactaaatttaaaaatttaattaaaatttaattcgcctcgttaagtataaaattggtccgtttgatgccgcgccaatgttcaaagggattgcggagattacttgatcaaaccaagcagtgatcggagatgaaattgaggatttgatcagattcatataaaatgagttgatgaaatatccaccaatattcacagcgatgatacaaaaaagtgatcgtaaagtgcgacgattgatctgatcagcggaagacagtcctaaaataatttatccttcatgaatattttaaaatttattaccgaacgatttcatttttataacaagtccaacaaataaataaataaataacaattgtcatcattgttaagctaaaccatattgttttttgatgagaagggcccttaatttgaataattttttgtaaaactagcaatagattaggaagaactttgataaaatctgtcacacagccagtgatcatctgatcaccatacaaattcataaattggtataatgtaatgagtaaatcaaaaccgaaaacaaagcaaattaaggttaccgtagtcaaatagagccaaattttaaatttattgtgccttaaacgtaaatttaatgtataaataaagtttcattttttacatttcatcatgatatttttaccgattccaaaccaagaaatgaaagtgatctttacggccaaacaatactcaatgaaattttgtccagaaaaagccgtgtaaacaaaaagaaaatagccaggttgatgaattaattcgaaaagggagcaaagtgccaaaaggtaattaac

SEQ ID NO: 32173 - DNA, 1369 bp, Heterodera glycines
tttattcaatttttgttttaagtcttcatgtggtgtctactcgcgttggaggaattcccgaagttttgccgccggaattcatctctttggtcgacccaaatccgaaaggcatcgtccaattattttatgaaattacagtatcaaatactattgtagattggttcatgtctaccgtagccaaatttaaattaggttgattcccattgaatttaacaataatttggctgttcgatcattatttgactcatttataatcaaatactttatacagcaattgcaattggtcttttggatgccatccgtcggcgtgagaatggcgaattgccgtgcccggtgaagaagcatcgacagatggccgaaatgtacaattggtcggacattgcgcagcggacggaacgcgtttatggcaattcactgaaagagccggagggcagcattgaccacaaattgcgaaagtgaggcaaaaattgaaattttaatgctcgtggagttaaatttcaatgccttttatctttgatcaaaattcgaaaatcggagaaaaaatcctttaaaatttccccgttcattttttcagtcagttgaatgccggtttctggttcgggctgatctgggcatgggtaacagcagtgaacatccttttcgcctcggtgttggattgggtggacccccgggatggcattgagacggttgacaacaaggcgaagacgaacaactgatcgcggttgatcggactgggatttgtgggagggaatgcgcgcataccttttcatcgttttgccaaattcaaacgacggactcacaaaagtgttgggggaactgacggaagccaaactgatcagaatgatcaaaaatcaccactgattagagttgaggtgatcgataaatggcacatttccgttctttttttttttgctcattttttaattcttcaggtctttttgccaaaattcaaaattgagtcgactccaactttggaagagctgttgccatcgcttggttttaaatgtgagttttcgcaaaaattgttattttatgaaattagactcaaaagtcattagcataggtaacttacattggcactctctttccactcattggaacttattgcatcatgttttttcatctgctcaaattttttccggcacttattgtagattttgagtcaacaaaatattcgattagtgattacgtttgataatttaagtcgggacccttttgatttgcaaaattttttttgaaattagttaattaaacacatttttaagaatactgatcattaatatgctaattgctttggtcatttttgtttttttttaaattctttttccaaatctaaagttgttcccccgttaaattaccaacgaaaaac

SEQ ID NO: 32174 - DNA, 1407 bp, Heterodera glycines
aaaaaaaaaaaacccgaatttcgaacagcccctctattaaagcggccccctttgattttttaaagaaggaaaatttccattcctaagaaaatttctcgataatatagttaatttttcaaaacgattcaatttagctcgaagttttatcaagaatttttctaaaatttgccaccgaatgatccaaaatcgagaatccgaaaactatcagcggagatgagtcgtagacataccatccataagccatttttagcaatttttgtctctatttgtacatgctaatcatgttaattgggtgctgtttattaatatgttggacaattgcaattagcagacccaagtcccctgagtttatattagcatggatttcatcgaaaaaatttttcttctaccctttcttatgaggaggtaaaaattataactcaattggatattggtagaatgagaagcagtaaaaaaaatctgaacttaagtcatcgcaaaagggggcaataacattttttaaacaatatttttttttttactatttttcacatttaattacttgtcctacacaatactgacaaatgaatgtaataattggtttagctaattatcattttccaattaattagccaaattaaattcaattttatattctgagaataattttgacatgagcacatatttagtgatgaatttgtttcgttcatttaccatttcgcaggttttcttctgccttcccaatacgtcgattttattttggccaaattggcacacaaatcgggcactttttgggccgaatatttcgaggcgcgtattgcgagcgtttttctgttggaacaaatcaacaaaaaggagagatttttggatcgaattggaccagcgaaaatacgaaacgaattgaagagaaaaatcgttgaggcgaagacgcaattttatggccaactcaaagaacaaatgtcgccaatttggcgcaaaaatttgtgcattttggtcgaacttgaaatattttttacgaaaatatttgaaaagagaaatgaatttacaatggacaaaatcagaaaatgggagccaggaaagcatttagaaataatgaaaaaaaaattagaaaaacggagaaatttattaattaattatttaaatattaatttatatttacttttttagactgcaaaaatgaaaatgattataaaaaagccatggaaaaacagagagaatttgtccgtttgtttcattgcacatttctcatcaaattgttggaaccaaagcccgaaaatgaaagctttcggcgcaaaattacgtcctcccccggggcaaagacaaagctatggagaatgatgagcagtgttgaaaaaatggcagagaaagaaaaagcatcggtcgtagtggaaaaattggggggggggaacatggcgatggggggggggg

SEQ ID NO: 32175 - DNA, 1938 bp, Heterodera glycines
  unsure (1)..(1938): unsure at all n locations
catgcactcgctgagtttgattagttttttctcatgttnttatcttttatttattnttgtaaaggttcgagatttcatatnttatttaaggtttgaagcatttattatttgcaaattttgaattttacaatcgagcccagttaccttttcttccatcataagtttcgtcaccaatactccggataataaatgccaaattcattataaattaatctttatgcctattaatttactttaaattttatttttcctttattcgacaggtttttgtatttttatgactttctttaatatattctttgccgtaaaaaatttaattattaggttgtaatttgtcatttattgtttaactgtatatatttgtttccttttcattttaaattaaatttactaatataaagtttaaaaaataattttttaattaaatttaaattttcttatcaaactcctttattagaattttaaatgacgatttacacttaaatctttaaatttatgtttcacaaattttttaaaataaaagaatttatttacagcaaatttgtatttttaataaaatttttactggaaattcttaaatttaattcttatctattatacttactattatgattatttttgagcataactaagtttggtttttatcaatttctatgcatttataatatttaagttatttcattcattcttgcggcgaccggtatcttaaatttcttaattaggagtggaaccttgagctttaaaaaatatttatcgcagacaataatatatcagtcataaattaattaaagttatattaattcttgattaaagtaaattaaaaaattaattgtctgtgtttattattattatttcttttcaatttttaagcatttaataaaattgctatcgttgttcagaaacttcctcgcactttctttcctctttacttaatcattttttaaaattttattgataatattatatttatatatatttttaaatgtattttaagagtgcttatttttttaaacaataaaaagagcctttttgaataaataaagttgtccatttgtaaaaacttatccatagttctttttcttttggtgattttgtattttattatggtcttaatattctcttatttataatatatcttatcttttttccattcgaaatatttttcatttatttaaagtaaatattttatttataaccattcgctcgaagttgatgttattcgtgtcgttcgttaaaagtatggatctcaacgtcgtgcttgaacatttttgcaaaaaatttaaatccaagacatttagcaatttcattcattataattagaacctaaaagtaaatattaaatccgatatttaaatttttattcgccagatttgagcaatatttatatttatgtaattttgataaatataatcgcataataaaattttcagctgtttgtagctcaatataataataataattttttttgttagaaatccataatttcctcactttgtatttatcttttattttgttcatgttttcctactttaaacttacaatccacttggtagctagatttctttacaatatacaaatatgtttttttattcttttcgattttatatgctgacagttcatgccaatttatcagctggaaaatttattatttaaatatttttttaattagcacattaaattcggtttgctaaatgattttatatattgttcaatttaataattacggatgggaaatttaggtaaatacctaaatttttgcacacttaatacgcatagagaagcacgaaaagagcattttccgcttggtttggggcttctacgatgacttgtataatacctattcttacctatttgggagtttttctacctattatacctattaaggattttcacaaaattccttaacaaaaatgcaataaaaccaaaaaaatacacccc

SEQ ID NO: 32176 - DNA, 1543 bp, Heterodera glycines
  unsure (1)..(1543): unsure at all n locations
cgctgggcgactacgacacgggagcggaactgctggtgcgcatggcgagacgcggcggctgaagggcgagcncaatttgtaggcggcgctgcgcgaggcggccggcgaatttcacttgtccggtgggtattaatggcatttttcccagataggatttgtgccgactcctataaattttttatcccaaaggtgccgacgaagcaccgcgggtagtgattgtgtggaaaagtggcacctccagctcggcaccggacaaacttcggcacacggccgatctgttgcgacaacagtacggcgcgttggttttggtgataaccgccggcggtctcgcgacggcggaggaccgcgcaatgactgtggggcacagcgacccgctcgtgttcgacggatgggccgaagcggacgcggacgcactcggagtgatcgcggacacaatttgcagggtacaaaaaacaatttgttgatcagtggcgaggagacaatttgggcaccagaagattgagttccgcccccttcagccaatgaaaatcaacaacaaaaatgccgtctttcaggtcattcctcaagctcggggtgaacagccggagacggcgatcagttggccaacccgtgccaccagcgcgccaagcagtgcgacaacggtagaaaaaaaatatccagatttaatttggcattttataaaattgcgtttaaattgcgccatctttcaaaagagtgacggagcgtcgcgcgactgcactcgaattgaacacgcgttggacttggtccttgtggtggactcgtccaccttcagcgctgaacagttcgcaaaggttgttgaagggctggccacgttggttgacgagtcgttcgacttggcccctgacgttgttcgagttgggctcatcgtgtacaggtcgagtcgtcgatttgggaaggaaaatttaaacgaaaatcgacatttttcagtgaaatggtcgctgtgccggtggcacttggccattacgaggacaaaattgagctgttgtccaaaatggtgtctgccacacacaaaattaatggtcagtgtgtgctattttgcccgagggaattcgttcacctcattaggccaattaaggcacaatggcaattgccctgcgcgggttggaagcagcgcgtcaacagtttcagttgcacgggcggcaaggtgtgccaagagtggttctgctgctgaccaacggcaaacacaggtgggtggatggacattcgcattggcccacgtggtcttgttaattataattttaatctctcgaattcaaaaccatttcctaattgatagaggcaacgcggcccctgtcgccgccgaacttcgcgaacagctcggcgtccaaattgtcgccgtcgctgtcgccccatcgttggaccagctgaacacgctgacgcgaattgtcgccgacccgaccagcgttgcagcggcgacgacggtgcgcgagcgattgctgcgcttggacagcgttgatcagttggccgacgcggagcgaatcgcactgctgcgacgcgctctgtgcaccgcggccgcaaccgc

SEQ ID NO: 32177 - DNA, 1208 bp, Heterodera glycines
  unsure (1)..(1208): unsure at all n locations
accgagttanaaggattggatttccatctaaggcttaacatttggcccatttctttatcaaacggaggaatagataaaataaaataacagttcttaggtttgggaccatttagttctgcgccgcaaatgtaattttgactgggcgccgcaactgtcggcgccgcaaatgtcgctctggctgggcgccgcaaatgtcgctctggctgggcgccgcaaatgtcgctctggctgggcgccgcaaatgtcgctctggctgggcgccgcaaatgtcgctctggctgggcgccgcaaatgtcgctctggctgggcgccgcaaatgtcgctctggctgggcgccgcaaatgtcgctctggctgggcgccgcaaatgtcgctctggctgggcgccgcaaatgtcgctctggctgggcgccgcaaatgtcgctctggctgggcgccgcaaatgtcgcatcacctcggcgacgacgttttggggtgcaccgccctgagagaccaaagcaaagggaaaggtttttggttttccttgacaatgaacatatgtaatattggtcatctgaataaaaaaaatgattgaattgaatggagatttaatttttcaatttacatatttttttaggaaattcatattttaacttttgacttttatgaagttgaccaatagaaaggattattcatttgaaaaataatttaaaaatttcaatttttggttttgatttttttttgaaaaattcccaattactcctcccggtcccgtgcaatactaatccaaaaaaaaaacagcgaaaaaatgaagtcaactttcttccaattaacattctctgttaaaaagggttttctcaattttcttcaacaaaattcttttgtatggcctgaaatcagcactctctcatttttgcgttgtgtaagtctcctgattttttagcgccaaaaatttttttaaaaatcactgcaattaattttttttcagggtcgcttctaggggggggggaagtttgggcaccaaattaaggatttaaaaataaaaatgtttttaattgaatctttaaattgcaaacatccaatttaaagcagataaatttaacaaggctcggtctgttcaagacttttaaattttatgagtttaacataattagacgggtcatttgatatttcgggcccaactaatccgggtattctaagttcaaacaataattagtacacgtttaattc

SEQ ID NO: 32178 - DNA, 1962 bp, Heterodera glycines
tatattaataaaatttaacatatactctcaaatatttttttattcttaaaaataatattatttaatgaattataaattataactcatcaagctatttttataagataaaaagcgataagctaaacagctggatacgctcgaatcgctgcaagagtttaatcgaattttaaaaaaaatccgtgaaaaaatataaacataaattaaaatttaaaaattatatttaaaaatttctttttttctcgcaaaaataaatttaatattttacaactttttatttctataagcatttatttctagattctagtattaaataaatttagttttcaaattgtgaaaattgttagtcagtgctgaagtgaattttgctcaaatttaagaaatttttttcataaacataaacataaagcatctttttaaaaggttaaaataaatattaaatgaaaaatattaatgaattaaaatttgtaaaataaagccttccataaatgattacttaacaattataattaaaatcaaataaattaaacaaaaattttatcagaaaaaaataaaattatcaaagcatggtgataaagagtaaattcacagttttttcacattgaacgaaatgaaatctaaaactttgtcattatgtctaaaaatattagctttaagaaaataattctaaatttcaactgaattaaggcaatataaaacaaatcatctaatatatcaatttaaatgctaataaaatcgagtaacaaagattttaacttttcagctcaatgttagcaggtatattatatatgggaaaaattggagattaaaatttacactagtaatgtttttaaatgccaaagcttcttttgaacaatgtcaagcataaaataattttaaaaaattactcgattaaatatttgtactgccatattaatagccctttatactaaaaataattatgtttatttgatttataatttaaatctctatttaaggaaaattttaaaaaatgtttaaatatattaactattacttagtgcaaaaaaatgccttattaataaaacaagatatattaaaaatatatattatattgaaacgattagaaaaagcaaacgtatataattctatttatccttaaatcataattttatgacaattaaaatgggaattttgagattgaaagttgttaaaaacaagcctaaaagaaaaaaatagagaaaaaaaataattaataataaaaatataacaagaggaaaagtttttagttgtggtggatcagaactttcactagaaaaatgctaacaccacgcattaaccattaggcaagaacactggtgcaaaaacaagacaacaaattttctttatattattatttaaagtttaatcttcaagcttgacacagatgctcatttagcagccctaaaaaattgcacatagaactttagtgtggtcaagccacaaacaatagtttcatttggaaactccaccatcacttgaaaacctacttaaaatttaagcattaaaacatgttattaaaacagaattaagtaaagaccacatttcctgtataagtttaaatataatataaatgaaaaatttaaaaaatacaaaaataaatttctaatagaatttaatacgagagagttttattaatgcatgtatcaatttacaaagaaaacgctcgctgtttcttgagactaaaagaattaatgacctgaaaatatgatgaaaaagtacaattaatatttgttcaaatgaaatttaaaattaacatttatactattttttatgaaaaagaacgaaaaaatttatatcactaaatacaaaaattattaaattgatcgatgtttaatttattcaaaaaaaatatttaaaaaaataaaacataaaacactaagcacgagaaaaagacaaataatattttagaaaattatctcagatacaaatggatttaaatataataaattgaaaaagttaaaaaaa

SEQ ID NO: 32179 - DNA, 1626 bp, Heterodera glycines
aaaaaattgggtgggggaataaatgaaaaaaaaacaatttaaaatgggcattttatttttgagtatttaggaaaaaatgtcgcccgtcgagaaaatccagcagaatttgttgcattcatccaaatatgattaaaaaaattccacaaaaaactaagtttttattgttttttacaaattgggaaagggaaccacatttttctggattggcattccgtccacttttgtccattttcaattttcagtcaattcgcggctgccgccatgttcatcacagtgcgcttcagaatggcacggtccggcacattcagtgccttccagtcggccaactcgcccagcagaacgccgtacgagcccagcaattggcccgtcgaatttgcgcggtcgctgaggcgacgccttcgccgcttcgactcgccggcggcgccgtcgaacttcagcagttggaccaccgcgttgcacaccttttcgcacagcggctgaatttgccgagttcgccgattctgtgggggaaattggggagtgaaaatgaatgaatggacggaatggaaaaagtgccaaaaagggcgaggaggtaataaaaagtgccgaaagggtgaaaaagtgtcaaacggtaaatggcaagggactggtttctagctaaaacatggccatgcacaaatgcagaacaacccaccctcgggagcagttcgattccccgccgtcgtatcaatgaattcgaaaaaatgccaggaataaaaaccaagaaaaataaaaaatacgaccatgaaaaaatttcagtaattttttgtaaattataatttttaatttctctaaagtttagaggaaaggaatagcaaaggtcccaagattttggattttaaaggcttgtagggcatcttttggaaaaaactctcagccaatttttcgaatttttccttaagaatttctgggacggaggtcaaaaaaataaatttaaaaaaattgaggataaaacatttttctcccggtgaagcggcggcacatcgcttccgcacacaaagtttaaactgcggctgtacttgttgcaaaagtcggagcaacgattggagcgcaatggtcgccgtttgaatgagcggcggcgatggcgttccgtcgttgtcccaatcggcttttccacgcgccgtgtcaccgccgtcgtcgtcgtcgtccgtgccgcccaaattgttacgcaatgccccggtgatcaaatcgagtgaggacagcagcagggcacagtggggcgaattcttcagctcacggccccccgccaaagtgtcgaccaattgctgcactttggcactcaacaggggcatatacctgtggaaaccgatggatttggggtcaaaaattggcagagaaatttaacttgcccaaaaagtggtatactttgctgtattacaaggcttaaaaaatttaaaaaaaaaattcaaattttttagtttttcctagaaattcagcaaatttagtttttattagcattagattttcaaaaaagcaaattttttattaatttttttcgacgatgttatgtcccggcggttgtccggcgacgttttcgggtgtacccattttgctacgcaaatcaaaaaaggtatttcggatttgcaattttttaaaatttgccaatca

SEQ ID NO: 32180 - DNA, 1388 bp, Heterodera glycines
  unsure (1)..(1388): unsure at all n locations
tgataaaaattngaaagactcgaaacttttttcatatgagttaaattgcttagcattcgcttagaaaaagattctcttttcaaaacttttcgaatgatatcaatattcgatttagttggtgggaatgaagtgaattatggctgatctaaataaacaatacaaaaaatggcaatgatcagtgtaaattttgaaatagcgcacaaaattacgaaaattggcgttatgtatttattcattttgtctattttaattttctgttcctgacaaatgagccttgagcttttgaaatttttgagtttgggtaattttggcaaacaatgctaacccttctgttggccatttgtctttctttgggcccaattttggcctatttgtccattgcacttttctctcaccgttttttgatcgtcgatcgttctcgcaatcggccaatttgcacttcgcccggctgtgtccgatgtaatcggaatgcaaatgtgagttttttggctctattgcgctttaggcaaatcaatgattgtttttaggccatcttggaatattcgaaaaaaagagaatttaatgtttctcattgtaatttttttaaaggggtttttagtttacctaatttattttctaatttctaatttaactttatttttagtttctaatttaatttaaaagtttttccccaggaactcgcttccgccatggaccgctttcaaaaggctcgtttcgccgcccgcgcgcaattcgcacgcgttcggagtgcgctcgagcgcgcgcgttgcgcgtcggtcgacgacgcgcacgaacttttctttcgcatgaaatttgagggtgtgcaacgacccgtttggacgcgttcgcaactgccgccggcttttgtcgcaaaaatggaattatttgaacgccaacacgcggccattgcgaaggaatgcgaaagggtcggcatttggcaagccatttacaatggaaattaaaaatagacttgaaattggcgcctatcgaaaccaccagacgccctatgtttagggttttcaattattgaacaataaactcaaaaaaataactacaacataaatttatcacccaacttttatataattttttcctcatggcgcctctttgcaatgtcgaaccacatcactagctactccgattttttgaaatttttcggagcgttgttttgtttgacaatagttgttcccaagtttttgttttttttagttcaaacattgataaaattcagattttcacccaaattcaaaatttaaaaaaaatcatttttcttaatccattttccgcatttttcatttttgcccgttaaggcacttgaccaatgccccctatttgtgagccccggaacgagggaaagggcgccccgcactgcacacggacaatggcgc

SEQ ID NO: 32181 - DNA, 1570 bp, Heterodera glycines
  unsure (1)..(1570): unsure at all n locations
atgttattcnttaaactgttttaaaaggagtgataatttcattgtaattatttttnaaaagaataatntctagcaaatntaaagcatatccgtgttaatcatttttgctcttctgcttgggccaatggcacaaaaagacaaaaaactaaaataaattaggaaaaagaaataatgcaattgcacttgagtagttagtgtaccggcgactaactactcacttgctttcgagtctcataataatacacaaaaaattaatatttatatttcaagttcatatttatgagtaaactttaaatattcttttttttcttaaaagtgaaattattaaaatatgtaaataacaaaaatatagcaaatttcatttttaatattaatatttattttaaaacaattataaaactataaaaacagaatatccaataaaaactttaaaaaaaatttaaaatatggactaaaaaactcaaaaatggccaaatatggaccaaaatatggatttattcccgaaaacccccaaaatatggatttcatggactaaaaactttcttcaaatcaaaaaattttaacgtagaaatgctatttttgagccccattattcatagcatatgcgcagaaaaaatatattaatccatatagtttataaccgtacttacaagttatgctaaaataataattttaaaaaaatagtaaaagtattaatgtttattcaacataaatcacagcttgcgctggttaataaaaaggaagggtctaaaatttgtgagaaaattgactcataaaagtaaattaattttttttgtaatataactggtagaaaataaaaaaataacgaaaaaactgaatcaatacaaaataaatttttttttaaaatagtaaataataagctttttaatttatgaaaaatttacaaatattttgttttcaattaaatgactactaatgtttattcaagttgcaataaatattatatggcttattcgctttcaagaaccaatattaaataaaaataaagattaataataaatacatcattgaaattttgttattatttgaaatgcagagtaaatattaagattaaaccattaaattattttttttaaaactttcaaatcaacaattatgcattaccttatgatttcggttccttatgcaagtaaaaaaattccgttattctataacaatatatttaagtgtataagaatcagaaaatgatttttaacaaaaaatttcaaaaattgattacgaagaataatgtaaaattttgtaaatattaaaatgatgtgaagtgcattatgtttaatgtgcttaaaagaataatcacataaaaatggtaaaaaataaaactataaaatgtatccctaataataagaccgaaaaatttattaaaaaagccgctatataaattgaatgaataaattacagatattgaagaaattttaattattaataaataattttaaagaatttaataaagtttatattattctgcattaggcctagcaaaacaaaaactatataaagtaataaaattatatagttctgtgtgcaaaaatcaacgttatgcgggcaaaaa

SEQ ID NO: 32182 - DNA, 1435 bp, Heterodera glycines
ctcaaactctaaatgggtatgaagccagggttgcttgactctgaacccaggcgttgaatgtttgagctccaagtgggccatttttggtaagcagaactcggcgatgtgggatgaaccaaacgtggagttaaggtgccaaagtgcccgctcattagaccccataaaaggtgttggttgatatagacagcaggacggtggccatggaagtcggaatccgctaaggagtgtgtaacaactcacctgccgaatcaactagccctgaaaatggatggcgctggagcgggccacctatactccaccgtcattggcttgtacacgtgcttgtcgcgtagtctggccatgacgtgtaggagggtcgtggtggttgcgttgaaggctttgggcgtgggcccggccggagcttccaccagtgcagatcttggtggtagtagcaaatattcaagtgagatccttgaagactgaagtggagaagggttccacgtgaacagcagttgaatgtgggtcagccgatcctaaggcaccggctaacgccgtaacacactacggatgacgacttttctgtgcttgcgcagttggtccatccggttgccgaaagggaagtgggttaacattcccacgccaggctagggaaatgacggttcgcaagagctgttttgcgcggtaacgcaaatgaactcgcagacgtcgtgtggagtccgagccagagttctcttttctggtttagggtgtgcgtgcctggaagtggctcagcctgagatagggatgttgcgcccgtaaagcaccgcggttcctgtggtgtctcgtgcgctccacacggcccttgaaaatgcgagggaagctatttgaatctcctgcctgatcgtaccgatatccgcagcaggtctccaaggtgaacagcctctagtcgatagaataatgtaggtaagggaagtcggcaaattagattcgtaacttcgggaaaagaattggctctaaaggtcgggtcagccgggctgttgcgtgaaacaggcggcttttgcccgtggctgcgtgctgttctttcggggatggtgcgtggactagtggtgagagctgcttgtggagcgcttcagctgcgtgtatgctcgtcagggtatgcacttcggttggcgctgaacgaccagtttagaactggcacgaactcggggaatccgactgtctaattaaaacagaggagacggatggtccttgtggacgttgaccgtgtctgatttctgcccagtgctctgaatgttaagccaaggaaacttgattaagcgcgggtaaacggcgggagtaactatgactctcttaaggtagccaaatgcctcgtcggctaactaccgacgcgcacgaatggatcaacgagattcccactgtccctatctactatctagcaaagccacagccaagggaacgggcttggcaaatttagcgg

SEQ ID NO: 32183 - DNA, 1391 bp, Heterodera glycines
gttgttcaatttaaaattttgaagaaaattttttttccctctaggtttctagagaaaaaccaaaactgatttattgagagaaaaaaatttcatgattttaaaaattaaaaaatttttgctattgtacattttttccgggccgcgaccgtcggcaccgccggacccttcccgttcgttccccaaattacataaaagcgcgccataaaaaaatgctgtgaacaaaaaagtaaaagtaaaaaaaggtggtcgccgcccgggtgcggtacctcccctccctcaaagctaaaatcttgggaaagattctatgagaaaatcatttcatggcacttagtgtcaactttcaaaatgaaaccacgggaaaccccaccccccccccacaaaaaaaacaatgagaagtcaatgcacacacttggatgacaaagtacgagttctgggactggatgctgtacaggatggccttgaatgttttggtggcaaatgttgccggcgggtcccatttgtgatgcaagtcgaagtggtggaacaccggctccaacacggacctgtgattggaaacaggagaaagaagaaacaatttatgagtttttgcacggcataactctcatggggaacgagtgtttatgtcacactacttaaattagtaaaatatggcaaaatctattttttagaccatttttatattttaaagcaaaccggtgcaaaacagggatgggccaaattgaaaaataaaaagcgaaatgcgaaaattgcgaaactgaaaaatgcggaatgaaaaaaaagcgaaatgcgaaaagccaaaatatgcgaaaatgcgaaaagcgaaattttttctacaactttttaatagttaaaatcataaagcaaaaatcatttttttaaattttattccaaatttaaaaatcaataaaacgcttttttgaggcgcgctttttccaaaaaaactttttgggaagagggggcaggcggcgccggcattgaaaattttattaaaatttgacagattttcaccaaaaaatcatcaaattttgtgatttttgtatcatttttctaatgagaaataagagttttggcgcgccgctgagaacagtttttcatcaaattaccaaattttgcgattttgggccattttctaagaaaaaataggagttttgggggcgcggcggtgccgataggcgccgccggggaaaaaaattggaaattttgatcatttataaacagtttttcactgaaaattagccaatttataggtaaaattttgaaaaattttatgggaatttaatccaattcttaggggtgtaaaagtcgcatttcgcgccaaaaagcgaaatgcgaaacgccaaaaaaatgcgaaaggcgaaatgcgaaaagcgaaacctaggcacatccctggt

SEQ ID NO: 32184 - DNA, 1179 bp, Heterodera glycines
cccgtctttttaatttgtgggagggatccggccgcttcgcggcctcaggacgggcgcttcgcgcccgttttttaaattttttgggagacgttcggccgcttcgcggcctcaggacgggcgcttcgcgcccgttttttaattttgtgggggacattcggccgcttcgcggcttcagactggcgcttcgcgcccgtttttaaattttgtggtggatattcggccgcttcgcggcctcaggacgggcgcttcgcgctctttttaaattttgtgggggacattcggccgcttcgcggcctcatacgggcgcttcgcgcccgttttttagcttgttaggccgcttcgcggcctcagtcgggcgcttagcaaatggtagaagaggtacaactgtgattagaagaggtacaacagtgattagaagaggtacaactacgggggaagaggtacaaaagtgattagaagaggtacatcagtgattagaagaggtagaagggtaattagaagaggtacatcagtttaaattttatttttttacaaattcaatgtaaattgaaacatgatattctttaattttttattcaaaatttaaaaattatttttaataaaattttcaccaaaaaataatttaattcaaatgaaaaatttttatttattattaataaaattaaaaatattttaaatgaaaaaaaaatgaaaaacagaaaataaatgtgtagaaaattaatgtacaccgtccggattcgaacctgccccccccccctcaaaatgatgcctcagaatccccaatcacacagggattctgaggtcttgacgatgtcaaaagtaaaatctgatcacgtattcgtgatcagcggcccaaataacccctaaagacatatttttggaagatttttgtgagaaaaatttttccactcaaaaatcatgtgctcccctttttggtcccgaaaccaaaaatcacttttatttttgtatctttttttaaaaatgtgataaaaatgtaaaataaaatttatattatagagaaaaaaattacggatttttgtagtatattacttttcccgaatagcttttcagaaggcagttacgaattttctgaaaaatcgaaaatttccagaaattctggaataacttttttcatattgatgctagaaatttcaaataaatcccataaaattctcctta

SEQ ID NO: 32185 - DNA, 709 bp, Heterodera glycines
ggtcttggacaatttttaatttaaattattctttttggatgggcactcgaaaattaatttaagtattttaattttatcaatttaagaaataaagctctttttcctattcggcttaatttaaattatccaaataaaatcgaattttatccgaaaaacttctcgcatatatttttatcgtgcaaattttattaaaaacccatcatttttttcgaattttcgcgtttccaagtttcattttatcctttcgtatcaaaactccaaatttaatccccctcccccaccctgactttgaaaagtatccgccgacaattgcttcccccccccccccaaaaaccgtccactaattttattttctcccaaaaagccaataaattttcaattttccccaattttcggggtcaatttttgtcgtaaagtggcggctttgggctgggctggggacctccttttaaatttttcgcctggtgccacccgcaaatttccataaatcacccctcgccagcccccctccccccccccaccctaacccccgccggcaatacaaaacgcagcaccgacgcggagaccgctcaacagcagaagagcaaaaatggaggaatttgttggctcggaggacagcaataattcacttggtggcccgatttttggggctgaaatgaaatgaatttaacaattttttaaagtgacggctcacccatttttactgttt

SEQ ID NO: 32186 - DNA, 1535 bp, Heterodera glycines
ttgatttattacgcaacatcgaaaagaagacaaattgtggcaaagaaaagttggaagacactttagacaaaaggaagaggcaaaacaaaaaacaaaaaggacaaaaaacgattctttcgttgacccgatacaccgacgagaaagtgagcccgtgccgcgttcatccgtcgaccgcctctaaagtcgcaattccgcccgtctgttgttgccgtgccattgtcgtcccattggatgtgccgcctttcgatccaatggaatttgccatagctgcgagtgctgccagctgcgactgttgctggtggacggtcgtggccggcggcgttgccggatgggcccctgccggcgactgccccaactgctgctgtgccagcatggcgaagtcaacgcccggcgggaaaaagccgccggttggcaatgcccccaaattggcgaacagtccctgaaaaaagctattgatcaacgaagagcaatgcaagtcaaaacaccgaccaaattgttgattgccatcgccatttgttgtaaatttggggtcactccctgctgatgagtctgtgaactctgcttgccaccattgggctgctgagcatacggatggaagcgatggctggcagaagcgccgccgccggcggattggcaaggcaatggggaggctgaaaaccaagcaactcattaatgctaattgatttgttgccaaggctcttcacccgcaccccttcacaaaactcacaatctttccattgttgtgccgtctgctgctgcaggcacagcggcggtcccatcggaagtattcctgggggcagcccaactgagggccaagcggttccgttgttgttgaacattgccccggggtttgagtgtggttttgcatttggcgtggcgccctttgcgctgttctgcgacactttgtttgtctgatgagtcggtgtggagcgagatgaacttggcgagccagccgggccctttttgccagccgaagtcgtcacagcagtcgatggcactgtcaccgttccagccgactgttccccttgggaagtcgtggaactgaccacgttgggggaactctgcttgccgatgtgtgcgtttttgtagtgagcaaataactgctcctcagttgggaaaatggagccgcacaattggccatccttcagacgataagtacaggccaaacagccttggggaagttggccagaagcacaggccatcagcagggccgggatggacagagcggaggtgggggacactctgaaaaggacgcatcagcagaaaggcaaggacggcaccgactgacccgccatcgcccccatttgacagcgaaggaccgttagggggaagaaaagtgccgctggcaaaggcatcgaacggatgcatttgcattgccaagtttaacgcagaggcatccaactgattggcctttttcaacgacacgcttggaggaagaggcacgccagcggatgaagtgaacagctgaacatccaataaaaaggaaaaattagtcgaccaatttggggtcacctgctgagggaacaattgaggct

SEQ ID NO: 32187 - DNA, 918 bp, Heterodera glycines
gatggttccatccccttaaacactcttatggggatggtcccatccccttaaacactcatatgaggacggatgtcatccccctagacactcttatgaggagggtaccatccccttaaacactcatatgaggacggattccatccgcatagacactcttatggggatggctaccatccccatagacactcttatggggacggtccaatccccttaaacactcatatatcccttccacctaaacactcttatgtcattgttgtacctcgtttaatcactgttgtacctcttctaatcacgttaatcccatccccctagacatttgcattgggatggatcccatccccatacacactcgcatggggattgattttcgaaaataaagtttgcagaatgccaatttttatcattgttttttatcctataaaaacacaaacaacaattttttatcctaacatatcttacatttttgcgcaaactaggcgatgaatttttattccttttatattgttaataatatagtttacaaaactgtttccaatattatttaatttgccaacaaatcataatatcctcatgaaacaataaaatttataagttaaattctgaattatttagttttttattcaaaaagttcttaacacagtattagactttttaagtgtatttacaaacttacaaaagcaattataaaatttatataattttttgcacttttatgtatgtctatattcttcgcttttggtccatattttaggactatattttgtttttttaattattttttaagattttgatattattattttgtaagttcctactggtggctggcggtgtccgattttcaaaggattggactttcggagaacagccaacaattgccctcatcctttaccaaatcgtcatggaatggatttttgg

SEQ ID NO: 32188 - DNA, 1383 bp, Heterodera glycines
aattcgtttacctaacggcgatgccgttgaattcagttacagcaatgccaaattagggaaccctttacttgataattcaaagccggtcttgaaactcatcctaaccttgatttaaattttatttttaagcggcttgaggttggaaatgagccaatttttcctgcagaatgtcgtcaacgcggcataacttatcgttccccattttgggtgaatatcagccttatggtaggcgaatggttatgttttagtgataaaaaatatttgagcgaataggtaaatggccgatgcattgacaatgtcgaagtactgcttgctgaaatcccaattcttttacgttcgaataagtgcaatttgcatgggctgtcaaaggagcaattgatccaaaagggcgaggaaggactcgaaaggtttatttgtttcatttacagccttacaattagtttggttgtgatttttttaaacaaaaattaataatttgctgttgattcaggggtggttactttgtggtcaatgggtcggagaaggttgtccgacttcttgtcgccaacaaacgcaattttccactggcacttcgtcgtcgggcctttcgcgataaaggcaaattgttttcggactgtgcggtgatgatgcgttcgattcgaggcaatcatttggcatcgatgatgacccttcattacgtggaaaattgttccatgatcttggctattcaagtcccgcaatttacaataataaattaaaatttattttttataatttttctaaatgcatttagttccgtcgtgaacttttctacgttccgttgatgtacattttgaagtgtttggtcgattggaacgatgcgatgattgctgctcagctcaccgctggcaggcctgacgacgttttctgggagggatgcgtgaggaatatgctaatgatggcacaggtcagtctctggaagctaaaatttatcagttcttcaattaccaggggcgtatgctagttgctttaaatttttaaggaggaaaacatcgttccgcatggaattgctctccgtgcacttggcaatcgcttcagagttgcgcttggtgatagaattgcgccatgggaagacgacgaacaggcaaagcatctgacaccaattaataaatcatttgctgaagttcccttctaattgtaaggcgtgtcactttttgctccatcagtgtttggccattcatttggagacaaacgaacaaaaatttttctgtctcactttaatggcccacaaactcgtgggacttgtcaagaatgaggtgcaggccgaatccttagacaacccccaatttcaggtactgaaaaggccatacaaacttcctaaacctgaagttcgttaaggaagcgtccgtcacaggacacatttta

SEQ ID NO: 32189 - DNA, 858 bp, Heterodera glycines
acttttgaaaaacttaataacatttttgcaagttggcaagctaatagaaaactcttagggctatcgtaagataccaagattgtgcaatatggttgagtctgagaaaagttatgagtgaatttactcaaaaaattagcaaattttgcactttttgtccttcgaccccacttttgcctttttgtccttcgaccacttttgcactttttgtccttcgaccacttttgcactttttgtcctgcgaccacttttgcactttttgtccttcgaccacttttgcactttttgtcctgcgacctagcaccgtacttggcatccaagtacgaatccgagccctgggcaaaacatattcgacacggttagcattggaacaaggggcataaaaaagcttgttttatttgaaaaaaaaatttgaaagaaattctccgtcagccaacgaaaagttggtggtttttatcctcttcatggataataaggagtagcaaataaacggtcatcattcggagaaggaatatttttttaaattttataaaaacttcaccggggaccgaaccatcggttagttaatcagaaataacagcataaaccactaaaccaaaagttgaattagtcttctgtctgtatgatttattttaaggcctaaaatgctattaaaaaacttcgccagcgtacaattaatttccttaatataagtgtatttttgcgtaattgaacattttcataaaaattcgcagttccgctagcatacccaaatgaattcaccaaagaactgaacaatgaaaaaaattattcagtataactatttcagaagaaaaaattgtaaaggactccagcaaaactagaaaaagatttctttaaaaa

SEQ ID NO: 32190 - DNA, 1389 bp, Heterodera glycines
  unsure (1)..(1389): unsure at all n locations
ttttgagaattttctatgcaacaaacgctctcgaacatgnaacgaagtgcggtgcgccatggccattttatttttcaaataatttttatatntaatagatattccagaaaaatggctatctctttttttgagaaattttctatgcaacaaacgctctcgaacatgaaacgaagtgcggtgcgccatggccattttatttttcaaataatttttatatttaatagatattccagaaaaatggctatctctttttttgagaaattttctatgcaacaaacgctctcgaacatgaaacgaagtgcggtgcgccatggccattttatttttcaaataatttttatatttaatagatattccagaaaaatggctatctctttttttgagaaattttctatgcaacaaacgctctcgaacatgaaacgaagtgcggtgcgccatggccattttatttttcaaataatttttatatttaatagatattccagaaaaatggctatctctatttttgagaaattttctatgcaacaaacgctctcgaacatgaaacgaagtgcggtgcgccatggccattttatttttcaaataatttttatatttaatagatattccagaaaaatggctatctctatttttgagaaattttctatgcaacaaacgctctcgaacatgaaacgaagtgcggtgcgccatggccattttatttttcaaataatttttatatttaatagatattccagaaaaatggctatctctttttttgagaaattttctatgcaacaaacgctctcgaacatgaaacgaagtgcggtgcgccatggccattttatttttcaaataatttttatatttaatagatattccagaaaaatggctatctctatttttgagaaattttctatgcaacaaacgctctcgaacatgaaacgaagtgcggtgcgccatggccattttatttttcaaaataatttttatatttaatagatattccagaaaaatggctatctctttttttggcaaatgttagggacagaaaattggacatgccaggttggcaaacacattttcaagcagaagttgccggtataaaaggagggcactaaccccccaccaatcagtacaccaacggtttcctgagaggccaatgcctcgtcctcctttccctcccttccctttccccccgtgccgacaactgctccgcctgcccgttcgtgccgccgactgttgtgccgaaccgtgcgccgcccgttcagttccaagccgacccgtgcgccgaccgttctgtgccatgtccattccgtgccgccgccccgcaccaccgatgccgtgccgtgtcgccgacgtgttgtgccggatgccccatctttccccgacttgtgccgtcccccattt

SEQ ID NO: 32191 - DNA, 1456 bp, Heterodera glycines
  unsure (1)..(1456): unsure at all n locations
cagtgttcaggcatataccacaaaagatttgattaattaattaattgctgattatcatcgtctgtaactttctctaaatgttagaattctcttgttttgggtttgtgcgaacatgaacaaagttattgtataaaaacccggggattgtcaattgattggactcacataaaagtcagattggactcataaagtgcattagagccagtaatttttattaaaaatcaaaaaaatttgaaaatttagcatttttcaacattttataccaggccgtaacctagaaaaaaatttcttcggaccaaaaattccatttaagataaaattttgaacaaaatatatgcgaaaatcgaggtggatgccgttttcagccccccccccaccctggttacgggcctgttttataccgataaatttcaaaattttttttttgcaattttcgtcccatatttttcgttcttttcaatgccattgtcatttcattaaagcaaacttttcaaaagatcatccatatgtaccacaaaatttgtcaatcatcgtttagatgtaaatcccctattaaaaaaattttaaatgcaaaatttccaaaaatttttttacttatttaaaatgtcaaaaatttgttccgtcatcacctcattcattcgccatcatatattttctgtctcctcttctatgtgaatgcacattttgttcacactaattgcatctctctctctctctctcccaattgcccacaaaatggcgccgttttaatttgctccccgctaattatcaatgtaattaaccgtctttgtcaattaattaattaaccccccccccccaccgcccaccctctccgcctaattacgcccctccatttgcacaatgcaaaagtaaaaatttcgacaaaacggcggcgcatttgtgatgagagcagcagagaccgatcaaactgatcacaatgatgactttttcattcaaattccgttattttaacaaaaattatttaattgcccgggagaggctaaaattcccccccccctccagcctacgtcaaataatgctaataaattttttaagaattttggttagatttttatttttaaaaaaataatcatcaaattcaacaaaatttcgggtatcatttgaaaagctcttaacagcccctaataaattagtatcagtgtcaaaactgaaaaaatttagaaataaaaaatgtgaggggaaattttaaaggaaagtttttttcataaaatttctgacattaaaattttactaaaattttacaaatatttgggccctgtttaatttttttttatatatataatttttttgtgaattaatttagttttacttttatttcgcgtggctgccatttaaatttgaatttgaatttacagtcaggtgcaaaacaggggtaggctgacgtttcgcttttcgcccattattcgccattttttggcgacctgcagnngcatgc

SEQ ID NO: 32192 - DNA, 1516 bp, Heterodera glycines
aaaattccgcaacatttttattgcccttgtgactttaaagtggggcaggcaattaataaattgggaatatttgaaaaaatgatttttaggtttatctttctccactaaattgttatgctatttttttggaatttttcgtaaaaacaatataatttcattaatattaatttatttgtttttcttcataaaatgattttctgaatttcttacgatgaaataatcaatgcaaataattgcacattgattactggaaattgatttcttcttttatttataagcatttccaaagccgcccagcttctcatttttatgaatttttttgtttttctttaatttctttcacatttttatggctctaaattattttttgttcgtcattttaatgattctcataaataacggcaagtttataataatatttaataaatagtcttttgcttttttcttttaaaatgttttgtgctttttcacatattcgactgttgtttaagttctgtaataaaagagaatttttttttgtttgctgatttaaaaaagtttcaattaaattgagtgataatttgcaaatgccattcgaaagagaaagtttaagcatttttagaaagcgtttaaaatccgtttggttttttcattttttctgttttaaggctgcgcgcaagattttgagttgggccttcccttaaaagatttgctaacgtccaaattttcattgcaaaattcaaaaccattgaaagaatgttttatggcagcgattggagacgaaaaagagcgagctcatttcgaaaggcaaattttgaacaacagcgaatttaggggagaattgaaaacgatggaagaaaaagaaaaagccatttcaaagggccagcggaaaatggagccaaatgaaatagcagaattagtggaaaagcatttcaaagtgatgggcgaacacaaaatggagggcgaagaagaagaaaaagcggaaacaaaggtccaatcgagaggggtggccaaatgagaggcaatttggccaaaaagaaacatttaaattatgaaaaataaaaccacaaaagcattttaaaattaacataaaacagctagcgattgccaccaccaccacaatttttaggtaaggcttcttctgctgatgctattcggcattatgccaaagaataagcacatggaaggcaaaaaaatatgggaagagaaaatttggggaaaaaaatggcaaaaacatttaaaagatttaatcaaaaaaagacaagtcaaagtatcaaacaccaagcagttgggcacggacaacttggagaaggtgaagaacacaacggtacacctcagttgggctgtcacgtttgggccggcacggttgggcccagcatgtttttccagtataactttctttaacttttttcgttgtcatccatcctccaacattgttgatatcattcggaagcataacatgtttagaagcttttctaagctattgagtcgcgattagacaattaccaaaaaagttatacataaaaattgcaaaaag

SEQ ID NO: 32193 - DNA, 2023 bp, Heterodera glycines
  unsure (1)..(2023): unsure at all n locations
tttgctttttttccatttattcaatcgaccacgttaatcattctctatacatttagtgccttatttcatgaaattatatataatttaattttaaataaagaggctaatttttacagaaaataaatagacgctgactaattagctaacatttataaagaaagtagaaatttgattaaatgcatatacaaaatattacttttttaaaatttgtataaagttcctagtcgtatgtgctttgcgttggttggttggcgtgggtgagtgtggtggttgggccgtttttgcgatattgtggctggaaaaaaaaatgcgatttcactgtggggagcgcggccgtctgggttcaagtgcttgcttgcgcttgtgctcggcattgaacggtgatggctgctgctggggtgccacctttgtcgtggcctcagtttctccagcgtttggcagctgtcgaaatgaataaaacatgcagctcgtctgtgtgttaaagaaatttggcgagttaattgacttgtgtaaatgtggcctaaggcacaaatgctgtggggaactcagcactggggatgctgaacctaaagttggtggtggtgttggtatacgagtgagtggcgtattgccatggttgacaagccctatgagttcgtggatcggaactccttgcctggggaccagtgtgcttgcattcgaaaaaacacgaggcataagcgcccgaaggcctttggcctgaggaagtgtcctaaccggaaaatccggagtgctcgtgtgagtgcctgtgcactcgccctcggagctgtgtccagcggcgagatggttcttcccaagtccgggaagctcggatgcctggccagcgctgtgtcattaccacttgctcggtcgccttcgccgcccatcgcgcacgcttgcgctgaacggagttgtttctgctgaaactatccgtctttacaagacggctgtaatancggcgcttggcaacgctcgctagcagctattctggttgatcctgcctgaactgatgtgttcatttcaaagattaagccatgcatggtgtaagtttaacctgccagacagggaaactgcgtacggctcattacaccagctataatttacttgaccttgacttcttacttggataactgtggtaattctagagctaatacatgcaccaaagctccaatctccccagagcggagcgcatttgttcgccacaaaaccaagcgccctccgggcgtccagtgttgactcagaacaactaagctgatcgcacggtcttgtaccggcgacgtgtctttcaagtgtctgccttatcaactttcgatggtagtgtatctgactaccatggtgatgacgggtaacggaggataagggttcgactccggagaaggggcctgagaaatggccactacgtctaaggatggcagcaggcgcgcaaattacccactctcaacgcgaggaggtagtgacgagaaataacgagaccgatctcttatgaggccggtcatcggaatgggtacaatttaaaccctttaacgagtatctatgagagggcaagtctggtgccagcagccgcggtaattccagctctcaaaatgcatagaattattgctgcggttaaaaagctcgtagttggatctgtgctagccgtccggtgcacactttgtgtgttactggtttggttggcttttctgccggtctttccccggcgttggcctttaccggtcggcgtcggtgggctggcgagtttactttgaacaaatcagagtgcttcaaacaggcgtttcgcttgaatgttcgtgcatggaataatagaagaggatttcggtccgattttattggttttgctgaccgagataatggttaacagagacaaacggngccattcgtattgctacgtgagaggtgaaattcttggaccgtagcaagacggactacagcgaaagcatttggcaaagaatgtcttcattaatcaagaacgaaagtcagaggttcgaaggcgatcagataccgccctagttctgaccgtaaacgatgc

SEQ ID NO: 32194 - DNA, 1467 bp, Heterodera glycines
tttcggatgcccgcccctgggcaatgcctttgtcgccgtcttccgtttgctcttccgctgcttctccttttgctgtttcctccgcctctcattccgcacttgccaatttcttccgcttccgctgatcagtgccaagcgccgcccctccgcatcggtgtgctccttccggacgcataccggcgccgcgtggagccttggctggcattggcccaacggcacatccgccagttcagcgccgcaccgacgccaaagtgccgtaaatggggcagtgttttgcgtatcaattcgctaatcagtcagcttttcctcggcagttcgtctgcccattttcttcgtgcccattgcctccaaatgatccccaaaaacacggactgtcgcccgtcgttgggactgaaggcgcttttcgatctgatggccgtctctgaaaatgacaaagcattggtgggaatgggaagtgatcagtcggcacaaaaccatcagaattgaaatgaatcggtcaaaaagggactgatcaattgaattaactaattgggaaatggaaatttaatacagcaaaaaatgggtcaaatttattgaaaaaacaatgaatgcctttcctccctttcattaattaggaattgccctccggcgccgatcagtcggttctcgcgctatttggcgacatttgcacgtaggcatttccaacaattacctaatgaggtaattaaccatttattcattcgccgcccagcgatgtgaacgaaccggtggcaatggcatcgaagtgagacgaccaaagggcgaaataagcaattaaataattaggaattggaacgtcgtccatttgtcgttcaccgaatcgcacgcgaagtttggcactgccgacgcaaatgaggcaaattaattataatggaaaattaaataattaataatggaaaattttgatgccacagctttacccgaccttttttcgccttgtgccaggcgaacggagtttgaacagagcgcgatgcgaactgatcaaaggttggaagagggaggaattaagcaaaaaaaaaagaagaaattaattcaaaaattaaatatttttaaatttgcgcagcttttggttggcgtcgtgtgggcagcgtgaagcaaagtgaccatgtcagtgccaatggggcgggggtgatcaaatgccgattttgttcaattttggacatggtttactcctccttgtcgagactcagtctcgacaatggttcccttggcccccactgatttttaagtgctgatttgtgaactgaattcgacctttttgtccccattttccgtgctcagtcgtccctgtctctgtcccacgaacgattgaccaccaaattggagcaggacggagtgcaggtgatttacacggccagcttgagcagtgagcacgacgagggcacaatcggagccgaattggagcaaattgaagggtgacatgggacggcagggaaaaaaggccgaact

SEQ ID NO: 32195 - DNA, 1250 bp, Heterodera glycines
  unsure (1)..(1250): unsure at all n locations
taccaaaaacagtggaatcaatttggagatggcagtcccaaacagnaacaaaaaatcgagggagaatccgaagacccttcttttgtgctttggttcaaatattaacaaaaacgcaactctgttggccgcgctgttcttctcgtcgcacatctgctgcaaatagttgcgcagcactctctcncggccgcgtcaaatccgcgtggccaaacggggcgcggacttggcgacggtcgaacacgcggaagacggacctttcaaatgggggagggaagccaaaatgagaagaaattacaggaacagagggcagaaaacatctgttgcactttttttgtacattttcttatcatatgacattaaaatttccaaaaagttttccaggcggcgcctatcgacaccgctggacaccattggagcattatactttgaaaatttgaccccaaaacggtaaaaaatcgttatttttagcgcaaaagccctacaaattcctgctttttcgccgcgataaaaattttgaaaaataatactgtagaaatttttttagcccgaataggcaaaaaaagctcttcgggtgctctccccgaattgtttactggatacgggcctgtggccagagaatgcaaaagagccaaacaaaaaatggggggaccaaccgattgaacaactgcatgaagaacagagcgcactcgtggttacggaaatggacgcgaatcagcacacagtcggtccactggtgctgctgtgggagttgaccaccaccaccaccattgccgccgcccaagtgaaaaacaccgccggcgaacggagcggcggcggccgccgaatgggggacggacgacaaaataacggagggattggagagggactgaaacggcggcggaggggttttggacgaaatgccgtaaatgtatccaaaagattttatgcaaatgaaaaacatcttttgggtatgaattataacttttataaattaggggtcgataaacaaaggaggacccttttgaagataatgagaattaacacatttttaaggttgctaatcataatgtcatttatttgttcatttttttctaaaaacaaaattttttgtttatcaaaagaggccccccccccctttggttttggaacaaaaaacttttaatttctcgaaacttaatctgatgagaacctataaaagtgcctttgtttcctttgggcctanaaaatgttctcgcttaaagtcccatcttggtaccctgcccataagccatgtt

SEQ ID NO: 32196 - DNA, 2179 bp, Heterodera glycines
taagaatgaaatattcgtgggataaaaagcaaaaatttatacaattttgaatttttaaccatctttgacaatttttatgaaataaagtaaattttgctttaatttataaaatatttgtggtttagtggttagtgcttcacaactaacagtattttttgttatgagttcgacaccagggatgggccgaggtttcgcttttcgcatttcgcctttcgcattattcgcattttttggcgtttcgcatttcgcatttcgctttttggcgcgaaaagcgacttttacacccctgagaattggattaaattcccataaaatttttcaaaattttacctataaattggctaattttcagtgaaaaactgtttataaatgatcaaaatttccaatttttttcccggcggcacctatcggcaccgccgcgcccccaaaactcctattttttcttagaaaattgcccaaaatcgcaaaatttggtaatttgatgaaaaactgttctcagcagcgcgccaaaactcttatttctcattagaaaaatgataaaaatcacaaaatttgatcattttttagtgaaaatctgtcaacaaattttaatcaaattttcaaaaattttcccggcggcgcctgccccctcttcccaaaaagtttttttggaaaaagcgcgcctcaaaaaagcgttttattgatttttaaatttggaataaaattttaaaaaatgatttttgctttatgattttaactattaaaaagttgtagaaaaaatttcgcatttcgcttttcgcatttcgctttttatttttcaatttgtcccatccctgttagatctctattatcgcattaaatgtaaatttgtattgatcaataaaagtaaaattaaagaaaagaatattgaatttaaaaaatgccgttgcccattaatttctttataatttccttaacccaccaattaaagtgtgtttgttttgcccaagaaatgaattgatggcatggcacacgcaccacacgtaataacaatgccaattcgatgaatgtggtctatgggggaggagggcgtggaaatgaattggggaggcggcaccaaagagtgctatttttcgcgcggcacaaaattggccaaatttggccagaatttctcaccaataaaagtgctcccaactgtctctccatgccgataagcaaaggaaaagccgccggtctccaaacggcgacataagctttatacaacaaaaaaataaaacaacggcgacgacgaggacgacatgagagaatgtgccaagtttcgggcattttgtacacaatctcatcaaattaatagattaaatgtcatattctgcattaattgttatgccctaccacacaaattcgttggccaatgtgccacaatttaaaatggcacagtgtaaaatgccaaaacaaaagcccaatttgattcccgaatttatggacgagagggaaagccatcaattgttgtctgaattgatccattaatcattctcctggggaagcttcttctctgtctcaattgcttatcaatgaaaaattctcgataattttgcaatttttaccattttttaattaaaaattttccttttcctttttcaatttctttttttttgtaaaaaaatcaatattttttgaaaatattttcaaggcatgcttcattctccttgtacaaattttttttcataaattaggaaatgcatctgccatttttaggcacaaaaatcgcgaaattggcattaaataggcaaattaattttttttaattaacactttttatgtaaccaaacacataaaaatataatcaataaaacttaatttttacatatattccaattataaatgaagttattaaaattttaaaggttttttcgaataaaaaaaaaatttaaaccaaaaatttttatcaagaaaaaattatattttagggaatcaatctttttctgaaaattttttttgggtcatttattaggggtgtacttttcattttttttaaatttttattaaggatttttccgaaaatccagaaaataggcacaaaaatatgcattataaaagtcatccctagacaatccaaatcaagctgaaattgtgtttttcgtgcttatctgagcgtatcaagttaaaaaaaattcacagggggggctttttcagaatagcttaatctttttaacgtcatatt

SEQ ID NO: 32197 - DNA, 921 bp, Heterodera glycines
accattgaatttgaaccaaattttgcagttgagcttctcgtttgccgtgcgcattcttctcatttgtcagtgtgatgtgggtgaacatagaaaaataaaacaacaaataaattttaaaaaagtggtgtttattttaggaaaattgtattggattggccctgaggtaaaaaaaactttactagaaaaactcgctaatttcgaaaattcaaattcattcaaatgttccaaagtttctctggcagcacattaggcatccccagaccccaaattcataggatttattatttttatttttaattaatcattttggttaaaactctaaaaatttaatttagtttaattaaatgagtaaattaaaagtggcaagttcaaaaaacgagcgaatcaacaaaattatgccaaatcagtaatgagaaaaaattgttgtcaagaaagtaaataaataaattttggagatgaatttttgagaattcatttcttcgggatgtattttttgaattttaggtcgattcttaggggtgtatttttgtttttattgcattttgttaataattttgggaaaaacgccaaaatagttgaaaatattttttttcaaaatttttttaggtttttagatgctaaaaataaaaaacaagaaaatatttgccaataaatcgaaaagtagcttaacaacaaccgaaaaaaaacacgtttttcgtgcatttcagaccatagggagctcaagaaaaaatagctgaaaaactataaattggagccttattaattactatgaaaattatggctaaataaataaatcattttaacaatgagtaatttttttgcccttaattcgcgcattttttgtagttatgaagaatttttcacaatgtaccatggcatcggaaggtggcaattgacacccttttgcgtgctataaaattt

SEQ ID NO: 32198 - DNA, 1109 bp, Heterodera glycines
aagcattgtacagcataattaaaaccgaaaataattttcgtatattttccccaatttatttcaaaaagccaaaaaaaaatgattaaatttgaaaacgaaatagtgcacaaaagggagggatggttagacgaaaagaggaatttttagaaaagagcgcaccccatctgatattcccatttttccgttccacaactggccaaaggcgactgtgctaattgacacgtagttgtccaataaggtacttggactttccacagtaaaatgtggtacaaaattttggaactgtcccgcctcacggcggggcttaaaagcattgtactgcataattaaaagctaaaataattttcgtatatttttcacaatttatttcaaaaagccaaaaaaaatgattcaattttgaaacgaaatagtgcacaaaaggggagccgccgcacggcggggcttaaaagcattgtacagcataattaaaaccgaaaataattttcgtatatttttcacaatttatttcaaaagacaaaaaaaaatgattcaattttgaaacgaaatagtgcacaaaagggagggatggttagacgaaaagaggaatttttagaaaagagcgcaccccatctgatattcccatttttccgttccacaactggccaaaggcgactgtgctcattgacacgtagttgtccaataaggtacttggactttccacagtaaaatgtgctacaaaattttggaactgtcccgcctcacggcggggcttaaaagcattttactgcataattaaaaccgaaaataattttcgtatatttttcacaatttatttcaaaagacaaaaaaaaatgattcaattttgaaacgaaatagtgcacaaaagggagggatggttagacgaaaagaggaatttttagaaaagagcgcaccccatctgatattcccatttttccgttccacaactggccaaaggcgactgtgctcattgacacgtagttgtccaataaggtacttggactttccacagtaaaatgtggtacaaaaatttggaactgtcccgcctcacggcggggcttaaaagcattgtactgcataattaacagctatgataattttcgtatattttt

SEQ ID NO: 32199 - DNA, 899 bp, Heterodera glycines
gaattgtatcgatgcgagcgttgattttgtctatgtttgtcatggcattgtgttgaacttttgttattttcgcaccgtaaattgatttttttaaaattttaattttcgactttttgttcgaattcgggtccggagttcgaaattggtcgcaatggatgtcagattcgtgatcagcgaccccgaaaaccccctagaaatgtgttaaaaaaaaattttttttatggtctgtaaaccacataaataccaatttttctattgaaatgcaaaagttgaagcggacgacttctttaatccagatatctggcagcccttttcatttatttttttattcagacataggtataaactaaaatgagtaatcgagtttacattggccatcttgcttcgcgcgccaccgaccgagatgttgaacattttttccgtgggttcggtcgaattcgcgacgtagttcttaaaaatggctttggatttgtggtctgtttgttattgcttttattttttacagtctgttttaggagtttgaagattcgcgcgatgctgatgatgctgtttacgagctcaatggacgtgaactgctcggggagcgtgtagtagtcgaactttctcgtcgtggtggtaacaaatagtgattttataattaattatttttcgtttaggaccctatggcgggggtggcggatacagcggaggaggtggcggtggtggtgggtatagcggcggtgggggaggatttggcggatatcgcggcggtggggcgtaagttttcagtttttattaaatttaaatatatatatacataacgtatctttcatgaattactatttggtgaatcctttcctctgaaacttattattctcatccgatttgttcgtttcataaacttcaagtgtaaaaatgaa

SEQ ID NO: 32200 - DNA, 959 bp, Heterodera glycines
tttcgttttcgtttcgtcgtacattttcggcactttttgagtttcgttttcgtctaccaaagttttttcgtttcgttttcggttttcagaatttttttttcgttttcggttctaaatgtcatcgcggcaaaaaaaattaatttttttattgcatttttattaaataatttctgaattttacatgaaatatttgaaaaatatgcactaaaatatgccttaaaaactgccaaaaaatggcttttaactttcaaataaatgccaaatttactttgaaaacaccaaaacaaagaactaaggagcattttttagataattgcaaaaattttgaatttccaagttttaaatttttgttatatgctaaaacaaaattatattttttatataaataaatttttttccaaaattttcttacaaaaaattaaaaaaattttttggtatcattcgaaagtacaaagtctaaataatgtaataatacgagaaaacaagaaaattctaacatttcaagaaagttacatacgaaaataataagtaattacttaattaatcaatcttttatttttcaattttctagccagcgaaacttaggtaagctaatttttgggaattcataacttagattggatatgttagtggtattaagcttaaaataaaaaaaaatcatgagatttttatgtatttaatttggtttttgaaaaaatttttggaaactcaggaaattttcgaatttcataaaaaactgagaactcggttctgaatgagagttcacccaaattaaaatagtaggaaaatccgcaatttttgctttataaaatttttcgaaaaattaaaaattctagttgtcccccggggggataaatggagacggtgggattatttttcaacctcctcagaaaggggggcataattggggacagcgggattaatggagacagggccataattagagaatatacggtatg

SEQ ID NO: 32201 - DNA, 1627 bp, Heterodera glycines
  unsure (1)..(1627): unsure at all n locations
aaatgttattgtacaatattgggtcggggtgggttaagtgtgccacaacgaattgacaaatatgagggnatgagggtaaagagtaaaaagagaaattgcattttcattacttaatctccccatttctgtgttattttttcgggttgactgatcttcattttgaattattttgcaaataaatccctattttttcttcttctttttgttttttttcatctttgattgaaatttacatcaaaatccgcacaaaaaattgtttataaaaattcaataattattaaaagcagtgggctcccagtaaggctttagcctaatttttaatgttttttgaggagcaaatgagtcagtctaaattttcaaaatgggggggggctttgaggctttttgtcgttttttgttttttttgaggaaaagccttacaaaatttggttaacaaattccataaaattcttaaattttcgcgcagcctccaaaacttctattttgtttttgtttgtttttaagtgattcgaaaatcgccaaatttgtctattttggacaaactttcttattaaaatccgcttaattttctaaaacaaaaaaaattttcggcgtggtggggtttttcggcacccgttacatcaatattttctatgtttgaaatttaaaaaaaaatttcaggacggggcgggaaaattttagtacatccttttgaaaaattttatctgggacccctttgattaaaaaaatattgcaaaaaaaaaacattttaaatagaataattttatttttaattgcatatttttcctctattccatcaataaagcttcctaatgttgtcgtcgtcgttctcgtccagtaccgaaattattgaaaaatctttcaatgattttgaacaaaaaatgattgaaattttgggttcgctttctgatcagcatcaaaatgaagtgtctgctcttcaagcagagatttcagcactgaaacgaaaatatgaggaggcaaatgggaccaattcttccgacataatcccaccaaaaattgtacgtaaaaacgggggggggggttggggggggagtcacgttgggaaagtttaccgcatttttttacggcatttttttgagccaaaaatttaaaatttttctttgttttttttttcattcctctaatctaaaactgtgagcatttttggtcaaaaaataaaattttctgcgccagatttattcttattactagggcgtgtaattatatgcaccaaaatttgcaaaatacgcacataaaaagtgaaaaatatgcacataaatttttccaaattgagggcaaatttttaaatttcttcaagtttgttaaatttaagcataaaaatcccgaaaatagctaaaaatagtatgaatgattattttagaaccaaaaaagtaatatttatttattttgaagaaaattgagcaaaaaatggagaattttctattttctgactatttttggcataaagttccaattttttaaaaagttaactttttttttatcagaaaatatacccaaaaatctgatatttttgaaaatttttcggtcattagagcccaaatggccgctttaatagagggggccgttttaatagaggatttattgaaaaaatgccgaaatatgcaca

SEQ ID NO: 32202 - DNA, 1604 bp, Heterodera glycines
  unsure (1)..(1604): unsure at all n locations
gggcaatttatttatttatttttgaaaaataattgaaaatatttttgtatttttgtatttttttttttaacaaattgcccttacataaaactgcttgaacaccctatccccagactctcttccgccgtctcttccttcttcgttttctgtccgtcgtaggggtacagcaaatctgccaattctgacaggcggtcggcggcctccaacagcagttttcgaattttgtagatcgtctcttcaggcttttccagggccaatgctcgcttcaagtaggagttgttttttcggattgggctcctctccaactgtctttggcctgggactggtgttggccttcttcccctcggggcttcctccatggcactttctcttcgtttgagccccagcccttctgggggtatgcatggtttctcattcaccgtctgcgtcgccgacttcagtgtgttttcgaacagccgttttccgctcgttccgaggctcatcctttcccggttacttctttcttctctttctctcggtttgggtgccgagtccaattcgctttggcattcaaagcgtgccacgctgctggaatagaaaggcattcgatcctttggcggcgccggggggttttcgaatgcctcgcgctccctttccaattccgctgtgtccttttcgtcccttttgccattttgttccccacttaattttgccgtcaatttttcgatttttttccttatttctctcttctttgcatcttcttctgcctgcttcacaatttcccttatttctctgtgtgcttcctcaactttttccatgctctgttttttctccttttcctcttcggttaggcgtctttttttgattcccctggcgattattgtttcttctgctttttcttccgctcttttttccacattttgttgttgcttctctgacttctttttttcttcttcgtccttttttgccttctcttctgcttccttctgtgctttttcgtccgcttccttcgccgccttctctttcgcttccttccgcacctcttcttccaactccttccttgctttttcgtccgcttccttcctcgccttctcttctgtttcctttcgcgcctcttcttccaattccttccttactgcctcttccgcttctttcctcgcctcattttccgcttctttcctcgccttttcttccggtttggctgccggtcgtcggagtgcccgtttccattcttctttttctgctttggctttttctttggccttctcttccgcttcctttcgcttggcctcggacttcgcttccatttgctctttttcctttctcttccgctcgcgtttgatcttctccgaatatgctcttcgctcctttatttgttcttcttcttcctcttcttcctggattttggccttcgcatcgatcatcaattgaatttggcgatcgatttccgccaatcggtactccttcttgtacatttcaacttggtccgggtgaatcacttggacttgatccactgacaatggcgtgaggatcggtgcataggggcggngttggaatttgtcgtcatgtttttgtttttgttgttgttgttgctgttcagattctccttcggagtccgagtcgga

SEQ ID NO: 32203 - DNA, 1462 bp, Heterodera glycines
cattccttccgaatattcgcattctcaaatgggaaaaacgacgactccgtgtgctcatttacaccaatgccctccttacgcgccatcggtcggcactcctttggctgtgccgtgttcttcaggttggttgcccacttctttttttgtttgctttgcttttgaatggttcccctgggcctccttttcacaatttgatccttgttacaaaaaaggcgttttttgaaatccgttttcggtataatgactatcctctgtctgtctgtatggttttttggggcagtttaaattttccaaagattggaattggattggcctctcctccattcgtttttcctttcccacccccccccattcgttttccttgcccccgtcccattcattgccttcctttgtccccagcgtttctcttcgcttcgtcccctcctgcccatcctcccacttcgtctttaataaacggccctttcccttccgttcgacaaatgtacgactctgtccccccgtcccatcaacaacaaatgctcttccatcagcaacacttccatccgctcgccgttttgccctctccccaatgtcgccacagtttcgcgcgtcctcccccttcctccgtctctcatccattttcggtgtgtcggggcggtccctttgcgggcattgcgtcgccccactcggagtcccttttccttccgccctcttacgctttccaacagtgccaacagcagcaaatccctcagcgctttttgcggggccatcagcagcaacggcacaaccgcgtggtcacttacgacaatgatgagatggacctcgaaatttgtggtagcgttgaactcgctttattcccttttgctcatttggtggtggtcatttagcgatcgaacctccgccggtgttggaggcggagggtaacatttctgcgtctgatgaggggccaatgcgatttgaggggggcggagggaccacgcggtcggactctgacgcgtcggacatggacttgcgcgagattttgccgcagcagcaatgaccgatgccgtgccaaattgcatccacgccagacaaaggcttatcgagatttttccgcagcgcaatgaatgaatgccgtgccgaattgcactcttttcacacgctttcgtttgcctttgactcaatggctcactttttcattgtcatttcgttctttgttttcttctttacaccttttcttgtttttaacatttttattgataggtttaagcgggaattcttcataaatgcgggtattattttcattaatttccaaatgttattgtaatttctgattctgtaattctaactcgtattgaagaatatttattctgtgaataaaattaaaaatggaatgaagcgaatgaatgccgcaattggtccgcccgattggttattgcctttctgtccgctcaatctgctgaggatgctgtgttttcagtacggagccatccgaagaggacag

SEQ ID NO: 32204 - DNA, 1180 bp, Heterodera glycines
  unsure (1)..(1180): unsure at all n locations
tcagcattgagaaaaaggctggaatttacttgtgacccaattcgcggggcattttgagttagaacaacgtcncaacaattcttctgattacagaagcaatgtcccttttattttggaatagggtaaaaccttccaggagttttatgcgcacatgtcaataataggaattgcactttagttaaaattttaagataccccaaactctcaaaaatctttcttttaaaccacctgaacatatctacctgagacaaatgataatatcggaagttgtcttaacaaatgtagactatgcttttgtcaaatttttctagtggatatcaccgttcatttatgctttattttgataatgctaaaccatattccctgactttatttatccttttcattgagattaactcttcgcttcctcagcattgagaaaaaggcttgaatttatttgtgacccaattcgcggggcattttgagttagaacaacgtcccaacaattcttctgattacagaagcaatgtcccttttattttggaatagggtaaaaccttccaggagttttatgcgcacatatcaataataggaattgcactttagttaaaattttaagataccccaaactctcaaaaatctttcttttaaaccacctgaacatatctacctgagacaaacgataatatcggaagttgtcttaacaaatgtagactatgcttttgtcaaatttttctagtggatatcaccgttcatttatgctttattttgataatgctaaaccatattccctgactttatttatccttttcattgagattaactcttcgcttccacagcattgagaaaaaggcttgaatttatttgtgacccaattcggggggcattttgagttagaacaacgtcccaacaattcttctgattacaaaagcaatgtcccttttattttggaatagggtaaaaccttccaggagttttatgcgcacatatcaataataggaattgcactttagttaaaattttaagataccccaaactctcaaaaatctttcttttaaaccacctgaacatatctacctgagacaaacgataatatcggaagttgtcttaacaatgtagactatgcttttgtcaaatttttctagtggatatcaccgttcatttatgctttattttgataatgctaaaccatattccctga

SEQ ID NO: 32205 - DNA, 1635 bp, Heterodera glycines
ggctggcaggtcatggccacgcggcgccgaaaaagtcaagaaaaagttaatttttgaggtttttcggccataacttttttgtaaaccgacgaaattttttgaaattttacaggctaatagagaatctgaagagctatcgaatgataacaaaaatttttagtttggttgatcaggaaaaaagttgttagcaacggcgccgaaaaggccggcgccgaagtgggcggttccccaaacgaatcattaatatttgtaagtttgagtgcaccggagcgggccaacgccttcttattgttagccaatttgagcatcctaattagggtgttgatttattttatgacaaagcatttttatgcgggttttttaattgcatttcattttttagaaaaattttttagaattttgtaccaaactcattgtcagcattttttggtttcaaagtttgaaatgtgttatatattaaattttatatgcaatcgcttattgttaacatctaaacatgtaaagccgtaaaatggagccaaatttgttggattttatcaggaaataaaaaatactgacaccaaacacttggctgggacggaatgagacaaaaaaaatttttttttcaatggagagaaaaacatgcattttttaacacaccaagcaaatggttcactcggataatggcccaaatttgctattaattgttattaaaattttaaaatgggttttcataatcacacagaatcgaatcaatggtgaccagtgggcaattacatcccggtggacttgacgagtctcaacgtgaccattgtgtccaaatttcaggttagaaaaagtgcgctttttttgcaaaacatatatttatgttttttctcgcaaaaaaatcagtatattatttttttggaaaacgcgccgaaaaagtggattgaaaagaaaaaaaatatccagaccccatttttttacaaaaatttatgatgtccaggttcagattaatgaaaaattgaaaattccgaatcatggattggttcatttttctgctgttccctttttattttcaaattccaacttctattttcttttattattttcaaaattcctgcgattttttttcaatttttaattccccgaaaactaaacatagaaatttttgagaaataaagaaattctgtgagggacatcggcaagatgttcctctaattgttttgctcatttgcttaaatacattaattgatttgctctctcccttttcccccctaaagccgtggtccacagaaattgttggccatggtaagaatgtgacgctttccgacatggtgccgctggtgttgtaccgcacaacgcgcgaggtgtccttccacaacaatgtgacactgaaggacgtggtcgcgtaagtcggcatgggcaaattgggctaacccgaagcaaaaacattaattagcgagcaaatttgagcgattttgaaattgaactagttgattttttgtgccgttgaaaaaataggcggaaatgtttgcgcagcgggtgggcgtcgaactcgcgccttcttttgaaaacaaaagtgtttgtgccatgcccgctcacttcattccccgaaaggcattgccgcatgtgtttccccctcaacaatataatacttagaaattcttgaataat

SEQ ID NO: 32206 - DNA, 1372 bp, Heterodera glycines
  unsure (1)..(1372): unsure at all n locations
tttggtggggtgctgganncagtggaatcatgcgcacccgtcgnatctgcnaagttaagcaacgattgctgactagccaaaaggttcggtgccgtgatgaaacgaaccagccactgcttacnncgcggcaccnggcacggtcccccgaaggaatggatttaattaaattctctccttcggggattttttattaaggaagagagttcattatttatttgtcttttgcataattaattcataagtatttttacagaaactgctctgaaacgcaccaaattttatttacatgttagtttaggcactctgatgctttttctatcaaaaagggagatgaataaaatttttaaaaatttttaattcctttttaaacaggccaaaaagtttaggcttaactttttagtgaaaattcaatcactcatttttcgagtagtgatcagaagcgcaccagattttgcaggggcctaaaaaggtcaaggaaaggcgtctctgcgttgatttagcagtagtacctatgaatttaaattttctatgaatttttaaagttttttgaaatttttttaagtgcaaaagtggtggtgtctgcaaaaaattttcaccgggtttaaaaaatctaggaaaattagtaagcatttgtagtgttccgatacgtatccctgcaaaatttggtgagcccctgatcaattacaaattatttatggacgatcaaatttttagaaatttttatttatttttgcataattaattcataaatatttttttcagaaaatgctctgaaacgcaccaaattttatttacatgctagtttaggcactctgatgctttttctatcaaaaagggagatgaataaatttttaaaaatttttaattcctttttaaacaggccaaaaagtttaggcttaacttttttttcagaaacttatcagaagcgccccaaactttgcaaattttttttacagcttaactaggccctattaagcttatttccagaaaatctcgcatgaattctcatttttaaattttttaatagatttttaaatgtttggattttttttggcttaccaaaacttcatcgaacctggttctttctattctctttcaaatcgccccaaattttttttacagcttaactaggccctattaagcttatttccagaaaatctcgcatgaattctcatttttaaattttttatagatttttaaatgtttgcattttttttggcttacaaaacttcatcgaacctggttctttctattctctttcaaatcgccccaaattttttttacagcttaacttggccctattaagcttatttccaaaaaaatctcgcatgaaatctccatttttaaattttttatagatttttaaatggtt

SEQ ID NO: 32207 - DNA, 1042 bp, Heterodera glycines
tgcgtcggcgagttgaactgttcccggtgtagcgctagtgcgctagttagccccaggttcggatcctcaacattcaaactattttatttatttttgtattttataccaagtcaattctcaaaaactattttataaaagaaaactttatttttaattttttaaaaattatttaatgcataaaatactcaagaaaaatattaacaaaaatatatatttttttaaatcaacaagatatttattgtatctttatgttaaatggaattttttgatttttatggaataaaattaaaataaagattttgataattgggacccaaaaaaaattttgactaacgcactacttctacacaattagaaaattgtaaacaattgaaacaattattcttttctttaattataaaaaagtaaaaactttggcaagtcataactcggcactcgtgctcatttggcagaaaataaaaccatttttcttaagaacccatgggtgctctatccatccaaccaagtttcattcggaaatcccacggacaattggccacctccctttgtcagtccatttttactgtaacagaatgccagattcaaaacattgccaaaaatggctaatttaaaattgatttaaacaaaaaaaatattattttttattcatacaaaaggcaactaaaactaaaaaaaatgttctcattaatttttggcttttctcttttaatttttcgagtattggttataacgaatttagaagcaacaatttatcctccaaattttcttctacaaattgtttcttccatcgtagaatgctacagtttgttttattattaattctgtattagctttttctttttattttcattaagcaataatttatgcattgttgtactcaattagtttcaacgtaataatgtttgagttgttatttgagataatgaaattaaactgatagaattgaataatatacacatttattttgggtggcaatatgtaaaaacaaaaatttttaataaattattttttgaattattattctttttttttaactttataa

SEQ ID NO: 32208 - DNA, 1082 bp, Heterodera glycines
tttcgtttttttagccaatgtaagcccaaaatgcgcccccacccggcttcgtcctcccaatgcctggctctgtgcctccttttccgatttgtctccctaacagtctctccccgtcctctctctcctccgatttatctgtccaatgtctcttcaaagttcgttctttctttctttcgttcgttttgtccgccctccccgcattcgttcttcttcaggcaaaatgtcaagactaggcgctgtttatgtattgctgtgaaagaaatttcggaagcggagaagcacaccgaaactttgaatttatgggccgaattgagcaggcgaaaagcgactgcgatttgtcagttgcggtacggggggaggggcacgggccgacccatcccgggggccgtaacaaataaataattttaaaatgaaaaacactcatgtcaacatttgaaaattgtgatccttaaaaatatttaacgtttaaattaatgaaaatattaagtgtaaattggtagccaagatttttctattttaacccgggcccgtccaccaaatccaggcccggtgcacaagcccattattcatccttgccatcgggtaatcatctaattgatttgcgttgcttttcagtcccgtccatcgcctggcgccgcccccctttctccggcgatggaccctccgccgccaaacttttttcctcaattcgtcctcctctttctcttttcctcctctcctcgcttcttcttcctgctgtccactctttttccatgtttccccttccgtcatttcctcttcctcccccatttcgtcgcgtcctttcattggcacgagtcgtctcagcaaatgggataatattggcagaaaaatcgactttgttggcggcgttctgctgctgtttgtgttgaatcttctgttgctcagcttcaccctctgatcactcaatgccttttcagtctttcattgttttatgctttattttttaatttgccaaaattagggcctagcgaaaaattagtgacggaaattggggggaggttggggggggggggagtcgtgtctttttggcgccactctgacttatggactcactttttcct

SEQ ID NO: 32209 - DNA, 1551 bp, Heterodera glycines
  unsure (1)..(1551): unsure at all n locations
aaaaaataaatgtaaaaaatataaaaccctacgggtattaaatggaggatcatcaagcggatacattaaataaaaatcatatttggtcgaattttaattttgtaaagtaaagaattaatgacgttaaaaaatataaaagcctacgggtattattggagttgacatttcaaaaaataatataattgtatatttggtatgaaaattagataatattaccaacaataaacattttatttgctatagtttaatgtgatccttttttgttccaaaaatagcatattcataaacaagcaaatcagacatattattgttgttagcgaaataattatgaaagcaaaaaaatcattagcgacatttggttttatgccattgcaaaatactaaaaattcgagaataatttaagtcacaatttcccagttggcactctttacttgctttcgccaattaactcaatcggacattcgcaaatgttcaaaaacgtacgtttcgccaaaaaccataaatcagatatttcaccatcaactaacttaaaaataattgaaaaaattagaaaataaaatttttttttaatttttccgaaatggcccaaaattaggcgtttcaaatagaaccgtctggcattttcaagattataaccttaaaaatccgaattagggtcattaaaagttattcaccaatttataaatattaggcaaaattcgttgcccaatcgtccgattgaagcttaattgaagaaatgccagttgtaagagtccaattagcaaaatgtcatattttatttagttggcgacaaattcattttgagttggttggctcgttgttgtaccatttattatgttcctctcgctgagaaagtgcaattatacgaatttgtgacaattcgatacaaagtttagaagcacaaggcattgattatttaatattttggctctattgcattaaacgcatccaatcactttttacgcgtccaatcaaaagcgcacgctccaaaccccaaaccatatatttttttagtagcaatcaaaagcttagtctcgagaaattgtataaacgagccaatactgatatcagaaaataattataatgaaaaatcaagatttcatcttttttggagtatatcaacaacactattgcatacaattagcttgatcattcattgtacgcctaaaatgtgattggacgcgtagtttaaactgaaataaagccaaattttttgatgcgaattctctcaacgggaggaatcgaatgatggtcacaattcattatacaaatttcaaattgtatgttatggtatttcaagaaaatatagttacagaccaagcagaatcccccaaattcctttttcacgcccccccccccctcccccgccacacccttgcccaccgactaccaacattgacaagatccatttcaatcggcgggaattgtgtaaaactgatgcggcaacgaacaaaattgagcncttctccaaaagcaactcacggaacaatttgatncncttaancacttagaagaaaagaagattaaaaaacaataagaacgaaataaaag

SEQ ID NO: 32210 - DNA, 1060 bp, Heterodera glycines
atctcctgcaggaatgtcgtcagtgcgcgttcgtcctcgttgagcttcgccgagatgttgagagcataactaaatgggggaggggatgattatttagacacacaatctcaaacaaaaaacccaccgcaaaatcacgaagtatatgtagaggtattggtccggcgtctgcacactttgggcccgatgctgacggaggttgcgcgccaacgagaggatgttgagtcgatgtccacgctgcagagtatcgtaggcaatgtgcagcgccaccagtgttccagtccgtccgattcctaaaaatgggaaatttattgaatttttactttccaacatgacacaaactcacccgctgaacagtggaccaccgagcgccgaagctgttgcacttggaaaagcaaacgaagaggcgccaagtcgctctggggtacaccgcggtcgggccaccggcgccagtggaagtggtggacgtacatggagccgttgcgcgagagcaccgacagctttgtcctgtagaggtccggctccagcgcagtctcttcgatgaagtgcacggtgatcgtcttgttggcgaagtgcaattgctgaaaggggaaaagaggggggagggaaatgattataaaattgagcaaaaaaaaaacccccacctttttgtccggtgtcggccagtactggtggcacttggtcttgttttgttcgacggtgtcgcagagcatcacaatgccttcgatgttctcctgcacgatcattgtccagaagtcagcgcaggtcgtctcgagcgggccttgtgtgcagatgaagcgctgttcgccaagggccgtgatccagttggcgtggatgtatcgtccgttgtcgagtcgcacgcggccctgctcggcgcagatgacgtcccggtagcggttgcagtccatgtggctgtaaagaaattaactattttatttatgtttgagaatcgaaacagccaaactgaccgtgtgaattccggcgaagtcgccggccgtggcatgccgttcagctccgtgaattcgttgaccagctcctgcacgttgcgtcgcgtgtctcgttg

SEQ ID NO: 32211 - DNA, 1093 bp, Heterodera glycines
tccttttcctcatcatcttcctcctcttctccgtcttcccgttgctgttcaccaccttcaaaagagtgggaaaaaagaaatgggttaaaactttcatcaaaacaattttcgttagttgaaatcgaaaataattttgaaaaaatggctacaaaatttttgaatttaattagaaattccagttaaacgaattgggcgtccgatgatgctaataaaaaagaggccgagagctaaaaatggctaaaataattgcataatgattaatgctttgccaaatttccttttaaagtttaattttcaggcaccatcggtcgccctgttctccacgggagccaatcatttaacgcagaaattttcccagaaagttttgaaacaaatcaatagaaaaatgaatcctacgcaaaaaaaaaaattgccggaattctgcaggcatttcggcaactgaaattgccagaatacggaattccggcacaaaaagttgccgaaatgcggtcccaatcggccatttttttaaatgtcaaaatattttaccgctagtttccagtgttgttgttgttgatcccattgtccgtggtggttgcggtggtggtggcagttccactatttgctgttcttcaattgttgctgctgatacggcttcaacttctccactttccaacaattggtggtgccgtcgcttgcggcgtgtcgtcacagccgcttcgtccccctccggcaccgcttcagcaagctccaccgccacctccgtcgtcgttcgaatccgttgctcaacatcaccgaccatgggcccacgatccttgcgccgttgttgttggtcggcattggcactggcaccattaccttttggacggtctttgtccttgcgctgatggtgatcatcactgctaccgctgctgacagtttctgttttttgggtctttcttttttttaatttttgaaatgaagacttagtactgttcgataacattaaatgttctagaaactaaatgtataagtaattaactacatttccacaccaccaacccaaaatcttttttcaaatttacaattaaatattttttagaaaatgaaaaattttttataattttcaagaaaa

SEQ ID NO: 32212 - DNA, 1054 bp, Heterodera glycines
  unsure (1)..(1054): unsure at all n locations
aaagagatagacgtttttcaaattttcagagccaacntcgcccagaaagacatccagaaanattagggtcgtcgctattattccgaaaatgtggttggagttcatttgagtgttgagcagaaaaagagatagacgttttttcaaaattttcagagccaaactcgcccagaaagaaaatccagaaaaattagggtcgtcgctattattccgaaaatgtggttggagttcatttgagtgttgagcagaaaaagagatagacgttttttcaaaattttcagagccaaactcgcccagaaagaaaatccagaaaaattagggtcgtcgctattattccgaaaatgtggttggagttcatgtgagtgttgagcagaaaaagagatagacgttttttcaaaattttcagagccaaactcgcccagaaagaaaatccagaaaaattagggtcgtcgctactattccgaaaatgtggttggaattcatttgagtgttgagcagaaaaagagatagacgttttttcaaaattttcagagccaaactcgcccagaaagaaaatccagaaaaattagggtcgtcgctactattccgaaaatgtggttggaattcatttgagtgttgagcagaaaaagagatagacgttttttcaaaattttcagagccaaactcgcccagaaagaaaatccagaaaaattagggtcgtcgctactattccgaaaatgtggttggaattcatttgagtgttgagcagaaaaagagatagacgttttttcaaaattttcagagccaaactcgcccagaaagaaaatccagaaaaattagggtcgtcgctactattccgaaaatgtggttggaattcatgtgagtgttgagcagaaaaagagatagacgttttttcaaaattttcagagccaaactcgcccagaaagaaaatccagaaaaattagggtcgtcgctattattccgaaaatgtggttggagttcatttgagtgttgagcagaaaaagagatagacgttttttcaaaattttcagagccaaactcgcccagaaagaaaatc

SEQ ID NO: 32213 - DNA, 1459 bp, Heterodera glycines
taaacaaatgggggtaattatttaatctgcctttataagataaaggggaatttaagcgaaggattcaggcaaaaataataatctatagaaattctctaaaaagtagttcctcgcagattcgtggaccgtttctataaagctagagacatatgcgctaaccataaaaaagatgaatcatgtttagaaaaattgatatagttcgactaaatttccaaatcgctttatggtgtacaggatgttagtagaatcataacttgtcagcccttttagatagtcctgccattgctattcctgcaaatattgagtctagtcagctcattggaattgaagaaatattgggtggggatcgtctgccgctaacaccataagatattttttgggcatagaattttaaaaaatgaaaaaaaaccagatgcaaactcatagtcatgaaataaaatcatagacttaatgatgtcatatgataaatctgatgtcatatccgtgatcagcgccctcgattgccatttgttatcattttaatatttcgtgcatttgaattggttttgttgcgtaaatgttgaactttgttgaaaattgaattttcgattttttgtcggaatccgggttcggggttcgaatagggtcgaaatggatgtcagaatcggattcaccgacccagaaaaccccagaaacgcctttttcgcgccaaaaaaaaatgaatttttttttcaaaaaggtgcgataccatctaaactattacccctaattctgtttataaaggccgcttttcccttttagcctcctcggcgatggtgccaagccccgtggtggtgcccgatgttgaggcggaggcattcaggacgatgttggtctttatttacacggacgatttgagtgggattgacggagacaatttgttcgacgtgctttacgcgtgtaaaattttaaaatttgcctattttccccgttcattttaacccccaattttagctaaaaagtacaacattgtcggcctggtcagtgcctgcttggacttccccatcccttcgctgcccaacgttttcttcgcctttgcacaggcgcgttttctcgaagaaaaggttggcgtttatttgttgatttcgcatcaaaattggtggccaacatagccagggattggacaataaataacatagctatttatgatcagcgaccctaaaaaatttgtataggattaatttcagaaaaatggaaatccccaacccccccccccccccccaaaaaatcccggggttcgttccaggatattagatattttaaaactccatttttgatgtgtcaattagagggttcttttaataaatactaattttattttttgacccttcgaattcaataacttttgatgggtaagaaagcaactcaaggcatttttggacaaaatatattttattgtgagtaaattttacagaaattccaagtcttttccatactccat

SEQ ID NO: 32214 - DNA, 1093 bp, Heterodera glycines
gtatacaattacacatgcatgatccctgtaatttcgacccatgcaaatgattttctgcgtaaattcgtgtgaatttattcagctttaccattgcagacataacgaaaagaaattatattacctacctaacatataagtgtgggtctagctaggcgtttggagcaaaaaattgaaaaaaaagaaaactttttaaataagatttttttaataaagtttggcattatatatttttttaaaggaaaaagaaatggattgtttggtgtttgagcttgaggctataagctataggcaaagaaatagacaaataatggtgtaacgtaccaagtgcttatcttcttatacttaatttctacatagtcggcaaatgtgggactgggacaacgcgacagtgccacaacgcagtcgcgtcccaccctgataggcgtagtatatacaggctttcttcattaattagttatgccttcgcattttagtgctcgtaatgacgtaatgactattttttagcattaaacaacgagagtgatgtttagattccgcgagtttaaatagagacaggcaaaacgaaaatatagatatagatatagagtttcaaaataatgatgtcttataattagtgcaaaagaaacatcatgtgtaaacattagtgatcggaatttgaaatgaatggaccgatcctgcaaaatcccggcatgactccggtccctccgaattctaatcatttatacccacaatacatttgctataatataatgaccttttggctcaagtccagtttatgcgtccaatcgacttttgtgcgtcccatcaatttttaagcatccgatcaaactttatgcgtccaatcaattattatcagctaagtgaagccggttttttttctccgttcattgacaaaaggaaagtctgtaattaaaaaaccagtacatgaatagaaagttgttactaaggctagattatctcgtatatttagaaatactgtcatgcaatgcaactaatttggtggttaaaattgattggacgcataaactggacttgagccaaaaattttggtggttgttaagctatgcaggtatttttgattattagtacatag

SEQ ID NO: 32215 - DNA, 1206 bp, Heterodera glycines
attattgcaagtattatctcgcaataagggatgaaacccccggagttgcaataccaccacatcctttcacgtggtggaggacttggtcagcgctggatccttgaccaggctgcaaaaattgattggcaaattgcaacatttttgcgtagacctgacatggacctgcggatcagcactccaaaaaatctgctgcagtatttggtcaaccagtacaacaggcagcaggcacggcaaaaccccaatgcccaacagaaaactgttgatgacattggcagtgttgttcggctttccgaacacaacgtaaattctctccaatattggaagaaaatgtatgaagattgcaacaccgtttttgcacggtgccatgacgcgaagaaagcgcgtctcttcattactttcacgaacaacagggaatggcctgagttcaaagagaatttacacaaaaacggtcaagtatttactgaccgttttgacatgtggatgcgtgtctggagcagcaaaatcgctgagttccgagaagaactttatgacaaaaagttcttcggaacaatccttggttacggtgaatcaatggagttccaaggccgaggaggcccacatgcccacattgtggcgcaaacagacctggacgcagttccatatgtcattcaggaatacatatgggcgcacattccatctttgcctgataaagatgacgacacgcccattgcaaaaatgcatcgcgaaatccgcgaaacaatgcatatgcaactgcacagatgcagtgacagttggtgtggtcctagcgacccaatttacgggcggtgcaagaaggggttcccagccccttactcaaaatgtacgattttgcgcccggacaggcccgcgatgtatttccggccttcaccatctgatggtggtgcccaattagaggtaaacggcctgatatacgacaactcacatgtcgtgccgtataatccttatattctgctgcgttaccgagtacaccataatgtactgtttgcatatggtaacaaagcaaatattaaatacgcactcaagtaccctttcaaagggccaggacattgttatgtcgagtgcaaagaagagtccggcaataaaattggaattgatgagccggctcaatatgccaagatgaacttccgtggtgcaacggaagcatatgccattgttcattcaatgccatttgcccgtctttcgcatcat

SEQ ID NO: 32216 - DNA, 1505 bp, Heterodera glycines
  unsure (1)..(1505): unsure at all n locations
ttaaaattaaggaccaaaatgcgctttccgtactccccccaccattcggtaatgcttctgttgctgatgccatgcccacttccgtccacaaaatgccatcgcccacttccgtcccncaatgataatttcaaaatgtcatcaatgccacccccaaacattgccaatcattgccctcgtcccgtttcacttccctatgccattttcgtccccaattcctcgtctttcaccacgccccaactcttttccgctgccgatgccaacaataatttgatgcgctttggccctgccgaatcgcttccgagtgccattggagaaagtgaaacaaaatgattttctgacagttaaatggcatttcaaatgctagggcgcgtcgtcgaactctccgccggcaattcccttcctcaaaattccgtccccaatgcttcttcctccgcttcgctctcttccgctgctgcgccccctttcgccgccggcacttttcgcccggttggcttaacccttcagctttttgtccatcagcagcagcgttcgtctttttccgcctgctctgacccgttcagtcatcgccattcagcagctgttcaaatggatgttcaggtgggataaagcatttggacttccgtagctcagtcattagaacaccccacggagtggaagggtcgtgggttcgaatcccaccggcgggcgagtggggaccggaaaattggataccaaacggaaaataacccatacagtacaccacaggatcttagacagggacagtaaattgttggacgtcacattctgcttttttaatactaattatatcaaataaaatatttgcttagctaaaatgaatataatttaaatgctccaaaagcctaggcatattattgcactgggttttaaatattatctgggcctcggaataattcttttaattttatggtatattttttattttttagtcttaaactttccgatcgatgttaactgttcgggcgtctccaattaatttttcgtgtccaatttctcgggagccacgggcaaattacaccttttattgttctattttgtccattgtccatattgtgagccctaataggattgtgattttcgttcattttctttccccaggtggagcggacgaattccgcagcggacgaacgctttaacgacgcatttggcggtgtccggcgatggttgggcgccgtcgggcggtgggagcggctgacgcagcgagcggagaggcggcagcgacggaggcgcaaaagtcgcgcgggcagcgcacggccaaaggcacagcagcggaaagtgtccaaagtgaggccaaaacaaccaacgaacaaacaaacaaacaaacgatcagagcaatggcttactcagctgcttttgctgctgatttttgtttcccttagcatacggtattatgataaagcatacggtaagcgtttctgtttaacagcaccacagntatgcgtttggactcacatttggtaccgggagggtcgctgctctcttttcgt

SEQ ID NO: 32217 - DNA, 983 bp, Heterodera glycines
cagttaattattgaaatagttacctaattataattcctttaaatttccattttataaatacattcatttaaaaagcagttaattattgattattcaatatattatatttcaaaagaaaataattaaaattttccctttgctttgtccaaatattattttgcatttaaatgatcaataaaataaagatattatcaataagtaactgaaaaaatctacaacagattccattccaaaaagaaataggaggttaatatattgggatttgcttctttgctttatatctaacaaacgcaaaagaattacaaatttctaagcaattttataaatttttcgattaatggagaaagtggcccagcagaattattatttaggattcaaaatcatcgtctttggcaagtgctgcccaaaaggagttggacttcatccatcgtgttttgttgggcccacaacggggcaatttgacgggaacgcccaccattttggcgcgcgtattttgccacatctactgcgtggggcatattttggtgccaattttgtatgagattgtctagttgggtcttcgccggtccacacgtactcggaaattggctgctcaaatccaagattggctgaataagataaataataacgaaattcaaattgaatttaatttagcaacttttttgatcccctccaaatagtcggccaataatcgatgtgccaaagtggtcgcactgatcggcaaaagcggcgaatcggcaaaaagacgtgccaattccgcccaatattcgcccacggctttatgcacctgaattttaaagaattgagttcgaaatttgcaaaaaaaaatgtttgtgaaacggaccgccaattgattgttgtcgaaaatgtgttcgttgacaaatggcaattcgtaacgcgtgtgatagagcgggtattgaccacgtttggggtcaatgtaagtgatcatcatcacgggaatgcccagaaagtcgagaaaagat

SEQ ID NO: 32218 - DNA, 1458 bp, Heterodera glycines
gggtgggcaaaaagtctaattttggctattttgcgccttccttttcaaaaaataatggttcaatggggtcacggcggcgcggtgccgattggcgcagccgggaaaaatttttggaaattttaatgaactatataagaaaatgtgaaaaattttcaaaaaaatttgttcatttccaccactaaccatcatttggttgttgcttcttatctcggcattgctcaacagccaaaaagtctccattacgcctttgccctataaaaagagtaagattgtgcacactaattaatttttaattgtcttttttagggctttctaattgtttcgttttaatttgatttttggttaataagtggtgcttattttttccccagcattctcatattattcgcatattttgttaataatcctgtgatgtgactctcaaattgacagttttgtgggtgccttatcttatagatcacggcatttagtcaattattcgtgctgattaatgatgtatttatcgcccctcccccctcaccttaattatcacttcgcctcgactttccactgcgtaaccatcaaaattattgtgcagcagcatatacgtttctttggagatgtgaattttgttagctgaatgagaaaaaaagattcattaatgtttttaaacgaacggcttgaagagctttccatgcgcgaggcggtgtttaccgtgtcgccaaacagacagtagcggggcatggctaaccctaaattacaaccaataaaatttttgataggaaaatgaatcaaattctaaaatttacccattttaatttaattacacgaaatgtgtttaaagaaatttttaccgacaacgcccgcgacacatgggccactgtgcagtccgatgcggagacgaatgcgctcaaaggaatggtccgaaattcggaaggtttccaacgctttcaaaaattccaatgccctaatttaaaaaataaaatttttgaatttatttatgccatttcttacatgtcagcacactgtttggcatgtaaattgccatttcgattgggaaggccggacacgcacaaatagccatcgcctaaaggcatttagtaaaattaatacataattatgaataataaaaaaatgttaaaaaatatatatttttaaatcctaaaagacatttaaaaactcaaataataaaagtgaatcgattctttattaaaattatgacaattttttaatcgtaaattagctgaagcatatatccaccatttccatccccgttccccctgtggttacgagtagagaccgaaaatttcaaatttgcggatcccgctgcgggactggaactcaaaatttcgggacgggatcccgcgggattaataccgcaaatcccgaaatcccgcaaatcccgcatttaaaatttgcgggatcccgtgcgggattgcgggattttggaaaatcgaaaaaatttcaattaaattcaaa

SEQ ID NO: 32219 - DNA, 1468 bp, Heterodera glycines
cagtccgatgacaacaccaccgatcacaattatgatgcatgataaaatgctgacaaaataatgcaagaaatgcaagtttcttgatccgatcagtgaaaatttgataaacatttgatagagtgtctaaaaaaatttttgcttcttcatttttaataattattttaaggaattatatttaaaattcgaaatatgtttatttaaaaaataattattataatctaaaattattttagtttaaatgaaaactttaatgaaaaattgggtcagtttctcaagaaatcatgaaactagctttttaaacacttaacttcgattgagcaaatctcataattatcttccaaatttagaaatttcgatttatttttttaatattctatcaaaaaaaaatttttttttctttattttgattatcatggaattaaattcgtgacttctttattatttaataaattcataaataaattattttaaattaatgatttttattcttgccactgccgccgcatcgttaaacaatgcttcaccgaacacgttgatgaacaaaaatttgttcacattaatttgctcaaaaacgccaatcaccgccaccgggtccaccgaactgatactggcggcaaaagtcaatgcttggcatattgaaaatggcattgaaaaaatgccaaaagtgcccagccaatacagagtgaaacctaaaaaaaaagaagaaatttctataagaaaacaatttttatagtaccaattgcaaccgtattccaaatggtgccaacaaatgcgaacaataaaattgagtcataattttcccacaataaatttgtcggcatgtaaaatcctgtaaatacaataaaagaactttataattaaaaaagaaaagagtttaaaaaaacggaccgaaatttctgagaaaaaatcggatttattattcagaaaagaacgattttctgaacatttcgactaattttgaaaatttcggatccaaatctaaacaaaaaaataaaaataaaaaacaaacaaacaaacattttcctagatttttttccatccaactgatttgaatagtttttcttttgcataaatatgaattttatcgaaaattcttatggtcaagctttggcgacaatctcaaatcggagattccctagaacaagaaaattaaaaaatagacgaatttttaggaaattaaaaaaaaatgacttaatccgaattgtaattacgaatttacccgcttcaaaaatgattggtgggagaaggtaaaggaagaaagtgttcgcctcaaacatataaatgtgacgttcaacacggaacaggcgcagcagttggccaagtgcaaagccaagcacaataagcagggccgagtcgggcacagtttccgccacttttttgtacgcatggaatactgtaaattgttttaaattaaaataaatagaaagcatatatttttttacacatttttggaaatgctagcaagcat

SEQ ID NO: 32220 - DNA, 974 bp, Heterodera glycines
aatcttatttttggtgtccgaaccttagtttttcacccattttgtcttattttgaaaaaaaaaacttgggagccctgttaatactacttcaataccagtcagctgaaaaatcagcttatgaacaattaaatatatttaaaaataattttaaaaataatgaattaattgagacaaaaagacaaatcgagaatgaaatagtaaaatttaagaaaatttatttatttttttcttaaaaaattattgtgtatttttgatattaaaatgacaaataattttttaaactaatattgaaaaaagatttaagatgctttaattgagatttaaatttgcaaatttttttgcttgctttacatttttgcaaacttttcaaattcaagcataatatctagggctgctaattttatgtaaatacattttttttcctagattctccatgctctaattagtaggaaaaacactttcttttttgtgtttgcgaacaaaagttgggacttttatttacatattttttacatattttgggatttttctacatattacatatgtacatatttttatacatatgttggaatttttcgtacatatttcgcaatttttcgtacatattttcattttttttacatattttgaggatttttgagaatttttctagaaattttttgtgaaaaatttaaaaaaaatttcgaaaatgtatccctaaaaaatcgaatgtttttcaaaaaatgaaatatcaaaaattaatttaaaatactaaaaagtgattctaagcctattttggtcatttttatggcattttgtgcctatttcactttttacgaagaattttttttccaaaaataaccattaaaaaaatttttatttacatattttagtacatattttggggatttttgtatatatttcatacatattttagcattttttatacatattttatttacataattcgcaaattttcttacataaaattagca

SEQ ID NO: 32221 - DNA, 982 bp, Heterodera glycines
aaaaaatcgatttttttggttttcgggccagtccccccgaaccgatgcgcccagatttatggggagaccgaatctttcgggaatagcttccctatagcctgtactttaattctgcgttggatttttgctccccataattgtttgagtaccccaaacggacacttgaaaaaatcgatttttttgttttcggggcagtccccccgaaccgatgcgcccagatttatggggagaccgaatccttcgggaatagcttccctatagcctgtactttaattctgcgttggatttttgctccccataattgtttgagtaccccaaacggacacttgaaaaaatcgatttttttgttttcggggcagtccccccgaaccgatgcgcccagatttatggggagaccgaatccttccggaatagcttccctatagcctgtactttaattctgcgttggatttttgctccccataattgtttgagtaccccaaacggacacttgaaaaaatcgatttttttgttttcggggcagtccccccgaaccgatgcgcccagatttatggggagaccgaatccttcgggaatagcttccctatagcctgtactttaattctgcgttggatttttgctccccataattgtttgagtaccccaaacggacacttgaaaaaatcgatttttttgttttcggggcagtccccccgaaccgatgcgcccagatttatggggagaccgaatccttccggaatagcttccctatagcctgtactttaattctgcgttggatttttgctccccataattgtttgagtaccccaaacggacacttgaaaaaatcgatttatttttgttttcggggcagtccccccgaaccgatgcgcccagatttatggtgagaccgaatcctcgggaatagcttccctatagcctgtactttattctgcgttggattttgctccccataattgtttgagtaccccaaacggacact

SEQ ID NO: 32222 - DNA, 1662 bp, Heterodera glycines
  unsure (1)..(1662): unsure at all n locations
ttgttggcaaatagaactncgggtggcataatctattttttaaccctcaaaaattattttaatcattttgatttggcaaaatataaaaaaaacattgaaaaacaatttagataatcgggagaaggtaattaagccaaagtgtttggcatggatttaagttaaactgtgcttgagtgctgaataagccgcagttaatcggcacagatgtatcacattttttgcacatgtgaccaattctgatgcatttggcaaaatttgtttttttaatttaatttattttttgaaattttaaaaataacaaaaaattttaaataaaatttagtctttttaaaaaaatgttttctacaaaaacaaaacaaacaaataaataggcaataaattttgatcatgagtgaagtttttaattaattaatccgattttatctacgggagaattaccgaattaatgtgttattttattcaaaaaaaacaattagatattattagttagttaagaaactaaaattcacttttatctgatttttttgcgtaattataaaggcaatttaaaaaaaaagtgataataaaactaattttttaaaaattattttaataatgatcatatctcgttctgtgaatgataaagaattgtgctcggttcaaccgaaaaagaaaacaaaaaataataattttagtcatgggaccaatgaaatggagaggaatttaggcccaaaaatgaaaaatggaaaaatatactttaattttaattagaatggccaaatcggtaaatttacctttcataaaaagagattttatggccaattggtgggaaagaaatgtgcacttgacgtcagaagggaataaaaacattattaaaggttgttaaaacgcgaaagtgacattaattaattgtttttttcaaatatggcattacgaaatttctttttttttaaaattactatgataaatttaataatttaattttatctctattacgtcataatttggaaatgataaatataaaatgttttttttttaattttaaaaattgtcatcggttgacccccgcaaaattaatgcttttataaaattattttctgtaattgagaatttcgtaaatttagcaaaaaatttcaaactgaaggtcagcccatcacacaaaatgcgatgacattggatcaaccaacgcaaacaaatatttccccatttatttttaatgatgttttgatcggctgtcacaatttgattaatttggcgcgtctgtcaattctatgcggagcacattaattatcattagttaattaatttctttttgtcaggctgagaattttccgttctcggtcagaaggaataaagtaaatcttgggtgatttatatttttaaaaattatctcagtaaatgtacagaattaattgtggaaaaatattagaaagatgtttccagccatttactttgtttttaattataaaaaatgattttaattaacggattggaatattcccaataanaatttatgggaattaatttccaaaaaataagaagcatttaagggtttanatttggtatttaattttanaaattacatttttgttcattcaggtacattcattcattaantaatttcattcattttattatttcattttcggggtgttgttgtgtaagaaaaataatttatatggc

SEQ ID NO: 32223 - DNA, 1675 bp, Heterodera glycines
gctatatattaggtaacaaaaatgccgaaataggtatttcaatcagacatcgcttgtccttaatttaaatacacttttgtctttttagcacttacgccgaggcgggaaaaatcacgaaaagcgctatttgtgccgattggtccccctcgggttggttaaagcattttattcctaacggaaagtgattcattttcaggtgaattgcttttttgtgctatcagccgttccaacccaatttgtttcaatgtacaaaatcacatttatagtatttgccaaattccgaatttcattgtttagttgcaaaattccgagcatttgcggctatcagacccaaaatactcaaacatttgcacaataaaatcgtgctcttttgctggcgatcagtatttggtcacaggaagtgacgattggaatatttacgtgtggaaagtgccgagcaattggggttagtggggcatttcgaataaaaatatatctgcaatgcttttcagacgatttcgccaatggcactgtcaatgttcactccgttttggagggccatcgctctattgtgaaccatgtgaagtacggaccacgcagcaatttgcttttgtcttgcggtgtcgagaaaatcattaaagtgaaaatccaaaaaagaatttatttataatttttgctcattgtcagtgttggagtgggctgcctttgcgtgactcgtaccaaaatccgaaaaaacgcgagcgcatttcgacgattcttcccgactttctcgatgatcccgaccacgggtcgatggattcggacacggaggaagacctcgacacattgcaacgattcgacttttattatgaggttggacaggtccgtcctgtccttttaagcacaaatattgcaccaattcagcagacgctgaggtcaaacagagccttcgtttccgacctctcttccgaagaagacgacgaattggccaattttgtagtacattcagttgtgcgtttttaaaactgatgattgaatggacttttgaatgaatccgtcttcaggaatccgaagaggacgccaacgatcacgagtctttcttctcagaaatcaccagcggtctctactcaccgtcgccaatgcattcgcccgactcgcaatctgacgacaactgaaagaacaaaacaattgtcccactgaattatttgaccacgagtaccacaaaaacccagtgatcggaagggaatgtgcaaaaagaaatgattaaattttatttttttattatttatcatcctattcgagaataggcttttccgtcaaacaatttgtactacgattcattaaagaatttacccaaagtgtttactcggggatgaatccatttgtttattttatcggttgcattggcagtttctccttttcaatgttgccttattttatttcctttttatttgcatgcatttctttcatttgttcagttttgcccgctccctttcacccttcccattattctctccgttggaattaattgatttacctatcatccatcatctcctcagtttatcttttctcttttgaacttataacaacaacaaacagttttgtgggccctcccggcggcgtttccttttaatttgaaaagggacttccccttttaatccaaatttaattttaaaccgcttttttttggctttttttttccccccccccccccccc

SEQ ID NO: 32224 - DNA, 1549 bp, Heterodera glycines
  unsure (1)..(1549): unsure at all n locations
gaatgggcatgcgtgtgcacccgtgagcagttggaacccgagggcttggcgaataagcatgcgtggcatccgtgagcagttggaacccgagggcttggcgaatgggcatgcgtggcacccgtgagcagttggaactcgagggcttggcgaatgggcatgcgtggcacccgtgagcagttggaacccgagggctttgcgaataggcatgcgtggcaaccgtgaacagttggaacccgagggcttggcgaataagcatgcgtggcacccgtgaacagttggaacccgagggcttggcgaatgggcatgcgtggcacccgagagcagttggaacccgagggctttgcaaattggcatgcgtggcacccgtgaacagttggaacccgagggcttggcgaatgggcatgcgtgacacccgtgagcagtttgccaagaaaagaaaattgtctaatgttcagcggatgccaagaaaagaaaatggccaatggatgacaataaaagaaacattataaaatggccagtggatgccaagaaaagaaaattgtctaaatggccagtggaagccaataaaagaaatattatacaaaggacagtggatgacattgcgtcgaccctctgtcccggggtatacactttgtcactgtggtgaccaaatggtctaaaacagacagtcatgcacttgccactgccctacacgcacaaaaaacacggtgtcgacactttgtcccagcaagtgtgtagacactttgtccgttttgagtgtcgacactttgtctgttttgaccaaatttgcgaaaaatgtgctttttacgtctgcgcccatcctttacactaaaaaaacaccgcttcccgcgaaaatagcgactttgcattttgcaccccccaggggctaaagggggttcgacccttcagacttgtcgaatcgggtcgaacttttttttaaaatgctccccatggcgcggcgcaactttcgccaagcgacggcaagacagctactctgcagcgccaggcgctaggcgccattcgcgaaaagttagcaaaaacaggttagcacaactcagcgcaaagcgcccggcgccagacggcaatttgttttcccagcctttcagggtgcgggacgcgcggggaaaaaaattctgactctctagcagcgctggcccaaaagttggctctctatggcgcaaagtgggcaacaaaagttagcatatctcagcgcaaagtagtcgaatggcgccaaaattttttccattatgctccccttgggatggcacgcatttcgtcaagcggcgccaaacttcagcgccgggcgccacgcaaagttagcaaaaacaggttagcacatctcggcgcaaagcgcccggcgccagaacggcaatttgttttcccagcctttncagggtgcgggacgcgcggggaaaaaaattctgactatccagcattgacggttcaaaagattgctgtctatggncgcaaagctggtccacaaaaagacagcaatctcggccgccaagntggggtcgatcgggccaaaatttttttttaaaatgctccc

SEQ ID NO: 32225 - DNA, 1566 bp, Heterodera glycines
  unsure (1)..(1566): unsure at all n locations
cgcgacaagcacgtgtacaagccaatgacggtggagtataggtggcncgctccagcgccatccattttcagggctagtgattcggcaggtgagttgttacacactccttagcggattccgacttccatggccaccgtcctgctgtctatatcaaccaacaccttttatggggtctaatgagcgggcactttggcaccttaactccacgtttggttcatcccacatcgccagttctgcttaccaaaaatggcccacttggagctcaaacattcaacgcctgggttcagagtcaagcaaccctggcttcatacccatttagagtttgagaataggttaaggacatttcgtccccaagtcctctaatcattcgctttaccgagtataactgcttaacgagctccagctatcctgggggaaacttcggagggaaccagctactagatggttcgattagtctttcgcccctatacccaagtcagacgatcgatttgcacgtcagaatcgcttcggacttccaccagagtttcctctggcttcatcctgctcaggaatagttcaccatctttcgggtctcagcgcatacgctctgtctccgccccatcgcatgcgatcgagacgggactatgttgcgccccaacaccgcagtgccagggatcacacatcagctccgtaagaagccttcactttcattgcgcctttgggttttgaacacccaatgacttgcgcatacgctaaactccttggtccgtgtttcaagacgggtcgaacagatgaccggcttttacaccgagaacgcacaactgagagcccgagctggaccgaactggttgctggtacgtgtcgcacgcgaccgccaccgacccccagctcgagtcaacacggacccgaaaccattgcacaattcacccagagtaaacagcactcccccgatccgggtaccagaccccgaaaggctggcctcaagaccgagctcacgcagctactccgagcatctcagcgcactccgcctgcaaatgccccattcgccactgaacagaaggacagcaaaccccagtctggaggctagcagcccaacgtacagcaacaaacgggtgaatgcagaccagatacgccagctctgtccgtttccacctcatcggtttcacgtcctctttaactctctcttcaaagtgctttgcaactttccctcacggtacttgttcgctatcggactcgtggccgtatttagtcttagatgaagtttaccacctgatttgggctgcgatcccaaacaacccgactccaagacacgtaaagatgggtaggcaccgccagttggacaggtcttgcaccttctctggagccccggtcaagggaaacttgaacaagcgggccaacccaagctcacggtctatacgctacacctcgcaaccccagaggagctgcgattcagcgctggactcttcccgagttcactcgccgttactacgggaatcctcgttagtttcttttcctccgcttactgatatgcttaagttcagcgggtgttcaagtgtgagttcaggtcgaaaaatcaaagcaggaatg

SEQ ID NO: 32226 - DNA, 647 bp, Heterodera glycines
tggtcttgaccaaatttttggccttgactatgagggtgaaggttttcgaaaaaatcagctcataactaaatttgcactattggttttattcactgcgggcgatgaacaacgaatgaaaaagttcgcgagggtagaattaggaacccaacccttgcgcatctttgtcatttccttccttgatcggtcagcggcgcacattttgctttcggcttcttaaccatatgttcataatgaaaattagaaataaaatttattaagctttaaaaagttgggtttactgtgttcatttctttgttgtcagtagagcccagaaatttcaaatttgcggatctcgcatagggattgaagctcaaaattttttgcgggacggtatcccgcgggattaatcccacaactccagtaatcccgcatttaacttcatgacatgaaaaagccaaacaccaaaaagggcaggaaaatgcaatgaataaaacacctgctagtaatatcgcgtttcgtgaccattgttaacagtgcgatcccaacacatgaaacggtagtgatccccatggccaccaaaacggacacggacgaacagaaagcggttatgacctaaattattccaaataaaattagtttgtgaacaaaaatcatcgcacttaccatgg

SEQ ID NO: 32227 - DNA, 899 bp, Heterodera glycines
  unsure (1)..(899): unsure at all n locations
aagaggtacaacnggtgattaaaagaggtacaacagtaaatagaagaggtacaacagtgattagaagaggttcacagtgattagaagaggttcacagtgattaaaagaggtgcaaaagtgattagaagaggtacaacagtgattagaagaggtacaacggtgattaaaagaggtacaacagtaaatagaagaggtacaacagtgattagaagaggttcacagtgattagaagaggtacaatagaagaggtacaacagagattagaagagttacaacagagattagaagaggttcacagtgattaaaagaggtgcaaaagtgattagaagaggtacaacagtgattataggaggtacaaaagtgattaaaagaggtacaaaagtgattagaagaggtacaacagtgattagaagaggtacaacagtgattaaaagaggtacaacagtgatcagaagaggtacaccagagattagaagaggtacaaatttgatgaagaggtacaaatttgataagaggtacaaaagtgataaaagaggtacaaaagtgattagaagaggtgcaacagcgattaaaataaaagtcataaaatgcgccgtatttttcctcattttttaattatttgattgtgaaaattcaccctccctaacccgagttacgaatttttgaaaattacaccaaatataatttttttgacaatttctaatttaaaaaacattaaattctttaatttaaaaaaataattatttttaaataaaattttcaccaaaaaataatttaattcaaatgaaaattttttatttattattaataaaataaaaatattttaaataaataaaaattaaaaataacgtaaaaatgcacaaaaaaataatgttacaccgcccagattctaacttccc

SEQ ID NO: 32228 - DNA, 1234 bp, Heterodera glycines
  unsure (1)..(1234): unsure at all n locations
aaacgaatgaatgaacgaatgttttcccttcggctgtttctgttgtgaaagaatccaaatttgcatcgatttcncctcgggtgccgttggaattgctcaaatagtgccgagggagagacagagttaagccgaaaggggggagggcgtgtacacttatgctaggccacttggcattattcactcgcacggcgccgtgagggagggggggggatgcatttggaaaaacaaaaaaggaaaaaaacggtggcaatgggacataaaaaatatttgggaatggaaatgttttttttaatgagagtaatttggtcccttttaattacccccgtcgtttttctccttccaattttccaccgcttcttcgtcacggttctcaaagctttgccattctctgcttgaccttcggtgttccacaggcttcggcggtgccttccccgcatattttgggttcgattcgattatgtccgccccgtgagtccacgcggcggttgagtcgcaacggtttctggtcttaaatgcggtgagtgacaacgcaccactcgacagatgggccttggtttgctaaacctgcgcggctgttcctccccccggggcattccaattgcaaatgtccctttggccggtcgaataacgccgttgtgcttccttcaattctgaattaatattaattaattgcctttaattgtgcaggtttttctgttctgccgtccttactcgcccctcttccgcgtcccattggaatgaccacgtgcattttcggcatgaatgagtcggatggcattcggcaggacccggcaacagatgatgaagtcctttccggtgacgaaaaagactcaatgcgcagaaaggagagaccggtcggagttgtgggccgaggccgaggcgcaaaatggacagtggaagacgaagaaggggagggcatggggacggagaaggagcaggacggggcatggccatcgacgggaagcgcatcggcagcagaaggacgaggacggtgcatctgctgaagggacgaattcgatttctgatttccgaatgactcgatcagcacataaaattgagttattccttttaatggcacgaaaaataaaattaaattacaaatttcggttaaacaacaaaaatggggtgtttttaccattaaaatttccattctaaacatgactagcgacggcattttgccgattgactaagtgcaacccgtgggggaaaagtcacaaaattacaaatcccgcgt

SEQ ID NO: 32229 - DNA, 1226 bp, Heterodera glycines
  unsure (1)..(1226): unsure at all n locations
tcaaagcttaactattgcctttttgtatgataactggtagatattgggagtaaaaaaaagttttttttgtgactatgtacaataaaaatttatgcagcatttctaaaaaggatctaaaaataatttcttgcgtaatattttttacattatgttgttgaagaatttgaggctgcttctgatgcgattgaaaatttttcagcttttcttgaaaagttttttcccagaatttatacagctttcccgacaaattgtttagataattattctagacgatttttttatatctcagtgcttaactattgcctttttgtatgataactggtagatattgggagtgaaaaaaagtttgtttgtgactatttacaataaaaatttatgcagcatttctaaaaaggatgtaaaaataatttcttgcgtaatattttttacattatgttgttgaagaatttgagtctgcttctgatgcaattggaaaatttttcagcttttctcgaaaagttttttcccagaaaacggatgggtcaaataaaaaactaaacatctcacatgaccaatttaaattcacttacattttgggtttactttattatgctggcccataaaaaaatggagtttttccggtgccaaatttttgtgaattttctttcggcccgtcataagcggattgtttgggggcaaataaaaacaaattttgtgttattcgaatgcgctagccgagctctacattttcaaatgtatcaacaaagggtctatctccactctctggcgagttatgtccagccaaagcagagtgggccataaacacgaattttttaatctttggtatttcctctattttgagcctgctctacatttatgtattgtgccaatatgcctattgcaactgaaatttatgcaactttcccgacaaattgttgagataattattctagacgatttttttatatctcaaagcttaactattgcctttttgtatgataactggtagatattgggagtaaaaaaaaagtttttttgtgactatttacaataaaaatttatgcagcatttctaaaaaggatctaaaaataatttcttgcgtaatattttttacattatgttgttgaagaatttgaggctgcttctgatgcgattgaaaatttttcagcttttcttgaaaagttttttcccangaatttatacagctatcccgacaaattgtttagataattattctagacgatttt

SEQ ID NO: 32230 - DNA, 1012 bp, Heterodera glycines
taaaaaattttaaacattttttaacccacacatctattacaatttcagataaaaaaataccatacgaatttttaaaaacgaagtttctaattttggagatttttagcgtttttcgagtgcctctttttgcttttttaagctcttctcttgaaaaatatgaaaacgaaaattcaacaattatctattttgcaccagttttaattccatggaaacttttttgaaaattaaaagaaattaaaattatgagtaaatctccgtccatttgaggatatggcaactcgacgtcaggtccgtgtgttcacccgagttgatgacgcaattcggcacattcgtgacacaacgccacgcccacaggaacacgatgggcatcaaaatgccaacaacagcgccaatttgaattgtggcactaatactgatcagtcattggctgatcagcttaagcaacatgaaaagccgctgacaaatcaaaagcggaccgcattacggcaaattttggagaagcaacatttggtcaaggagcggaccagcatcaatttgttggcccatctgcgcgaggcggctgcccgtggccaacgcttggagttggacttggccgaaattcggcctgacggatgcatcagcatgagcattgatctgaaccagcttcgaccgcttgccaattgatctttttcattcaaatcaattacactaattgatcatttaaggcttatttaatattagtctattaattcatcataataattattaagcctgactattactaatactaatcctttcgttgtttcttctaattaatcataaattgatatttaaaaattttttcattttgtattcacaactttattaattagtttgtatcagttcattttcaaaaatagcaataattttagttttctaattttttgtcttatttattatattttcatttatatgtatttatttttataaaattatacattacaaattagcaatgtttcaattcgatttcatactcaatgaaaagaattctgct

SEQ ID NO: 32231 - DNA, 1573 bp, Heterodera glycines
  unsure (1)..(1573): unsure at all n locations
aaaacgaaatttcaggaaaaggaaaatatttattttcataccctgtggtcgcttttgatagcccggtggtgcccgttttggttgagttgatgatccgtgaataaccagtcttggtcataggtgcccgaaccactgccgttaccacccaccaatactcacaatggaacttaaacataattttgctgtttgaagatttctcattaaaataagcaccccccccccccatcggagcagctcgtccccccccccctttcctgcctcctccccgtatcgttgctccagaaaaattttcctattttttgactaaatttgaaatttaaaaaaaaattccgggggttgnagggggggggggctagttttagattcgtttcgtttaaaaagtcgcactttttttcattttgtatgctccttcaagaacccgtcccctctctctctcgccatgtcacaccaacctgtacgggtcttcgctgccgcccaacgagtaaatttgtgaagacgcagtcgcatagagcggttcatctgctgacgcagcagcacgtcgcagcgccggtggcggcacagcgacgcgttgttgcggcgctgctcgctgctgttgtcgtcgcaactgatgctgctgcggttggtccggtttgccagcaaagtccaggtagtcgtagcgcgactggggcgacgatgatgacgacatttgtgcatgatgggacgaggaagggcgggtcgagttcgagttacgctgaagctaccaaatttcaggggtatgtaatcagcagaatgcacataaaaaaacacccaaaattcgattaaaactttgaccctagggtgtgtagtaaggggatcatttaccctccttctcgaaccccaatgaattcaattttttttaattcacaaactgacaatgagagtttttctcccgagtacaatacgtctcccgctcattttcgctttttttatttcttcgtattttttttttagttaaacacccaaaaaatttttgtcaaaaggaatttctttaattcttcttttacaattattaaggaaggttttttaaccccaagttaaaaaatcaaaaatacgattgttccctttctcccatattacaataattcgaaattttgctgacaaattctatttaaaaatttccaaattttcccaactcccacccgtcaaaaacaaatcacaaacaatggagtaaaatggagtcgaagaatgatgagtcacgacatcatggcattcgtccgcatcgatgtagtcatacgagcctttggagtttttgcgctgcggttggtcatcagtgtcggtgcacgaggcggtggccatgtcccaggagacttttttgccggacaatattggcacccgaaatgcaaatttattcaatttcccataaaaaatagaatagttatgttacttttgcccgtctttgatgtccaacaccattggcacgtccgtcaacatggtcatcaccatggcttttgttggcaccaccatcctttttctaggtctttttgaattggtcaatcaatgagaaggcgccgcgggaggagacgaccctttttcccgtctgttttgttgtcaattt

SEQ ID NO: 32232 - DNA, 1357 bp, Heterodera glycines
  unsure (1)..(1357): unsure at all n locations
gcccttggcctttgacttcacgatgggccncagcgcccttggccattgacttcacgatgggccccagcgcccatggcctttgacttcatgatgggccccagcgcccttggcctttgacttcatgatgggccccagcgcccttggccattgacttcatgatgggccccagcgcccttggccattgacttcacgatgggccccagcgcccatggcctttgacttcatgatgggccccagcgcccttggccattgacttcacgatgggccccagcgcccatggcccttgactcacgatgggccccagcgcccatggccattgacttcacgatgggccccagctcccatggcctttgacttcacagatggcctcagccaggctcgtagtgtagaacataaagatttcgcccggtgggactcgaacccccgacctctccaaagcatgaagtgctctgtccaactgagctacgggcgccacttagtggttctccagtattgcgcctgtggtcgtctcagtttgcgccatcgttctgtttgcgcttgtgttcaatctcagtctgcgccctcgctcagactcagtttgcgcctgcaattgatttgcgttcccatttgcgttcctcaatgtgcgttccaatttcgcctcaatttgcgcgctgtctttttgttcctgctcagacagtttgctcttccctttcgcctcgttttgagcttcctcaatttgctcttcctctgataattttccattccgcctcggtctgcgcttcctcaatttgcgcttctcatttgcgcttctccaatttgcgcatctccaattgcgcttcaacaatttgcgctgctccaatgcgcttctccaatgcgctttctccaatttgcgcttcaacatgcgctgctccaatgcgcttcaacaatttgcgcagattaggctcactgccctctttgtgagctcggcacaatgccgccaatgagtgcgagataggctcgctgcctaagcgcatgaccattctttcctgaggggctgtggtgcggaaggcgaggcgccacgggccaaaaagagacccgaggggccgtatggcgcggaatggaaggcgccccgggtcacaaaagacccaagggacaatatggtgcggaatggttgcgccccgggttacaaaaaacccgggaggccaaacggtgcggaatgcaaggcgctacgggtcacaaaagacccgaggggccctatggcgcggaatgcaggcgccttgggttacaaaaaacccaaggggccagaaacgcggaacgcaaaatggaatagcgctaatgccagacgccacaggttacgaaaaacctgtggggccggcatgctccccctacccctgctcac

SEQ ID NO: 32233 - DNA, 1280 bp, Heterodera glycines
  unsure (1)..(1280): unsure at all n locations
aatttatcaaatacntgaaaaaatttacattgtgaatgatttgaaaaatgataattaattatttatattttaataaattggctatgaaaaaacaactcattatttattattttttgaaattaataattaaaaactaccaaaacaaataataaaataaaacgatttaaaataaagcacaaatttatgaaaaatatgtatggattgtactgtacatcaaatgattaaaatatattaaaaaaatttgtaataaaaatccaaagttttccatttttgattaatcccccgggatttttggggtgtgccaaggacgtagcaacaaaatcttgcggaataggcgaaataggcaccgtcaggaaaatttttcaaattttttttttaaatttgcaatgattcaatacgctattaaatgccaaatttgagcctatttagaagagaaagtaaaaagccaatgaagaatttttggttttaaaaatatgtaatggcttaatttcgttaattttttgaatgtttttttaatcattttatacctctaaatttgagactttttagtgcctattttctatttttttagtgtctatttttgtggtttttatgacctaaaaccctatttattttggcggttgatagagcctaaaaattgcatccctaattaccactcttttaacggatttcccttaaagggctacgtccccttgttgcgggggaaaatcgtactattagtaccccattgcgaacagcccttgtccctttttcgatcacatttcacacaatgaatttcttcaacgcgcatcggctcaatgtctttttgtttccagtaataccagaagctttccgcgctgccttctcgtttctgttgagaaaatgataaaaaaactgcaaaaaaaaagaatcccaaaattgataataaacttgaaaataaaaaccatataacaatttttgggtataaaatttgaaataattccagtgtacagtatatttaacaaaaaaatggcacccttacaaattacagtataaactcacgtgacacgacacattcaatcggccactcgcattttgctgcactttgtcattgagctatatatagataaatagggatgaattgttgaaataaaattgtaattttttcaaactttagacgcgctaatgagaaccatgaaacgtgtgaaactgtttttgcttaaacaaaattatgcttaatttggccattttttgtgaaaattgcttgacaaatgcacaaacaaaagaaaaatgattattgcaccctaagggccgatctagaa

SEQ ID NO: 32234 - DNA, 1954 bp, Heterodera glycines
  unsure (1)..(1954): unsure at all n locations
tcaataaatatatcgaataaatttttaacaaataaacttccattattctgttcaagaatgtctttatttactcaaaagttcataaaataaaaagaaaangcaaaaataatctaacaggaaaataaatatcataatcaggcaattggtaatatcgtaattatctaacaattattgttttcggtatttttaacaagaaaaagaatgattttaatatacaaatagtataacatctcatgaaatacaaaatatataaccctaagagaacatattcatacttttgtatattaaattaagaagcaaaacgaatttaattaaaaaaaagaaaacataaaaatagtaaaataaaagtttatattcttttttatatatttaacacaattatcaatttcacaattgaattataaattttacaaaacaaaaaatttttttataatataaataaaatcttttccatcttaaggcgaatattcgaactctgcatgaatattttttatgagaagaaggaaaaataataaatatgacaattgtccaagtattatcaagcgaaatatgatattatgtaaatgaaaattaagtttaaaagatcaaaaaacaattttatgttgcttgcaataatcaattattaaagaaaatcttataatattatcaataaaattgaatgattaataaaacaattgctttaaaaatgaaattaatgaattatttaaatagataaaaattaatattaatatttatcataatttccataaaagtaatttagattaaaaagaaaagtgagggcatagataaacagacaaaaactcgaatgttttatcataataaatctgaggtaaaaaagatacaaatcaattctaattatcaccttaaaagaaacagcataatatatcatcatttaaataataaaaattaaaacaaaattatttaagctaaatacaaaacacattacaataaaacagcaaaaataatttaaagaaaaaatatataaacaaattttaaatttgcgaaatggagtaaatattttgattataattttagacataccgtattttcaaaaatttttcactaatacttagtcgaaaattaatccccccgtctacatttattccccatatctaataatcccccccccccccatctttctgaggaggttctacaataattctgccgggggggggggggggggtgggataattagagatatacgttattataaaattttaaaaaaaagttaatcgattatttttttgatttttaacaaaattttaataactacaatgaattaaataaaatcttataaaaacaaaatagtgatgcgattcattacaaataaatagtactctccttgaattacttagggtgaaacataagtaacattttctctggctctgtatctattttgggtttcagtcaaaaataccaaacaatatcaaacacaataaatatttgttttaaaattaaaaaaagagcttgtgatgcgagaacaaataaatttcattaaatataataattaactaaaaaatatttacaaactaaaaaatatttataacaaatattttttttaatttaataaataaaaacaaaacataaaatataattttagcaaaaaaatcacgcgatatttttatggttatatatttaatatcattaaaattactttatttaattattgaaaaagcctttttattataatttttaatatccttataatttatatattttttattaaaaattatataaaaaataataatataatcattttatggcttccttttaattttgacattttcttttttttcatgacgaagccaatatatcaacatttggtaatattttagtttttatttattttcataacattttttagcaagttaattttttcgtttttttaatctaaaatgaatttctagttttcaacatattttatttgaaaaaatgaaatatatttatattagga

SEQ ID NO: 32235 - DNA, 874 bp, Heterodera glycines
accgttggcgaaaagtaagcgaatgaaaaaagggcaaattggggatggatgagaaggaattggcaaatcaattggcaaatcgatggttaaatgatttgtaaatggaggggggagaaggcaaattcaacgaatgttgacgaaaaagcgatgagtgaataaatgggggaaattgggccgagagagacggtcattaactcattactcacctgccatggcatggcatgggaatggacgaaatccatccatcattcacagaaaggggaccgaaattcaattagcgtcaattgtttaagactttttttgtgttccgtcgatgagagttcctttgatcagtcccttctttcccttctcatcgtccaaatcaccgtttgtcctgccccagcaatccctgccaatcactcactaattagccaaaagttctctcgggaattaccgcaaattgaaaagcccaaatccgagagacggtccaaaactttacgaggcggccattctgtgaggaattcctatggaagagaggtaagaaaacgaagtcgaagaactgcgaacaaacggggaaagtgttgccgaaacggtgcacctgttgagcttcaagcagtgccatcagtttttggtcggagttcgcgtcaccaacaacagtgggccccgtctcacagcgaatttgggtggagacaagcaaatgttcgaatggcatttggaaggggaaggcgcaaattggccaataaattggcaaaccaaagcgaatggagggaaaaggcgcaccgacagattgattgattgatgattgattgattcgttaatgaagtgttttagtaattatttaattggttaattgatcgcgggaagaaaatgacgattcaaaggggaaaaacgcgtt

SEQ ID NO: 32236 - DNA, 1763 bp, Heterodera glycines
aacaaacccaataagtatgcattaaagtttaataatgggtttctttcattatttttgttggcgaatttaataagtgaatacattaaaaattgtaatgttttaatttcattttgtgccgaatgcttttagtttttttcaattggcatttgcacctcaaaatgtatcaattcgccaaataatctgttcgcattggctcgaatttgtcagctcaaaattgtgcgtttccactgctttcgcattggcacaactcttcagcgggcaaatcgatttccgtcagaatgttgtcctccagcagattcgggtacagcttgagccggtgcctcacacagttcacggccttggaccaccaaattgacgaatttttgccaacataaactttgtgctgtttctttgcggttttgtgtggcaattttggcctttttgtagtcacaataattgcactagcaaagccgggcagaaagagtgaagaaattccaggccaaagacatttagacggaacaaaaagcaattaatatcagcaaattattaaataataactaataataattcaaatttaacacacaaattaaaattgcattaagttaatagggcaaaatgaacgaaaatgtaaaattttatttcgcttttgcttcacttttttttgttctgctgctaattttgtgtacattctctctcatggaaatgtggtagagaaaagaacattgagaaaagaacgcacagtctctgtttctttttctcccctcttctgcgtctatgcctaaaggcccacaggcgtttttgttttcattagggttcgagccccgtggggcgggggtggcttttcacgggggcgggggatgcgggggtcagagtcacgggggcgggggcgggggcacgataattccgcccccgcggggacgggggcgggggtttgctttgaattagctccaaaaatctcacaaaaaaatattttttaagaatgatttctttggctccacattcctttatttgttgatcgcctcgatactatttcttttgacataaattgcacagatttcgactaaaaagtaaccaaaatttagggatttttgggtaattttttttaagaaaaaaaattttttttttggggggggcgtgccgataggggcgaattttaaatttatttctaacagatattcaccaaaaaaattaagactttttcgataaattttcgtttttaactatattaaattatcgtgatttactcaaaattggaactcaaattttttaaattttttttcttgcggcacatttttcaaaaaaaaacgtgatgagtgtgcgaggggagagttccagcggtgccgataggcgccgccgggaaaattttttgaaatttgaatgcaatttgttaacaaattttgtacaaaaaatgagcaaaattcgcgagcttgggataatttttaagaaaaaatataggaattttgggggccggcggtgccgataggcgccaccggggaaaattttaaaaatttatatgaattttgttagaacttagccaaatttttcagaaattttcttcttttagatgaaaataaggggctcgaaccctaaaataaatactgaagccgttaattatctatacaaaaaaatgaattagtaaataaaagatggcaataacaaaatttatcattcaacgcatcactctgtagattgaattgttgattacacagcatcatctatgatggaatttactctattatcaagaattctttgtttgaaaatttgtgtgcaaatttagtctttaa

SEQ ID NO: 32237 - DNA, 1409 bp, Heterodera glycines
ctgatgacaagctaatgtgataaaacaggttaattcctttcctttcagtatccctgcaaagtttggtgcgcttctgatcagtttctgaaaaaaaagttaaacctaaactttttggcctgtttaaaaaggaattaaaaatttttaaaaattttattcatctccctttttgatagaaaaagcatcagagtgcctaaactaacatgtaaataaaatttggtgcgtttcagaaccctttctgaaaaaatatttaagaattaattttgcaaaaaacaaataaataatgaactctcttccttaataattttcctgcaccgaaggtactcactcggcctcttcgcggcctcgaggtgggccttcgcgtgttgtcaaactttctaaacagctaattgtaagtcgagaatctgatttattaaaaatttaattctgagtgagtgaaaggcatcgtctgtgttcaaaacatggacaaaagcgtgaaagagacaaatgctgggagatattggaaatgatcaaatattacaaatgaaacttgcaaaaatggaacatttgtccataaggccaaaagcaagaaatactcttttcataaatggcacagaattgctcaagcaaacacaccataacaaattgacagaaataatttctgatgtcccccacgaaaatttttccaaatgtttgaaagcttaaccattttgaaaatgatgtgcgaaaagcgggcatttctgctgaaaaagtcggacgctcttttgagtaggggagggatgaaaaatggtggaaagtggtgagagtgaaaatgatcataataaatggtatctgattttctgtgtttgtcccgtgtctttcttctctctgttcgttatggtagttccatcggccatcactagcgatggtgatgacgttgttgttccatacgactgcgatgatggccacggttggatgcccgagctgaagaagcggcggcggcaccatggccagtggaagtgccctggaaaatgagtgactgatgacccatcatcaatgacaagtataaaaaaacaaagggacaaagatagaaattaaacattggtgcatgccatgaatgcttaaattggttgcatttgttttttcaattttaatacaaataattgatttgttttgatgttacacacaccgtttcaaaaaacgagacatgaaccaataaatagagagtgcagagaaaaatacatttctctcattttggcgtactatttctttacagagaaagaaaaaactttaaaaatgacgatatttaagaatcttttttgagggtttttgccaaccaaactggacaatcttgttatcattcgaaagcccttgattaggagaagccttttctaagcaaatgctaaacgatttgatgaactggaaaaaagatatgaacgtttgaaaattttttt

SEQ ID NO: 32238 - DNA, 1418 bp, Heterodera glycines
gccgccgccaccaccatcacaaattgaagatcgtgttgccgttgccaatgccaccatcaaatgccaaagtcgccgcccgacagaaggccaagacttcatcgacaacaacagtagcaaaagtcgtcgccacccaaaatgcctgcgtgctcatcatcatcatcaacagcagcaaatgttcctcagccgtcgtcgtcgtcactttccgccgccgaagaattcgctaaacaaaaaaagcggaataagaacaacaaaaacaagttcaacaaaaagcaggtagccttgattaatattgaaaaaaaacttaaaatttcataacacttaaataactaaaaaatattaacctttcatagtcttttaaaattattataaaaatggttttaataattatttttaaaaatatcttccaaatttcttttctttttagccgccgcccccatcaatccgcattcctaagggcaaaacgccgaagaaggtccgtccacgccacccggaacccgaccagccggacgaccaatatgagctccgggcggtgttggcgaccgccgaagtggtgtccgggggcacgacacatctgtgtctgtatgtggatttccttggtataaaatttttttttgaatttttacactaaaatttctatttaatttcgatttaatttttaaatttcagattatcaagggcaagaggactggtgtttgtcaacgaaaagcgacgccctagaactgacgcacttccacgacattgactcgacaatggactctacgctccatgcaattgtgggccgaccggtggcgccatttctgcaacaacggcttaatgctcgcccactttttcatcaacgtaagaaaaattttttcaaaatttaaaatttttgaaatttttattaattagtgcgtcagcagcagcaaaatggtccgcaagtggtcgagcaacaattgccatttgtgttttcatcttctgtcgatgtcacgccagcgcaaagggcaaaggtggattggtctttctcatttctctctctctctctctttctctctcacatttcataaagtctgggtgttgatgtgcaggccttccctcgtgttggtccccccttcaatgcttatctcggagctgtgaaaggcggtaggcaggccttcctccgtgttggtccccctattgttttttgcttctcatttctctctttctctctcacatttcctaatatctgggtgttgatgggcaggccttccctcgtgttggtccccccttcaatgcttatttcggagctgtgaaaagcggtaggcaggccttcctccgtgttggtccccctattgttttttgcatctcatttctctatctcacacatttcctcgtttctgtgttttgataagactgaccaaaaatatttaaaaattcaggcaaatgcattgttgaagcgttca

SEQ ID NO: 32239 - DNA, 1751 bp, Heterodera glycines
  unsure (1)..(1751): unsure at all n locations
ttcattttcaataattttgttttaatttaatttaaaaaattattttaatgcagtaatcaaatattttaaaaatttataaaaattattattatttttttaataaaatatagaaatttaatatcattgaaactttttaggttcgacctagagccaaataaaatttaaaatgttaaaaaaaaacaccagcgtcggcaccaaattcagttgcaaagatgcatgagcatttaaagccttgaagaccgtccatttcaaaaaagttcggtttctggccagcagcagacgattgcaaaacttttttttaatttttcgattaaatttaaaataataataaaaaattattatttttaattttcctaaaccggcctgcccgttaccgcattttttcgcaatctcctccaaattggaagtgaaatctgaagcgcatccccattcttttcgcgtttgatgtcctataaaaattgaaaaaggttaaataaattatagcaaaaatttgttttttggcttaattacaatttatacgacttttatattaaaaataattaataacaattattattattattattttacaaatttgatagctcaaaactttcactactataacaattatatgtttagtttagttgatttaagcttataggatttattactttcttcctttcaaaatattattactaacattaaaataatatttaaaatttaaatatttattatcattgagtttggagggtggtagcctaattgggcaactataaaaagaaaatttctggaaaactaaaatatatttattaattagtttatttattatctcaaganagactcaattanaatatataccatccgagcagttaagcatataacactcatgcttaaccagtttttcatcatgtagcactgaacattcttgctctccgaaatcggtttccgtgtttccgtctcggatttgaggccgtgtggacaggtcaatccgtgaacctaaatttttctctaatagtgaaaaattaaaagggttaaatttcaaacactttattttaaaaaatttttgaagtttctgactaataaagaattttatttaaagaaattttcgaacgctacccttggtaaaggacataagaacggttttttttcaaaatttgtcccttacctcataaattttcacaaagcccaaacacaaaaatacaccgaaaatgatggccatataaaatgatgggaattgttcagacatatttggaagatacaccaaataataataataatatttcgaaatgaagaaaaatattagattcagaaaatataattaataaacaaatataaatgaaaaatgatttgactgaataaatctgtttttgtccacataaaacatgaatcatcaaaaacagtgcctctctttacggagaaaaatattttgctgatcacaaaatttataatataaaattttgtgattcacagattagccagccaaatcagcaaaaactgacgatatgctaacaagccaaaaaacaaaaacggacgatcgcactattcagctgaaaactggattttaataaagtcacgtttatcggtaaaatatgtgtaaaaatcgaaaattgtaaaaatgtggaaaaacttcgaaatataatataaagttccaaaattgtgcataattttccgaggatgataaatttctcaaaacttactcaatttggttaattaaaaaaccctttttgctaaatattgtattaaagtattttttgcagaaaaaattcaaaaag

SEQ ID NO: 32240 - DNA, 1509 bp, Heterodera glycines
tgagaaaaaaatatttttttgaaacatcgccggcattcttttattttaatttaaataacgcgtttatgcaaaaacataatttaatgcaatcaattcaatttaaaaaaaacacgaaaatacacccctaaaaatagaggtttacaaaaacgaaaaaatacacccctaagaatcgactttttgagttggcccccccccccccgaaacgaaggtcctggctacgcccttggctaaaattatacaaaaacaaaagatgcgatagaatcaaatgacaaaaaaaaaattcccaaaaaatttaaaaggaatgaaactttttaaaatatttttgacttttttacagtaggatttaggtattcataggaactgtaaaatatataaaaatgtggaatccgccgttagaaaatccgccagccatcccagtttaggtcatatttaaacatttccttttctccaaacccctaagattctgctctttcactccgcctttgctaacccatttttaaataaactctttctacaaaaaacatctgtttaagaaaaagaataaaaccggggtcagtcggatttgggaaacaattaaaaataaatttaaaaaatattcgcctgaatttggtcaaatgagcccagcagttccaacgcgtccgtctcgcttgtcagtcgaatgtgctccaacggttggccaacaagtgtgggccagcgtgcgaactgttgacccgcttgcccatatgcggtggtccggaaagcaggacaagccaattggccgacacacaagcggcaacacgctcaagtaggccaagctgggtggccaacagtcgaatgggcggcgctgatgaaatgacagttgacgaatcggtgccaatgcctatgtgataatgagtggaaaaaaacaattatggcgaaacgacacttgttatttgatacacaattttacatctttccaattaaatttattaccatatcgaattcggagttaattgtctaaaacaaaatgggaatggtatttttttctcatgaacagcagtcattgctaatattcacttaatgacatagtgggaccgtaccttcaataagacaaaaattatttggtatttttttttttttgctttcgataaaataagaatcagagaccggaccagcgggcatggcaaaaaccggcccggtgatttttggaaaaatccggtttgaccggtacttggagaggccaagctcaggaaacgaacgtttttgaaaatgccaaactggcgcggcccggttaacttgaaatttccgatattttataaaaaaaataacatttttctaagaaaaattctattttttcttaaaaaacttcatgatacaattattttgcactatttccttttctcactatttattgccgatgaaatgccgcggcaaaggtgcaatggcacacagccaatgttgagttgaaattcgcttccgtccccatcaacagcggccgcgtcagacaaatgcaacatgggcaagttgggcaaccacttgccctcgttgtga

SEQ ID NO: 32241 - DNA, 970 bp, Heterodera glycines
aaaacccatgacctcgaattagatgtcagattcgtgatcagcaacctctaaaacccggataacataaaaatttgatgaattttcctacagattttaataccaagggcggctaacagaaaatgaaaattgctttggccaatgaacaaaaaaagatcgccagggggtgcctctcgtcaaaaatttttcttatcaatgttagaaaatgacttcgccgtccgcgctgtgttggcgtgccatggccgtctccacgtcctccatctccaagtcctcctccgtctcgtcgtcgtccaccgtactttccaattcgcttccgtttccctcatcgcgttcatcatttgtgttcggctgaaaatgaacaaaacaagaagttgttttttacgaggaaaggaaaagatgctattgtaaaaaccaaactttaatatatccgaaattctttctgcctttaaacacggatttgggtttttttaagttgtccagtcacaatcaaaatttcgtccaacccaaccccattttctagattcttccaaatttacaggtgcaattgcggaaagctctgctggcgatgtcacattgtgcgcagaacaaagcgaagagaccaaaaaatggagttggaaaagaatgttgggcatctcttgttggccggtgagctgcgcgagcagtggcaaaacggtgggctcttccgactcacagaaccaaattggcgcctcgcgaggataattctcctaaaaagtggcatttactgttagtaaagggcattgattgagaaaagaaaacaattttaaaatggaaaatttgaaatttaatcatcttttaattgccaaatgcaaattgtatttgaaattagcaaaccataatattggcgctaatgcaaattgatcttccgcttggcatgatgaatttcaccgtgacttcgtcaacggaagcggaaacgatctattttttgaatttatattaaaagtcaaaaggaaat

SEQ ID NO: 32242 - DNA, 1234 bp, Heterodera glycines
tcaaaccgcccctctctctctcctaaaataaatttgccattaattttgcacccgaatttcccccccccccctcctaacctcaatttcctccgcctcttccttttgcgctccgttttggtttctgtccgcgttttctcctccgttccgtcgttcttcgccaccgtcgttcatcgcattgttcccaatgccctccaactttttgcccaatttctccaataattttcggttttccaccacttcgcttttaagcgtttcgatgcgtctccgaatggcattttggcgttcctttgtttcgacattagtaaatgagtttactgagtcccttttccacctcaaatttgcccccctcgtcgtccccgtaaagtgccgtcctccgccgcgcgttcgattccaccgacagataaagcatcatactaatcaacatgaacgtaccgagcgccaacgccacggcccaaatattgccccgggaaaacagtggcatgcctcctcaaaaccaagtcaatgtgttaaaattactacaaaaatttcgaaaattgacgcattaatataatcggtttttgtcttttataacaaatcgaagcaataatcacacaccatgagatggtatttatggtacaatgagaaaaatgccttcaagcgaattacaaatgccggaaaaataagaagcaaccaaatcagaacagtgaataacatcaatttaacaccaattttaggaatcatttcctgctaattgtaaaatgtttaataataaactaataataaatggaatttaacacgtcaccacaattttcaacggtaaaatgggtttgttcatgacagtccgaaaagaaagcgcttcaaaacaaatcggtcacttcaacagaatgttcacgacagcgttcgcgttcagagtgcgcaagtcgtggtaagtttgaccggtgccaacaaaaacgatgggctgtcccgtgatgtaagtcatcgaaatggcggcgccaacctttggtttttacatttgattcctcaattgaatattcttgcccactttgtcgtcaatggtgtcgaatttggtcagcacaatgccgtcgatcagccgtgcctgctccccgacggcggaattgtcggccaacgcctggttgaacttgaccagctggtcaaccgcctcgtttccgacccaagcttcgccaacaaacaacaccaagtcgggcttgttcatgtggatcaactacacaaataacacatggcattgtgcactgac

SEQ ID NO: 32243 - DNA, 961 bp, Heterodera glycines
tacaatatttttcaagctgttcaaaatgttcctcatcaaatatttgatgagaatgaaatgaaaattgagtccattttggacataaattctgagaaagataatgaaaaaggggggggggggaatggacagcgaatggcattttacgagttaaaacattaacagaagaaaggcaggctcacattggtgtgccaatgggccactgaatgaatgaattccccggcacatccaccgccaaactccaattaatataaaatggcattgcgcgcgccattccccggccattgcccgatttgtcgccgttaaagttattagccgggagagtcggggaaagcaaaaacaacagaagcaggtgagaaaatggagcaggagaagaacattgtggatggagggggggggggcaaaaagggggcgaagggatggacggagggaggtaaaaggcatcagaggcaataattaattaattagagtagctattaataagagcaaaaatacaaattggggatttcgaaaatggcaaaaacaaaaacagattttgaaaaaaacacctgttgaaatgaattaagcccagcagggaaaggaaaagtttcatctttggcagccaaaaaccaaaagtaattcccgagtaaaagtgacaaatgaaaatgaagggataaaaggaataaatggcaattggagtgaaatatggaggagaaaatgtgtcaatggctaaatgagaaagaaaggagggaaaccctgggataatggcggaatttgccctgaagtgaatggttttttctgatcgcgaattatcggagagaattgatcggctgactgaaaagagctcttggggaggggcgggtctgattggatccggatcgtgtggaagtgaagtggctgatcaatggggcgagggggcgggggacgtcgggaagactttgccgggggggcaatggtcaatgcaatttggggaatggaggaaaac

SEQ ID NO: 32244 - DNA, 849 bp, Heterodera glycines
cccctccccccccccctctccatttaatttccattattttttcctccgtccgcttttccctttcgtgcccatccttattgatccttttgcacctcaaacagcacacgaaacccaatttggatggactaataaaaggcagcagaagaagaagaagcacatgtttatggaaatggaaggaaattgggagggaaaaggaaagggagagaaatgaccgaaaggggggagagggggaggaaaagccaaagttggacagaaaaggaagaaaagtgcaaacatagggagagagagagagagagggagagaaaatgagacaataagagaggggagaggggagggagagaaagttttaattagcgcatgggagagaaagtttatttgccaagcagcggcaagtggcaccaatctgcggacggtctctaattaccactaaatgggttcagtatcagttcaattgcctgtgacttttcaatgtatgaaaaggaaaaggaaaagataaagtcagacaatcggagcgaaaagcgtgaaaagaacggcgaaaacaaaggaaaattgtagggagagagacaacaatttataatttaaaaaataaggccaaacgcacgaaaagtgagaaagtggaaaaaggaggaggacaaaaggaggaggagagaaaagagaaaaagggggagagagaaaagaaagagggagaggaggaaaagagggaaaaaataaagtgggaaaaagagagggagggggggggagggaaaagggaaaagggacatggtataggtaaaagagtgagtgggggaaaaggagtgagggaatgggaaagggaaatgtgaagaatgggggagggtaatgcgagggata

SEQ ID NO: 32245 - DNA, 889 bp, Heterodera glycines
  unsure (1)..(889): unsure at all n locations
cgagacaaagactntcggaggcaacaagaagcattgaatctacaggcactgattgacgaggaagagcgagaaaattttgaaaaccgaccgattaacaccgctaacaatggggtttttgagaattctttgattgagggagaaatttcagcatcacaccgaaacttggactcggaacaaattcgcgatgcacttttaaatgtggaaccagcgggtgtacgaaatgagcagcagaggcagaatgaggcagtggtcgatgaaaatttggaaccacaacgcggaggtttgagattgcgttttcaaaatttgggattcaacgttggtagagaggaatggttggtgagaaacgaaaattttgatggccatcgcataactcacactctttcaccacgtattgtaccaagaacctcaacccccattgaaaaccgcattatcaccgctgagaggaaatgaaggggctaggcctaaagggtaaaagtattaacatttgccccaaatcacggaatgtggtggacgtaaatggaaaactcgtcgaatgttatggaactgtctcacttcctgtcctcagaaaaggttgcgaagaaatggaaatcgatttccacatcacggatgccccttataggcctacccattttattcggaaccaatgctttagggcctcttggtttcaaatttttcgatgccccaaatggtgaattgattgaatttgaatgttcaaacaataaatcggattcggttcgtgtcgtttacaacacagtggttgaaccgttttcaaccaagtttgttgaactttctgttccacccatttttaatgatacaaatgtgctcatcattgcaaatgacgaagacaacagcgtaagagtcgaacctgcactgagtacgggcagaaacg

SEQ ID NO: 32246 - DNA, 1201 bp, Heterodera glycines
tcaattttcccctaggaacaaaaactttaacatgatacaaacttttttgggggaaaaatatttggtggatttttggagacaattctcagacgacaaatttaaaggatggttggtgttgaaccttcctcaaatatttgtcattcataattatgattggctcctgcttctgctgatcattgttattttgttgtttttgttgtcaatgttttttgagaattgcccaattttcagagccaacgttaccgtttctttgcggataaacacttggaactgttgcgacgatatcacgaatggatgaaggattcgttgcttctactggagaaagaattgaatttgggtggtggggtgggcgatgaattggacaatcggcggagaaatggccaaacggagagacaaatcagcaaatttggcagaaaggatgggggagagtcggaaaagagccaaagagacaaatggcaacagaaagagacgcaaagagagcaaaacggagaggaaacggacaaaaggggacgaaaggtgagaataatcagaccaaatgagaaagtgatcaaaagggaggagggaagtgagaatgatcagaccaaatgagaaagtgatcaaaagggaggagggaagtgagaatgatcagaccaaatgagaaagtgatcaaaagggaggaggagaaggcgtcagagcggacgtaacgcgtcgcgagaggggcaaaagtgcggcgggggaggacgcgcaaagagaggcggaagtgagaaaaacagtggttaccgagctggcggcgaagttcgccacgcaaggcgcatggcctgcgggaagaaagcgcgaattccctgccaaaattttccgacccacgccaattgtgccgacatcgaaataccgacacagtgtggcggacggaatgctgacaagagatttgagggacagtcaagtgtggaaaacggtggtgacggtggacggaattagtggcggacaagcggaacggcgggggcagcggagcaccgcgaaagacgaaaagcggcacggggacacagaggcggttgcactgcgccgccacttttacgccgaaaagccaacaaacgaacaatggcagcagaacggacgagtggcattggacgaggacgggcacaacgccaaccaacaaaagttggaccgaggcgagaactgtttgccattaacgcacaaattcaatcctttagcgccgaatggtgga

SEQ ID NO: 32247 - DNA, 1660 bp, Heterodera glycines
aattcctaaattcaatggtcacaggttccttctatttggtcgactgtttaccatcttatgttccagacgaattgttcccattttttgctgaaacatggtgacgaaatcgaggcgaactttgggcccaatttcaagtttaatttggctactctttgaagaaagcagaaaaaacggaagaaaggcgataatttcatttttgatcaatttttattctttgtttattttaatttaattattaattttggatttttttattacgttaattactattcttattaatgataattgatttaaaaattgaccgtttgatttatttgctatagtaaaaatttgtttaaaaaaacagttagcgaatgatacatatcgtcaattgcgccctcaaatgaggaaatgcttggaacatgaattttatctgaataattaagtattacaaataaaaaagaaacgaaatttttaaaatacttttaaagttaacccatcaatgtagtcaaaaaaaaaaattaaaatgtatttaatactttttttaaattgaagcgaatgatacataatctaaaacttgggtaattaaaccagggtttctatatgttttttttttctaagaaatgttctgattgggggtagtgccttatttgcatccaaaagagggaaatttctgaaaaatttgctcgtgaagaatgacactgctctacagagattttgtccctgcaagcaaatctgttttcatttgttaagtcaaatcttttctcagattcctgagccgtcttaatggtcaatttgagatgcttcacaatcggcacgattgtgactcgtaagatcactcatctcttacgaatgttggacaagctttagaacgctaagaatttgaaagaaattttcttatattttggagatgtaattcttgagggttttaattttacttttgcgttttttcatttgcacctatcaattaagccaaaattacttcagcaaatctcttaaaaaataaaagatataatttataacaaatttttaaattaaaaaaatataaaatattgtgaagaattgattaattgttcgtatttacgtggcaaaattaatctttctaacgataaataaaatgaatattaatattaaaaatcgaaaaaacattaagtagattcattggaagcaataaattcataatactatatgtatttttttaataaatattctatgattttgtggcatttaataatattttttataattttctttgcttttggaattgaatccggcaaaatccgaacaaattttgttgaaatatttggtgaagaatggtacaaaaatgaaagtgaagaaaaattgaaaaaaactgaacgaaatgagcgaaatgataactcacaatcagcatcagttgatcaattgggtgaagaaatggggacagacccaaatgatcaacagaaaagagaaatcattcgaaaatttgaagcaattaaagaaaaattgaagcaaaagggaaaatttcaatggaaaagtcaaacaaaaattgagaggaaaattggaagaattttaggcatatatcgcgaaaaaatatacaaatggaaaaaagaattaaatttaaataaaattaaattcaaaataatgaaagatagtttttatgaagagaaaaagaaagaattcattgaacgatctaatgaattta

SEQ ID NO: 32248 - DNA, 1440 bp, Heterodera glycines
ccaccgtgaggcgggacagttccaaaatttgtaccacattttactgtggaaagtccaagtaccttaaggactacagaagagccaattacagcagtcacctttggacagttatgtaaaagaaataaggaaatattcgatggggtgcgatcctttcaaaaaattactctcgtcttctaccctccctctctttttgtgcactgtttcgtttaaaaaattggttccgaaattttttgactctaagaaattaaattgtaaaaattcaaaacttaaattctcctctgaagttttgaacttggctctatcctgcttttaagtcccaccgtgaggcgggacagttccaaaatttgtaccacattttactgtggaaagtacaagtaccttaattggacaattacttgtcaacgaacacagtcgcctttggcctcttatggagcagaaaaggggaaatatcagatggggtgcgcgtcccttcctaaaaatttctcttttcgtctaaccatcccccctttttgtgcactatttcgttttaaaaattgggaacatttttttgtttgtttttttgaaactaaaatgtaaaaaattttaaaaaattatttctgattttaaataatgcttctgtttcgaatcttttgactctaagaaattaaactgcaatttttagaacaaataattctctgaagttgtgagcttggcttttcaatgtttttaagcccaccgtgaggcgggacagttccaaaatttgtaccacattttactgtggaaagtccaagtaccttatttggacaattaattgtcaacgaacacagtcgcctttggcctcttatggagcagaaaaggggaaatatcagaaggggtgcgcgtcccttcctaaaaatttctcttttcgtctaaccatcccccctttttgtgcactatttcgttttaaaaattgggaacattttttttttgtttttttgaaactaaaatgtaaaaaattttaaaaaattatttctgattttaaataatgcttctgtttcgaatcttttgactctaagaaattaaactgtaatttttagaacaaataattctctgaagtttttaacttgacttaaccatgtttttaagtcccaccgtgatgcgggacagttccaaaatttgtaccacattttactgtggaaagtccaagtaccttatttggacaattaattgccaacgaatacagtcgcctttggcctcttatggtgcagaaaaggggaaatatcagatggggtgcgtcccttcctaaaaatttctcttttcgtctaaccatcccccctttttgtgcactatttcgttttaaaaattgggaacatttttttgtttgttttttgaaactaaaatgtaaaaatttactagaattattttgattttatataatgctaaaagttcgaatcttttgactctaaggaattaaactgtaaa

SEQ ID NO: 32249 - DNA, 1540 bp, Heterodera glycines
tttttactttagtttttgaaaaatttattcgtctatctttttaacttccagtggatttttttaattttacgatttgtcattcgggtctcaaaaagccaatttttgtatctcgggctaacccaacagactcataaattaaaattggtttcagtttccccagacataccgggtcggccattttcggcagcacaaaattgttcacaatgtcggggatcagtggttccatttggcgcttgcatccctcgccaatcgtggaaagagcgcaaagccccgcatgacgacacttccaattttcgttgttcaacagttcgttgatgcattgcaacgcgtggttcatcaccgcctttccgccgagtgcacaagcgattcggtcgagtgaagtctccccaattgttgccgtttcctcctccaattcgtcctcggcgtcgtccatttgcaaccactcgtccaattcgtcgtccaactcggtcatcaactgcagacattgctggactgaaatggactggataagaatgggccaaatgaaagttttcactcactcagcggtggcaaatacagcgctcccttttttcgcattatgttggaactttcgcagatggaaaccatcacttccaggccacctaaacattttttattctttatccaaaatgggaaaattgtccactatgtctgtacgattcgtccttttctttattggccacagtccctaaaacacttttgtaaatccgagtgccgttctgcttgaaatttgtttgcaaaacctgcacaaagcgaaaaaatgtcgctcatgtgaggggcgagaattttgggaagagtggaggccaaatcgcccaaacattgcaaaggcacatctttaaaagttgattaatgagatgaaatcggaggcactgggcaccgtcgtcgtcctcagtgtccacgacatgttggcacactttgatgacggcagggaccaagtcggacagttggcggatcacagcgtcgttctcctcattgtcgcacacaaacgcaacataggcacggacagcggcagtccgcacggaactgtcggcaccgtaaagcagcgaagaatggaacattgtctgaacaacaaacagttttgaataaaacgcggaatcggggctgtgttgccttaatcccggcaatgtatttgaacgagtcggagccgaacacatttggcacactttcaatgagcgacatgccagcctcgcgaaaggtgggattgtccgaagttgcgcacatgtccaggaactgcatgatgccagtccacgtctgtttgccagttttgtcgtctatggaacccaaaattagaatgggttaaattcagataaacaccaatggaattccgcgcaagttccgccaacaaatcggtgagtcttttgcgcaaaacgggctccgtttcaccattgatacacacaatgaattcgttgtgaaattggtccttttgaatttgagtttctgtgaagaattcttcgtaggaattcgacagcaaacggcgcagaagaaccaaagccaaagagcgagactaaacggaaggaacaaa

SEQ ID NO: 32250 - DNA, 1429 bp, Heterodera glycines
  unsure (1)..(1429): unsure at all n locations
atttgaagaaaggagctcaaaaaacgcatttccgcacattttttttcgattctgatgtcattatcggtcactagaaatctctattttgggattttgtcactaaaatagtgaaaattcactattttggagttttgtcactattttttcactatttcgacatttttttggaaaattctttaacaaaaatgcaataaacccaaaaaatacacccctaagaatcgacaaaaaaaatttcaaaaaaatacacccctaagaatcgagctaaaatttttcaaaatatactcctatgaaatgaaaaaaaatttctcaaaaaggtattttcgtggcaagaattttaattttaaaaattatttttttatgtacctattttgtttttttgcccttaaaaatcccagtcctactcatttgcaatgcaatcagtgaataaaaattatttttgcttaatttttggctgaaaattatgtcactattcgtcactatttcggactttttgtcactatttcttcactattttggcatttttactcactattttagttaactatttcgggatttttcttcactaaaattcacgtccctaataatgagctttagaagtgggcctgccacaaatcaattgggctaaaatcatatttatggatacgtaatattctatccatattctggcgttttcccaaaaattctattagaacagagctctattaaagcggccctctgaccattaaggaattgaaaaaaattatggaaagtttcttaagaacctgtttgataattgaattcaaaaaataattttgaaaaacatttttaggacaaatcactttcggatttgttaatttgtatatgccaggaatgtgacggcttgccaatttctgaatttttaggctcgattttcgattgcagaatttaacaaagcaaaacgaaggcttatttctaaaaaattcatttttggcgattattttcttcactgatttgtgagaaactttttttctgaggggcgcccacttctaaaagagcatgcgaaatatatttttttaaattattttggtgatttttttagattttggttgaacgtagcaacgcagaattgttggcaatacaaaatgcttttgtggcattgtatggggaaacattgaagaaatgtataagaaaaaaactgcatataaatggggatttttacatgttgctgctcgatttaattgacgcaaaccgtgacgaagtcttttgcaatgatgaggaaatggcaactgaggcaaaatttattanaatttaaaaaaatattaaaaaaggaaaattggtttatttttattagtgaaatttggtttatttatttattagtacttattaacattttaagactgctngtacgctgtacgaggctggtggtanaaggggcggaacgcacgaaggaaaatttatacgcatttttgca

SEQ ID NO: 32251 - DNA, 1070 bp, Heterodera glycines
ggggaaaaaaaaattttcaaaattaaatcccccgggagaagggagggggaaaccaaattttcaaaattttcaattttttctagttttaatctactcaaaccggttcagaaattcaataaaaaataacattcacggggcgaaaaaatgggggttgaaaagtttatttgaaaaaaaagactttacaaaaataatacccctgggagaagggagtgggaaacatgatttcaaaattttcaattttttctagtctaatctactcaaaacggttcagaattcaataaaaataacattcacggtgcgaaaaatggggtttgacaagtttattggggaaaaaaagactttacaaaataatacccctgggagaagggagtgggaaacatgatttcaaaattttcaattttttctagtctaatctactcaaaccggttcagaattcaataaaaataacattcacggtgcgaaaaatggggtatgaaaagtttattggggaaaaaaagactttacaaaataatacccctgggagaagggagtgggaaacatgatttcaaaattttcaattttttctagtctaatctactcaaaacggttcagaattcaataaaaataacattcacggtgcgaaaaatggggtttgacaagtttattggggaaaaaagactttacaaaataatacccctgggagaagggagtgggaaacatgatttcaaaattttcaattttttctagtctaatctactcaaaccggttcagaattcaataaaaataacattcacggtgcgaaaaatggggtttgaaaagtttattttgaaaaaaagactttacaaaataatacccctgggagaagggagtgggaaacatgatttcaaaattttcaattttttctagtctaatctactcaaaacggttcagaattcaataaaaataacattcacggtgcgaaaaatggggtatgaaaagtttattggggaaaaaagactttacaaaataatacccctgggagaagggagtgggaaacatgatttcaaaatagaagatgttttctagtctaatctactcaaaacggttcagaa

SEQ ID NO: 32252 - DNA, 1197 bp, Heterodera glycines
  unsure (1)..(1197): unsure at all n locations
tgccgaacagactgttcatgtccagctggtcgtggaaatggcctagggcaaaacagaaattggcgtaaataattaggcaattagcgattgaaccgtatgacattgaaaaaccccttttgctttttttacttacagaataaaatatttntaattaattctaattaaaattaatttatcatcacaaaacncaccggcataattggccaattgattcgcggcaaaatcgatgccctgcagcaacgccccgttgagaccagccgccgaatgctgcgcaatttggtgtccgatcactgaacaacgaacgattgaaaatcccattaaaatcggtcctttttaaaatattttattttaaatgatttcccttcgatagaccgtattttgcgttgatcactttcagctcactcactctctcttctctcaagtgaccgtatgaattaatgaatgaatgggtcgcaacaactgacaccttttaatgtcacacttttgcgcccctttgcccccgggggagcgcccgatttttgtttggtttttcattttgttttgttttattgtttcgtttttttgccaccattggtgcctcggccgcccattgtcagctgctcactttgctgctgttgtgcgctgtttccgttgttgcggccgagcaaattgttaatctgaaaattgttgagttattttttaaaaaatatttttaatttttacattttcgatggatttatttaatttattttaaattaatccaatgccaattctttcgccataatttccctccccatctccaatttcgtctgttttcccccaaatggcttttaagcgtcgcaccaatgccgcgggggatgcgcgtgccaattccgtctccgagtgtcctcctctgcaaatgctcgactggccccctgggtgggggggggagatactgccgctcatactgactaccccacaagttgcctccctaaaatgtgaatgttgtaaatccaaatgttgtatatttagtgatgcttgaggccagtgaggcaatctgggcggcagtccaactgagcggaatgggacacatattaagacccgctacaattaactaccgaaataatactgagcgcgcacaaaaaaaacatataataagttctgataactggctgatttttgagagaccacaattgcttataaaaaaggaaatccttgttacgatgaagaaaacttgga

SEQ ID NO: 32253 - DNA, 673 bp, Heterodera glycines
gttcgaggtgcgaataggatcgaaatggatatcagaatcggattcatcgacccagaaaaccctagaaacgcctttttcgcaccaaaaaaaatgaatttttttttttcaaaaaggtgtgataccatctaaactattacccaaaatttgtttaaccaattgacgagtgatcactgtttgacttttccagtttttatacaaatttagtgaataaatctcattgtcagaacatgaacagatcattatacatagctattagttgcaatcgcatttttatatttgcatttttattgcatttcgctaatttataacgttcttttttattgcactaatgtctaacaaaacgaaggaaccgcttgctttcgtcactggtgtcgatgataaatgtgtgtttatttggtcttcagaatatccgttggaagaattacgctttccagtgaaattgggtgcacaaagggtgggtgtgatcccgtctgtctttttcaacttaatctgtttcagcccgaattgggtcaaagggttcaatatgtttgcacaaaacctccacatgaggttcaatatagcgggatactcaaaagaatcgcgaatccgtcacccataataattctgcgtgatggtgaatttgtggtaatattagggttttagtctagtacagacccataaagaccttttcctt

SEQ ID NO: 32254 - DNA, 1064 bp, Heterodera glycines
cagtcgtccttccccccgtattgtttcttgctctcaacaattaaaaaaaaacaaattttttttttgtttttctaatttttatgattttcagaaaggtttttcttgaatttattataaaaaattttaatgtttttttgattccaagttttataactttaaaaaaatcggcgcgtgaggcgggggggggggggtagtgaatttacatgtcggcgaatcattggggttttggatagcaattagaaggattggcccgtttcgatattgggaaggggatggatggcaacttttaaaagaatttaaaatatgccattttatagttggaggatggtgaaattgttatgccggttgatgaaaatgacgacgacgactacggtgtcttttattctgctgagggtgtcggcgatggcgcattggcggaccgcttcgaagacggtgagctcgtcgatgacgggccgtctgtcatcccggcggaacggcaccgcgcggagggcaacaaacgacgctgtgccagtgccatcggcgcttttcggcagcgctcagcgacgacgacggattgcggcggggatgatgcgcaaacgcaacaacggcacgtctttttccgatcaccgccgccctcgcaggcagcacaaattggtgagagaaagtgatggagagacagagggagagaagagagaaacaaggagggagagagtgagaagtgaagcgggagtcaacgaaaaagaaagagtacataaaagagagtgaaggaaatggagagagagagagagaagtggtgagaagcgggaatcaatgagaaaaggaatagtataaaaagagagagagaaagagatggaggcagagagggaccaagagttgcggtgggggtcggtttagtctggccggtttagtctggccggtttagtctggccgttttagtcagggggtcgttttagtctgacaagctgtttttgtcccacacggattctgttgtgattttttcgaaaaatggaaatttaatatcaaaacatatttatcaatgaattccaacgaaaaagtaacaaaatattgaaaaatggttaagggcg

SEQ ID NO: 32255 - DNA, 661 bp, Heterodera glycines
ggtgctgggtcattacttaaaaaccatcattatgaaaatttttgtcgaaaaattatttataactttgctcgaaagtaaccaaatttttaattgatagccctaagtgttctctatcagtctgcaaaatttcaaaaaatttcgttaagtttcaaaaaagttatagctcgaggaactcaaaaaacctttgattttcgaacatttttggccataactttttttaaacttaataaaattttttgaaattttacaggctcataaagaacatttagatctatcgaatgatagcaaggattaaaaatttgggctttttagagcaaagttataagcaaaaattttcattatgatggttttttaagtaacgcccattatgatggtttttaagtaatgacatagcaccaaccaaaggggggggggggaccattcgtgaagagagagagagagagtgcagcagagaaaaagaggccaagttggagcggaggaagagaaaaatggtggaaaagagtgtaggaaataacgtgaaaataaatgatagaattttggtttaattgaattctttttaaatcaaattacgataaaaaaaatttgttaaagatgaatttcattcattgtttaacaaatccatctaaaaacaagtcaatataaaagcctattttataaaata

SEQ ID NO: 32256 - DNA, 1527 bp, Heterodera glycines
  unsure (1)..(1527): unsure at all n locations
tcgttacttaaaacaccatcattatgaataatttttgtggaaaaattatttataactttgctcgaaagcaaccaaatttttaattcttgatatcatttgatagccctaagtgttctctatcagtatgcaaaatttcaaaaaatttcgttaagtttcaaaaaagttatatctcgaggaactcaaaaagccttgattttcgaacatttttggccataactttttttaaacttaataaaattttttgaaattttacaggctcatagaacatttagatctatcgaatgatatcaagaattaaaaatttggtctttttagagcaaagttataagcaaaaattttcattatgatggttttttaagtaacgcccattatgatggtttttaagtaatgacatagcaccattccaacatcttaatgaaagcttatttattcgaaaaatttagataaaaagttctatatttaaacaaactacaatatctttttcaataaattttaaaataaaaataaattataaatttaaaattaatatacagaatggaataacaatctatacatttaattttaaataaaataattttatatattggattttatgttaataaaataaatttatcagatgatcatattcacaatgctaactatccgcaaataattcgctagctgaagataaatccatattcacaatgatagggatagggtatctacagatgaaaatccttagcctcctcccgaggaggttaatttctaaagattcgagtattattttgatgtccaaataaattttggagtatgtttaaaatttaaaattttttattgaaacttcaaaacctttaatgataatatttttattttttatttttaaataactgatttagagagcacttaatattgtataattttttgtagtcaaactatttatttaaaccaagtctttgcccttttagttttctttataaaaaacactttaatttccttatttttgatgctaaataaaagacaattattaacaattattattatggttgggaattttaggcataaaaccacgaaataggcacctaaaaaggcagacaaaatcgaaaataaattggttgttttggtttttaaatgtcaaaatgacgagtagttatcaaacctaaatttttttaatgtgatttgttttttgtttggcccaaatcaacgctattgaaaatatctggtacgattttttaaaattaatttccctgttgataatatatgaaaaggtttaatttttccaaccttttccgggctcggcaaattcaaaatccggtttgaccggcttgggagaggacgagcccggaaatcggttgatttgaaaatgtcggtggtctctcgtaaaacaataaaaccacactttagactaattgctttaacgataagcnaatcatttgggtttaaccctttaactnttttagataatgcncaattnatttgntgatcagtcaaaatcaaacataaacaatttgtatcctttgcgtaaagtttgggtttgtcctggntgacaaa

SEQ ID NO: 32257 - DNA, 1153 bp, Heterodera glycines
gttgacaaatttgtgcaatttctcggtcaatttcattgtttttctcaaaaatcgcgtgccttgtaatagtccaaccaccggtgcgcagaaaaatgggatgatttgcaatgctccgacacgacatttctttcctggcaaatgaaaatttacaattcacaaataaaccaccaaattcaaacacactgaccttgtgaaggcattggtaaagtgaccttaaatcatttgaaaaaacattttcaaaatgttcattttctgctgctctctgctcaccacatggactggatggagacgggcttgaacaacaatttgaacgagttcggctgtttgtcctcctcaattttgatgccaccgtcgccgtcaaggcaaatagtggaggaagtgctgatgggcacggcaattccaatgctgtaaagagaaaactcgtcaaattttgtcatggaaaatttgtcaaactttgaattttagtatgtttttaagcaaaaggggagaacaaaacccgtcagataattttgccaaaaattgcaattcgtacgcgctgcgaggggcggtggaagtggacggcccaatgaaatggaagccgagcagcgcagcctcgcgcgactcggtggcgtcgaattgggtggagaggacggccaaatagcgcacgtggggcgacgagggggagacgagggaaggcgactgcaaacggacgaccctaacaaagagcgaagggatggttgggaagtaaacaaattttaagatttgctgagtgtttttcatccaaaaaatgtaaaattcccgcgactttaagcattccttatttatccgacggtggcttttgtccatagatcacaaatggcatacattgtcagtgagtcctccggacgcaaagcattgagcattacgtgcagatgagcctggatactgtctgaaaaaggactattgcatttcacacgaccacaaaacaaattggcaaatttaatacacaatcattttttctagaagcatccaaaataatcattcaatagctctaagaattctctattagattgcaaaatttccaaaaatttcgttgctttttaaaaaagttgtggccgaaaatttggggaaccttcgccgccctctgcgtttgttcggtttgagcagcagcggacagccaacgacgcggacgact

SEQ ID NO: 32258 - DNA, 1127 bp, Heterodera glycines
acatgttttagcttggtttgaagcttctaggatggacttttatatccatatttttccatatttcgcgatttatgtccatattttggcatttttctacaaaacccctattagaacggccctcgtcagctaaattggccgttttgaccccaaagactggaaaattttccgaaaaagacattttttaacaaaattttgtcgaaaaaattgattaaatttaaattttcttagaaattggttatttatgtcaaaaataagcaaaaaggaaaatttcggtttttttttgttggttttcattaaaaatagctttttttcttttaaaacgagttcttataccgtatttagccattttagatgtattctaatagaatttaatgaatttgaagaatatttttgaaaatttacccctcaattcggagaatttatgtccatatttttgctattttatgtccataaaattgcggagaccacggcggttaagctacagcagaagaaagatgaaaattggaacaacaattgtaacaatgtgttcatttggctttttagtggcactaattgcattgggtgagcaattaaaaaaaacatttgatttttatccaatttgaattttgcgcttaattaaggcctttgtctcctccaccggcagaagaaacgggacaaagcatcacaaaagggcgaaatgagtgagggacaaacgaacaaaaacagtgatcagctgaagaagaaatgaattaattaagaaatgaccgaccgatcataattaaatcagtgatcaaatgccttttaaaaaaattttctgaaaatttttggggtctattcttagggggtctaaaaattttagctctatttgtaataaattgtttgaaatttgcccgaaattccctgagaaattcatgattttttttaaatcgttaatgggatttggggaacaaactgtgctcctgcaaacccacgccacaacacaaaattttttgcctatgtaatcgaatgaatgcatttttctttcgaaaattgtgtattttttaggattttgacgtggatttacgacatccattagcaatattagcaccgccaaattttaaaaagtgtaaattgctgccgtcctctctctttcagcttcatctctcttc

SEQ ID NO: 32259 - DNA, 1364 bp, Heterodera glycines
aaaataaaaaagttattccagaatttctgccatattcggattttcagaaaaaaattcagaactcccttctgaaaagtcattctgtaaaagtaataaactacaaaaatccgcaatttttttctctataatataaattttattttacatttttatctcttttttgcgaattgttataaaaataaaagtgatttttggtttcgggaccataggggggtgaccaggatttttgggtggaaaaattttttcaccgaaaatattccaaaaacatgtctttaggggtattttatgacgctgatcacgaatacgtgatcagattttacttttgacatcgttcagacctcagaatccctgtgtgattggggattctggggcatcatttttttgggggggggaggaagttcaaatccgggcggtgtacattatttttctgtgcattttttgttacttttacatgtttttattaataaaaaatagatttcttttattaataataaataaaaatgtttaatttgaagtaaataattttggtaaataaatgtattaatttaaaattaattattttttatttttaaattaaagaatttatttgttttttttaattagaatttgtcaaaaatttattttcaataaaataatactcaatcattgtaaattcaaagtttatttttaattaataaaagaaagcattttttaataattttttaaaaattattaatacatttttttaattatattttttcataaaccatttccttatttgtttaattttaaaatcatgattttacactgttaaccattgttgtaccatttcacaatttttgtacacctctcctaatcactgttgtaccacttctaatcactgttgaacctcttctaatcactcttctaatcactgttgtacctcttctaagcccaacaaaattaaaaacgggcgcgaagcgcccgtccaaggccaacaaaaattgaaaaacgggcgcgaagcgcccgactgaggccgcgaagcggcctaacaagctaaaaaacgggtgcgaagcgcccgtataagcccaacaaaattaaaaacgggcgcgaagcgcccgtccaaggccaacaaaaattgaaaaacgggcgcgaagcgcccgactgaggccacgaagcggcctaacaagctaaaaaacgggtgcgaagcgcccgtcttgagcctcgatgtggactaaaaacccctaataattttttaaaaattcaaaaaatctctccaaccaattaaaacgggcgcgaagcgcccgttcgaggccatgaagcggcctcaaagccccagataattttttaaaaattccaattctccacaaagctgcctaaaaatcccagtgtacctcttctaataa

SEQ ID NO: 32260 - DNA, 994 bp, Heterodera glycines
  unsure (1)..(994): unsure at all n locations
tcatcggaccatcagagcagcacggacaatgaataatgatgaacaatggcacttttggatcaggaccacncattaaagggaatttggcaataaaaaagtacaaaatctatacaaattgtccaaaattgaccatttgtcagcgatgggacacaatttttggaattttgcaattggcaaggcgcaaaagaaaggtgaacatcctttttggtggatgaacatataaaataattaatcattgggacatatgttcttctcgaattgcccttcccattttatgtccccgggggacaaaagcgtttattctccgccccaaatccgccaaatccgcacccattcattattttgtttccattgttattgtgcctcggcactttcaaacactcggaatggccgtgccgatatcgggcacctgtccattcgtggcaaagcaaattacggcccatccatcgattggaagtctcgaatctctcccgccctccgttttttaatctcgcatattaattttttataaattttgccaatatgcttctcaaaatagtgattaattgatgaataaatccctaaatcccatccccttggtcctttccccttccccccccccctcccattggtcccctgttttgttttgttttgcttgtccatttgttccttcccagctctctctcatttgctcatttgtctgtccccaccgtttaagcatcattaaacttgcgcgggtcgatccgtcctttttcaacgcctcaccccacaaattccctcactcgcattgatttcattttttgtgaacaaacacgcgcaatttttaatccacaactttctgctgctttcgatcgctgtcccatcatttgctggttgtggtcccatttgtttccaatattcaatttcattacgatatcccccctcccctccaaatccctcgaaatcccgcggattttcttattctccccgccccagtccgccgccgtcattccccttacaattcaccccctccccc

SEQ ID NO: 32261 - DNA, 1083 bp, Heterodera glycines
gaggaacagaaaggggaagagagagtggaagagggacagaaagcggaagagagagatagagagggagagagagtgggagagagagtggatgagggacagagagcggaagagagagtggaagaggaacagaaagtggaagaggaacagagagtggaagagaaagtggaagatgaacagaaagcggaagaggggaagaggaacagaaagtggatgagaaagtggacgacgaacagaaagtggaagcggaacagaaagcggaagagaagaagaggaacagaaagtggaggagaaagtggaagacgagcagaaagtggaagagaaagataaagaggaagaggaagtggaagaggaacagaaagcggaagagaagaagaggaacagaaagtggaagaggaacagaaagtggaagagaaagtggaagaggaacagaaagcggaagagaagaagaggaacagaaagtggaagagaaagtggaagaggaacagaaagcggaagagaaagtggaagaggaacagaaagtggaagaagaacagaaagtgtaagaggaacagaaagtggaagataaagtggaagaggaacagaaagtggaagagaaagtggaagaggaacagaaagtggaagagaaagtggaagaggaacagaaagtggaagagaaagtggaagaggaacagaaagtggaagagaaagtggaagaggaacataaagtggaagagaaagcgtaagaggaacagaaagtggaagataaagtggaagaagacagaaagtgaagaagacagaaagtgaaagaggaacagaaagtggaagataaagtggaagaggaacagaaagtggaatcgaaagtgtaagaagaacataaattgaaacagaaagtgtaagaggaacagaaagtggaagcgagagtgtaataagaacagatagtggaagcgaaagtgtatcaagaacagaaattgaaacataaagtggaagaggaacagaaagtgtaacataaagaggaataggaacagaaaatggtagcgaaagtgtaagaagaactgaattgaaacatatagtgtaagaagaacagaaattgaaacagaaagtgta

SEQ ID NO: 32262 - DNA, 1581 bp, Heterodera glycines
gagcaaacacatgttttttggctgcctttttaaatcattctcacaacctatagtacaccattcaatagagtttcaatagctctacaattttactcagaggaatttttgctttttctattaatagaatagtttattgcttttttgaaaaaaaaacattcaaaaaaaaaccgaaaaattttcttcggttttttcgatttcggttttttaaccgaaaccgttcgaccgaccctcttgtccggtctctatgcctcccttctaattgggtaattagaaatttatccatttcgcttaatttgttaatttgtctttcttctgctctccctcccgccccaactgacaacattcgctgccgtctccggcacattgcatcggtcgatagtatttgccgtcctcgtcgcactgggcaatgccttcgtccgtcgcccttcggtcggcccccgcggcgttcgcttcgcgcaacgaacgaatgcgcttttgtccacacgctgaaaccgcttcaaatggtccgctccttcttaggggtcactgactcgcgcagcattttccctccgcgcacatttcgcccccgagggaacagtcgccgtcactccggcaaattctctcccacgccccgccgtccgcacatttttcagctgccgaattttgtgaaaaacaaatgaaaagcgaaggaagtgcaaattgccatttgaatttgcacttcgatttcggcgagtttaattacccccgcgagacaaaggacagcaaaaaccacgcgaaggcacgcaaaattcaccagaggaaacagtcgaagtcggaacggcaaaaaaaggacgaaaaacggccggaatcacagcggaagcaaacgccacgcaattcgcagagccctaatttgtaagcgaaaaaacaaaacgacaaatgatcgaaagcaatcacaaaaagagataaaatgtcaatgccaggggcatttcggcacattaactcactttgagacattcccaaaacgacagacaccccccccccccaaatcttcggctcaacttctcaaatccaacctcaatccccccccgccctcccattcattcgactcataaatgcataagccgcacgtgaaacattggccttgaaccaaagaacagtccgtccctcggctgtccatttgactgtacagaaaaaggatccctttcttcctgagagttcgctttgaagaaatataattaaataattgactaacaattaattattccgtgcttctcctaattatcaatgcgtctttggctatctgtccgttcgttctctcaataattcttcggctccctccccatttttctcaacacttccgccgtgctcacaaatggctgtgtgacggttgcgtcggcagtcgtcccgcgcaccgcaagcggcggagtgttggcatacaaatcggagaagagcgcttccggaggtaaaactgaaaaaacaacaaaataaggtggaaacaatgaagcgccatgccttcgtctgaaagtgcgactttgaccgcctcgtccacctcctgacgcactttcttgtcaatgtcctgcggggatggaatgaccattgatttgtgtattcattggcttgcaa

SEQ ID NO: 32263 - DNA, 1109 bp, Heterodera glycines
cgatctttaaatattaatggattttatttttcaatttctaaaataaacttctttttttttgccagacaatcgctttgtgcagcaggacagcacacggcaaatgatgcgcaaccggcgcgaatgggctgtccaacggttgttcaggcattatgccaatgtcggtgtgccggacccaactgtacggttgggcgaaattctgctgttgctgcctgagttggaggtgttacaatatggggactcaatttgggaattacgatcaaatatcgacctaaaaaagcctgagattgggccaaatcaataccaattaatggatttttttgatcagatccccatatgcatgccaaataactatgatcagtccaaaagagtaccggttgggctcaactttactgtttcgatcagcaccgattgatctagctcgtttattagggcaatgatttatgatcaggataagttgccattaggagagggataattagaatattttcattttttcgatttttattttggacccattacctcttaagcttcttatacgaaaattatggaatcaatttatttgaatttttaatcaaaaaagtttttttgcgctcaggtcatctgcgatttgcactgcagggatttccaggtggcacaactgttcgagtttggcaacatgtctgactattggtatgaaaattatgcatactgtgccatgaatatggtcggatgatcagcagcaagcagaattgtctgtaattcagcaatatattttgaatccggttaattgatcagagatttgccattgttttttttaaatttttttattttaggttcagttttatttaaaaaaaaattttcctaggctttagggtttacgtcaattacattaataataaaactgttccattgtttcgttgtttcgaaatgaaatagaaaaattctaaacatccattgacttccttttttaatttagtctctggtgtttatttatttaagaactttcatttctggcctgaaaagaatttaaattaaaatcattttaaaaaataaaaagaaaaaataacctaaaaatagaattgatttttgaagattatatattcttttttaaattttttgatttaatttta

SEQ ID NO: 32264 - DNA, 1148 bp, Heterodera glycines
gcggatgggaggggtagagtgggtaacgcgtgcggttgtcacgcagaaatgaatgcgtgcgtctttgtgtgagtgttatgggtgtatagagtgggtgggaattaaaagttagagaagaggaaaactacagagagagatgaaaaaggaagcgagagaggggagagaatgaagagatttaaggaaggggtgagagagagacagagaaagagaagattctgcctttttggacggaaattgttggacattttctccgtttccgcttgttttctacccagtaaaatttacttttttttcctgcttcgttgatctcaagattataaggactttttgaatggagcatttgtcttatcctgaaaatttttttaagaaaattgatcttttatgtttttcaaatttttcctaagtctatccatccctcccaaattgtttgtttaaattgtttccgtcatttcagcaaatgggttcgccagtcctccttttattacatgattgtgggcaacttgatcgttattgcggttttcgcggacagggccttaacgagacggtactttggcaagaagatggagccgatggcactgccctcgtggaatgcttttgtgaaaacggagttgaaagaaggcagggaactgacgatgccaattagcgacgacgaaaaattaattaattaacggacgattggttttgttcctgcacattttacaacttattatttcttttttgctggtttgttctgcacatttattcaagctgttctattgaatttaggctttcaacaaaaatttatggaaaaataaaatgaaatataaaaatcgaagattttttctgggactgtgaaggtcgcccgatggcgaatatacccgtagctggaaactagacggggtcgggatttcggcgctagtctaaaagttaccacttttgaaattttcacttttttggtcaaaattttttttattttttttacacataatgatgaatattaagtattaatagcacaattatggagaataaaaagtatattcacgatttttaaccaaaaaaatttttacaaaacaaaagggtcccccttatggattttgataaaattcaaaatctatcactttataagtagagcctaatttggttaacatgtgcacataattgtcatattc

SEQ ID NO: 32265 - DNA, 934 bp, Heterodera glycines
tggtcataaatttgactattttttgcttttcaaaaccgcctttttcggacaattttttcaaaaactaggaaaaaaggggtccgtctatgcagataggcgccgtctgaaatttttttttaaattttatcaaataattaactgattttgaccaaaaaatgaccaaatgttacaccttttgactcaatctacaggattaatgtcgatccagtggtgtcgataggcgccgccgggaaatttttttgcaaattctaggtgaaatttgacggtcaggtcgttttcgcgtgggctgttttcgcgtggtcgttttcacgtggggttcgttttcgcgtgggggtcgttttcgcgtggttgcatataaaagataagtcattactagagtggcgcgacgccgagaattatgataaaaagcagttgaccatgacttgccaggtgatcgggtgtacgccgatctcgcaagtccacttgttctaacgtggacggctatcacatttgccaaaaactattttctgaacctaaaatctcgataatattttcaacgacaaaaataatggaaagcatttctgtgtcttaaaaaaaaattatcgcaattttttgcaaaatctttgaattttgtatacaaaaaatttttgaattctattattataatattgagtgcgatgcaaagatcgtcaatatatttttttaaaagtatggcattcccgccaatagtgccgtgtcgattaccccagggatttgttagaatcacattcgaatttaatgattattattcatcatatttaaaatattgattaattttattcagaaaatgaaaagagtaatttataatttgccatttcccaattatcgccagaaaattgcatgcaagcgaacctcagtttgtatgctcttaattgcacacgctcttcatatgtttcttgacggggtaaattaattt

SEQ ID NO: 32266 - DNA, 1400 bp, Heterodera glycines
ctccctccttttttcttccattcgtcccccctcctattctctctcttcgtgctttatttctccactctcatttcatctccccctcttcctctttcccgcatctccgctttttctccccatttcctctccccatgtcccccgctttctctcctttctgcgccatttatacctttgtcgcccccaattttgtttttaacttcatcttttttttcttatttttgctttcaacgccaatatgtactatatatattgtggctttttaacaaagtcttattttcctcttttctcgctttatttttaaattttcgtcagttttttagaataattacatatttagatttttgcactaactttttttattttttaaatattttggcgctttttctacataagtcatttacttcaaataacataattttcttcataaatatttttctccatcacccgcttcccttcccttttttgtttattattttcccttcggccattttaaccgcttgccccttttatgtccgtccaaccctttgcatttcgttttaatattttttcatggttagttaaataaaagttaattttgaaacattaaataaaaacatcatcatacataatagcagaaattttgtttttctaaattttcttcattttcactatgcatctgattccgcgttttggaaatacgcttctttcaatgcatcagatgcggaaattcgttcgttcggccgaacattgagcattttctgaaaaatgtatttttacttctttttaaaaatataaaaaaagcccaaaaaattgtaaaaaatttattagagtctaaatttataattctattttatgctttttttcttgcaccatttcgtcccgcttcttttgttcaacaaaaaaaatgctataaaaaggacaaaaatactaaattcccctattcgtaatttttgctgctgctgcccccctcccttttaaaattcaaactaccgctagcagctgcactccggcaatgccgacatcgacaccccctttcaatttgttactaagctctcccctgaccaagggctggtccatgtcgtccggagaacccattatgctaaaataagaaaaaagtttaatgattttatttatttttttaaacctataaatttttcgcagctgtatttccacttgctcctttcggaaaagtggcttacgctgtatcatttcataaaatatacagcccacgctccatatgtctatgccaaaggcatatttgtagctgcccaagagtaactcaggcgctctataccaaaatgtaactacatcattggaatacccccggcctgacgcgcgcggtgatcgcgcaagacagaaagcgtcagtttttgtgcgagtgaggggcgtctaggggttgtggggaatagtgagtgacataa

SEQ ID NO: 32267 - DNA, 752 bp, Heterodera glycines
ttaagatagacctgccattgctattcctgcaaatacccttcctagtccccccaagattgctattcgaatggtttgtccctttctcgccccccacacaagttgtgctgcttcttgcaaagaagacttagccaactgtaaacagcaagccatcctcctgcttcaatgtaaaaaaaaattacatttgtatgcaacctttatttttcctctcctctcttttccaaaaaaaaagatattatcaagcttgtttgaaccaattctaaaaaaaatcgtagtaattaatttaatctagactttataagataaatgagaatttaagcgaagcactcatgcaaaataataatctatagaaattctctaaaaagtagttcctcgcagattcggagaccgtttctataaagctagagacatatgcgctaaccataaaaaagatgaatcattttttgaaaaatttatatagttcgactaaatttgcaaatcgatttatggtgtacaggatgtttgtcgaaacataactcgtcaggcctttaagatcgacctgccattgctattcctgcaaatatggagtctagtcagcccaatcgattgctattcgaatggtttggggtcgttggcccaaacaaaagttgtgctgcttcttgcaaagaagactaagccaactgtaaacagcaagccatccaaatgcttcaatgtaaaaaaaaattacatttggatgcaacctttatttttcctcccctctcttttcaaaaataaaa

SEQ ID NO: 32268 - DNA, 772 bp, Heterodera glycines
  unsure (1)..(772): unsure at all n locations
aagtgcgaagaaaaacaaaacgccaaagacggacccattgggcacaatctcctcattggcacacactgtcagcccagtgggcaaacacagcaaattttgagtgtcttttgtggtgaaagaagtgcctgaaatgatcggagaggtcaaaatttatcaatgttaattagccggctaattaattaattattcaattgcctgcggcaatgtcaaacaaagccaacggagcaaagcaatggcggaggagagtaatctgaaaaggggaagcatagctcatttgttcaaaaaatttataaattagcaagggatggaaatgacaaaaaatctgtatttttgggttaataaaacccgagtacagtatttctggggggtttggggactgactttgtcgtggtcactcatccactctttcgtttcgttcgttttcttctgctcttccgtcgtcccaagcacaaatttggtctccagcaaagacaattctctgatataatcgaccgcctcaaaattccatttcaaaaaaattctttctttgccgtgccgtgcccaccttcgccagcgtacggtacttacagaactccaattcgtcttctgtgatgcgacgcaaccggatacagtaattcacctaaatattcattttcattttgccggggatacagtggaaaactgtgcacagtacactcgcctgtgttcggaaacggtccaaaatttcggggcacaaaaacagcgactccaannccgaagtggccctttggcgcttcgttctcactgaaagtcg

SEQ ID NO: 32269 - DNA, 1655 bp, Heterodera glycines
tacttttccattatggtacaccccgaaacttcttttcattatatttttttagacctattttaagcgctgaaaaatccggcattgtttatttaatttaatttacaagatttctggtttttatgaaaaatttagcaaaatatttttaaaattttgggtgagattttcgttttaagaaaaattaaataattgcagctatataaattccttttggaatttccgtcctattagaataaattaaattaatggacttattatatagtaaaaaaatatattataaaaattttaaaaaacgaaagccaaaacttaaaatatgaatgagaaaagcagtaaaaatttttaaattaaacatgtatggtttttataatgaaaagtgaattttctaattaataaatattttattattaatatgaaaattttctttaataatatttaaatttattactttacttaattgattttataaaattaatcgataaaagacatgagaaaaatcaagggtttgatttgatgggtttttgactaacgccctttttgatggtttttgactaacgtcatagcacccgccagaccccttgttctcaaaattttaccttgaaaaagcgcgacgcagaaaatttttattgattttttctttcgaatagaaaattttcatatcgatttttgaacaattaatttgtccatcaaatgcatggccaaacattttgccgtcagaattggcgttgtcggcttagaaatgaattgtccctatccaatcccaaacaaattcagcaaatcggaagagttcagatacccgccatgagatgttgatagaattggtgtaagtaaatttaataaaacacaaaaatttggaataaatttttattgtttcaaaaaggggtaaactgaaaaggcatttgaaattttgttcagattgatgactctggcgatatgaaaatcattcaaaagcgtattgagtcgtcgcccaaaaaaatgcccggggtgaatcatattcagcattttgcccgagtgatcgacgcgaagaatggcgcgttgttgagaagcggagaaaggatcaaaataaaaattccaatcgacaaaacggacggatcacttgaagagttcaaatttgacattaatttgatgtacgaaggactcagttcgcatccgatcagtgagttcaaagtgccggcagatcaaattaaaaataccaaatttataaaaaagaaatattttaaattttattttaagttgggaaaacggtcatgaaaatggcgagtgaacaacacagaaagattccatttcagcagttttgccagtcaaaaatttagcgtaagttaaaaaggttatgttgggataagacaaaatagacatgcattaatttattgtctctatcttttcccttcgctattttccctcaatgtcttttcctttctctctgcccgtcgaagtgcataaatagtgaatgttccttacacatttcgttctctccccattcattcgcaatttgccttctctactcttctcttcattcactctctctcttctgacttttattattatttattgtcgataaatatttgtgttctttggacacaacattttggcgcggtcagcgaaggcaattaaatttctgctctaaattttgccagtcctaggcctatttttctcattcattt

SEQ ID NO: 32270 - DNA, 937 bp, Heterodera glycines
aaaattttgaagagctctgcggaacggattagcatcggggttacgagatagaaaattgtcctaaaaagagatagccatttttctgagaattaattcacaatttccgcaactcttgcggtaatggaaaaattttgaagaggctctgcggaacggattagcatcggggttacgagatagaaaattgtcctaaaaagagatacccatttttctgagaattaattcacaatttccgcagctcttgcggtaatggaaaaatttttgaagagtctctgtggaacggattagcatcggggttacgagatagaaaattgtcctaaaaagagatacccatttttctgagaattaattcacaatttccgcagctcttgcggtaatggaaaaaattttgaagagtctctgcggaacggattagcatcggggttacgagatagaaaattgtcctaaaaagagatagccatttttctgagaattaattcacaatttccgcaactcttgcggtaatggaaaaaattttgaagaggctctgcggaacggattagcatcggggttacgagatagaaaattgtcctaaaaagagatagccatttttctgagaattaattcacaatttccgcaactcttgcggtaatggaaaaaattttgaagaggctctgcggaacggattagcatcggggttacgagatagaaaattgtcctaaaaagagatagccatttttctgagaattaattcacaatttccgcagctcttgcggtaatggaaaaaattttgaagaggctctgcggaacggattagcatcggggttacgagatagaaaattgtcctaaaaagagatagccatttttctgagaattaattcacaatttccgcagctcttgcggtaatggaaaaaattttaaagaggctctgcggaacggattagcatcggggttacgagat

SEQ ID NO: 32271 - DNA, 1283 bp, Heterodera glycines
cccccccccccccccccccccccccgccacaactcaataaattgcggaaaaaaaggaatttgttggcacaaaaatctgacaccaaatgccaaaaaacaaaagcagcacgtacatgttgcgcttcagatcaagcactgcttggtgttgacgattctgcaccaccaacagcatggcaccgtccgccagcgattgccagcgaggccaaaagtcgaacattgaagcgaccgcaacaaattgacggcctgcaaatttgcttcaaatacgattgatttcaaaaaaaaaaattctagaggttgtgggttatggggtacggcagttatggttagaggtagggtggaattccttccggtttctgaaaattttttttaacgaaattccgattttttgagtcaggaattttcatatcctgggtttcattatttatgatttatttctacgagacccagttccgatttggtggctgatcagaattgatcaggcagtcccgagttggtttggcactctgatcagggacaatcctgatttagttcaaccctctgatcagaattgattgggcaattctgaatcgctttgaaactccgatcaaggacagtcccaattttggcactcttgtccaatttatcaggcattctcaagttggtttggcactctgatcagaggcagttccgatttggctgttcagaattgatccggcattcccaatttagtttggcactttggcctaagccccacgagtttcgacattaaaaaaaaatttaatccagagaccttcatcacgcaagaagcattttgtttggtgctgatcacttgtgcttggcgtcgaacagcagaccaactgaaaatggacagacaatttggcaaaaattgaaattttgaaatggcactaatcacttttttggagaatcgcatacagtcgtcaaatttatctggccaattgttggtggcattaaatgcaatatgtcttaatgtgaaaaaataattgtcgaaaatttaacattcgctactacgtaatatataaatattttacaaaaaataagaaacaaatattgttttaaagtttattaaaaaaaaaaaaatgtaattgccttgaagtaatttaatttgggcaaaaaatgccctaggaaatcaaaatgatctttgaatgtgtaaaattaaaaaaaattttaatttgtcaaaaatcttaattgcctaatggaaattaatttgaacaaaaaaaacacttgaaattaaataatctttaaatgctgctaattagcctgtaaaatttaaagtatataagtttg

SEQ ID NO: 32272 - DNA, 1318 bp, Heterodera glycines
  unsure (1)..(1318): unsure at all n locations
atcaatttcggctacgcatgtgccatttattttttggacgacccgccagaaatggacgacgaagacgaatatgaggaggaagaggaagaagccgaagggatgggtgttttggcataccaaacggtggagggggcacaatcgacggacaatgtgcaactgatcggcacctcctcaaacactggtgcggaacatgctgggatttttatccagtggagaagcgggggggggggaggcgctggtagccatttggtgaaaaatttttaggagcacacaattttgaaaataatttaaatagtaagaaatattggaaaattaaggcaccaatgagaagaaaaacgaggacagagtgctcgaaaatggcacgtttggccaacgttcgtccgtgcaagagtcggattatgtcatccgccaaattcgcactgataacaatccgcggctgttcaacgaagtgccaacagtgccgggggaattgtttttgctgcgacaccaaaacgaggaaataccgcattactgtatccgtcctcagggcatagaggtactgtaaaattatgcaaaatcagacgagaatttttttttttttttgaaaaatcttcattaaattaattatgctaaacaatttaaaattaaaaaacaattaatataaaaaaaattaattaaataattgttagaagattttcctagctttttaagaataattagttgcgagattaaaaatgatcacattaaattaattgttatgaaggaatattttctcaatattttaccagagttttctaataccatttttaaaacattgtcattaattaggctgatcgtttcatccaacagtccctctccgagagaaatcggtcggaaataaagaaatttttggagcgaaatgtcgcgccggatgacggcgactgtacgcttccaaaaacacacaaaaaatataattattcgaatgttttcagggtcatatttgtggatatcgcaagagcttaagttggaggtgtttattactaattagcgttaattaatgaaaaatttaactcttcagaattacccagtgttcatcttttcaattaaaatgttagaaaactttttcaaaaatgaacgaataaggagggtaaaatggtaaacaaattcaaatttaagtaatttaatcactaattgctaaatttaggcgccatttgtccattgataaagtgtccgtttaccgttattcgctgcctcaaataacaacaaaatttcgactgaggtacttttacactcttatgtaattcaaatgaatatagtgcaatcatttanatattgttccattctttcttaattgcagaat

SEQ ID NO: 32273 - DNA, 811 bp, Heterodera glycines
taaattcatattaattaattacttcatttctccatctctcttcttgcttcaataatattaatgttcatgttaattgctttctttgcgatggtccgccttttatatgttgctcatcgtgcagtcgcaatttgtgtttcgaccattcccaaccctccccccaccgttgcattgatcaaattgttgtgaatgggataattaaatttggttaaaaaaaatttgggtttaccagggaaatgcccaccatattaattttttttaatctaaaccaggctgtcagatgtgatgatttatcatcattttttgacagaaaatttttcataacttcgcataaaatgaattaaatgttttaaattttggtattgtataaaaactagatgcatataattttttagttcatttttatatattttattatcaatttaattaattttctttattcttatgaacagaaagattattttatttatatttctccacttttcttttgacttttattccgttactggctttttattaattggttaaagtctgataatttacaataattaattcaaaaaattaattttttcctcacaaaagagtaatttttaagaattttgctttcaacagatttaatgcaaaatcttttttttcgtctaaatttattaattaattatgaaaattttaattgctaattaaattcaatttgttatgttataaaattaattccaaaataaatttatttgagatcatttcattatttttttttgactttttgattgtttatctttttttctgtaaatatgagtgtaataaagcagacaaaattttt

SEQ ID NO: 32274 - DNA, 912 bp, Heterodera glycines
gagcctcttcaaaattttttccactaccgtaagagctgcggaaattgtgaattattctcagaaaaatggctatctctttttaggacaattttctatctcgtaaccccgatgctaatccgttccggagagcctcttcaaaattttttccattaccctaagagctgcggaaattgtgaattaattctcagaaaaatggctatctctttttaggacaattttctatctcgtaaccccgatgctaatccgttccggagagcctcttcaaaattttttccattaccctaagagctgcggaaattgtgaattaattctcagaaaaatggctatctctttttaggacaattttctatctcgtaaccccgatgctaatccgttccggagagcctcttcaaaattttttccattaccgtaagagctgcggaaattgtgaattaattctcagaaaaatggctctctttttaggacaattttctatctcgtaaccccgatgctaatccgttccggagagcctcttcaaaattttttccattaccctaagagctgcggaaattgtgaattaattctcagaaaaatggctatctctttttaggacaattttctatctcgtaaccccgatgctaatccgttccggagagcctcttcaaaattttttccattaccgtaagagctgcggaaattgtgaattaattctcagaaaaatggctatctctttttaggacaattttctatctcgtaaccccgatgctaatccgttccggagagcctcttcaaaattttttccattaccctaagagctgcggaaattgtgaattaattctcagaaaaatggctatctctttttaggacaattttctatctcgtaaccccgacgaggaccgttccggagagcctcttcaaaattttttccattac

SEQ ID NO: 32275 - DNA, 936 bp, Heterodera glycines
gtcgagagacgggaagaggtggcgggagggggcgaggcgggcaccgtcagtttggcgtcagagattttaatctcaagacaaaatttaaaaaaaattcgactaggccaaaaaacatttccgtctttttttctgccagaaaaatctctgccgccgatgggtgcggcgggtgcctttactttgaacatctagccccatataccatcataatctgttgttgtgccatttgagctgtgccgttccgttccgttccgtgttgtgttgttcctcccccttcgcccatcctctcgctgccccacttatgcttcattccccgccccctccgatttatttgtgaggatgttttatgctttatccccaccccgcccctttgcccactaacccgcgcactttttcattattcactttccttttccttatcgctttatccaattggtaaatgcccttaaaacctttgcttatatttgactctaccctttttcaaattaaaatcaaattttgttttttgtcttttatcttataatttaattttccagttttattataaaattccatttattttgatcttactgatttccgagtttttgatttttgtcactccgcccgaccattcactgcccccgccgcaattagccgtaattagccgaatttacccgttcgttctaattaattgcaaaaacctctctatctgacttttttaatattaggtaaaagaccatttgtccttttgatgctgccatttaatatttaattattgttttcctttcggcatttttctttgtcataactctttccgatgcgaatttactgttctatttttaacattttattgtactttggcttattctcagatttgttattttgcctttgtgtgatataaacccataattttcgtccattttccacggcattgtgccaatgtcggcacccatcgaatgg

SEQ ID NO: 32276 - DNA, 1182 bp, Heterodera glycines
  unsure (1)..(1182): unsure at all n locations
tcataactntttgtcaaaantcgttgacaaaaataaaaaacctttcttgggtatcgttcaatagctcataagcttctcatctatttccttggaaaaataactaaaaatttagtcctgtttgaaaaaagttgagcaaaaaattttttttttcttgattctcatggaaaaaattaagggctatcgaatgatactttaattttgtcaaattttacaaaagtttatgactattttttttttgtcgaacaacagtatacgagtttgggtttcgtccacattgtgcacccccagtggggtaggggtagggggaggggctgcaaaaggtaaaaaaaaattattattttttcaaaaaatcaatgcaagaatttcaaaaaccaaaccacatgccaaattcgtggggtatttatttctctgtatattataaattatcttttttttaatatttttaaatgttgtataaaaattgctcacccagtgggccttcgcgcttcagtgtccgcataaaacagtcccatgtgccggtgtaatgcgtgaacggatcctggcaaattttataaaattattccctctggagagtgtgtgagaattggcatttttaaccggcgactccaaaacattccgcaattttccggcattaatgttcaaaaatggtaaaaaataaaatatttttttagtgtacaaggaaaaactcagaaattcagtaaacaaaaatttttccccattttttttttcaaaaaacggcaaaaattttgcttttttttgttggtattttgtttagcattttttttaactaggaaaaaatagagaaattccgtaagcaaatatttaattttttttgaaagaaaatttgcgtttcttttttataattttattgaaaattctccattaaaaaaaatttttgttgtacaagcgcttaaaaattttaaattttgcacattttttaccccccgaaaacacctgcagtcgggtgcgcaacacttggtacggaaatgtgatggtggtggacatgcacttggagctgatcgaaaatgtcagatagtccaccggcgccaattgcgagtcgcgcggaatgccacgcgcatggcaccgccagtccttcagccaattgtaaagggcgaactgcaccgcgccgttgatcgtgccgaacaggccgggcacatagccctaaaggcacaaaaaaaagac

SEQ ID NO: 32277 - DNA, 1110 bp, Heterodera glycines
  unsure (1)..(1110): unsure at all n locations
aggacaattttctatctcgtaaccccgatgctaatccctttcggagagcctcttcaaaattttttccattaccgtaagagctgcggaaattgtgaattaattctcagaaaaatggctatctctttttaagacaattttctatctcgtaaccccgatgctaatccgttccggagagcctcttcaaaattttttccattaccctaagagctgcagaaattgtgaattaattctcagaaaaatggctatctctttttaggacaattttctatctcgtaaccccgatgctaatccgttccggagagcctcttcaaaattttttccattaccctaagagctgcagaaattgtgaattaattctcagaaaaatggctatctctttttaggacaattttctatctcgtaaccccgatgctaatccgttccggagagcctcttcaaaattttttccattaccctaagagctgcggaaattgtgaattaattctcagaaaaatggttatctctttttaggacaattttctatctcgtaaccccgatgctaatccgttccggagagcctcttcaaaattttttccattaccctaagagctgcggaaattgtgaattaattctcagaaaaatggttatctctttttaggacaattttctatctcgtaaccccgatgctaatccgttccggagagcctcttcaaaattttttccattaccctaagagctgcggaaattgtgaattaattctcagaaaaatggttatctctttttaggacaattttctatctcgtaaccccgatgctaatccgttccggagagcctcttcaaaattttttccattaccctaagagctgcagaaattgtgaattaattctcagaaaaatggctatctctttttaggacaattttctatctcgtaaccccgatgctaatccgttccggagagcctcttcaaaattttttccattaccctaagagctgcggaaattgtgaattaattctcagaaaaatggttatctctttttaggacaattttctatctcgtaaccccgatgctaatccgttccggagagcctcttcaaagttttttcccattaccctaagagcnntgcggaaatt

SEQ ID NO: 32278 - DNA, 839 bp, Heterodera glycines
aaatatatttttttgtgttcgcggcacactcccccagccgatgcgcgcacatatatgtggagacagaatctctctggagtagcttccctatatcctgtactctaattctgcgtgggatattttctctccacatatgtgtgagtgccccacacgcgcactcgaaaaaatatcgatttttttgttttcggggcagtccccccgaaccgatgcgcccagatttatggggagaccgaatccttcgggagtagcttccctatagcctgtactttaattctgcgttggatttttgctccccataattgtttgagtaccccaaacggacacttgaaaaaatcgattttttttgttttcggggcagtccccccgaaccgatgcgcccagatttatggggagaccgaatccttcgggaatagcttccctatagcctgtactttaattctgcgttggatttttgctccccataattgtttgagtaccccaaacggacacttgaaaaaatagatttttttgttttcggggcagtccccccgaaccgatgcgcccagatttatggggagaccgaatccttcgggagtagcttccctatagcctgtactttaattctgcgttggatttttgctccccataattgtttgagtaccccaaacggacacttgaaaaaatcgatttttttgttttcggggcagtccccccgaaccgatgcgcccagatttatggagaccgaatccttcgggagtagcttccctatagcctgtactttaattctgcgttggatttttgctccccataaatgttcgagtaccccaaacggacacttgaaaaaatcgatttttttgttt

SEQ ID NO: 32279 - DNA, 942 bp, Heterodera glycines
gtagagatgcgccgtgactgaaaaaacccgtgaatcgtgaccgtgaccgtgaattggtcccgtgaatcgtgaccgtgaacgtgatcgataaaacccgtgaaattcacggttttcgtgaccgtgaattttttgagtttattcaatttatattaaatcataattaaattgaagaaacaattgcattttcgcatgttcactggtaaaatttgagcgtttcggcttaaaacttcactgtttcgaaaaagttcgctcactttctacgctgcttggaggtggacataaaaattttgggacaagcttttttattgtaggaaattgcgagttttccttccaaaaaagcagtgggtccgattccaacggttgaagtgtcgactaaataatttatttatttttaaaaatgatttaatttgtgcctgaaggtagagcataatttcatcacgaattttgtttgtttgagaatcagtaaaatcaatcgactgagtggctccaataaaagattccaataaatttggagagtcgctatttatttttggttgttccgattcagaccctcgacgtgatggattcgttagcatttctactgtgtcaagcaataacacttcattttgagctcgttcttttgtcgagaaaatgttaggattgtttttgaatcgaggatcaacgagagtggccatgcgcaaaaagcttaagcattataattagcaaatatgacaacaaaaaaaatccaaaatttacattttagattggtgttctcgcatacgggattctaatccatcttttataacattttttaaacgcagaatgggctcattttcttcgccattaacacggagataattttgaaagcatttgtagacaggaataactgatgaaatcgattcgtcacgttttgataattggttcgtgaatgtaagaaagggctttagaatctaaaacttagat

SEQ ID NO: 32280 - DNA, 1006 bp, Heterodera glycines
  unsure (1)..(1006): unsure at all n locations
ttttttgaacatgtgtttcgaatccatccaaaaatgaccttggcattggtagtcatttaggaggatttcctttggtagctcataagtgagcttctttacattctcatgaatgtaacagttctctgcacagcagagctcaactttattaatttcctttggaatctttgctttaacgcctttgttaaagcaaagaagtttgcactcattgcattgattggttggataagcatttgtttctgttccccccttaacgggaagagggaacaaacatgctaaaattacagtaaacgccattatttgcaaaatatggcgcgctgtaaaaaattgagggattgcccctctttgccttccttcttgaaagcaaggcgtgctctgatcctcaaaacaacgtaatgatactttgagttggatcattagccaagcaatggttttacgcccaatagaaagggcttttaaaattgagagaaccatcagacttatgctgatgtaaaaacaaagcgtcaatgctatgattgattgctctgttcgattaggaagagtttcttcccatttattgtccattcgattaatacgaatggaaaaaactgaatggctcacaacaccattcttttttatgcaacagccacagattttcttatctgtgggagttactttcggtgtcttctgctcaccgaaatgagagtcagattggtatgaaatctgactcggttgatcgaaaagaactgacttttcgatcattttttgggtggtcgtgctttggcatgaccatggcacgacaaaaaaatgaatgtgatttatttgtcacatttttcaacccactggttgagctgcagtcgaaagcaatactttcagacggtttatcctctactctagaggatacgccctgagtaaaagggttttagaacgagaanatttcctctttttgttttggaggactgnttcttctgaacagtccttccttnncctatcctgtntgcggagtgctcccaattggagcatctccatg

SEQ ID NO: 32281 - DNA, 969 bp, Heterodera glycines
caaaatgcacattcgcagtgccatgtctgttgaagacttgctgcagtgtttagcggtgcaaaaaaaaggattttaccgaaaataaaattgttttattttttcccaacaggactgcccagaatacgaggaaatccctgtccgtcacaatgaagaccaaatcaacaggtgtctcccagcatttgttcattttgatctattaaatccttaattcatgcgccaattgccattttactatattatccattcattttcaaaatttgacacccaatttttgcaaaatttcagtgaaattcaatcctttttgcccatccgattgtctacctccgattggggttcaccccatgtgaaggcccatcttctttaccaggcccacttttcccgcatgaaattgcccgtcgattacaccactgatcagcgttccatcattgaatcatgcattcgaatcatacaggcaaacagcgatcatcattatcatttttgccaaaatggattacatttcggtcaattctgttcaggcaatgttcgacatttgtctggaattcgcgtttgtcgacacggcaatcaatgtgctggtgctgcttcaacaaatttaccaagcccgatggtactctgaccatccgttgttgtgtctgccccacttcagttcacattccatcgatggcattgcgtaataattactcattcacacataattttaattggtttgaaattaactattctcccccctttttttgtcagaccgttttgcacaatcccacaacttcaacaccaattgggcatttacgcattggacgatgcaagaacgacaaaatctaatgaatttgaacggcagctgattcgtagacttagaaagaacagcattttgaaggagttcgaggccaaggaggtgcgtaaagatagtgtgattgagttatctgtcgcgcgctaaatttttccccaatcacccaaaaggatgcccattcattctcc

SEQ ID NO: 32282 - DNA, 1362 bp, Heterodera glycines
gggtaattgtcgaatccaattacaaaacccccatgggagaagacggaacgccatgaatgctgcccaagaaccggcatacgaccctgttgcggcttctcgaattcaaaaactttaccgccaaagtcgtcctcgtgcataccgagaaatcacagaacaatcatcaccattttgtcaaattgagggaaacgatcttttcaaccaattcagccaagtttttgaggagaatgctccgatcgacgaagaaatgccaccggaaataccaaggcatggaccaccaactgagcgaaacccgctgggcccacaatttacccaaaaagaagtgtgggaacgtcttaaacggtgcagcaacacggccccaggcccggatggtatccgttattcagtttggaaaaaatatgaccaaggagcgcacatccttacgactattttcaattgtgttaaaagatctaaacacatccctcaaagttggaccaaatcagtcactgttctgctccacaaaaaaggagacagaaacgaagtgtcaaattggaggccaattgcactctcaaataccatcggcaaattgtactcttcagtcttggcaaaccgattggcgatgtggtcaattgccttcaacagagtcagctcgtcccaaaaaggctttatgcctgtcgacggttgtgccgaacacaacttcgtactccaatcgatcattcaggacgccagacgtaccaaaaaacggtgctcaattgcgtggctggacttgaccaatgcttttggttcaattcctcaccaaacaatttttacagccctaaaatggtccggactatctgaccagtcaatcgctgtcattcggcagttatatgccacgaattccactcaaattcggcattcaaacggccttactcccgaaattccaattcgcgcgggagtaaaacaaggatgtccgctcagtccaatcatttttaaccttggaatagagcccatcctccgcaccattggccaactcagaactggctataagttgcaaaaaaaacgcattgatgtgttggcttatgccgacgatctcgtccttgtggccgaatctgccgaagaattgcaaagaatgctggacgccacctcaacaatagcaacttgggctggactttccttcaatgcccgaaaatgcgcgacgctggacatagatgggcggagaaaagcagcattaaacactgaattcacggttcaaaatgcccacccgcccatcctaacaatcgaccaattctatgaccatcttggcgttccaacgggctatggttcagcccaatcagcgaccaaaatcttagaaaaaatgaatgaccatgtccaaaaaatcgatgagtctctcttaacgccgtggcaaaa

SEQ ID NO: 32283 - DNA, 703 bp, Heterodera glycines
ctaaattggcttacagatttcctaactaacaggacattcaaggtcagaattaatcagcagttttccaaagaatttcccataaaatcaggtgttccccagggatctgtcctggggccaattctatttttgatttttataaatgatctatccccagtaatcccagacggaatttcgctaaaactttttgctgatgatactaaaatttacctatgttataacactgaatctcaacgtaaaaaactagatgaagccttacattgcgttaaccaatgggcccaaaggtggggtctacaatttcaccagaaaaatcagcttctcctttacctcggcaaggataattttaaaattccctaccaatttaatggaaagacaattaaagagacccaaacaattcgagatcttggaatcttaattgacaataaattgacttttaaatcccatatttcagctattctccaaaaagcataacttagaagccgaaccctttttcaaaaaattaaatcaaaatcatcaaagacatggattaaaatctataaaagctatattagatccttacttgaatattcatccgaaaattggaaccctcacattaaaaaagaaatcgttcgccttgaaaaatttcaaaagtttttcaccagaagagtgttcctaaagtgcccatttaccggttttaccatattcagaccgattaaaataccttact

SEQ ID NO: 32284 - DNA, 1823 bp, Heterodera glycines
  unsure (1)..(1823): unsure at all n locations
cgttcgttccaccctttttatggaccgtcgtcgcctcgaccgtctcgcgcttctcgtcaatgttgcggatgccgcaattgcgcaactttcgatggccgaccgtcccaagggaatggtgcgcaatttgtaccatttccgttgctgggccggctcgcccggcttcgacgaccgtttctcgcagcagtggcgttgtgtggcgtagccaaaagcgcaccgacaaaagccgcgccattccttcgcctttatttttgcttttcctttccattcgccttttcttggctcatttccgccgtttcgtccttttgtttttttgtcctcctcaaatatctcatcatcattccttctccattcattcgctttctttcattttgttttttgttttcatttttaattttttcgtttattttttaattttaatttatttattattctcggggtttgcgcttttctcatcggcagacaaacattctcttaaatgtcttattttgagatgagttcgctcctgaaatgtctccccgcctttctccgatcacttttttcccccttttttttgtttgccttacgaattatgttttttttctcttcttccgtccattaacttttctttctttttccttttcgcttatttaatcactttttcattttgtgtactttcaatgaacagaccattcgcttctcttttgccaatgtttgttcttttcttcccacacttttcgttgttcgttcgttcgttcttcaatctttaaaattcaaaaagtgttttttgagtgagtgctttctcttcttctcctgctgatgttttgccattcttttggcattttttccctctgcgaattttgttgcgtttatttaattttttatggtaattttatcgttttgctttttgtaatttaaatgttttggcacaataccaacggattttgtattaatcgcatttgtcattcgttttttctttaaattaaaatttgtcatcggcgaaaatgcctttggaatataaaaaatataaaagtaaaattagccgaaaattgtcccacggttaaacatttgttctttccaaacggaaaaacaaaacaaaaagagaatgaatgatgaacagttgacgcaaaccaaacggaagcattggcatttgtctggcaaatcctttttcttcgttcccgaactttggcccttcaaaatattggcaagtgtcccccggggaaagctcagtttaaaaaatttttttgctcttttctttcatttttttcgttccgttaattgagcaattccatcccaaaaacaaatccaaatcgtctcaaaaacacagcacacatttattttctgcgataaataaaaatttgtccgttttattttaaaaaataaataatcaaaatatatctgcgaaattaattaaagtatttaatccctaattaaaaaatatttgtttatacaaaaacacaaatttcccttttcaaattttnccntnnnnanacaaatnaannaaannnannaaattanacnncactcccccannnnnaatnntnccatttcaatcnactaannnanannatnccaaatccattcattttttttctctncctcttttcccttcatttctttttcacataaccttttctccccactattttttccctctctttccctcacattctctccaatttncacattcttttcnttttttctccnnancaaactccccanacnnancncaccncnaaannnccaaannnnccnnannnttcnccatttatnccatcncacnnncnccttctccccccnccnccncantaatttatcctnanncaaaattaccttcaaatnaccaa

SEQ ID NO: 32285 - DNA, 1445 bp, Heterodera glycines
  unsure (1)..(1445): unsure at all n locations
tcctatntaatanagttgagtgtctgtatccgccatgctttgaattggcgtggcgttttgttattattttgcgttaaaaaatgatttaaaaatgaaaatgtttttgttttgttttgcgttaaaaaagcatttgaaaaatgaaaatgtttgttttttttgcgttaaaaaatgatttgaaaaatggaaatgtttgattttgatttttcagtttgttttgcaaaaaacattcttagtcatttattcgcttttttgtgtatgttcaaatataacgccaaaatcgtcctcaaaaggctaggaaattgtattcctagtaataatgcatcaaatctgtttttaggttctgacagtatattacttataaggttttttatttgttagtcataatttttgcatatatatttgttaaaaaataaccaaattttagcattaatatcagtaaatagcttaattgttctctattggcctgtaagaaaaaatttggttactttttaactttcatattgatagttttttcaaaatccgtccagttataataaatgtagttggtcgatttacaaaaaatacaaaaattacagtagtaatgtgtgacaaagtccatgcatatttttcttacgtcttttgacatattttaaaatttattctcataataattcatgcataacattggcgcaatcagcccggcattttaattcatactaaattatcgccagctcaagccgaatctttttaaatttaattattgatatattgtctgaggcctttcctagcacgtaatacacatctgccgggtacgtcaaagaaattttattaaaacgagaatgcttaaaaataataaatcaaaatgataggagaaattatgaatatttagcaaaaatgcttaatgctgatctaatttgtcgataaatcttgcataaaaattaataaatgacactcctcattaaaaaagcacttaaggacaaccgcataaacaagccacattacataccgcgcgatgaaaacgtttgcatattcatttaatattgttatttaaaataaaaatttatttaattattttaaaggtttatttgtgtaaataacataaaactcagaaaacattttaattataattaaaccaaatgtatagatataattaaaattatatgatagattaataaattattataatagaaaagatcatcccgaaaattaaaatttgagttttcgtactaatatgaaagtgattaaattgtattatataataaaagatttttctaaagaagtcaatccaatgatgaggagggtcttcaacaccatcaaaagaaaattaatgcaataaaaacaaataagaaaatataaaaaaattaactcaagcaaacttattaacaataaaagttagtttaaaataattaattacgaaaaaaatgtaaaaattcaatctggaatagggaaaaataataaatttattt

SEQ ID NO: 32286 - DNA, 1392 bp, Heterodera glycines
  unsure (1)..(1392): unsure at all n locations
cgacagtgcaacgcaacggctgggcagtgcctgggataagaaaaaaattttaattccgaccaccagcagcatcatcacgcagtacattttctctttaatttctgatttaggatcacgttgagatgggaaaaggtggttagatgccagttaggtttgagccggaatgagggtcaaccgaagcctcaacccacttgngatagtccgatggccgactagtaggaattccgtcaacgaagaatgcatgacctgaaaaactgtgtatattagcaaccttggtaagcccgtggtgcgtgccacccctcttccttccttggaaaacccgtgtgcatgcccatctgtccacccgagaaattccgcccttcgtaagcccgtggcatgccaccctagcttcacatatgaaaatgtcaaccttggtaagtcctgtggtgggttcataccccgtccctagtttcctccctcacctgtttatccagcacagtgcccggctggcagttctgttcctgcgcacggccgcccggctgcacattggtcggaatgatgcgatagttggagttgcgttggcacacaaccattgtcagtgccggctttttggccatgctctgctgttcagccatcagttcggcaaaggcggtcatgaatgcgccgccctcccaatgcgcgaccttcacaataaataaaatatttcaaatttttcagataattctaataagaattttcttaaggattactaaaataaatttcaaaatgttttaaatttaagaacgcaattttttctttcagattttctcaaaaaagttgtaaaattttaaatgaaaatttttttcctgctttaaaaaagaatattttgtgaaaaaattatcaattattttcatcacatataccaaattaagtaaaagacccttgcctataagcacacacaaaaaaaattatcttataaaattatttaaagagatataaaatttaagtgaatcttatttattttttaatttcgactgcctccttggcactgttcgtcacctttttgtattcgccttccgaggccccggcccggaacacgaaaatgtgttccgggaagaatccgttttggtcaaggaatgccaatagcgcttgcttgatcgcgttcaccatcggtgccgatgtttgcactgtggtcacccggggctgctgcatccaataggtgccgtttagcttcaacatgtgcttggaaatggtgtaggccatctgaacaggtcatgtatatgtantcagagatgggaccaaaggccccgaaaaaaacttcgaattccgaaggcccaaaaatctggtanatttggaatgggcctcccagtccaatttattgcagtagaatatcccataattggcaatttaacttatgaaaattattcacaaatg

SEQ ID NO: 32287 - DNA, 924 bp, Heterodera glycines
  unsure (1)..(924): unsure at all n locations
gtcttttgctaancatcagacnncttcgtttggatcgttctcaacctgcactaatttcacgtctcaatttgtcctcaaaattggtaacatatcgcaaccatttgcagaagcaactttcaaattcattcgtaatttcttcatttacaagcgatgaaatgatgggacttttgggcgaattgctgactttttgttgttttttgattggcgtcgaagtgcagaaattagactcgctggccaaagtcatcgaaaacaaaactccgtttttgtttgtctcaacatttccgcctgaatttaatcaatgagaacgccaaactaaaatatgacctaaccttcagctttttcagccgctctttctttgttaattgtaaaagaatgctccgtttgagcattttcatttatttcgacgaattcattgcctccattttggtcttcatcgcttcccgattcctcctcactttcggacgaaaattcgcaaaagtcatttggccgtaaaaattgtactgtagaaggagagctaaatgcttttttaaaaatgaaatacatgtagagtccatagtttttatgggccaacctgtttttattcacgggaacacaacgtactgctgggtgagtgattttttcgttaaaggtgagataatcattctgatttgaaaatttcaattacctattgtactttataatataaaattcgataactaacgaggatagagcatttcggattcggcgccttaacacgagcaagactcagttttctttcaaattccctgtgaagtttctccttctccaattgtaaactcctctcaaagcgcatgaaaccatcctcaattttggccatcaattttttgtcatcgatatatttcaagtaatttgctgacgtaaaatctaggcttcgccggtggtaccaatttctaagaaatatgtaag

SEQ ID NO: 32288 - DNA, 1194 bp, Heterodera glycines
atattataactaaattattaaatcaaataaatataaattatagataattacacgacgaaaacaaatattgaaatttattatacttttaaaataaacaaaagctataaattatattaagaacaatggatatgcgaaaaaagaatttttaaatacataatattggataaaattttcagaaagatttaaatggaaatacgaatgaacctaaaaaagtgacagatatcaacggcgctgactattttatttaatggtaacagaataaatgcttaaattatttgaaaaaagctttcgatacgctatttcgatgacgaagtcttgtacaatagaaaaaattacaaaaaagaaaaatattcttgattgggctttatatagttttattgtttaatgggaaaaagtatttttaatactcttaataaaggtagaaaaatatactaataaccaaatatacattgtaatcttgaagtgatacatataaaacaaataaaaatggaaataccagtaatctatggtctataattattttttagaataaaatgaaacaattcggaaagaaacgacaaccctcaacaagattattaatttgaaaaaattatttttaaacaaattatttaaaattagatttcgagggagaaaaatattgatgctatcaatatcaaaattattactactaatatatactggatattatataaatttaaattccgtaataaaatatttaaaaatttaattaaaaataataaataaaagccaaaaaaaattaacatttataaatattaaactcacaatattgattttatgtcaacctttgttggatgcgtacattatttaaaactactttttccattgtgaattttatcatctgcgagttctgccgctatgtgagccagcatttctcgcgcatgttctaaccactccgtcaagtgccggtcatcacgaataaaggcagtgaaaagcacttcctccgcctctctcgctgggccttgaagtccgttcatgatagcaccccacgcttccagctcgacttccatccttgacaggatacgagtgatgtgacctcgttcctgttcaaggttttcaatcgtttcggcattgctcacgggctcatccagcaaattttcggccgttgtgacatgttgccgaagtcggaacagcgcgggccccaaagccatccggcatcgagctgaagacatcttt

SEQ ID NO: 32289 - DNA, 2079 bp, Heterodera glycines
  unsure (1)..(2079): unsure at all n locations
tttntttttctcataaatattatttttactttctaaatctttcctattaattgctgttgctaaccaaccgtttcatactcattcccgatggttgaataatatgcgtcatcacggtcctgttgttccaactgttgaccccttaaaaaatgcaccaaaataatttatatgttcgttgattgaggctttagcccgttaaatgattcggaacaaattttaattaccccttatgccttaaaaaattctcgtgttttgattggtcgaagaggatgaggagggtccggcgctaccaggaacactcccaggttttgtatcccctccaaagccggctggagccctacggtttgccaaaaaatttttatgaagaagtcacccctagcctagcaacaattcacttcacccacaagtttgcccgttgctggtgctgttgttcgctttgttgttgctgctcctgctcctccctgagtcgaatgcgttcccgaatcactgcggcatcctcgcggaccgtcaaataacgataggacggctgcgtactgctgcaaatactgcccgaaccactctcaccaccaaagtcggtggtcgtcgtcgattgctgatgttggaatgactgttgacggaggagttgttttgcgatggctgccgatgttgtgggctgttgttggtcagcagccgatatcttccggttgatctacaaaaaaaaaattgaaaattataaccgaaattttaagggaatggcatcccccgaaattaaaattttttttcaaacttaaaaatttcccaaaaaatcttattgttagaaaattttaagaaaaaattaaacaatttttctagcgtttttaaaaattttattgctgaattattaagtttttcaatattttttccaaacattgctagaaattttttattttttttgtaaatttttgcgtggggaacgactcgctcaaaaattttaaaaccaaaaaaacaactaattttctctataaaatttcaaaaaaaaaattcactcataaaatgttggatacacctccaatttaagaaaatccaattaaagccactcatttcagatgaaatacaatacaacctttgcatagagttggtccaattcagcaaaattattggcattgtttttgttcatagccgctcgtgctaacattgttgtcgctggtggcactctgaaaggcgacaccgatttcttgaccccaaaaaataaaaattccaatgcctctcttgacccgtgaaatttttttggaaaaacgaaatttcaggaaaggaaaatatttattttcataccctgtggtcgcttttgataggccggtggtgccgtttttgttggagttgatgatccgtgaatagccgtgctggtcataggtggccgaaccactgccgtaaccaccaccaatactcacaatggaacttaaacataattttgctgtttgaagatttctcattaaaataagcaccccccccncatcgggagcagctcgtcccccncccccccctttcctgcctcctccccgtatcgttgctccagaaaaattttcctattttttgactaaatttgaaattttaaaaaaaattccgggggttgagggggggggctagttttagattcgtttcgtcgcactttttttcattttttatgctccttcaagaacccgtcccctctctctctcgccatgtcacaccaacctgtacgggtcttcgctgccgcccaacgagtaaatttgtgaagacgcagtcgcatagagcggttcatctgctgacgcagcagcacgtcgcagcgccggtggcggcacagcgacgcgttgttgcggcgctgctcgctgctgttgtcgtcgcaactgatgctgctgcggttggtccggtttgccagcaaagtccaggtagtcgtagcgcgactggggcgacgatgatgacgacatttgtgcatgatgggacgaggaagggcgggtcgagttcgagttacgctgaaactaccaaatttcaggggtatgtaatcagcagaatgcacataaaaaaacacccaaaattcgattaaaactttgaccctnagggtgtgtagtaaggggatcgtttaccctc

SEQ ID NO: 32290 - DNA, 1191 bp, Heterodera glycines
actttttgaaatttttaatttgttttttttgtcttctcttccctgaaaagagtcggcttttcgatttgttcttcgtcttatttgtgccagtcagtagttacaaattcgtatgatttataaacaattaagcatcaaaaatccattaaatttatcagtttttttgtttgttgtaaaattattatcaacttcttcactttaattgtcatcaatttgcaataaatacgaatgccgatcgttgtaataattctctgtacaaaattgatttataattatatattttgcatttatgattcataaagctccgccattttagaagcatttccatattcatgttgtctaacaatttgcgaactgttgttcagaatttcatttttaccagtcctaattttcccgggctctcggttgccgtgacgggaatgcaatggggacttgccaattcactttgacaatatccaatcaaatcgtcatgattgtttgttcaattgtctttttctgtatatttgtaatttgttgttattactattgtataaaaaaatgtgagcttgttgtatcttgatcatatatgtatttaataaaaatttttgtatgatgaatcaattaattttcaaccttacaaacagtgaagaatggagtgatggaattcagaggaggaagttacccaaaatatttcttaaatgggaaatttaattcccgaggcccaaaattctcgaaaatcggttaatttccgaggcccaaaattctcgaaaatcggaattccatccacctcaagcaattaattgaagttgtcataatattgtttcatttaccaatgtattcttttcaatgctcttaattatgtcataaaaagccataaaaataattcattgttttatttatttttaatatataaatattctttgtcatgttaaaataaatgcttgaataaaatgaaatatttgcaattattgtttttatatggcttactcatacgtgaacaaggagtatgccgactctcgtgggcgccataacgaagggagaaaaattttaaaaaaattttaaaaattttcacggcggcgcctatcggcaccgccggaccccgctaccccctctggttccccataatctttgaaaaaaccatgccgcaaaaaaggtggtttgaatagcaaaaaaaaaaaagggccgcaaccggagaaaagtgtgtccttcgtacaa

SEQ ID NO: 32291 - DNA, 1180 bp, Heterodera glycines
  unsure (1)..(1180): unsure at all n locations
aattccgagtttcatgaggcatcaacttcatcttttcttgtcctgccccattgtctcaaatgtatacctaaaaatgcgctaaaaatgatcaaacccgtttttagccgaatatcctgtcaatatttccctattagaaacgatactgtgaattctttcgcctctttaattcattcgtgctttgcttcggattagtctaaaaatttctggacaggatttttacatattagcgatccttttttatttgtgaccgcaaatttttacatactagccattttttattttattgtgaccaagcatatctttcctcgtatttctgggatttttttcagaatgtggtcatagaatagatgggttgaattatttgtatttttttatgagtattatgtaaggatattttcgacaaaacataaccaattccgagtttcatgaggcatcaacttcattcttttcttgtcctgcccaattgtctcaaatgtatacctaaaaatgcgctaaaaatgatcaaacccgtttttagccgaatatcctgtcaatatttccctattagaaacgatactgtgaattctttcgcctctttaattcattcgtgctttgcttcggattagtctaaaaatttctggacgccaattttacatattagccatttttttttatttgtgaccgcaaatttttacatactagccattttttattttattgtgaccaagcatatctttcctcgtatttctgggatttttttcagaatgtggtcatagaatagatgggttgaattatttgtatttttttatgagtattatgtaaggatattttcgacaaaacataaccaattccgagtttcatgaggcatcaacttcattcttttcttgtcctgcccaattgtctcaaatgtatacctaaaaatgcgctaaaaatgatcaaacccgtttttagccgaatatcctgtcaatatttccctattagaaacgatactgtgaattctttcgcctctttaattcattcgtgctttgcttcggattagtctaaaaatttctggacgccaattttacatattagccatttttttttatttgtgaccgcaaatttttacatactagccattttttattttattgtgaccaagcatatctttcctcgtatttctgggatttttttcagaatgtgngtcatagaataggtgggt

SEQ ID NO: 32292 - DNA, 1105 bp, Heterodera glycines
tttcagatgagaaatttttttataaaattttgcttattttcatatacgaaaatttcagcactttatgtaggttagcaacaggggtggagcgcgaccgagatccgcggcatttttttccgcgattcgcgatcgcggcaatttgaatccgcgatgcgagatacgcgggtcttttggaaacaaaatttattgaaattataagtttgtatgtctggaaccccttcgcaaatttgggaccccaccccacccacatccattcccgtcgcaaattttttatgtccacccttggttagcaagtactttttcagtaggattccacctctctcgccgccacgtctaagccaactttgagtcatcatattagctcttaaaatatcttctaaacttatacatagagctttcgaatgacacaaaatttgttaggtttaaaaagaagaaaatattatggcttcttaaaattggctgagacggagttggccagacagacagaattgactcctacacgcccttccagtttaccagtccactgatcagaaaatgcttttgatcggaacggaatgaaaggtttggcgctactttaaaagcgttacattttaaaaaattttttcactttttttaacataattttttttttgtttattttgatacagaatgatgaacattaagcattaacagcacaattatggcgaataaaagtatattcacgatttttatccaaaaaaaatttacaaaacaaaagggtcccccctatggtttttgataaaattcaaaatctatcactttataactagcgccaaatttgcttaataggcccaaataattgtcatattcgtgatcagcgacctttaaaacacccgggtacttggtttcaggactttttaaacaaaaaaaaattttgaccaaaaaaaagtgaaaaaaaatttcaaaagtttcctctttgcaactagcgccagaatttttttataaaaattcatttttcacatttcttttttgtgcgggcctcgaaatcggttttccgacaagtcaaactcccgaaaaaacagtcgtccctattctaaatttacacactgtatatagaaaataattaactcaatttttactcaaaatt

SEQ ID NO: 32293 - DNA, 1218 bp, Heterodera glycines
  unsure (1)..(1218): unsure at all n locations
gctcgagcgcaaaacgtatgcatggttggaaagtatcgttcataccaataatgaggggtttattttaaatgaaattntatgataacccttattatctcagaagctatntaatgatttcgaatgtttttatcncggttaattagagcaacgaaaattggtttgaatcgtgaagtttatcatttctaactcacttctcaaaattgttgataaattgcaaatatatttttccaaaagtctgtggacactttctgaaaataaattctatactcatgtattttccacttattagattttgcaggcttattgctgcatgttctttgacacttcttcaaaataacctatgccctttattcgttcaaaacagcatctttgttgtttcgctttggattgacaagcccgatgataaatagctcgagcgcaaaacgcgtgcatgtttggaaagtatcgttcataccaataattgagggtttatttttaaatgaaattttatgataaaccttattatctcagaagctatttaattgattcgaatgtttttatcgcggttaattagagcaacgaaaattggtttgaatcgtgaagtttatcatttctaactcacttctcaaaattgttgataaattgcaaatatatttttccaaaagtctgtggacactttctgaaaataaattctatactcatgtattttccacttattagattttgcaggcttattgctgcatgttctttgacacttcttcaaaataacctatgccctttattcgttcaaaacagcatctttgttgtttcgttttggattgacaagcccgatgataaatagctcgagcgcaaaacgtgtgcatgtttggaaagtatcgttcataccaataattgagggtttatttttaattgaaattttatgataaaccttattatctcagaagctatttaattgattcgaatgtttttatcccggttaattagagcaacgaaaattggtttgaatcgtgaagtttatcatttctaactcacttctcaaaattgttgataaattgcaaatatatttttccaaaagtctgtggacactttctgaaaataaattctatactcatgtattttccacttattagattttgcaggcttattgctgcatgttatgtgacacttcttcaaaataacctatgccctttattcgaggaagaacagcatctttgttgtttcgttttggattgacaagcc

SEQ ID NO: 32294 - DNA, 1122 bp, Heterodera glycines
agcaaagcactaatagggtgtttgactcacttcaaaaaatatttcattacacaaaggttttttacaaccacttattgccaatctaatttcttgcagatttaaagccatccattgcctgccggttctcggcacagcaaagcactaatacggtgtttgactcacttcaaaaaataattcattacccaaaagttttttacaaccacatattgccaatctaatttcttgcagatttaaagccatccattgcctgccggttctcggcacagcaaagcactaatagggtgtttgactcacttcaaaaaataattccatacccaaaagttttttacaaccacatattgccaatctaatttcttgcagatttaaagctatccattgcctgccggttctcggcacagcaaagcactaatagggtgtttgactcacttcaaaaaataattcattacccaaaagttttttacaaccacttattgccaatctaatttcttgcagatttaaagctatccattgcctgccggttctcggcacagcaaagcactaatacggtgtttgactcacttcaaaaaataattcattacccaaaagttttttacaaccacttattgccaatctaatttcttgcagatttaaagctatccattgcctgccggttctcggcacagcaaagcactaatagggtgtttgactcacttcaaaaaataattccttacacaaaagttttttacaaccacttattgccaatctaatttcttgcagatttaaagccatccattgcctgccggttctcggcacagcaaagcactaatagggtgtttgactcacttcaaaaaataattcattacccaaaagttttttacaaccacttattgccaatctaatttcttgcagatttaaagctatccattgcctgccggttctcggcacagcaaagcactaatacggtgtttgactcacttcaaaaaataattcattacccaaaagttttttacaaccacatattgccaatctaatttcttgcagattgaaagccatccattgcctgccggttctcggcacagcaaagcactaataggggtgtttgactcacttcaaaaaataattcattacccaaaagttttttac

SEQ ID NO: 32295 - DNA, 1368 bp, Heterodera glycines
aggtcatatagaagaccagtcgttgtattaaagacaaattaatttctctccccagaaaataaacgatattattaaaagataccaaaattccttcaaacaaatttaattcaaaattagtattgtttgaacaattcgctgacaattaaaacaaacatagaaataattttaaaaaaatattttaaaactaattcttgtaacaatattaacatggatataaaaaaatatagaataaaaatgtaatttctcattttcgttaaagaataaaatatttaattttaaatatgaatttttaaacacatagaaaggcattaaacaaagcaaatttattattgtttgcatttaattattaggaattaaagaaataaaaaaatgcatttattgatgaaccgccgcgcgcaagcagcaagcacatggcatggaccatgagaacaaaacatgaaaatagattcaaataaaaacaaattaatttattacataaatattaattaacaatttcttaacgaaatttttttaattttaaattcatttgtattattaaaatatgtaatatattgaaatgcttattaaaagttaactaaaaataataaattcattttatttaatggaacaataatatctaatgaaaattcaaatattttaaataagaaatttttttaatatatttttaatcttaacatcaggtttgaagcaaaataatttacaaaaaataaccgttacatcattacctaataaccattatatatttagtatacaaaacataataaataataaatttaaagaaattcatttaaataataaaacttattaatatactcgaaaaaatatctaatagataaatatatatatatatatatatatatatatatatatatatatatatatatatatatatatatatatataatataagaaaaaaaaaaatatatatttttatatataaatatatatataaataaatttaaaaaataaaaactattaagtataccaaaattctataaattttatttctaaattatttatatctaaaaacatgaaattaaaaaataataataattaaagaaatcaaaacgcatagtaagaaaataacaatatttcaaaaaatatttaaatgccttaaaggaaatttagagcaggataaataatttgaaatatttctttacttattacaataatatgcacagctgccattaaattaatattttatagcaattaattcagttacctaaacggctagcccgaatttacgttaaagagtgcgactgacatggaaaagacagagacagttaaattcaaggaaaatatacaaaagaaaaagtcacataaaattcattttatttattattttattatttctttgaattcattttt

SEQ ID NO: 32296 - DNA, 1123 bp, Heterodera glycines
  unsure (1)..(1123): unsure at all n locations
tcagggcaagtgctgntccgtaattaatggtttagattctcgattctcgtggggtcaattcctcgttctgggcaattttcgaactcaatttatggagtcagttcttgattctcgagatcaagtgaaactcatgagataaattcagatgtcaaatctcgcgcaattttcgactctcggagaccacagaatatcatagttccgactcggggtcaattcttgatctcgactttgccaaatccacgtaattcccgatctagacttccggagtcaatcatacactctcacagcaattctaagtctctcaaacacattctatactctcgggccaacgggatcaattctaggtctcggctcttccaaatcggtgaattctcagtctcgactcggggtcaattctcgattttgactcccggagtcatttcaagactctcaagacaattataagtgtctcaaatggcaattctcggaccttgactttcagaatcgggggcaaatctcggtctcgaatctcagaaatgcgtcgattctcggtctcgaatctcgggcataaattatagacttccgggccaatttttgctctctcgaaaaaaactatagaaaaattaatccctgcagctccaattcgactcctcaccaacactgtacagtgcacatgacgaattagctgaggcgcacagcgtcgatcagatggagatgaactgtggcgagaccaatgtggacctgtttgcgctgaatgaccacgagttgcacctgttccaagtgcatttgccggccgacgagcgcaacgaacacattgggggtcattagttcgctaatgaagggtcattagcgcggctaatgatgctcgagagtctcgagaaatttttgatgtttttttggggggaggtcatttgttcgtcagaaaatgggaccaaatttcggggggaagtgtcgagaaaatcggttttttttttttcgttctcgagcatcattattggacaaccaaatgcacacagagacaaaatatttgattgattgaaaaattcattttaattgcacttttaattgttctaattaattttaatggcctttaatatttaatattggtaccatgtttttacaaccttttttttaattgtctctt

SEQ ID NO: 32297 - DNA, 1156 bp, Heterodera glycines
agatttgaccagcatggaaagccggtcggtctgagcccactcctcggttaaccccgtgaactgcttgaatttcttggttaaggtgtttccgaagaacgaaaagggtcatttcattttgccaaaggatgagaaagggtcgcccttcttccccgtcgatgatcgaacagtgcctatttttccatgggaccacgagaaaggaatgccaacatttcctgtcggtcagcctttgaatattagataattgtggtttattctggtaaattgattgttgtacgcttccagatgacacggatgagccaattttccctagaaatgatcagaataagccgattgtgccggtggatgaaaatggtaaaattggcagaaaagggaattgttgaacagttactttcagatcaaccaatctttcctgtcgacaaaacgggaactttcatttttccggtggatgagtcaaactgtccgatccccgcgctcactgtctatggttgcatttggggagagggaggcttaagtaaccataattggtattcgatttaggcacgcgtgttgtaccgaaggatgagttcggtaacgcggtgattccgcgcgaccgcgacggcaaagcactaattcatattgcttcggacggcgtcacaccgctctccatgggcgaatggaagcagtggaagaagtactacaaggagcaggcccaagtgcgaaatttctaccaacaacggcagcagcagccggtggctgttgagccggcggcagccgcgggcattggcatcggcgcagtgaattattcggcaatgaactcggtcagtgtacaccgttggccaagaaagtgatggatgcgagcgaacctttcgcagtttggccaaatttcctatcaaattgaccgatggtccgcatataaatggagtttttagacaaaaatgcaacaaaacggttggacttcattataggaatcgtctaacaccttttccatgtgtaaagtagtccacttggctttcatcattgcccattttccgttcagatgtttcacccactgaatttggaacagcaaagtgcctatttcgccgctgacatggaaatgttgcagcgggttcgccgtgttcgacccgaagacgtcgacttaccgggtcaaatggtttgtcgctaacattcagtaaaatta

SEQ ID NO: 32298 - DNA, 1094 bp, Heterodera glycines
tttgtctttaaaaataatattagcactggtattttttaatttgttgatgtgtgcttctatagttttgtgtgtctgcggtagggccgaaacactctttttttcttatttatcgttttctttaggaagagcaccgcactgtcgagtcccgctcgtgcagtagaaatttttataacaaaaaaaatttttttcatttaattttttctcaggaattgtccgcaaatgtccgtccgcaaatgtccgtccgcaaatgtccgtccgcaaatgtccgtccgcaaatgtccgtccgcaaaatgttcgcgtaggccgtttgaaaaagtaattcctattaccttcgcataattccacaacggttcatcaaacaattccatctcgagctgatgagaactaaaaaataattttaatatgattaaatttggttcgtattttaaaatacttgattaaatatgcctaaaagcataaattcgtattaaaagcaaaaaatagcatagaagacattttttaaaaatgctgattcattattatacataatcgccaccctgtgattagttaaatctgcaaatgttaaaaaatgaaaaaaaaaaattaacataactttttcaatgtcctaccaaattaagttttttgtattgttcaacatatcaagaaggttttctattagagtgttaatttttataaatttatatatttataattacgaaaaaatgataagaatgaatattaaaaacgttttgagttttcgaatttaattgagaattcagtttatgaatttatttgcatacattttttaaaattctaaccatagtgggatttaattaacgaataggatggtaggatttaacttatgctgtaacacccaattaaatatgacggcaaaaagtgccaatttggttttggtgccctccgatttgggctgtgtcggggcaaataaatctattttttgtacaattaccgtacccatttgccggtgtattgtcaattgaatagtaatgttcaatatgcgcatctgtgccgcaatgttctctatttttctcgacatacttgttatattcctcaaaatcaattggtaaacgttttgacaactctcgtccaaaatt

SEQ ID NO: 32299 - DNA, 1668 bp, Heterodera glycines
taaccactataccacacaatacacaattaacaaaaagaggtttactttatttaataaaatttggcaaaatggttaaaaaaaattcaaatttcttataacttttttgccttttcccccacaaaaattccattcttaggggtgtatacctatttaaccccgaccccgatcggggttaagggtcggggttcggggttggaagcgtcggggttcggggtctgggttttccccgaaaatggccaaaaatgtcgggggtcgggggcggggtcgggggcccaaccctacttttaagttttattcgtctcaattagagatcgacagggatcggattcgtgcgggaaaccaaaaacatggactagcaaaagttcaatcttaatgtccatgttggaccaataaacaaattgacgaacaaaatttttcatacaaaaatgtttggaaaaagtaaaacaaatatgtattttgaaccaaaataaaattttttgtaaaaacaatcgacgataggtttttttcggcacatttttcataatttttcaggaaccagtgagtctcgcgatgctgatagttgtcgagaaaaattttgaaaataacagttttttcatttcagcagaaaaccacaaaatatcataatggcataatacaaatccaaattaatcattccaacaaaaaaaaggacaatttttatgagcacgtcaattccaaatcaacaattcaaattgatcaatcatttctcagcaaagcattcattcatttctgctgatcactagggccgggaatttcgtcgagaagactaaaagtgtttaaacgaaataaatttgaatttttgaataaactcattcgcttacccgtcgccgatgtcacgctcactaaacattttaatgccaatttgattgcgctgctcatcattgcgccaatcagcttccttttcccattttgtccatttgctttcgtctcgcgcaattggacaacggatcagcaaaaaacgatcgcttttcttgatccttttcaatgccaattgttcatgcgtaaatccattggtctgatcaaatggcgcaacggagtcagcaaaaggcaaaggaagccaaacgaaaacgatgaaattgacgggggaagaagccgaggcaaaagcctaaaatatggtggaaaaattgattaagaaatacaaaatgggtaaatagatgacactttacggtttagatggcccgatgggacccaatgaaaaacataaatcaattaatatgcaccgctttaatggcttcgatcctcgacatccaattcacatcatccgtgttcaaatggcatttgaacacttttggcacatcatgttcttgaagtggagtaaaaagccatttggccaccatttgtccatccgatgccgcggcactgtcatcacatggaaattcggggaatatatccaccgaatacagtttgacaacgcgtaacaacggcaaattggtgaacagtgacggtacgaatttgcgcaaacggcggaaaaggctgacggacaatcccaagccataaagctgttttccaagcattggccaaatgttgtgcaaaatgaagtccgaaatgcgatcattgtccgtttggatgttcaaattgattggacaaacggcgagaagcggacgaaaacagtgaagaaaagcgatcacataattgtcgatgtacctgtaa

SEQ ID NO: 32300 - DNA, 986 bp, Heterodera glycines
cagaaaaatggctatctttttttaggacaattttttatcttgtaaccccgatgctatccgttccacagagcctcttcaaaatttttccattaccgcaagagtggcggaaattgtgaattattctcagaaaaatggctatctctttttaggacaattttctatctcgtaaccccgatgctaatccgttccgcagagcctcttcaaaattttttccattaccgcaagagctgcggaaattgtgaattaattctcagaaaaatggctatctctttttaggacaattttctatctcgtaaccccgatgctaatccgttccgcagagcctcttcaaaattttttccattaccgcaagagttgcggaaattgtgaattaattctcagaaaaatggctatctctttttaggacaattttctatctcgtaaccccgatgctaatccgttccacagagcctcttcaaaattttttccattaccgcaagagctgcggaaattgtgaattaattctcagaaaaatggctatctctttttaggacaattttctatctcgtaaccccgatgctaatccgttccgcagagcctcttcaaaattttttccattaccgcaagagttgcggaaattgtgaattaattctcagaaaaatggctatctctttttaggacaattttctatctcgtaaccccgatgctaatccgttccgcagagcctcttcaaaatttttccattaccgcaagagctgcggaaattgtgaattaattctcagaaaaatggctatctctttttaggacaattttctatctcgtaaccccgatgctaatccgttccgcagagcctcttcaaaattttttccattaccgcaagagttgcggaaattgtgaattaattctcagaaaaatggctatctctttttaggacaattttctatctcgtaaccccgatgctaatccgttccgcagagcctcttcaaaatttttccattaccgcaaga

SEQ ID NO: 32301 - DNA, 1144 bp, Heterodera glycines
  unsure (1)..(1144): unsure at all n locations
ccaaatgacttaattgatgctaaaaaaacactaaataaagctaaaattttcaattttcactttgaaatggggccgttctaatagagaatttttcaaaaaattcccatattttcagaccgttttcaatcttaaaaaatttacatttatttaggataattttatgagcaaatctatggatttcgccgctcagggtggccaatgagatgattggctgacgcgtgcctttgctctgtcccattttgaacttttttttaatttttgaaatcaaaatcaccggccagagatggctcgccgtagttgctgggctgatcattcttcagcttctgatcattcttcagcttctgatcaatcttcagcttctgatcattcttcagcttctgatcaatcttcagcttctgatcattcttcagcttctgatcattcttcagcttctgatcattcttcagcttctgatcaatcttcagcttctgatcattcttcagcttctgatcaatcttcagcttctgatcattcttcagcttctgatcattcttcagcttctgatttaccggtccccttcgggcccccgcagtcaaccgcctgtggcgctcgtcagacgtcttcctccgccctccattataatttatatgcaaaacatgggcctgaaaagtagagtcgaatatcgaacgatggcaaaaattggtcggttattgattgacttgaaagacaatcggttatttatatccatataatttaaacctaaccatcacatggcggtagaatttggccaaattttgcgcaaaggctgccaaggaaaatgggaagacaaagacccctttttctcctccgcgatcatttaggcccaatatttgcacagcagcactctttcctccccatcgacagcagcagagattttttaaaaatgttttttcctttaaaattgagctaacgattggtgggctaatactaaatacagtaaaacacaaaaaaaatttacaaaaatatgtttgaatgaaggtgggcggcacggcacgtacaacacaagtgccgctggtgcttcggcactttgtcggtaaagttcatgcacttatcaaagataaatcctcgaaactgatcgaaataaatattctttacaattaatttcatagggntactacatttttca

SEQ ID NO: 32302 - DNA, 1222 bp, Heterodera glycines
aaaaaatttttttttgggttttcggggcactccccctgagccgatgcgcccagatttatggggagaccgaatccttccggaatagcttcactatagcctgtactttaattctgcgttggatttttgctctccatatttgtttgagtgccccaaacgcacactcgaaaaaatcgatttatttttgttttcggggcagtccccccgaaccgatgcgcccagatttatggggagaccgaatccttcgggaatagcttccctatagcctgtgctttaattctgcgttgggtttttgctccccataattgtttgagtaccccaaacggacacttgaaaaaatcgatttttttgttttcggggcagtccccccgaaccgatgcgcccagatttatggggagaccgaatccttcgggaatagcttccctatagcctgtactttaattctgcgttggatttttgctccccataattgtttgagtaccccaaacggacacttgaaaaaatcgatttttttgttttcggggcagtccccccgagccgatgcgcccagatttatggggagaccgaatccttccggaatagcttccctatagcctgtactttaattctgcgttggatttttgctccccataattgtttgagtaccccaaacggacacttgaaaaaatcgatttttttgttttcggggcagtccccccgaaccgatgcgcccagatttatggggagaccgaatccttccggaatagcttccctatagcctgtactttaattctgcgttggatttttgctccccataaatgtttgagtaccccaaacggacacttgaaaaaatcgatttttttgtttcataaatatttttttcagaaagtccccgaaagcgcaccaaattttatttacaacttaattttagcactctgatgctttagtatcaaaaaggaagatggagaaaaaattttttaaaaaatttttccttatattttggttatatcgttttgcttttggtggggtgcttggaacagtggaatcatgcgcacccgtccgatctggcaagttaagcaacgattgctgactagccaaaaggttcggtgccgtgatgaaacgaaccagcactgcttaccccgcggcacccggcacggtcccccgaaggaatggatttaattaaattctctccttcggggatttttttcccattaggtcgtccgttagcgttcaattgctctagtca

SEQ ID NO: 32303 - DNA, 1104 bp, Heterodera glycines
aaaagagatagccattttctgagaatatctattcttctgagacagcatttttcaaaccgaccttttgtaggactcaaccgcagatagtaatgcgtttttggggaaaccccccaggtacaacggtgtagaaaaaaagagatagccattttctgagaatatctattcttctgagacagcaattttcaacccgacattttgtagggctcaaccgcagatagtaatgcgtttttggggaaaccccacatgtacaacggtgtagaaaaaaagagatagccattttctgagaatatctattcttctgagacagcaattttcaaaccgaccttttgtagggctcaaccgcagatagtaatgcgtttttggggaaaacccacatgtacaacggtgtagaaaaaaagagatagccattttctgagaatatctattcttctgagacagcaattttcaaaccgaccttttgtagggctcaaccgcagatagtaatgcgtttttggggaaaccccacatgtacaacggtgtagaaaaaaagagatagccattttctgagaatatctattcttctgagacagcaattttcaaaccgaccttttgtagggctcaaccgcagatagtaatgcgtttttggggaaaccccacatgtacaacggtgtagaaaaaaagagatagccatttttctgagaatatctattcttctgagacagcaattttcaaaccgaccttttgtagggctcaaccgcagatagtaatgcgtttttggggaaaacccacatgtacaacggtgtagaaaaaaagagatagccattttctgagaatatctattcttctgagacagcaattttcaaaccgaccttttgtagggctcaaccgcagatagtaatgcgtttttggggaaaccccacatgtacaacggtgtagaaaaaaagagatagccattttctgagaatatctattcttctgagacagcaattttcaaaccgaccttttgtagggctcaaccgcagatagtaatgcgtttttggggaaaccccacatgtacaacggtgtagaaaaaaagagatagccatttttctgagaatatctattcttctgagaaagcaattttca

SEQ ID NO: 32304 - DNA, 925 bp, Heterodera glycines
cagtgggcaagcacacagagtgtcttaaatacacaccctttgtcacgtaaaatattccaaaaaaagagatagtgattttttttggattaggccggagaaataaaaatttccacctatttgaaaaacagtgggcaagcacacagagtcgcttaaatgcacaccctttgtgacgtaaaatatttcaaaaaaaaagagatagtgattttttctggattaggccggagaaataaaaattaccagctatttgaaatgcagtgggcaagcaaagcgagtctcttaaatgcacaccctttgtcacgtaaaatattccaaaaaaaaagagatagtgattttttctggattaggccggagaaataaaaattaccagctatttgaaatgcagtgggcaagcacagcgagtcgcttaaatgcacaccctttgacacgtaaaatattccaaaaaaaaaagagatagtgattttttctggattaggccggagaaataaaaattaccagctatttgaaatgcagtgggcaagcacagcgagtcgcttaaatgcacaccctttgacacgtaaaatattccaaaaaaagagatagtgattttttctggattaggccggagaaataaaaattaccagctatttgaaatgcagtgggcaagcacagcgagtcgcttaaatgcacaccctttgacacgtaaaatattccaaaaaaagagatagtgattttttctggattaggccggagaaataaaaattaccagctatttgaaatgcagtgggcaagcacagcgagtcgcttaaatgcacaccctttgacacgtaaaatattccaaaaaaagagatagtgattttttctggattaggccggacaaataaaaattaccagctattgaaaatgcaggtgagaagcacagcgagtcgcttaaatgcacaccctttga

SEQ ID NO: 32305 - DNA, 911 bp, Heterodera glycines
ttgttcaccaattgtaaagtgtgtgcttagttagacccctccccgagttgtgcagaaaaccaaaagcaaatatcgcataatcgatcccaacggacgaaaagcgaaaattaaaaaaaggaaaaaaacatattattttagggaaaaagcattggttcaaaaatatgtttaattaaatccgtaaatgaaaatcaaatgacaagcattgattgactcacttcgagaagcaatttgagttgtcacttaaagctatttgtaaaagacccattttggcttttcttcaccaatgctaatgacacaaatttcgcatttactctttgttaaattgacttaatttattaatacaaattaaattaatttttaggagtaatatttttatcaactttttatttctatcaatttgaccagttttttatataaaattttttaataatagctttatattgtttcagagatgaaactaatttacactatatataatcacttgtgaattttacatttgatttatttaattttatttgttttatttattttgtcgcactatataagagcattaatgtgcctttggtttgctcgataaattaaattaattatgaagagtttaaaaaatgtaatcaaattaatggccaaatagagtgttttaaacaatcccaaaaatttaattttctgccaaatgcaaatactggccaaaaattttgccaaaaatcctccatgaaactgatgaaaaagaaaaagcttattgtaatagtaaagtttatccccccttttttcgaaaatgttttttttttgttttcaaaagtcacaaaaacatgtttccatgggtttcggggtcgctgagcacgaatccggcacccatttcgaccaattccgaatcccggacccgaattcgaacaaaaatcgaaaattcaaatttt

SEQ ID NO: 32306 - DNA, 1786 bp, Heterodera glycines
  unsure (1)..(1786): unsure at all n locations
ccccccccccccgcttcagagcacgacaaatatttcaacaaaaatttttaaaaattgactagagcaattgaacgctaacggacgacctaatggaaaaaaatccccgaaggagagaatttaattaaatccattccttcgggggaccgtgccgggtgccgcggggtaagcagtgctggttcgtttcatcacggcaccgaaccttttggctagtcaacaatcgttgcttaacttgccagatcggacgggtgcgcatgattccactgttccaagcaccccaccaaaagcaaaacgatataaccaaaatataaggaaaaattttttaaaaaaatttttctccatcttcctttttgatactaaagcatcagagtgctaaaattaagttgtaaataaaatttggtgcgctttagagcactttctgaaaaaaatatttatgaaacaaaaaaatcgattttttcaagtgtccgtttggggtactcaaacatttatggggagcaaaaatccaacgcagaattaaagtacaggctatagggaagctattcccgaaggattcggtctccccataaatctgggcgcatcggttcggggggactgccccgaaaacaaaaaaatcgattttttcaagtgtccgtttggggtactcaaacaattatggggagcaaaaatccaacgcagaattaaagtacaggctatagggaagctactcccgaaggattcggtctccccataaatctgggcgcatcggttcggggggactgccccgaaaacaaaaaaatcgattttttcaagtgtccgtttggggtactcaaacaattatggggagcataaatccaacgcagaattaaagtaaaggctatagggaagctattcccgaaggattcggtctccccataaatctgggcgcatcggttcagggggactgccccgaaaacccaaaaaaaaattttttggataaaaattatttaaatgaactgactagataatatttaaaataggttatttctcttcctttcagtatccctgcaaagtttggtgcgcttctgatcagtttctgaaaaaaaagttaagcctaaactttttggcctgtttaaaaaggaattaaaaatttttaaaaattttattcatctccctttttgatagaaaaagcatcagagtgcctaaactaacctgtaaataaagttttgtgtgtttcagagcactttctgaaaaaatacttatgaattaattttgcaaaaaataaatacaaacgaaagactcagattttccaaaatttttttgagccagctatgtcggcgctcatttcagagcaagatactgctgtaccggagagtatcccagaccagatagccacgcttctggtcagttaccattaagtatgacggatcgaattttcactaacacagctaagactacatctgttggcatattataaaaggccattaagaaattgttaaaatgtaagactttgcctgcaccgaaggtactcgctcgggctcttcacggactcgtggcggcacctgtccgcccactgcgacgactgtcaaatggccgcgaaaaacccaacaaaggcacaaattcagccttggaaagcggcagacgaagtttttgagcgcatccatctcgactntgcgggcccatgcgaagacggccaaacgtatctcgttgtcgtcgacgcctattcaaactggccgggagtttgggagatgagtcgtgcaacagcgaaagaccgtcgctatgcttaaatcgtcgtccatcgaatgggaattccccgagaaatgtgtccgacaac

SEQ ID NO: 32307 - DNA, 1177 bp, Heterodera glycines
  unsure (1)..(1177): unsure at all n locations
ttcctttttaatcctaaacatcagaagtgcttaaagtaagttgtaaataaaatctggtgcgccttagagcactttcgaaaaaaattatttaggaaacaaaaaaatcgattttttcaagtgtccgtttggggttctcaaacattctatggggagcaaacaccccaccaaaagcaaaacgaaagtacaggctataaggaaaaattttttaaaaaattttttctccccatcctttttgatactaaagcatcagagtgctaaaattaagttgtaaataaaatttggtgcgctttagagcactttctgaaaaaaatatttatgaaacaaaaaaatcgattttttcaagtgtccgtttggggtactcaaacatttatggggagcaaaaatccaacgcagaattaaagtacaggctatagggaagctattcccgaaggattcggtctccccataaatctgggcgcatcggttcggggggactgccccgaaaacaaaaaaatcgattttttcaagtgtccgtttggggtactcaaacaattatggggagcaaaaatccaacgcagaattaaagtacaggctatagggaagctattccggaaggattcggtctccccataaatctgggcgcatcggttcggggggactgccccgaaaacaaaaaaatcgattttttcaagtgtccgtttggggtactcaaacaattatggggagcaaaaatccaacgcagaattaaagtacaggctatagggaagctattccggaaggattcggtctccccataaatctgggcgcatcggctcggggggactgccccgaaaacaaaaaaatcgattttttcaagtgtccgtttggggtactcaaacaattatggggagcaaaaatccaacgcagaattaaagtacaggctatagggaagctattcccgaaggattcggtctccccataaatctgggcgcatcggttcggggggactgccccgaaaacaaaaaaatcgattttttcaagtgtccgtttggggtactcaaacaattatgcggagcaaaaatccaacgcagaattaaagtacaggctatagggaagctattccccgaagattcngtctccccataatctgngcgcatcnggttcggggggactgcccccgaaacaaaataaatcgatttttttcagtgttccgtttggg

SEQ ID NO: 32308 - DNA, 1263 bp, Heterodera glycines
caggacagagccaaaccccccccccccctcgtttttccccgtatttcgcttgcccgatttctgtgtgttccacacaaattttccaaaaaattgaaaaaaattactttaaacagccggcggcggtcggcctgttctgcaccatcaaatacgttttggccaacagcattcggctctcatatttcttttcgcgcaacaatgtgtccaactgttggcgaatgccgggctctcgcaccgcgtcattttcagcacaaatgtacgtggcgctgtccggctgaatgaacggcacgtcgtcccaatggcactggaatggcaaaaaaaatgtatttacacagtttttttccacaaaaaaatgtttgcagatttcactcgaagaatataaatggtgggaacagcgcgtccacaaaaaaatgtttttcaccgaatttagacaaaaaattcggggggggggggaggaggagccgggaaaactgactccaaatatgaccatacatgcacaaggggtggtatgggccgagggccatacgatgtacgatcgtaccagggggggggggtggtacgaggccaatttttcttacgatggggtccatgaccaaaaaaattttaacgacctttttttttttgctcatcgctgatcttttttcgcttgcgcataaaattccgcttaataagctcgcaatttaccaagaaatgaaaaaaataacaaaaatgaaacgcaaaactagtcgtccaaatcgtctgtcaaaaaactgttcagggtcccatcagatttggcaggcgcagtcggaatcgccactttcttttttggcaacaaaaattttttagaagaacactccgccgtccacggcacatttaaccccgaagaacactcccccgccaaaggcacgtccgaaactgagtacttttccgttttggggccttaatttgaatttaaaaaaaaagcaacaaaggacgcgctcttaggcccaaaacggaaaattacccatttttgaagaacactccgccgcccaaggcatctgaaagcgccgagccgaccattccgaagcccatggcatttccaattgcttcgtcccccccggcaccgatggatctttgatattttgggcatttaggtcggcacgtcttatcgctgaaaatcttgatgcaaaacttagaattcgccttaatggacccccggttgaacaaatttcaatggattcatttaaacaacgatggttattagaagaggggcattatgccagtgacagcctaatgcgaacacatgat

SEQ ID NO: 32309 - DNA, 1177 bp, Heterodera glycines
ccctacaaagggtcggttggaaaaattgctgttcccagaagaatagattttctcaagaaaatgcctatctttttttttctacacccgtgtacatgtgggtttttccccaaaaaacgcattactatctgcggttgaggcctacaaaaggtcggttgaaaaattgctgtctcagaagaatagatattctcagaaaaatggctatctctttttttctacaccgttgtacatgtggggtttccccaaaaacgcattactatctgcggttgagccctacaaaatgtcgggttgaaaattgctttctcagaagaatagatattctcagaaaatggctatctctttttttctacaccgttgtacatgtggggtttccccaaaaacgcattactatctgcggttgagccctacaaaatgtcggtttgaaaattgctttctcagaagaatagatattctcagaaaatggctatctctttttttctacaccgttgtacatgtgggttttccccaaaaacgcattactatctgcggttgagccctacaaaaggtcggtttgaaaattgctgtctcagaagaatagatattctcagaaaaatggctatctctttttttctacaccgttgtacatgtgggttttccccaaaaacgcattactatctgcggttgagccctacaaaaggtcggtttgaaaattgctgtctcagaagaatagatattctcagaaaaatggctatctctttttttctacaccgttgtacatgtggggtttccccaaaaacgcattactatctgcggttgagccctacaaaatgtcgggttgaaaattgctttctcagaagaatagatattctcagaaaatggctatctctttttttctacaccgttgtacatgtgggttttccccaaaaacgcattactatctgcggttgagccctacaaaatgtcgggttgaaaattgctttctcagaagaatagatattctcagaaaaatggctatctctttttttctacaccgttgtacatgtgggttttccccaaaaacgcattactatctgcggttgagccctacaaaaggtcggtttgaaaattgctgtctcagaagaatagatattctcagaaaatggctatctctttttttctacaccgttgtacatgtggggtttccccaaaacgcattactatc

SEQ ID NO: 32310 - DNA, 1729 bp, Heterodera glycines
  unsure (1)..(1729): unsure at all n locations
aaaaagtttgaaatagtgacgaatagtgacataatttcagccaaaaattgagcaaaaataatttttattcactgattccattgcaaatgagtagggctgggatttttaagggcaaaaaaacaaaataggtacataaaaaaataattttttaaattaaaattcttgccacgaaaatacctttttgagaaaatttttttcatttcttaggagtgctttttgaaattttttttgtcgattcttaggggtgtattttttggttttattgcatttttgttaaagaattttccaagaaatgtcgaaatagtgacgaaacgccaaaatagtgatttttaactattttagtgacgaagtcgccaaaatagtgatttctagtgaccgataatgacatcagaatcgaaaaatttttatgcggaaatgcgttttttaagctcctttcttcaaaacaattattgctgattataatgtggcgtctttcatttgctgatacaaaaccaatttcggctaaggttatggagggggagggggtccttttgaatagcgacccaattttgggtagncttatnnaatctataaaaagaagantntntntttctttttctcatttcatccactnnnaaccattacnnataaaaacattccnnaaaaatcattaatactttttatnatcattannattnaaatttttaattaatcgaaaaanttatttaccttattattattatattattaaatgtgacaaataagtagcaagaaaaaaaaatcaattttacaatttaatgagtgttgtaatcatgtcaatatttcactttaaaatgtgtagaatttataagagaaaaatataaaattcattttgagaaatatttttatattcttatttatttcgttcttatcaaaaaatattattataatttctaaaaaaaaattctgcaatgaatcagtggatattattctttttaattgtattatttttaattattcaaattgaaattggagcggaaaagaaaaaattggaacaaaaaacatttgacgaaatatttggagaaaaatgggaagaaaaagaaaatgaacagaaaaagagagaaattgttcaaaaattcaacaaaattaaagagaaaattttacaaaaagagagaaaatattcaacaaaagaatggaataaaattgaattgaaaatcggaaaaaaattgggcacaaatcgccaatatatttaccaatggatcaaagaattaaatcttcagaaaataaaatcttacaaatcaaaaacggatgaacaaaaaattgaatttgtgcaaaaatttattaccatgaaaaatgaatataagcaaaatggaagaaaatattcgagaaaagaatggcaccaaaattatgccgaaatttgtaagaaaattggagtaagttatggaacaattgaaaaatggaagaaacaattcggaatccgtgaaagaatgacggagaaagaaaaaatggaaaaagtgaaaatttattttcatataaaaagagaaaatccaaaaataagtgatgaaaaaattgcaaaaatagtgaaaattaatcgacggaccattgacaaatggaagaaacgctttggggaagaataaatgaggattggatacattaaagagattaacatttcgttctattattagcatttttctttatgaaaaatattaaatgctttttacacattttaaggaaattaaaattacttttagccatttttaaatttttattg

SEQ ID NO: 32311 - DNA, 301 bp, Heterodera glycines
cggtgtcatctatgttactagatcggggatcgatccccttgcggccgctcgagcaggacctgcagaagctagcttgatgtggatcagattgtcgtttcccgccttcagtttaaactatcaagagagggaggagagggttggagaaggaaaggaaaaaaaaatgaaggaggagaaagggtgggtggcggaagaagagaagggtggggggagtatgagtatgatggtcaatatggagaaaaagaaagagtaattaccaattttttttcaattcaaaaatgtagatgtccgcagcgttattata

SEQ ID NO: 32312 - DNA, 1001 bp, Heterodera glycines
  unsure (1)..(1001): unsure at all n locations
agctgttcttatagtgtattncattttttacaatggtttctcctaaaaagaaaaggattcattattttgtaaatttattttccctaaaattatttcatgaaaaagttttaagtctatttttaacctacgactctcaagcgacttttgatcataaatgtttaacaattcagcataattaggtaaatcagcagcataattgttacgtctaaatattactctcaaaaaagttttttggacattctccagtttttcattcattggtttggccacctgttttatttgggcgcggtccggcaactcggacatggccaaaagtgtgaatttttccgtgtcgaatctgtacagtgccgaatagcaactgctttggctgctgctccgtttgctccgcgccgcctttgctgccaaacatttcattcggcgtgtgctgttcagcaacggattcttacgacggatcttccggggaaatgtgaggggatatattttaagatttaattgtaaaattaatttattcgaatttaaattctcgaaaatttatgaacataaaaaatttgagccagaaaataatggacgactttgtgtcattcatcgtcaacaattatcgccattaattatttcggcctgattttcgtttgtttgtccacctgttcaagcaggtcagacgcacttggcctctgttccgggtcggcgcggaacaactcgcgcacaatcagccgaatgtcctgcgaataagggcccttcaggggttcgtattcgcactgaaaacggtgccaaaaatggaagataaaataattttattttttttaatgcaacatttataattttgtggatcaaaattgtcaaattgtccgcgtcaaacggtttccgcaaggtgcacatttcgtacagacagcagcccatcgcccacatgtccgacttggcgttgtacgaacgcccttcacactttagggaataaatgtaaaattaaatttcgcaaattaaaacgcaaccaaaaaattgctaaa

SEQ ID NO: 32313 - DNA, 2100 bp, Heterodera glycines
  unsure (1)..(2100): unsure at all n locations
attgagctcttcagtcacatnnaagctgttacgctctttcccgcaccaaggtcccacaatgctgacaagacatataaatttgccctttgttttaaatgtgacgtcgttgcagttgcgagtctcaatgtcggttggcaacaatttaggttgtcctaatttggtccatgtttcaatggtaaggactgtcgcctgagctcctgtgtcgacattcatttcaatttttgtgccgttaatttcgaccaaaattgtccaccaccgtccttgagtcgtgccaatttgtaggcatgttgctttgacttggaccgtgtgaaatgaacggcgttggttctttgtcgtgaatgctccctttcggcaaacattagcaatgtggccttgtttttggcacttgtggcatgtcgcttctcggaagcgacaatctgatctccagtgatcagtaccaccacatgagccgcacggctgggtcggttgtccacgaattgcttttcctcctgtggccggtttttgctgtgccgggtggttttgttgcacggcatttgctgaattggccttggattttgattctctccactgttgagggcgagttcggatggcatttgtcgaagctggcgtggaaaggagtgacaaagcactatctttgacaatttggatcgcttttaactcctcttccaactttttgagtgtgactgtggtgccacttttctcggcttcttccatcattttaagacatttctgcctcaaatcgtgatattcatccctcagtgaaatcaccaaaatcatgcatttgagctgttccttggtaaggctcaaattggcatgctcacacgctgcgttgatttgagcaaccaaagaactgatgacttggtttggatgccgtctgattcgaaagcattcatatcggcggacgaaaagagagcgcgtttcagcgaacaactcctttaatctgttgattgattcagcccacgaagctttgtcgggtaactccgggctgattgtgtccctgtacttcgtgtaatcttcgtctccgagttttcccaacaatagtcggactttggcttgctcggttaagtctttgccatcctcttcaatcaatatgccgaagcgtttgtgccactgttcaaatgtttgaccattctcggggtcataaacaaactttgaaattctactgtcgattgagctggccaaattcgcttggcttatgcttgaagcggcatttccttggagcaaagcggtcaaaagttgttgaatttgttcggcgttcattgtccgtcaattgaaattgttgaaaaaaaaaatccacaaaatccacacctggtggatgcttacaccgtcttggtgctaagctgacgaatttgttgaaaaaaacgcttcttgcggaacctcacccttcttaggtctattggtttttttttgagttaaactgcttcttagcagacctcacaccacctgggtgctattggtttttgttgaatttgcagtggtccttgtcctcagtgatgaagaaaggctgctgactgcgccaatttgttgtgttcttccacttagaacacacaaagaaaaataaataaataaataattttattgattcggtcggagggcaaattgggaaataaaatataaatgaatgatgaaaggaaagaacaaataatgggaggaggtgtccacttttatggacgagggagggggcggatggacatagaaataacaaataaagtcaataagtcagatcgccataaattcaaattattcactacccaacaatcagaaataattgtgatttattaacatttagatttgccaattcatttttatgtaaagcaattcttatgttttcctgttagcttatatattcacagggaaaatgttagttcaattatcattataaaagcttttttaataaattattatacaaaggtaaattttatatcatttgatttattatttatttttcgagaaaaattttagttcagtcttaaaaaattcttgactgccctccccctactagttgttcatctctaagctgaagatggtttatttgttcgttgaggattttctggttatgaatatttattaagttagttttttatattacttaaaagtatt

SEQ ID NO: 32314 - DNA, 1330 bp, Heterodera glycines
attgaacgctaacggacgacctaatgggaaaaaaatcccctaaggagagaatttaattaaatccattccttcgggggaccgtgccgggtgccgcggggtaagcagtgctggttcgtttcatcacggcaccgaaccttttggctagtcagcaatcgttgcttaacttgccagatcggacgggtgcgcatgattccactgttccaagcaccccaccaaaagcaaaacgatataaccaaaatataaggaaaaattttttaaaaatttttttctccatcttcctttttgatactaaagcatcagagtgctaaaattaagttgtaaataaaatttggtgcgctttagagcactttctgaaaaaaatatttatgaaacaaaaaaatcgattttttcaagtgtccgtttggggtactcaaacatttatggggagcaaaaatccaacgcagaattaaagtacaggctatagggaagctattcccgaaggattcggtctccccataaatctgggcgcatcggttcggggggactgccccgaaaacaaaaaaatcgattttttcaagtgtccgtttggggtactcaaacaattatggggagcaaaaatccaacgcagaattaaagtacaggctatagggaagctattcccgaaggattcggtctccccataaatctgggcgcatcggttcggggggactgccccgaaaacaaaaataaatcgattttttcaagtgtccgtttggggtactcaaacaattatggggagcaaaaatccaacgcagaattaaagtacaggctatagtgaagctattccggaaggattcggtctccccataaatctgggcgcatcggttcagggggactgccccgaaaacccaaaaaaaaattttttggataaaaattatttaaatgaactgactagataatatttaaaataggttatttctcttcctttcagtatccctgcaaagtttggtgcgcttctgatcagtttctgaaaaaaaagttaagcctaaactttttggcctgtttaaaaaggaattaaaaatttttaaaaattttattcatctccctttttgatagaaaaagcatcagagtgcctaaactaacatgtaaataaaatttggtgcgtttcagaaccctttctgaaaaaatatttaagaattaattttgcaaaaaataaataaaaacgaaagactcagattttcgaaaatttttttgagccagctagctcggcgctcatttcagtgtaagttagtcctttaccggggagtatccctgcaaagtttggtacgcggagagtcaattagcaaaaaatatgagtgatcgaattttcact

SEQ ID NO: 32315 - DNA, 847 bp, Heterodera glycines
caacaccaagtcgagcagatagatcagatcagcggtgtaatcgcagagaagccaaaggcgaaggttggacgaagtctgaacaattgagggaagggggagggattgggagaggaagtcggacaaaaaagggacacgaaaagcgatggaaaaatggagacccaattaagcgatgaaaagcgacattgcctgataagggtaggaacagcgtagcggaatgacaaaagcattgtacagaaaagcgaccagcacaaaggaaagccatccgacgtacaaagagccttcagaatgggaaaagcgatcagaaacagtgaccaaaggagcgaagaagcaccgaaagtgtcaatgtgagaaggcaaaaggcgcgacggagtggccacaatgtcctccaattggtcaccctttaaattttcaatagtttttaggccccaagtcattcagtgcccccgggggatcacccggtgcagtccgatcagtgacaccagcgatgcttttgcccccgcttccgagtccgccaccgtcgtcccctcctcctccgcgcgttcgtcgtccggcgtcggctcgcgcactaactgaacgtccagcaaaagtcaatgaatcggctttccctcccaaatgctcttctcattttacctcgtcacgaactgcagaagtgcgtcttctaaggtcgcgcgcaaattcgtgcagtttttccttgacaatgaaagaaagttgagaggcggtgtccgtgtgatggcgcgaactgaaagaaatggacgaaaaatggacgaaaagccgagtaaaaaggccggggggggggggagtggcgccaaccttgcggaccaggccgttttcgcgccagcgcagtttt

SEQ ID NO: 32316 - DNA, 1206 bp, Heterodera glycines
agtccctcgtcttttttcacgcttttctttggttgtggcactcacggattatctcaaattattatctctttgaattcgttgcttttccattttctcttgatcattttgaaaattttgatattgttcaccttctcttgctacaaattttccaataaattttcccatttcataatttataagcaaaaaaaaaaaaaaaatctttgaaataaacaaataaataaattgtaaaattgatataaattattttaagaaaaaaggccccctggaaatactattgttcactttatcgaaactgacaaaattattcgtttcgaacaattctttaattaatttgtgataattacaaaaaataaataaatatgaaaaaattacgaattttaaaggcaatcaaaaaaaaaaaaattgaaatagcgaacgccggtaatctttggaattgatatcccgacggaaaaagatagaaaaaggaatttctgtgcttgctatttttctaggttaaaaaatatagacgaatcaaggcttggctttagcaaaatcattggttttagttattcatcaagtaaatgatttcaaaatttgccagatcgcagtgcagcaccctttcggcagtcgtccgcgagcgaattgcggaggggtcgacagtaatgagtagggaagcaacttttagtgaaaaaactttttttttgctcaattgttttgaagaaaggagctcaaaaaacgcatcttcggcgtcgcccagttggtagcgcccagtcggcggcgcccagtcgtgcccgtccgtaagaatcgacctaaaaaaatttcaaaaaaatacacccctaagaatcaagctaaaatttttcaaaatatactcctatgaaatgaaaaaaaattttctcaaaaatttactttcttggcaaaaatttttaattttaaaaatttttttaggtaactactaatttgggtttggaaaaatttcacaaaaattctccccccaaattttttttcttgttcaatattttctaagaaaatattttgtaactgcaatcagtgaataaaatctttttccttaattttaaattattttcaaattaaaaaacagctatttaaaaaattacacccctaaatttggaactttttcgccactattttggaatttttttctcactatttagttaattattttgggattttttatcactaaaaatccgatccctagttatcagtaaa

SEQ ID NO: 32317 - DNA, 993 bp, Heterodera glycines
gagcagctcgagctctacagaaggtatgaaagaaaaaatagtattctgggacttttcagaatcagaattattctccaatgtgccccaaattttaggcccccagccacagccccttgcttctcccagttttaagtcttggatttgtcaaataaattcaagacttcaaattaataatcaaaaattctcttaaaatttttttgaacccaattcaaaaaaggaaaaaaatttgcagtcaaaaaattattcgaatttctccaattttgtttccataatttccgaaagttattcggtatcataatgccaaaacaaaacgaaatcgttttaaaatattcctttctggacttgacttggtttcttgatatcgaagctgttttctacgctatttctaaaacggttataccaaacctcagatttttgaatccggttttcagaaaaaatgccttgtggtgaaaacaatatttcacatttcactccataactttgtgagttcggcacggatcgagaccgggataagaccattggaaagagcagctcgagctctacaagaaggtatggaaagaaaaaatagttatttctgggactttttcagaaatcagaattaattctccaatgtggcccaaattttaggcccccagccacagccccttgcttctcccagttttaagtcttggatttgtcaaataaattcaagacttcaaattaataatcaaaaattctcttaaaatttttttgaacccaattcaaaaaaggaaaaaaatttgcagtcaaaaaattattcgaatttctccaattttgtttccataatttccgaaagttattcggtatcataatgccaaaacaaaacgaaatcgttttaaaatattcctttctggacttgacttggtttcttgatatcgaagctgttttctacgctatttctaaaacggttataccaaaccccagatttttgaatccggtttcagaaaaaatgccttgtggtgaaaacaatattca

SEQ ID NO: 32318 - DNA, 1318 bp, Heterodera glycines
  unsure (1)..(1318): unsure at all n locations
cactttctgctcaacttccagcaaatgtttcatcaaaatgaaacccgcaaaatttttttgaacaaatggctaaaatntaaaattgaaaatattttggctcaaaacgagatttataagtggacaaactttttattacagactttgtacatttttgcgcaattttataaataactaaaatactaatgaattaaaaatcttatgggtcattgatacttcttcaggttctccattaatcatttttacaataggttcttctagcaccctccgaaccaagaaacattccctgtctcggacaaccaaccgagttcggaacggcccattttggtggtgcattgttcaaggtggttattgctgacaaatctgtgccaatttctcccagatttgatgattttgctggtgccgattgcccactcactcgttttgatttaatgctaactcttaacgagttcattccgaccgataagcatttgttcagtcggcaccgcttacacgaagcagaatctacaaaatcatacgaaaagataagtgttaatgatatcaaaataaggaataatttctgtcatagcttagacttgaacttgtttacagattttttttaaatcggtcaaacaaataattgttcatttggatatactattcgaaagagaaaactttgggcttatttaataagccatatttcagattttaaattgacttcatgaattttattttttaaacacaactttcaaaaatgaaattcttcgaaaattttgaaagaattttaatcgcgggattcaacaaaaaaataaataaaataataatagtttgtatattgtaaggactagatgttggttatctcatggaacattaattttgttaaaaaaaatttctctgattcatcataaattgttgattcaacaaggtccaaaaagagtttcgatggtggtataacttattcaatatggcaccatttcaaaaaatccatgcaattattatgttcagtcataggcgttacctacacccaaatttgcaatttttcaagaaaaactaaaaataaattctgaaaaagccccttatctcaagaaccctatggggtcgatttaaaaaacatgttaaatttgtcgactactatgacaaaacttattccccaacctaataattaaaaaatgatattttttgaataaaaatttanatgatttaatttaattagtttataatgttttttgttttttttgccctttntccaattcgcacgttcttnccgttttttgcatttgtattccttcttcaacgaaattgaaacggcgaaaaanatgtttacagcctgaatttttatttg

SEQ ID NO: 32319 - DNA, 1116 bp, Heterodera glycines
  unsure (1)..(1116): unsure at all n locations
tagcattaatttaanttattgtagtacaaaagaccaaccccaccccgtattttttcaaacttaaacattaatgtactgtaatcggattttattgtaaatttgttcccatcgtaattcacgctttaaatttcaaatcatcatgctaccgtaactcgttttgaagaaattcgaattcattgatgcatttttaaaaaaaaatttaccatatccaattgtaagaaaagtgacacacatcatccacagcgtattataatagctaagcacgtccatttcatcattgctaattggtttaattatttatttaaaagttttttaagcacaatgaatgcacctttcacataagcgaagaatataggcaccaataagccaaaaacagaactaaaattcaatttttccaaaaatttcttaaattttaaataaatgtactgaccacaaatgcagaaagagttgggcctaaataataatgatttgtattttatataagtttattaagaattgaaccatttcgaaagttagttttaaaaatgaaaataaaactttatagaaattaagaagcatatagattgacaggtgactaattctaatttaatctcggatcactctcgtagagtaataaaagagaaaatataccaaaattaaattacaatttttttaaaattaatttattagcaatcagtattctgccccctcgcatagagcaaaaaaaaaaaaatgaaaattatttaaaataaaaattcacaaaaaaaatttagaacccacctgggtggaggaaaagcatacgcttcaacaggaagcgcgtgtccgtcttcacacaattcagtcccgcgatggattttgctgccgcgtccgtgctgaggcgtgagcgcaaatgcaacacgcgtggtaaccagtatagccggaggaacatcagtgcgcacgcgaacgcgtcaccaccgcatggcaaacgcaaaagcggcaatggcacaacggcacacagcacaagttcgagcagtatcagcacccgttggcgcaagtggaccgcacagtgccaacgcttgattgagttcacatgcatccgaaactgtgaagatgggttgaaaaacatttggacaggggctagttagacatagaaaattt

SEQ ID NO: 32320 - DNA, 1285 bp, Heterodera glycines
tttcacagcatgtcaccggatttttagtgattttgggacacaaaattttgtgtgaatttgtttcccccattccaatatttctaattgaatttttttgttttgaaattttctcgctttttctttccgcgaggctctcaaatttcggagtgttgaaatttggtggtgctaaaacatgcggaaaaaaaacaaaagtggtcgtaatttgataggcaccatttccatacacataatagaaaaatgggttctactaaagttgattttgaaagaattggaggccaaaaaagcgaaaaaaaatcaaataaaattaagcaaatatttgcgtaattcaaaatttaaaagcgaatgaaaaaagggcaaatttatttccctaaattttattggggtttttgaccatttttcgtcaaaaatcaaaattgaaaattttttatttgtttgttttttgaggcctttttttgcacagactctccaataaaaaaaatctgaataatttacaaatattcaatttaaataagaatttataaatttatttgttaatttgcaaattttcctaagcattttttgttttgttttatatttttttgaaaaaatataattttaaataaattattttttttaaggaaattttttttacaaataatctaaaattgaataaaatttactaaaaacggcaaaacataatcaaacagttaacaaaattgctccagggctcgcatctgttcttttttcaaatattgtatttattttttcttttttagtacttggacatacataccctatgaaattttatcaatttgtaacaaaatttatttaaaatctgtttttttaaattggacaatttttaattaaaaccattttttggcgtccctatttgtcctaattgttcaacaaaaaaaaaaacaactagtgagccatgatttgttccatagttgcattttaaaagtcaaataatggatttttatttgccaaaatgttttttgtatttaatttccaatttttaaaaaaaaaaatccggtgtgtttcagagcttccactttctgaaaaaatatttatgaactaatttttacaaaaaaattttaaaataacaaaaactcagaattttgaaaatttttttaaaaccaataagcgttgaaaaattttcaggttaagttagttctgtgccggggagaatgcctctaaaatttggtgcgattttattaattatagaaagggttaagttcgataaaatttttaaaatttaaacctaaaaaattaggcataattaaaattttcataaaattttttttaa

SEQ ID NO: 32321 - DNA, 1767 bp, Heterodera glycines
  unsure (1)..(1767): unsure at all n locations
gctattttactcgaagtttcgggaaaaaatacacccctaaagattgagttttcaatgtgaaaatgcaccactagtgattgacttggtaaacttaaaattaatatatatttaaactatttgcttgtgttttttcgcataaaatttaacaattaaaatcgcaaaattttttcatttttggactaaatctgttaacaatgcactaaaaatttcaaaaatttcaccggcggcgcctatcggcaccgccggagctccaaaatttcctttattttttaaatgctcaaaaaccgtgaatattctaagaagtataaaaatttacaaaatatattgctcaaaaagttaattatatttatttatcgaaaagggttggttggtctctagaaactagagaccggcgcgggacgggatcccgcgcgggattttgcgagatcccagtccgcaatcccgcattttttgaaaaatttccgatttcttgcaccgcaaaaaagtggttttgaaaagaaaaaaaaatagtcaaatttatgaaccgttaataatttgatttccgatcaactttttaccgtcggatccaatcgaaaaatcttagtcgacccatcagccccttttaatgcatcccgacagcccctaaaaattaatttatggaaattttttgaatttaattgaaatttttcgaattttccaaaatcctgcaatcacgcacgggatcccgcaaattttaaatgcgggatttgcgggattaattccgcgggatcccgtcccgcaaaaaattttgagttccagtcccgcagcgggatccgcaaatttgaaatttccggtctctactagaaactgcgtcaattgattaaattcgatatttaaccgaaattatgtgatgaaaaaaattttgaaaaaacttcggcttcggcttcgaaaacttcgggttttttgggcttcgagcttcggacttcggcttcgaataaaaattgggcttcgccttcggcttcggcttcgagtgctaagccgagcttcgcccagccctgatccgcaggggaatgctttggttggaaattggcaaattttccgaatttcactagggccggtcggaagtgaacgtttgggcgaacaagtagctaacaaataaggggcattccactgcaaatattggcaactgtggaacaaagacaaggagctaaatagtgggccttttcatcaaaatcaaatcaccagtggcaaaaggttgccaacttcaccggcagggatggaagctaatccatcccgaaattccgtttcgcgttattttcgggaaatggcttgaaaagggaaacgcccggctcaccgcgatcagccacacgaagattccaaacacattcagcagtcttaccacgattaggcgctttttaacataattgttgtcgttgtcgtccgtcctcgttttttacgggctanggtcgtttcataaaaactaccaattttgcagatttttcgagaaaaatccatcataactttttttttaaatacaaccaaaaaaataatcttcgtaacatagctcttagattgctctattagcataaaaaattttagaatatttcagaaagttatgcctatttttttttctgaaattttttatgctaatagaacaatctaagagctattgtatgatatcaaataattatttaattaggttgtgtttaaaaaagttgtgacaaatttttctcgaaaaagtgtaaaattggcagtttttacgaacgacctagcaccgtttttttcgtcaaaatcatcgtcgagcgagca

SEQ ID NO: 32322 - DNA, 1121 bp, Heterodera glycines
actttaaataaaaaattgagaaataatgaaagaaagtattttttaaatatgtatataaattaattttagtttctaagttgattgacgaggataaactccctcaccttcttttctatgggcctcctggaacaggcaaaacgagcacaattttggcagctgctcggaaaattttttcacccaaaaacattcaatctcgtgttctcgaagtaatttttcgttttttaatttctttcattactcaatagaccctaacaaacatgatcagagatgctcctaaattgaatattttcgtttttcttgaattatcctgttttcgtttttgccaatataattccgggcctttaattatggataaccagagaacataatgattaattttcccaacgcgtcattaactttcctcccatatttaagttaaatgcttcggatgaacgtgggattggagtggtgcgtgagaagatcatcaacttcacaagttcccaagggttgcatgacatggcatgttcaaaagggaaacgtatggtcaaattggttattcttgatgaggccgacgcaatgacgaaagatgctcagaatgcgttgagacgtattatcgaaaagtacacggacaccacacgcttttgcatcatctgtaactatctttcgcgcattattcccgcccttcagtcgcggtgcactcggtaaaatgactgaatttattttgaaataacaactgttttcagtttccgttttgcaccgctaagtcaaaagcaagtgttgccacggttggattacattattgaacaggaaaggctgcccgctgtgacggacggagccaaaaattctctattcaaactatcgaagggcgacatgcgacgggtcattaacattcttcaggtttttagcaaatgtatgaaatggcatcatcaaatgcgaattgatcacagagcacggctttgtcaacatcggctgaaatagacgaggaaaacatttacaaatgtgtgggctatccccacccgaacgttgtcaaagacattttccgtgctcttctcgacaattcaattgaaattgcatacaaaagtaaattaaaaattttgaatatttttctgtttatgtctttttttgtggcaagatttattttt

SEQ ID NO: 32323 - DNA, 966 bp, Heterodera glycines
  unsure (1)..(966): unsure at all n locations
cacaaagtacatcagcaaagtgcggagcacttctctcttatagtaaatgttgtcactcactttaccataagaaaggaaacatacggctcgtagttctcttcgtccagtccggtatacgaccagcggtcgtaacggtaccgcgtgaattggcgtgggaccgaaaattgaacaaatgaacagaaacaaaaagtgaaacttacgggttcattccaattgcgacgatgcattgtgtgcgagtaattgtcgtaagggtctctctgttcgtacgtgacaacgccaatttcgggatagtctccaatctttaaaaattttaaacgacataaaggccaataaatgaacacaaacgtggttgacgaagtcgagtgggtgatggggccttaacaaagcaatgggatttgttacgtccgtttttcaacttctcccaacggtcacttgtaatcctcgggtcgtagtccgtattttatggcagccgcccttcgttcttcttcgttacgcgggtaaggcccaggcatatgatctctgaattcaaatgcaaatggaaggcaacggaggggcaactcaaagacatggggtgcactcacctcgggtaccatccgggttgagaaacggctccacggcctaaaattgtattaaaaggtaaagtgcgaaatgagaatgggaacaccacttacataacggggccgaagtatgcaaggagcgacgaattggaatttttgagagaaccatcgagcgaagaaagtacaacacttgtaatgaacaaaacatagaaaaacaaaataaaaaacaaacagacaataagagaacagggagaaacgaagggaaattgctaacgaaattagctaatcattgtttatcaaagggagaataaaacagagaaaaataaggcgtcaatcgtctgctttggtccatcgtctgctaatctttttttacttcttcnccttttcaatgcctgacgattttttcagc

SEQ ID NO: 32324 - DNA, 1697 bp, Heterodera glycines
  unsure (1)..(1697): unsure at all n locations
tttattggtttttgagaagaaatgtataatatcaatttctgtcaaaaaaaaanngngaatnnnnngggagaactgnataacctataagngcaanactatgctgannnnngaaaaaagccncaaaannagccatcnnnatgtaaaattgctaccaaaaagtaccaaattttcaagtttttgtcgatatgttgatttttttttcagttgggagccctggtttgaacttatgataaaaatttttaaaaaattcgaaattacatataaaatattgaaaagcaatttttttttgttgcattgtttaaaaccacgacttaaaatttatttttaaacgaacaacctttatttgatttaatttaaaattaagaatttttgcgtttgtccttgtcacaggtgtaatcgggaaatcggacgttttggcttataataatatattttgctgttacactcattatgcgggaaaaaacactgaccgacaatatgtccaatccacgaagtgtcaaggcttggttgaaatagagccatggttttaaaacttctggacatttcgtggctttctattacatattacacgacgataaaaaggacccaaatttaattaatttaaaaatttaatgcatcaaaactttttttagaagcctcaaaattaaacctgcttgatatcgttcggtaactttaagcattcaatgttagcttatacaatttcaaaaaatttctttgctttcataaaatatgacggaaaaagttaagaacttttatcacatttttcgctgctattagataaatttataagcattaaagttatcaatttattttatggccgtgtaaactacaatgtagctgatttcatggctttttacttaatatgggcttggatactttgtgggtccgtcgacattaagtttgggcactcactatatggaggaatttcgaaaaaaatatataattttgtaaaatcttattaaaatttaaaattaaatttagtaatttaacaacagatgtgcttacgaatttatattttcttgaaaataaaaaactttaattatggaaacctcttgaacagactgagccttgtaatgattacaaataatacatatgtatgaaattgatatataatgaattataatgagcctagcaaaataagcatggttaacacaccgtttcaaaaaacgagacatgaaccaataaatagagagtgcagagaaaaaaacatctctctttttggcgtactatttatttatctctgttaatagagaaaaacaacattcacttctctctaagaaaattttttttacgttaacagattttctttaaattttgcatatcgatagagaaaaaaattacgaacaaaattggagggtttttggaagcaaaaagtgggttagctaaaaagttattcgagaaacaaaatttcgaatgctcatattttttttctaactcatcaaattgcttagcatttgcttataaaaagcttctcctcataaagagctttcgaatgatactaagattgtccaatttggttgggaaaaaccttcaaaaataattcccaaaattcgtcattttttaatattttggacaaaaataaatgaaaatattcatgttgcacaacggactcgaaccaccaccctttgtccctttactatcttacaaaaaccacttcgccacacatgcaaatctttttggaactgggaggccaaaat

SEQ ID NO: 32325 - DNA, 256 bp, Heterodera glycines
ggggacctctagagtctgcggacatctacatttttgaattgaaaagattggttcttctctttctttttctccatattgaccatcatactcatactccccccacccttttcttcttccgccacctacctccctctcctgatagtttaaactgaaggcgggaaacgacaatctgatccccatcaagctagcttctgcaggtcctgctcgagcggccgcccgggggtcgatccccgatctagtaacatagatgacaccg

SEQ ID NO: 32326 - DNA, 941 bp, Heterodera glycines
  unsure (1)..(941): unsure at all n locations
atagaatttctaaaaattcaacaaaaggactaactattctacttggccgngtatccaacaagagaagcatagaatggcatcttcggttactgatttactcattaaaattccagattggacggatagaatttctaaaaattcaacaaaaggactaacaattatttcttcccgtgtatccaacaagagaagcatagaatttcatttacggttcctgatttactcattaaaattccaaaagccgattggacggatagaatttctaaaaattcaacaaaaggactaactattatttcttcccgtgtatccaacaagagaagcatagaatgtcatttacggttactgatttactcattaaaattccaaaagccgatttgacggatagaatttctaaaaattcaacaaaaggactaactattatttcttcccgtgtatccaacaagagaagcagagaatttcatttacggttcctgatttactcattaaaattccaaaagccgatatgacggatagaatttctaaaaattcaacaaaaggactaacaattatttcttcccgtgtatccaacaagagaagcatagaatgtcatttacggttactgatttactcattaaaattccaaaagccgatttgacggatagaatttctaaaaattcaacaaaaggactaactattatttcttcccgtgtatccaacaagagaagcatagaatgtcatttacggttactgatttactcattaaaattccaaaagccgattggacggatagaatttctaaaaattcaacaaagggataactattatttcttcccgtgaatccacaagagaagcagagaatttcatttacgggtactgatttactcatttaaattccaaaagccgatttgacgattaaaattttaaaaattaaccaaaggactaactattatttcttcccgggtatc

SEQ ID NO: 32327 - DNA, 666 bp, Heterodera glycines
ccaccgcaaaggccgaggaatgttcatgtgccacaactcccttcaaacggacagccgcaaaacccatggaatgttcatgtgccgcaattcccttcaaacggaccaccgcaaagcccaaggaatgttcatgtgccacaactcccttcaaacggaccaccgcaaagcccaaggaatgttcatgtgccacaactcccttcaaacggaccaccgcaaaacccatggaatgttcatgtgccgcaattcccttcaaacggaccaccgcaaagcccatggaatgttcatgtgccgcaattcccttcaaacggaccaccgcaaagcccaaggaatgttcatgtgccgcaattcccttcaaacggaccaccgcaaagcccatggaatgttcatgtgccgcaattcccttcaaacggaccaccgcaaagcccatggaatgttcatgtgccacaactcccttcaaacggaccaccgcaaagcccatggaatgttcatgtgccgcaattcccttcaaacggaccaccgcaaagcccaaggaatgatcatgtgccacaactcccttcaaacggaccaccccaaagcccatggaatgttcatgtgcccccactcccttcaaacgaccaaccgcaaaaccatggaatggtcatgtgccgccaattccttcaaacgaaccac

SEQ ID NO: 32328 - DNA, 1472 bp, Heterodera glycines
  unsure (1)..(1472): unsure at all n locations
cggattctttttgctgcttccattcttccatttcgaattgcccttttcctcccccctcaaatgcgttctcctccgcctcctcctccgatttttccagggcggcacttccatccaaaaactttggcatttctcttctcggagtcacttgaggctgatgagccggcacgaccgaggcaaatgcaattaaccgattaagtgatttgataaggaacaaaaaggcacagaaacgcaagaagaaaggcattgcgtgaaaaatgggcccaaaatccgaccctttaaccttaattccgattaaaaaaatatataaaaaattggaaaatatatttttaaaattcattttctcatatggattttattgggtaaataaaacattcccagcggcggcactcatttcgcctttcgcccattgttttaagttctcattcatatttcgggagaaagtgagcgggaaaggggggaggagaagataataatctaaaaataaaagtcaaaatgtgcacatccaattattcgcttcaatttccatttcgggggtcttaatctcgacattgaagggaaaccaattaataattgccaagcagataaaagtgccattcaacaaaaaatttaaaaaatttaattaaaataagataaaattataatttccacattatttttaagtttgtttaattcttattttattatgtatctctataaaacattttatctagttttattttaagtggattggaagctctgacctctgattaagaatttgatcaaacataaagactttgtttttcatttgaatgtattggcattttgtctcaattatttttggtaaattttttcgtttttttgccgtccatggtctctgttcaattactcaatttgtaaaactgttccccggacccaacattttccactcgcataaataaatttaatcataaattggtatttcagctaaacaggataattttgagagtatttctatttgcttttgcattcgctccctaaatgattttagtgagtttcgagtcataatattttacaactaaaaatggacgtggataggctctcccggggaaaaaataaataaaaagaggaaataaacagtctgtttacagttacctcctcgtcaacgacgtcctcacttcttacattgtctaaaaaattgaccccttttccaccgcaacaaaatgagtcgaaatcgtctcccaccagaacttttactagaaattgtcctctgcgttcgcaggggacacaacacgcctaacatttgtttctcttctcgcattttacgaactttcatggagcctcgagttgcactgtggcggagagtttggatttctgtatgggtttttagtgtgtctgtgttggtgctttgcttctgtttgcctatttttgatttatttgtcgttggcttggtggacttcttcaaacattctgattgtcttttcttgtgattgntcgcttttttatacgttttgcag

SEQ ID NO: 32329 - DNA, 1954 bp, Heterodera glycines
aaaaaacaaaaaagaactctttgttttttaaaaaaagtaaaaaaatatttaaaaatttaaattggaataaattacaaaaattaacaaacctcatatgagaagagactaaataagtacattaaactcaatttttatgtttataatattaattatacaaatgaattaatgattttttaataaacataattcattaaaaaattccataattaaataaaatatccacatcaattttttaggtgaaaaataacgctgataaataatttaaaaaatattggtttctaacaaagcaattaatgaactagcgacatgcacgatactatttttttgaaataaattctttaaatcattaaataaataataaatttcacggcattttttctatcaaatagattagctacacttacactatattgcgataataactctaaatctaaccaaattaaaaaaagaagaatgtagaggcgtaaatgttgcagcaccacctttaaaccatctcttaattaaaaatgattctggttaaataaattcaaccacccttttaaagaaattaatacacggaaaataagaattttatatgcactcagtaatttttttactttttcatcatttataaaagcatcaaagctagagattcggcttccaccaattatttccggtgagtttggttttcggttttttattaaaaagaaaatcaaaataatagcaactacagtcaggtgcaaaagtattgcctcaaaaaaaatttttttttaaaactggttttctcaaaaatataactctctttgtcgacgagcaaaattcggtacatgcgccaccccctccccctcctcttgaaggacacattctgtactggccgcttagacgcttgatccctgcatagctaattcttgaactgcggcaaggaaccaaggaaagacgtggtatgagttgtgagtccatcaatgcctgatcaaccgaaccggaaacgattctttttgaaactttggcagaattctttgaatcagaaacagcagatgctgacatgtcggctttctgaggtcggccgccaataacgcccctcttcttgccaatgtttcgcagcggagcagcgttcttcaccccacaaacctcactataacatatagtactatatttttatataatataagccttactgataatgcaaatccatgattccttgccataattttttgcactgacatgggcaacttactcttggttgttccgaatacctttaaaaaggatttaaaaggaacaccaatcagccaggtttaccagcattcatagtggaaaaatgccgaacagcagcgcaaaaaaactttgctttggcggattccagttggctgcaatttgaacagctgctgacaaagcatgcaaaaaccgggatgctgactcttgcattcgagacatttaccagtgttttgtcgtagcctcaaaatattgacaaatatgcaaaaaaattacataattctactttatttccaattcatcagcgtgtaaatgtgatgccgacgtgacagaacagtaacatcctgtctcgaaaacaccggcccccaagttttctttgcattctcgacaccgaacttttgtaaatttcttcttgcaagcatcattcatgcatttttttatagatgattctgcatacctacaaaaaaaaaatgcaaaaaaatcattgtgcaaacggaccaatcagcaaagggcttctcaaaatgccatttatgactgcaatctaccagtgcataaccatccatggcatccaactcctgcttgcaattgacgcatttgattgacgtgaattggcttcgtttaccgactggtaacaaagcagtttgcattggcttttctgaataaaaagttccaaaaaagaatattgtttttgcattaacctatcccttgctccaaacaattttcacgatcaacagcactcaacgtcaagtcgatgcaagtaacatca

SEQ ID NO: 32330 - DNA, 845 bp, Heterodera glycines
  unsure (1)..(845): unsure at all n locations
cgcgcgaatgataagcggtgacggagtcgggtgactttccaaaagaggtgggcggcggtacgtgtgccaagttcagaatgtcctccttcagaatccgtccgtctctgcccgacccggtcagtccgaccgtatctatgccatactcgcggatgaggcgccgatcgaccggcgatgcgattactttcggagattgagacaaaagcgaagacggagcgtcagttcttacagttggcaaaactgaaaatggaaattaaatgattaagaaggcataatagagaatgctgacaaagaaatcaccatttgttggtgcttccttttcttcttctgaagaaagttcggcaatttcaatgtcacccaatggaaggccaactttggcaatttcgtcgggttggtaataccttaacagcagaaaattgagaatctttgaggaaagatatcctccctaaatcttaagaaatgacaacggtcaaaaaagggtacatttttttgatttttccattgtatcggctggtgattgtattctgacgctttgtcactctgaactgaacaaagctcatcaaattcagcaatcgaatcgccttctttcacgtgccttaaaacgattgaatagaagtgaaatgcatagattaaccctaccattctttgacttgcacctccgcaatcccttcaccaatgtcggacaaattaaattggaccaatttgaacaaagattttgaaaaatgatacgaagcaaattgttgatagtggcattttgttaacaaaaggggcaaaaatttatgcaataaaaacatctaaaacactaatagaagtattttaaaccanaattatcagggctgccaaaaata

SEQ ID NO: 32331 - DNA, 1214 bp, Heterodera glycines
ataatgctggtgtggtaagtgtgaagaactgtgttcctccaggcaaaaaattctaagaaaatttataagcatttgtagggttctcagcagtttccctgcaaaatttggtgagcttctgatcagtctagaacgttgggtgataaaatgaaaaaaataatttaaaaaaaataatgctggtgtggtaagtgtgaagaactgtgttcctccaggcaaaaaattctaagaaaatttataagcatttgaagggttctcagcagtttccctgcaaaatttggtgagattctgatcagtctagaacgttgggtgatatttataagcatttgtagggttctcagcagtttccctgcaaaatttggtgagcttctgatcagtctagaacgttgggtgataaaatgaaaaaaataattaaaaaaaaataatgctggtgtggtaagtgtgaagaactgtgttcctccaggcaaaaaattctaagaaaatttataagcatttgtagggttctcagcagtttccctgcaaaatttggtgagcttctgatcagtctagaacgttgggtgataaaatgaaaaaaataattaaaaaaaaataatgctggtgtggtaagtgtgaagaactgtgttcctccaggcaaaaaattctaagaaaatttataagcatttgaagggttctcagcagtttccctgcaaaatttggtgagcttctgatcagtctagaacgttgggtgataaaatgaaaaaaataattaaaaaaaaataatgctggtgtggtaagtgtgaagaactgtgttcctccaggcaaaaaattctaagaaaatttataagcatttgtagggttctcagcagtttccctgcaaaatttggtgagcttctgatcagtctagaaggttgggtgataaatgaaaaaaataattaaaaaaaaataatacttgtgtggtattaattcataaatattttttttcagaaaatgctctgaaacgcaccaaattttatttacatgttagtttaggcactctgatgctttttctatcaaaaagggagatgaataaattttaaaaaatttttaattcctttttaaacaggccaaaaagtttaggcttaacttttttttcagaaactgatcagaagcgcaccaaactttgcagggatactgaaaggaagagaaataacctattttaaatattatctagtcagttcatttaaataatttattcaataaaa

SEQ ID NO: 32332 - DNA, 1764 bp, Heterodera glycines
aattttaaaaaacaaccaaatctaggccccaaaacggaaagtacccaaaaattttttatcatcaatcggcagcaattgaaaaaaagagtttttttttgattcttcattgtttaaagattttttttttattattttggtttttctattttttatttttggtctaataaatattattttttttaatgttaagtgggttctgttttgctatcaaaattacaaaaattataccaaattcgaaaaaagagataaagcaaggacccggaaaatttttttttaatttttacttgcggatcagtgaattttatgctgctccatggtgtccaattttttatgaaacaagcatgcaaagggatgagtaaagacgaaatggaagagaaaaaggaagaaagggaaggaaacagagaatgcggaagaaaaaaatggacgaagaaaaaaaagggaattatggaagatcgaggagaagaagaagtaatagtataagagaacaaggaagaacgggaagatgaagaaccggaagaagaaatagaagagtaaaatgaataaaggaacgaaaatgcggaagaaacaatggaagagaaaagaaaaagaagacaattatggtgaagagaagaggaaaaaaagagtgaatgataaacaagtgtaagaggaagaagaaatggaaaatgaaaaagaaagaaagagaagacgaagaagcgaagataaaatggaagagaaaaaaaaggatgaattatagaagatggggaagaggagaatggtgaagaaaggtaacaggaagaagaagtggaagaggaaaatgatgaggaataaatcgatgagcaatcaaaatggtaattattaagaattaatttttaattttcgaaaaccataattttgatttgaattacattatcaccaaaaacggcatatcaatctgacactcttttacgcgattgaagtaataattttaattatttttaattaaattattattattattttttgcattttccgttaattgagatttatagacaaatcatcctcaccaaattagtacatataataaaaaatttaaaaacttttttgaattgtaccaaactaatgtaaattattggtgacgttgtgaattggacccaaatttggacgcattagtttaaatggactcattacccaaattgggagaatatttgaaacatttaagtgttcattgtataatttttttataagcaaaaaaagtgaaaaagtaagaaaaaaaaatcaaaataaattcaaacaaaaaattaagagaattaaaattaattttttatatattatttattaaaatattaaaaaaactttttaaatttattcgtctttcatgaaaaatacaaatatattttaattgttaaattctataaatcattgtcttagaccagagaataccacagatttttcactttatttttcaacataatttttgggtttttctgttcacaaaaaaatccgttactctgtcgatctcgagaataaattttaaaagaactgatttatgaagtttgatcggtcgagactttgcaattgcgcaacattcgagagaaagcaaatgcgaccaattttatgatcatttctttgatttgctgaacatttgaataaaaaaatttataacggataaagagagtataatgatcgaatcgggtttcggggttggcaattacatccaaacagttaaatttgtccattagttttttattgaccaattaaattcttggtataactataattttaagaatttttcattactgaaactaa

SEQ ID NO: 32333 - DNA, 916 bp, Heterodera glycines
aaattttatttaacatgttagtttaggcactctgatgctttttctatcaaaaagggagatgaataaaattttaaaaaatttttaatccctttttaaacaggccaaaaagtttaggcttaacttttttttcagaaactgatcagaagcgcaccaaactttgcagggatactgaaaggaagagaaataacctattttaaatattatctagtcagttcatttaaataatttttatccaaaaaatttttttttgggttttcggggcagtccccctgaaccgatgcgcccagatttataaggagtccgaatccttcgggaatagcttcgatatacctctactttatttttaccttggatttttgctccccataattgtttgagtaccccaaacggacacttgaaaaaatcgatttttttgttttcggggcagtccccccgaaccgatgcgcccagatttatggggagaccgaatccttccggaatagcttccctatagcctgtactttaattctgcgttggatttttgctccccataattgtttgagtaccccaaacggacacttgaaaaaatcgatttatttttgttttcggggcagtccccccgaaccgatgcgcccagatttatggggagaccgaatccttcgggaatagcttccctatagcctgtactttaattctgcgttggatttttgctccccataattgtttgagtaccccaaacggacacttgaaaaaatcgatttttttgttttcggggcagtccccccgaaccgatgcgcccagatttatggggagaccgaatccttcgggaatagcttccctatagtctgtactttaattctgcgttggatttttgctcccccataattgtttgagtacccccaaacggacacttgaaaaaatcgatttttttatttca

SEQ ID NO: 32334 - DNA, 1151 bp, Heterodera glycines
cgatccgttctccaagaagagagtgcggacggcgccgaccacggaaagttcggcggcgtcgatgccatcggattgcatttcccgcactttctcaaaaagtgctgcacaaattaaatgttctcttataaattcatttgttttaaggacgtcgtacaaaatttttacacctccgacagtattttttatgaaattgaacacgcttttgcgcaatttggaccatgtcaatttcatcgttttccaggtaatatatatggtgcaacaattgctcattatccaataaataaccgcctattttcataattataaaattcggattatccaaaggagccaaaatcgatgcaaataatccctcccgtctttagacattcactctaactgatgcatttgttgagcgattcgtttgtcacattgagccaaggattattacgaatggtattctcctcattcctttaatccacttaattatctcattttgaagaagtccgactgattcggttcgagcccggcaaaacccacaaccgtgccgttcgttttttcttcggcgccattctggggaacaaaattgtttggagttccctttcgccatagctgggaaatttggaacccacgtgcaatgttttatatacatttgaattggtttccacgtgatttttattgtattcatatattttatacccataaaatttggtacgattttattagttggtctttatttgagtacaaaaattacaaaaaaagaaagaaaattggatgttaggctgcaaaaagagattgtctcctcttcttcgtgttgtacacaaagtcttcggcccctccaccgtccttttccttcgactgcggaatccatgacggaattttgcgctttgtcagagatggttcatgtattccatctgcactaatgccatattcgtactcgaaaattgagaggattattctcagctggtcgtaattgagcaggttttcgggcagcagttccattattggcttcatccggattatgtcttaattactctcgattatttgtcaaaacgaagggttgtggtggtgctatgtcgatcgacgaaagttgctaaatttttgactaaatcaattcataacttttcttatacgcaaccaaattgcacaatcttgatatttacgatagcccttga

SEQ ID NO: 32335 - DNA, 1622 bp, Heterodera glycines
ggcgccggagtggaagccggacgagtcgagcagagacagcgaagccacagagggggcacggcacgacggaggcgagcacgaagtggcgccgaacagaggaggaccctgaagaaacgacggcaatccaaatttgctggcatgattggcccaccttttcttgcattctgttttctcggcattgtttggccaatgaaagcaaagtcatcacatgggcattgctgtcgtcgttgtccatgttcgggttatgacattttgcctttatgccattcttcggtggggtggcgcatggcattgcctttttcggcacttccgttgtccctcccggcaatggctgttcctgcttctgttgttgttgctgctgttgcggttgtacgatgttattatacgccaaacttttgaatggtttgtctgagcttttgtaacatttcaatttgaatccgccattctccgcagcctttcgcgcgacagtcaatgacctaagcttttttgaggtcaaaagtcgtgaaaagttgcccacttttttaaagattctcgactgccgaaactgacgccttcgctcatgaatccgatggcctcgtcgatcaattcgttcagattggcattcggactggcaattgcggccaaaatgagctgactctgagccgagaatggatttttatattctttaaaaaagttattaaagaaaaattatattaaaaaataaaaaaaaacaaaaaaaaatgaaaaaagtcactttttggctactttaattaaattaattattcttttatttttttatttttaccttgaagtattccaattcggccacctgtaaaggaactccgtaattattcaattaccgattccaatataattaattaatagttccagttagtctagcgctttcttaactaattaagtagtagtttcagttagtctcacttcgtgttccgccgggtgattgtgttcgcctttggaaatgccctgtccatcgtcgtcccatgtctccgccctgcctttgcaccacgagcgcgagcaggtcaatttcttggcacaaacacatcgccacgtttttacgccctttgccggcacaatctgacgaagcgagtggaaatgtgtacgatatctcgtgatacattatacggtattacgtggtgaatgttgtaacggtaaccctcaaagatcagcttctgattgcctgaatatttaagcaaattagccatggcattctgagtgttatcaaacggtgcctttgaaagaagtgactgtcctcggctgggccgggtcataacgttggaattggtgcattaattaaattaataaactgaaaaggacgaattgagttttagcagatggaaaggacagcagcagtggcaatcaatgattttggccctcggccttttttttgtgccattcgttggcattgcataattaatgatgggctgctgacaattagcagtctttcaaatggggagcggaataaatgggcaacgacgaatgccctccgggtcattcagtcacacatcgctttgatcaatggccccgctgttttggctggcggaggggggggggggcgagcggtgctccgattcaatccccccggggagaccctttttatgtgccccattttgctgttcgttcgt

SEQ ID NO: 32336 - DNA, 1117 bp, Heterodera glycines
aaaaaaaataaaattactgcaattgagccgtgttttcgcggccggcactgagtcggccgagcacaaaaaaattgtgggagcgcggcaccgcgtaaagccatcgtttatcaaaaatgggaaaataataattttataatttttaattttacttacaatattataaaataattaataataattattattattattttaagtgacaactgtaaaatatttttaaaataattatttaatttaaatatatttttaatttatattaggtatttcaacagactgttctggtcacagggtgtgtattgaaagaccaagtcggcctcggaacagtgccgaacttcgcccgcaaaattgtcggcatcggacaaaatttgggcggacaaaatgggcgagaaaaggacgaaaagcggaaggaatggcagaagaaggaaagacaaatttggcacaaagcaaaacgagacggaactaaacaaaaaaaaaacggtggagaaaattggcattttttaattagggcaattaaaaatgccaatgattttttatgccataaaaataaacaaattaagtgaattcttttgccatttcactttttttactcacattttcattttttgctgcttctttcttcccattttccttctcctccttcgcatcgcattttgctcctccgttttgttgcgctttttgttctccgaatggataatccgtgcggataaagccgagaattatttggttattatccgatctgaaaaggcggcgaagcttttaagtgttcgtcgtcgatgtgctgcccggccggggtgtgccattgcattgtgagtaattaaggggggaagcgagcgacggaccgcggcgcagtgccaaagggccgcgggggacggcatttggccaatggcacaaagggacggagaggaccagcacgagagatagggaaaggtggaaatattggggagaaagggaaagcggacagtgacaaaatgagaggctgagaaaatagaaagaataagggaagggagagagagagagagggcgtggacgtaagtcaattatcccccgccgcttaccccacgataggcatctatagcagtgcatggcatggacattattcaggcgtttatcccccact

SEQ ID NO: 32337 - DNA, 1356 bp, Heterodera glycines
  unsure (1)..(1356): unsure at all n locations
tgctaataagcatgaaaaacggatttctaacttggtttgaggcttctaggttcaactttttcatgctgatttttgcttaaattggtattttcatgcttactgacaaatgaccatgtaatttttgtgcttaattgacattttttgtaaaatattgactaaaataccgcctcccagcaataaaaacgaaaaatacacccctattaagaatcaaacctaaaattttcaaaaattcgccaataagaaaaaaaatttttcaaaaattcatccccaaaatttttttctgacaaaatttttgatttaaaaatgtcaatttttgctatgattattaggattgtcagtgcgaaaagaaaaattgagaatttattgttaactaataaacatgtttgcctaaaatcaccaaatttatgtgccttttttcgatttttgtgcatattttgtcattttcatgctttttcgtgcttaattaataattattaattatcatgttttattgctgaaaaatccggtctctaataataataatattaaaaatttaataaagatcactgtttcataataaagttaataataaaaaagtgatgaaaatttttcccatcaaaatgggtatttttgtgtaaaatattgtcaaataagagaattaaaatgcaattctctccttttataaatttaaagtggaacatcacggatatattgaattaaatgtcttttattttttaacttatttcaaatgggaaattaattttaggagggtatgcttttagtcaatattttcataaacttttttatttacaaattcaacctattggcaggtgttacctgccaaagggattattttattgggaaaatttatgattttttatgaaaataaacgatgccacacttttggcagcagatggaagatggttgagccggacaccaaaactgagacaaaaagatggacgatcgatgggacaaacacttcttaagccaacgaagcagcaaaatggcagcggaaacacggataggcgttgcgctagaagaaattttaaaaataagagatcggagttttaaaacacaatttatgatcgggattagagggccagggcggtccctggcatacactcgggatgtttcaaaaatggcataataaaaaactaaaatagaatgtaaaaattgcaaccgggaatatccgttatatttaggaaaaatagaatattttataaaataagaaaaaaataaataaaaaataaataaaatatgttttataaattaaagaagttattaaaataaaagtaatttaaaatttcttagnaaaaattatttttaaagataaaattttgtaaaaataatatgaaaaaataaanataaggagttaat

SEQ ID NO: 32338 - DNA, 1142 bp, Heterodera glycines
ttttggttttattgcatttttgttaaggaattttccaaaaaatgtcgaaatagtgaaaaatagtgacaaaacgccaaaatagtgatttttaactattttagtgacgaagtcgccaaaatagtgatttctagtgatcgatagtgagatccaaatcgaaaatttttaatgcagaaatgcgtttttgagctcctttcttcaaatcaatcgagcaaaaaatttagttaaaacctaaaattcacagccctaattattaatgtttttggaatgtgtcaaaaacttatatcttaaatagcggtaaatcatttgagaaaaagaaaactaaaagcagaagaataagctaaaaaacgaaaaataaattattacggactttggtccgtgagttacgcaattaataacaaaaaaaatgcacttagccctgattttaaatcaattattgtataaacctttgacgttgtagagttattagctgaagctaaggaattggtagtagaacaaataattttggcatctaaacattgtcttaatttttctcttgctctaaaaatacaattttataggaaagtccttgaagttaatttctctgtagctaattttttaatgacttgtattaataattcacgctttggtgtatccagtgcttgggttttggctaatttctcctttcccccaaattcatccaatccccgattttgatcgttccttttatcatctttaggctggataccagggctgggcgcaactggattttcaattacggaaatccgcaatccgcaattatgggggtccaaaaaccccgcaatttcccgcaatccgtaatccgcaattttcaaaaatcaatttttgtcagaatttttgaaaattttttgaaagtctgatcattatgattttcaatatttataagaatcaatatccaaaaaaaaatttcggggggggggggggtgcccgaagaacttttttggccaaaatttttttagtgttatttaaaaaatttcaccaccgtagagcaaaaacaggaattgtagccgtttttagccaaattgggactaaattttgccattttggagtctcaatttaaaaataaaatggaacttttgggcaccggcggtgcagataggcgccgccgggaaattttttgcaatttt

SEQ ID NO: 32339 - DNA, 756 bp, Heterodera glycines
atttttcgtgttttgtggggtgtaatttttaaaaatttccaaaaaattgatctttaggggtgtatttttcgttttttttcatttttcttgtgaaaatttccaaaaaatggccaaaatatggactaaaaacccaaaaatggcgaaatatggatttattccccaaaacccccaaaatatggatttatatggactaaaaaccttcaccaaatcaaaaaattttaacgcagaaatgctatttttaagcccctttcttcatagcatatgcgcagaaaaaatatgttaatccatataatttacaaccctagtgataacggaagcgatgttttatttaaaaaccgatgactttttttaaaaccggaaccgttgttatgtccacaaaaaaaaaataattaaattttgagttgattcacccacactcaattttttgtctgaatacagaattacttactgtatatagtctttcttgtacgttttttaaatagcccaatttgcaaaataagattattttcataaagcctaaattaaaaaagacataacttataatttcgataaagtagcaaactttggaattaaaaaattcaaccgaaaattcaaaaaaaaaaacattatgccaaagtgatattttcaaagataaatgtacaaaatgaagaatttttgactatatcataaaccggtcaaaaatgccggtttccggaccggttttgcattttcaaaacgaccggtttccgggcccggtaaaaaccggtaccgggcccg

SEQ ID NO: 32340 - DNA, 1086 bp, Heterodera glycines
gaatgttagttattattgggggtcccaaaatttctttcggaaaaaaattttcaaaaaagtgttccgaaaaaaagagatagtcggtttttcatacgatatgaaaaagaaggcgtaaatggctctgaatcgtttttacatacgattattgaaaagaaggcgtaaatggctctgaagcgtccataggccgcagaccacaaagtaaaatgggacaacattcataaaaaaaggttggcctcaaaagggcccattcccaagctaatttcggaatttgctgataaaatcaaatagcctaaattatatacgcattataaaaaggaaatgacagaagcctcgaatgttagttatattgcgtgtcacaaaatctctttcggaaaaaattttcaaaaaagtgttccgaaaaaaagagatagtcgtttttacatacgattattgaaaagaaggcgtaaatggctctgaatcgtttttacatacgattattgaaaagaaggcgtaaatggctctgaagcgtccataggccggagaccacaacgtaaaatgggacaacattcataaaaaaaggttggcctcaaaagggccattcccaagctaatttcggaatttgctgataaaatcaaatagcctaaattatatacgcattataaaaaggaaatgacagaagcctcgaatgttagttatattgcgtgtcacaaaatctctttcggaaaaaattttcaaaaaagtgttccgaaaaaaagagatagtcgtttttacatacgattattgaaaagaaggcgtaaatggctctgaatcgtttttacatacgattattgaaaagaaggcgtaaatggctctgaagcgtccataggccggagaccacaacgtaaaatgggacaacattcataaaaaaaggttggcctcaaaagggtcgccggcgaaggagaaaaagagagaaacttctgaaaaatttgtccattttcttaattaaattcgcattaaaaatctgaaaatttttcagccggctgcgcctatcggcaataccgacgtgtcaaaaatcctcttttttcttaaaattttcaaaaaagggttccgaaaaaaaagagatagtcg

SEQ ID NO: 32341 - DNA, 1917 bp, Heterodera glycines
ctttaaggtattactgggagatcataaataattataatattttataggacaaaaattaacaaaattattgattgtaataattatacttttatcaaattttatttttttgtttttcaatgactgtgtttaagaattttatttgctaaaaatacataagtccacaatcgctgcgtttgcgcacgcatatcgttggaaatatgtattttttatatgtttaaccattttcatacatatgtaataatttttatttacattttggtaaaatttattttttaatcatatctttattttttcagtcaattaattcaaaatattttcgaatcgttttttgatatttgtttggttctctttgcataatttttgtaataaaatatagcctcatattaattagggttcttcgatgcaaattaaagatatgttaaattaatttttacaaatttaaaaacaatttagatgaattacgctttccttttgttattttttaaaattatctcggtaggaagaattggtttacctcacttttgtacagttatgcaaattttgaagcttttgaatgaccttattaaaatgttttctctgtatttgagcaatttatacgcacatcattcaattttttctggaattggcctaaatttttgagttgatctcgccccactacttgctccgtcttcgcatgctcccttttgcgaaattttgcttgtaaattgttatttcacgtttattattttcggtactgaaatgttcattttcactgggactcagttgccccagtgctcaaatggcgtcggttccaatgtatacattgttttttagacttagctcatcaagagctttcgaaggataccaaatttgtgtgattttgaccgttttaaaaggtcagttgcctccctttcactcaaattttcgagttttaaaacatgttcaaaaaccggtttaaacgctctgcgcgcagtttttttgatggtttaggcgttttcagcacctaagaaaacttataaaagtgtttttatgcaattttgagtctgggacctatgatggatatttaccgaaacggaaacgaaatacggttaaaaaaatttctggaaatttagccccaagaggatggcaaatttcgagtatatttttaatacaatttttgaatatttttcactcaaatatttgccattgaaaaatgctattccataatattcttaattttcacctcttttcaaactggtacaccaaagataaaagcccaaatataattccgtgctgccgtctgtgctgcttacgccgtttgggtctggattaaaatttgccattaattgccatggaaatcccttcaaatgcacggtttcgcttatacggtcactgtacaaaatttcgcgcgaaaattcggacactttttcaatttccatcgaaattgtgccgaatgaattgttttgttcagtagcagaagcctttttgtccatcgcttctgcttctttcaaagtgacgtcaatggcaagtgtcaatttgttctcataagatccatttctcatgccaattaattccttaatttgccaataattgattaattaagtggcgggggggggggaagaaaaatttcaaatgttatattttacttacgggttttaatggaaattcaaaggtgctaaattcattgttaataacaaagtcattaaatgttccagtgaaatgcgttgcgccgatattttgcgacaaaactcgaagagttgccgaaccacggcagttccaatcggaatctttaaaaattattcttttgtataaatttttaatcagggttcaagttcgtccttgaatggcaaggacgtcctggaaaattgggccctctttctgaaaaattttaaaatatccttgaattcaagatgttcttaaaaataaccatggggtgtttttttttaaattttatttctt

SEQ ID NO: 32342 - DNA, 1306 bp, Heterodera glycines
ttaattcataaatatttttttcagaaagggttctgacccttaccgaattttatttacatgttagtttaggcactctgatgctttttctatcaaaaagggagatgaataaaatttttaaaaatttttaattcctttttaaacaggccaaaaagtttaggcttaactttttagtgaaaattcaatcactcatttttcgagtagtgatcagaagcgcaccagattttgcaggggcctaaaaaggtcaaggaaaggcgtctctgcgttgatttagcagtagtacctatgaatttaaattttctatgaatttttaaagttttttgaaatttttttaagtgcaaaagtggtggtgtctgcaaaaaattttcaccgggtttattaaatctaggaaaattagtaagcatttgtagtgttccgatacgtatccctgcaaaatttggtgagcccctgatcaattacaaattatttatggacgatcaaatttttagaaatttttatttatttttgcataattaattcataaatatttttttcagaaaatgctctgaaacgcaccaaattttatttacatgctagtttaggcactctgatgctttttctatcaaaaagggagatgaataaatttttaaaaatttttaattcctttttaaacaggccaaaaagtttaggcttaacttttttttcagaaacttatcagaagcgccccaaactttgcagggatactgaaaggaaaagaattaacctgttttatcacattagcttgtcatcagtttttataaaaaattttcaaattctgagtctcctattattttatttttttttcaaattttgaagggcgggggggggggccttttggtgcgtttcagagcagtttgtgaaaaaatatttatgaattaattttgctaaaaaaataaaatagtgaagctttaaaaattaataaaaaattttaaattcagaattactggagttagcatcatagcagtgcttttccttgtctttttgatgccctcgcaaaatctggttcgcttctgatcagtttataaaaaaaaagttaagcctaaagtttttcgctcgtttaaaaagcaattaaaaatttttagatttttattcatctccctttttgatagtgaaagcatctgagtgcctaaactaacctgtaaataaagttttgtgtgtttcagagcacgttctaaaaaatatttatgaattaattttgcaaaaaacaaataaataatgaactctcttccttaatattttcctgcaccgaaggtactcactcggccgcttctcggcctcgtggtgggccttc

SEQ ID NO: 32343 - DNA, 1924 bp, Heterodera glycines
aagagattgaaaaagttctcggcgatcgcccgtcgcgccacaacgaaaacatttgccttgatgagttggtcaattccgtgtttggcgtcaagcaagaagggaatgtgcctgccctggcggtggcttcactttactaaataaatgacaaaaatgttttttaggacccccacggcgaattgcgaggcaaaaacattttgcacagagtcgacgaatatgaaatgtcgaaaattgcctccgaaaacaaaatgaccatcgaacaattgaaacagtgtatggaagacgcaaagcgctttttggccgaggtgcgttggagttcatcgacggaattgccaattttgcactaaaaaggaacgcgctaaacgcccgagcccgcacttggacaacaaaatactgaccgcatggaatgcccttgccatctcgggcttttgtgctgctgctcaggtggtcattttaatttggattgatataaatgggaattcaaattctatcaaattaaatgagagaattcccttttttgttaggctgtcccaacgcgcgcggccgagttccaaaaacgtgctgaaaaagcggttgcattcattcgcagccatcttttccatgggggcgaattgctccgatcggcttacttggacaatttgggacaagtcgttcaaatgtccggagtaatttgccggaaaataataacacaacccttgttttagaagacatcccatcaaagcgtttgccgatgattatgcttttcttatcgaagcccttctcagcctttactcgctgaacttggatgagaatttgcttcaatgggcgcataatttgcagcttcaaatggacgaacttttttgggatagcactttcgactcgggctatttcatgtcgagggttggcgatccgtcgataatcgtccgaatgcaagacgaacaggacggggctgaggtgacaccaatgttagccactgttttactattcatcgtttagccctgcaccaattcggtggccgcttccaatttgctttgccttggctttcttctcgattccgctgactttcgtcggcgtgccaacgattgttttgccggcgcagcaaaacgaattgagaaataccctttcataatgccacgtatgctaatcgcattgcatgccgcaactcatccgccgtaccaagtgaccaatttgggaatgaccgacataagcagcaaatcttttaattaaaggtaattgtggtcggacaaagcactgacgaggcgactcagaaaatgctcaaagcgattcgtgcgaagtttcttcccatggcaacacttatttttatcgacaaggatcgccctggttagcaggatttatttagccatttttgataatgctttgattgtttcacatgcttagatcaatggattttgcggcaaaattcgcatttggcggattatgcgagtgcctacagacccggacagccctcagtgtttatgtgccgtgagatgtcttgtgaaatgccgatcgcaactctcgaggaactgcaaaagcgactggcagaactgtgagggagtctctgccggcgcatttgttaattattcactgccctatgggaattgaagccgctatttattattttcattgtttcgtttcgaaatttcccgatgggaacagtcacaatgtgaccattcgctatgcccgagggcatagtttaattgatgaataaactcatccgacaaacttacttgagaagcacttttattatctttgctctgttatcactccgtcttatgagtgatcattttccatatgttttggcaactgtttttctcctctctctctctttgcttctgtcttttcctgtgtctgtcagttatgcggtattttgtggccattagtgctgctttctcctggccattatccgtcgactcaaatcattcctcgggtatatttatgccccccccct

SEQ ID NO: 32344 - DNA, 1695 bp, Heterodera glycines
tcatcattgtgcgtttgatggaaatgaatgttgaaattgcgtgaacatgcgcactgttcgctgggtaatgaggcggacactgtggtgatgcccggctgatgggcattgtaaattaacggtgccattctgtccttgtcaatttgttgaagacacactgaatttattttttgaaattgcatttatttattttaataaaaaatcgttttttataaaaattacttaattcataatacaactttttatatgaaaaaattcatttttacacaattttgaattgggataggatcagatcggcgttgattgtacgacacggccgtttttttagggtagtcgatttccgaaaaatttttcggctcaaaagaccaatttttggaattttttaatttcctaaaaatttttcagctcaaaagatcaatttttggaattttttaggcatcagaatttcgatttccgaaaaatttttcggctcaaaagaccaatttttggaattttttaggcatcagaatttcgatttccgaaaaatttttcggctcaaaagaccaatttttggaatcttttaggcatcagaatttcgatttccgaaaaattttgggtgtcgaaattgcatcgctaaatcttaatgggaaaaaagccgacgtaccaaagtcgtagtcccaattttttaatttaatttaattaaatattaaatatttgccttaaatattcatgaataaaaatcaaattttaattagcattatttaaaactttgttttaccgccattttcgagtggacttcgtagctttacatcataattgtctggcccagtttggagctcaatgtcatcaatatcgtcaagctgtacttgaatcggcgaatcatggaaattcgtctccgctactttgtctaaaataaaatttagttttacaaaactaaaattaattgtttttccatttacagtacccaaatttgccgaaatattgcttgcaattccagcaggggttaccgtctctttgttgttctcatcgtcacctaaaagttgtgtggattacaaacattaaatttaagccagattactgtaggtcgaacgtgacgatggtggatctgttgtactgtatgttcgcctagtgtaagtgacaggtcgtgtactataagtggtaaccggttgtgtgctgaatgtcactggtcgtgtgctgtatgtgttggtgactggatctgcagtactgtatgtgttggtgactggttgtgtgctgtatgtgtttgtgaccgggtctgcagtactgtagcttggagtcggtaggcattttccatctggaccgaataagcagcgtggtgttactgtaggctgtgatacagttggaactgtcactgttggcatagttattgttggagatgtcacggtatgcacagtgaagaccggaacagttacggtaggcacagttaaggtcggaatggttacggtaggcttagtgaaggtcggaacagttacagtaggcacagttaaggttgggacagtcaaggttggtacagttggcgaatatgttggtaccgtaggcgggtctgttggtatcgaaggcgtgtatgttggtaccgtaggcgggtctgttggtatcgaaggcgtgtatgttggtaccgtaggcgggtctgttggtatcgaaggcgtgtatgttggtaccgtaggcgagtatgttggtttggtagggctgtatgtaggttct

SEQ ID NO: 32345 - DNA, 977 bp, Heterodera glycines
  unsure (1)..(977): unsure at all n locations
ggtggggggggggtggnatggtttaaatagaattccgagaaatttttgatcttatattgaactttgttaacagatttagtcagaaaaatggctaatataaaatctgaaaaaaatcggggtactaaaaatgatgaacaaatacaattattaaaaaaacaaatacattagtgaataactctccatctttaatgaactctcgaagtttttgtaattgaccttcaattctgtataaatacctgttcggccagtggctcggcatattttcgcaccacgtggttcagtcccaagtccaactcgtaaaaagtgagtgtctgctgaatttgtttcgccgcatcgcccgttgggtcgtggtcggagtccttcaattaaataaacgaatcgtttaaatgtgttatttcttaataacccacctcataatcaatttctaaacatgaaaaggtcggattttcgaagcccacatcgatgccggtgatggcgaagcaaatgctgtagtttttgtgggcttccagcggggaactgatggtcaaattggcatgggcatctctgttcagaatatacaccaatttttgacgttcagcctgaaagcattgacaaaatttagttggaattcgaatttaaaaccatttaatttttatggatttatcaacataatttttaattttcttttggttatggtcatatacaatcaaaaatatcatatcattcgccatttaagtctttttattatatgtttgtgattttaactcaagaaatttttttaatctcggcaggctcttgagataacagtaatagttttagcacattttcataaataaatttatgtattttctggtgaacataaattggtgataaagcccggttcgtcgtgtaaattgtccggatcagtcagttaaagtcgtatatcaagcaccgggtttaggtatcataaaaattagtcgtaaaatccttaccgctccgatgagtactgcgcgtccctt

SEQ ID NO: 32346 - DNA, 1127 bp, Heterodera glycines
taattaatgttcgttaattaacccattatttaattattttacattttttgttggtgatgcggatgttgaagcagcaaccttctttgttgtcccattttttggctttgatttcacactttttactgctgatgctgtggacaattcgtttttttttaaatttgattattaattgaaattatttttaaataattcattattttaaattaatattaatttttttgcatatttaaaaatccatttttaattcaccttttgcctcgagctgcgattgattttcaatggccttatagtgaatgggtgaagaattcaatttattgctgatcaacggggggagtgcctttgaaaaaatttatggaattcattataaaaaaaatcaggaaataaaaaaaaaaatttttttatgatttacccgaaaaaatgtaaaaaatatataaatctaataggattaaaaaaaccaagcagtttttaattttttttttttttaattttttcaaataatcgcaaattcgtatttttttttgtccacctcataaaaaacactcactgccgttatattctgtggcccaacaatttgttgatatgcaaatgcattggacgacaacacatcatcctttccctgctgattgtccatgcttggcccgtaaagtatgcggccctttaggcaaatttactttaattgaattaattagtttttttttcaccatttggctgctcgccaagccgtcaatttcgagctgttgttgctgctgcggttgttgcagatgcaactccatttgctgctgttgctgctggtggtggtgatgatgttggtgttgttgctcatggcatggctcacaaattgcataactgaagaaatttgaatcccaaaaatgaattatggaacttcataattaattaatcaattaattaattaattattggcaacaaagaaatattaatgaatgactgagtttaattgattcattaaattgataggttgattaattagttaattgattggttgaatgtttaaaatgaatgggtgtttaattatttaattgattgataattggttgatgaagtgatatactgtttgattgagtgattgaaagattgagtgaggattaatgatttgattgcttgataat

SEQ ID NO: 32347 - DNA, 948 bp, Heterodera glycines
tggctgtcatcagttgttatgctctaaaaatgattttcgggccgtttgagtatatgtgaggtatggacggtccaaaaaaatggctatctctttttttggcaatctggtaatagaaatctctttggaaacaatgacagtggctgtcatcagttgttatgctctaaaaatgattttcgggccgtttgagtatatgtgaggtatggacggtccaaaaaaatggctatctctttttttggcaatctggtaatagaaatctctttggaaacaatgacagtggctgtcatcagttgttatgctctaaaaatgattttcgggccgtttgagtatatgtgaggtatggacggtccaaaaaaatggctatctctttttttggcaatctggtaatagaaatctctttggaaacaatgacagtggctgtcatcagttgttatgctctaaaaatgattttcgggccgtttgagtatatgtgaggtatggacggtccaaaaaaatggctatctctttttttggcaatctggtaatagaaatctctttggaaacaatgacagtggctgtcatcagttgttatgctctaaaaatgattttcgggccgtttgagtatatgtgaggtatggacggtccaaaaaaatggctatctctttttttggcaatctggtaatagaaatctctttggaaacaatgacagtggctgtcatcagttgttatgctctaaaaatgattttcgggccgtttgagtatatgtgaggtatggacggtccaaaaaaatggctatctctttttttggcaatctggtaatagaaatctctttggaaacaatgacagtggctgtcatcagttgttatgctctaaaaatgattttcgggccgtttgagtatatgtgaggtatggacggtccaaaaaatggctatctctttttttggcaatctggtaatagaaatctctttggaa

SEQ ID NO: 32348 - DNA, 836 bp, Heterodera glycines
agttgtgcgttcagctcgcggcacgtcgcctccgattcgcgcaacgcgcgtctcacaatttcctccgactgtacagaaacgcgccattgtgcgcgcaatatgctcaaattggcatgcatttgcgcttcttgtgccgtgagttcaatttcgcgcttaaatttccttttcgtcatttttattgtccgtttgaatttgccttttgcaaaatgtccgtcgcctctctttcttttgtccgttctctcatttctctgtccaatttcttttgcaactgttctgccttttgcagcgattgcatcagttcctggtgcactttgctcagttccgaatgtctccgattcttttccgcccgttcgcggcacaattccgcctatttttttaggtaaaatcaattaagcttttttaaatattactttattttttcatttcctttttccccattttctctctttttaccttaattatcgccatttccgcttcttcttcttttcccgaaattctcttctccctttcgtcgtcgcacttttctccaattctttgcttttccattttttgtttaagcgtcaaattctcatttcgaagctcttccaacgaattggaaataaactgaaattatgaaaacgaaatatttaaaaaagaccaaatatttaaacaaaaagttgtggtattttttgttaaaaaggggggggggaaaggttagcaaaataaaataacaaaacattggacagcatggatttgctggtgaactaaggtttgaagctaaagaaaggatcagcagcaacaatgggttagtgtatggtaggacggcgaacgggtactgtatgtacatagtacagtat

SEQ ID NO: 32349 - DNA, 1351 bp, Heterodera glycines
  unsure (1)..(1351): unsure at all n locations
attgggtcacaaataaattcaagcctttttctcatgctgtggaaacgaagagttaatctcaatgaaaaggataaataaagtcagggaatatggtttagcattatcaaaataaagcataaatgaacggtgatatccactagaaaattttgacaaaagcatagtctacatttgttaagacaacttccgatattatcgtttgtctcaggtagatgtgttcaggtggtttaaaagaaagatttttgagagtttggggtatcttaaaattttaactaaagtgcaattcctattattgacatgtgcgcataaaactcctggaaggttttaccctattccaaaataaaagggacattgcttttgtaatcagaagaattgttgggacgttgttctaactcaaaatgccccgcgaattgggtcacaaataaattcaagcctttttctcaatgctgtggaaacgaagagttaatctcaatgaaaaggataaataaagtcagggaatatggtttagcattatcaaaataaagcataaatgaacggtgatatccactagaaaattttgacaaaagcatagtctacatttgttaagacaacttccgatattatcgtttgtctcaggtagatgtgttcaggtggtttaaaagaaagatttttgagagtttggggtatcttaaaattttaactaaagtgcaattcctattattgacatgtgcgcataaaactcctggaaggttttaccctattccaaaataaaagggacattgcttctgtaatcagaagaattgttgggacgttgttctaactcaaaatgccccgcgaattgggtcacaaataaattcaagcctttttctcaatgctgtggaagcgaagagttaatctcaatgaaaaggataaataaagtcagggaatatggtttagcattatcaaaataaagcataaatgaacggtgattgatatccactagaaaaatttgacaaaagcatagtctacatttgttaagacaacttccgatattatcgtttgtctcaggtagatagttcaggtggtttaaaagaaagatttttgagagtttggggtatcttaaaattttaactaaagtgcaattcctattattgacatgtgcgcataaaactccntggaaggttttaccctattccaaaataaaaggnacattgcttctgtaatcagaagaaattgttgggacgttgttctaactcaaaatgccccgcgaattgggtcacaaataaattcaagccttttttctcatgctgtnggaaacgaagaagtaatctcnaantgaaaggataaataaagtcagggaaatatgggtttagcattatcaaaataaagcataaat

SEQ ID NO: 32350 - DNA, 1590 bp, Heterodera glycines
  unsure (1)..(1590): unsure at all n locations
tgggatgtataaaggggattgtagaaggaattgtaagcgctaaattgtttgagaagcttttggagcgtaattaggacaattactctcaccattttttctagtattagatcacatgggattttcggcactctgataattgtagcgctcataatgggatgtataaaggcgattgtagaaggaattggaagcgctaaaattgtttgagaagctttttgagcgtactgggggggggggggaaggcccaccacgaggccgcgaagcggccgagtgagtaccttcggtgcaggaaaattattaaattttaaaaattttttagttgctttttaaatatgccaaaaaatgtaggcttaacttttttagtgaaaattcgatcactcatattttttgctaattgagcagaagcgtaccaaactttgcagggatactccccggtaaaggactaacttacactgaaatgagcgccgagctagctggctcaaaaaaattttcgaaaatctgagtctttcgtttttatttattttttgcaaaattaattcttaaatattttttcagaaagggttctgaaacgcaccaaattttatttacatgttagtttaggcactctgatgctttttctatcaaaaagggagatgaataaaatttttaaaaatttttaattcctttttaaacaggccaaaaagtttaaacttaacttttttttcagaaactgatcagaagcgcaccaaactttgcagggatactgaaaggaagagaaataacctattttaataattatctagtcagttcatttaaataatttttatccaaaaaaatttttttttgggttttcggggcagtccccctgaaccgatgcgcccagatttatggggagaccgaatccttccggaatagcttcactatagcctgtactttaattctgcgttggatttttgctccccataattgtttgagtaccccaaacggacacttgaaaaaatcgatttatttttgttttcggggcagtccccccgaaccgatgcgcccagatttatggggagaccgaatccttcgggaatagcttccctatagcctgtactttaattctgcgttggatttttgctccccataattgtttgagtaccccaaacggacacttgaaaaaatcgatttttttgttttcggggcagtccccccgaaccgatgcgcccagatttatggggagaccgaatccttcgggaatagcttccctatagcctgtactttaattctgcgttggatttttgctccccataattgtttgagtaccccaaacggacacttgaaaaaatcgatttttttgttttcggggcagtccccccgagccgatgcgcccagatttatggggagaccgaatccttccggaatagcttccctatagcctgtactttaattctgcgttggatttttgctccccataattgtttgagtaccccaaacggacacttgaaaaaatcgatttttttgttttcggggcagtccccccgatccaaagggcccggntttatggggngnccgnatccttccgccataaatgccctatagcctgtactttaattctgcgttggatttttg

SEQ ID NO: 32351 - DNA, 1239 bp, Heterodera glycines
gtgttaaagcgcgtgttgaactgtcaacgagccgttctcgtcgcgatcgggatgagcggggccggggaattagtcgcgagaatgaggaaaaatcacgcaaaagggaacataagtcacccaaaaagaagaaaaaggagaaaaaacacaaacggaaaagcgaaaagtatgaacttttttaaagattaaaactcacaaagttttgacggaaattatttttaggaatgacaaacgaagcaaagggaaatcatcgaaacgaacaaggagagaaagtgagtaagttgggatggagttggaatccgaggatgaagagttggcgatcgaacaacggagaaagaagcgagaggaactgcttgaaaagctaaagacagaaatgggcctgactgatcatgtgaatgagcagcagcaaaacgatcggtataattcgacgcgatgtttttatttaaattttgcattttcttcttcaacacagtatccaagaaaagacgagtgctgcttcatctccaaagcacacgtcaagcagcgactcttcgagtgattcggaagacaatggcagtggctgtaacaaaagcattggccctggaggatggtgaaagggcaggtgatgaagtaatagagtgtgaaacaatacatgttgcagactcaaacgaacaaaatgacaaatttatgtgtgtctattattaggaatgagaggagcaaagctcaacatagcataggcggcaatgcataataactaaatttcaggattataattcataatcaatacctaacttgcttttattttatatttacgtgtatattcaattgtctggtaaaatatttttgtaaataaaagaccaacacggcacgcacttaaagagctcgatgttaaaaaaaataccattaatttcaatattttgtggaactgtttataggttgttattgttctttttctggaataaaaatgaagatttacagtttattgcacaaactgcatatggtatttttaaaaagttaacctgacgcaaattatatagaaataaaatttggccacaaaattcagttttgatatgtgtgagtttatcacttataatcaatttggttgcctataaaacacttattaagcagtgatgaagtaatagagtgtggttaagatattagaaaatattcagataatctggatcattatgaaactccagtaagctttcttgaacctgattaaatttctaaacattcatagaaaattattagaccaatatacac

SEQ ID NO: 32352 - DNA, 854 bp, Heterodera glycines
aactgctcgttgtcctcttccaacatctccctgaccgtctctctgaattcgttcattccttccaacagtttccaattttcaaatgcccttccccatccgtttctctgcgcaaccaatgcattccttcgctgatccgcgaagaatccgatgctgagcacgggagtgccgctttgtgcaccctccagcaaagagttgtaaccgccgtgggtaatgaacagacggaggcggggatgggctgaggagggggaggcaattggaaaatgggaaaaagcaaagggaaaaccaaaaggaaaagcataggaaaaaggaaaagcataggaaaagccaaacactctttgcgaaggacaacatgaagtgtaagactttgaaaagtgccaaattttttggtttcttttgccaacacatcgacttaattggaaaagagctcacagagaatggcgggctgaggcgcccacgaagtaaggcgaatgttgggcacgttctcagccatcctccggctttgttcgtcgtccggctcgattttgacgatgaaatgccaatccggcagttccgcaaatgctccgatcacatttttcataaacggcgccggcaaaacgtccgttttgacggcggaacccatggaaaagaaaacgacgccctttcgccccttcagcagctcacttttgtacggctccttcgggggtcagattaaatgcaggcaaatgaggacagtgatgagcgaaagaagaaaggacctgcagggctttgagctcgggtgttccttcgagttccaatccgccgatgaaaatgaaattgggaaaaagaggccgaggaaagtcggtgaactcatcgacgttgacgaacacctcgaaaag

SEQ ID NO: 32353 - DNA, 985 bp, Heterodera glycines
cgatgaaggggggtatgtcgagacaccccttgcacatgtatgcccctttcccctcaacccacctttgacccgctgctcagccattcaatcgcttttggtgctaacttggtcagatagcagtattgggcgaacgtcgacttggactcggacaagaaaccgttgttgcgcaacattttaccgaattccgtccaccaattttcggatttatttttgccacttccgaataattcgtggcccaaaagcccattgctcttcagaaaaggaaggagagacttctgtaacattaaataattgtcattagttcctttctctttttttttacattttcactgccccttagaaaatcaatgggctttttcagtccgctccgtccgttgaacaattcgagcgcattgaacagctttttggcttcctctccaaagtcgaccgtcgtcggttccccgtaaattttcgcgtcgttccctccaatttggcaccgtttttcacaattgtcacagcagtcggagttcggcacgtccgggtgttggatggaattgtcaaaataggacaggatcagatagcgacgacagctcgtcgttgtcaaaaactgttccatgcggcgcagcatttccaatttgtggttttcgtattccttcgaaaggttgttgttcataatccggcgccttggacagaaaaatgggttatcgggttcaaaaattgcatgcgcacttttgcatcattatatcactgacggcataaaaaactaagcaccgactggggaacccatcgcggccggcacggccaatctcctggtagtaactctcaatgcatccgggtgctaaatttgttgcacatttaccaaagtgaccaatcagcttttccttccccccccccccctcctcttacctccgtaatgaatcactcgtcggacgtcctttttgtcaatgcccattccgaacgcaatggtcgcaacacaagtggtcgcccgatcaatcgcgaactcttt

SEQ ID NO: 32354 - DNA, 1055 bp, Heterodera glycines
ccagcgtattagtaaaagcaatggtaataatagttcctgttgaccaagtacatgctatatcgttttttaaaagtgctaattttaattttacagcttttatgggaaaaaattcagcatgactttgcttaaacgcaaccatttaaataaatttaacgagctgttcccgaaaaacctgtaaaattggcaccttcgaaaccctctaatggcattttttacgaaatgaccaagcatcaaccaaaaaatgttatttaaaatttacttagttttcccaaaattattcccagcgtattgttgaaagccatggtattaattgatggaagacaaataaatgtaatttaaaaataataaatttcctattttctcctgcgaaatcactgccaattcatttattgtcttcaattcttccaaattgtctcatttgtaatttcatgtatgtttgcactgacttaaagggctacccgacttttggggatttgcaacttggggacccgacttttggggatcccgacatttggggacccgacttttggggatccgacacttagggatcccgacatttggggatcccgacatttggggacccgacttttggggatcggacatttggggatcccgacatttggggacccgacttttggggaccgaacaacatttgagctaaagacacttaagaaaaccacggatatttggcaccccgacatttagggacccgacatttggggatttcaataaaacaaaaaaaatttaaaaatttaattctaagccacaaaattagacaaaattacgtctgctttagccagagttaattccattgcaaaaaaaattaattaatattttaaaaattaactctgtttccggactcaccgcgaggaggcgcagaattttgagcccatactaaccacaacactatagacaaaccacaatacattttttaactacagtagacctttttccaatttttatttaaagtgcctttcccaagggtcaacgggaacagaaatccgtcaaggacattcaacaagctccagccgactttgctgcctaaccaccaaatg

SEQ ID NO: 32355 - DNA, 1222 bp, Heterodera glycines
tggcatcgaggtgatttttctttacaaaatttttgatacggtaaccatacccccccccacctcgctggtaaatttttatgaaattattttttttatatgcattttaaaaattatcattttttgtattaataaaataaaataatggaaattaaacaagataaatgtcagaatctactgcaatgcttggaaaatgtggcatttgagctgacggagcatgtgtgccaactccaactgccggatgtgccgtcatcgtcttcggtggaaaaggtgggaaatgaattttttttaatttttaaaaatcatattcggcggtgccaataaaaaaaggcaaaggaaaatttaatgtgtattttaggagaattaataaaccaattttttattttgtccaaaaaatggtcaacttttgcaaaaagtgtgcaattttgtgggtgatcgtgatttgtgaaggtttttgtttaacaagtcaaaatgctaaaataactgatttttagatttttttttattttgtattatttttatttactttttaaatttcggcatctttttttaataattttagaagaatttttttgcgaaaattttcgcgcaatatttattttgattttttctcaactcagtccctcttttggcacaggaagcgcctcaggtgcaatgcgtgcgcaaactgcaagcagtgattggcaagctgacacaacaattgcagcagttggacagtgccgaggagcgccgggcagtgcgggacaaatttgttgtaagtcaattataaatatttaaataacaagggaacatttcaaaaagagagagagggggggggggggagagagagcgagaaacagagagagagcagtcgattttaaattttttttttgctactacaccaaaaatgatcaaaaaaaagtaatcaaagtttcgaaaaaccgataaaaatgatcaggcccgtggcggactccagctcgttgggcttccgcgagaaaatgcgcaacaattgggcgagcgcgagccaccggccgaggcgtacaaccagcacaaaagttcatcggcggagcgccgaattgtgcagctgcaacagaaaaagcatgacggcgctggtggtgatgatgccgaaacagcggcggcgattgtgccagaagcggatgccacaacaagaatggtgttggcattgaggtgccccggatgggagaggatgttggaaatgatcgatcacccccaggacgagactgat

SEQ ID NO: 32356 - DNA, 1281 bp, Heterodera glycines
  unsure (1)..(1281): unsure at all n locations
ttttattctccttttattcccacaaattttntgtgtcccaaaaaattggatttttcacgcttcaacaatttttcatttgttattgcaaattccaaaatggaatgcgtttatattatggctgaagccaacaaaatgtcaaaagcaaatgttaaaggccaatgaaattttaaaaatttagaaagatttttgaaaatttttagcccccccccaccattttgaggttttgtgagactaattacgtatcattttttaatcatcattaattagcactgatcaagcaaattccactctttctgtcccttatgtcaaagcaaccagtaagagatgacagacaattttaaaggccaatgaaattttaaaaatttagaaagatttttgaaaatttttagccccccccccccaccattttgaggttttgtgagactaattacgtatcattttttaatcatcattaattagcactgatcaagcaaattccactctttctgtcccttatgtcaaagcaaccagtaagagatgacagacaattttaaaggccaatgaaattttaaaaatttagaaagatttttgaaaatttttagcccccccccaccattttgaggttttgtgagactaattacgtatcattttttaatcatcattaattagcactgatcaagcaaattccactctttctgtcccttatgtcaaagcaaccagtaagagatgacagacaattttaaaggccaatgaaattttaaaaatttagaaagattttttaaaatttttaggccccctaatttttgaggttttaatgaagcagagagactaattatcatttgttgatcttcgttaattaattatcactccgatccaaattccattctgtcccttctccattgtgtttgttccattatcattttatcaatttcttctctctttttactgttcgtgtgttcctcccgctgacccacaaaatgtccagcccacgaaatgtccaagtctcgaatttgagttttttattattcagatgggcctaaggttaggcaaggggtaatataaagggtatattcgtattcagcgaccccgaaaaccctaaaaatcctaaattagactcattttgtttttataaattttgaaaaattttggacatttcgtgggtttttactcttttggacatttcgtggcttggacactttgtgggggtgccgttcctcctcactcactcattgaagctcataattcacaaattcgtttaaaaactcaaaattttatcgctgccaaatttttttatgagggaaa

SEQ ID NO: 32357 - DNA, 2196 bp, Heterodera glycines
  unsure (1)..(2196): unsure at all n locations
aaatttccccttttatcggatttgtcaagcaaaaatatatcgcacctcgctttttcagatcctacgaagatgagcgttgccttgcgttaactgcgcggggaagaacttggccagccgcttgcgcccgcctcaacggccaaaccgacgacgacggcgaagaaatgagcagccacaagaggcgaaagtgaacagaaacgccaaaacgactcaatgcctgtgtaaaaattcaacttgtcaacaaatgttcctcttccgatacaatttgtttccatttttcgtttgcaaaagtcacaattatttggtattttgttgttgggatataaaaaaggtttcacacgggctgtatcagatataggcctacccccttttcaatgggatgaaatttcctataccattaggactcaaatggggcgggactttttaagtcgactttggagatttccgtgatttaaattcccatcccgtcatttccaaattacgtgccagtccgattgaatagactctcttcacacattcggtgcaaaatgggcaaaattagtatatttaaaaataaaacaataaaagataaaacaatatgattgcaaaattggcattaacgtatttgcgcgagatcttccaccagtttgagcacatcttcgggccttgccgtaacgcctgaaaaaacatatctaacaaataagtgccttgtttggggtttttctcactttcgtccattgtgtcgggttccctccaaaggcgtaacccatcgacgacaatttccaacatttcacgcggctgaataaacaatttgaactcgattaacccttagttgtcacaagggcctaacaaaagaaagtccgaccatttcagtcactgtttccaccaaatccccgtcaatgaacccaatgggctgctcattgcgccgttcggtgaaaaaggaacggtaaatgttgtggtcaacgcgaaggctgaaaaagaaggcattgtgtacgacggaatgaatggcaaaacaacttgccaattgtgtgtttttgttgtgattgccttttgcaattcatggagaaaactaaaaacaaaaacgttttaatgattatcccaatccgtaagacttaataaatcaaacgtttcaaatcacctgtaaatgtggggaggcacttgcacaatggtacccaaaccgccgtcactcgtccctaaaacgtcccttttgtaaaaggagtctggcgcattaacatttcctcatttttcattttgaaatttttttttgtaaattcaatttttaataaaaaaaaataaaacagttggaaaacaattaacttatggttaaatttcatttttccattgtacgacggtaaaactatttctcctctcccgccccgctcaatataaactcattgactctccaaagcgtaccgtaaattatcggattcgaaaaaagcggtgccgacgtcgccgtcggtgtcccattcctgccagttttgccaccattttcacaaaacgttgccgctcctccgtcctcaatttccatgagtccatgcgccgtgccacaatccctttccctttgctgggcggaaacaatggagccgcgacggaacacattgatcatttcgccaaggtaatagaggccgacttgctataaaagaggacaaaaaccatagtgaaaccctttgatgtcttgcgactaacggacaccttcaaccgcgatcgatcctcgtccgattcggcgttcacgtcgattttgcagcagtaaatgttgtggttgttctccgccgcgagaaaagtctccgagtcgataatttcacaggcactcgtccattccgtggaatagtccctcaacatagaaaaaagcgattattttaatgttttttttttgattagagaccagactgggatcccgacctcggagtccgttccgatcgtttttcaaaaatcttcgggattgatcgggatcgggatttggttgggatccttccaaccccacctgtccggtctctagttttgatttgtatggcaacacctggccaactcttcgaaagtcgagtcgaccgctttgtagccgagcaccgtaacggaacgcatcaaatcggccaccagcaccacgtcgcccttggtcttcaggtaaagtgcgagaatgttngtgaaagtggagcactccaagcgcattcccntctcgggcgtcactcgaacagtcngacggtgttattgacagtgcaaatcaat

SEQ ID NO: 32358 - DNA, 1774 bp, Heterodera glycines
ggcaattgcaaggggttttaaggccttaaaaagccaataaataagttaatgaggtgttaattaaccctgccaggtgctacaaaaagtgtgtgtccggcgaagaggattttcccgtggaaagtgtcgcgtcggtttcgctttttttcctatttgttggataaaagcggaaaatgtgcaaaaaaagttcgtatggcaatgaatggcacgcaattttcaatgggaagagcatgcttcaatatttgactttcaatttttaaaataaatatttttaaattctaaaattatgaaattggctattttttgattttgaaattcaatttccaatttcaaaattggccctacaattaaagaattcattttaaatcgctctccctcatattttcagatggttggtggtgtcgaaattgacataaaaactagagtgccacgggaccgggaatttttgccaaaaccgggaccgggacttgccgggacctgagaagccgggaccgggaccgggacctcgattttttttcaggaccgggaccgggaccgcaagaaaaaccgggaccgggaccaaccgggaaattttaaaaattcaaaaaaattttaaaaatttaaaaaaaattcaaattttcaacttttttcgtgtatttcagaccatagggagctcagcaaataaaaattgaagccctagtgatgaagtgtgaaaacatccaatgggacataattacgaaatggcatttgaaattatgatgaaattcatggctttaattattttaatattatttattaatattttattattaagaaaatctattgatgatcagtttcacttattgatcgcatttttggcaatgcttctccacattcattaaaatgaaataaaaaattattttccgaagaaattagcttaattttaatacaaatatatatattaaaaacttattaattaattatttattatactttttttagtgatgctttttctcctttttatatttgtgttcttaatcataaacaattcaactgacaaaacattgtcagttaatctgtgtaaaaaatgtcgaccaacttttgctgaaatatttggcgaagaatggcaaaatgaaataagaattggaggagatgaaaatgaaaatgagactgatcaaaatgcaaattttcatcaaaatgatcaaaatgaattaactgatcggacagatcaattggatgttcaacaaaaaatcgaaattattcacaaatttcatgcaattagagaagcaattaagaaaggaaaatattcggcaaaaaattggaataaaattgagcaaaaaatagcggaaaaattgggaattaatcgaccaaaaatttataaatggaaaaaagaaattggattaaatataaaaaatgaccaaaattattacgaaatgaaaaagaaggaattcattgaacgaatcgatgagattaaaagaacgtccgaaaatggaaaacagaaacaatttgcgaaagagttgggcattagcaaagtgacattaagaaaatggaaaaaggaatttggcattgaaatgagcaaaagtaaattttaaattaattttcaatttaattattaatattaaattttattatattcttaggtcgaattcgattcaccgatgaacaaaaaatgagcaaaatgaatgattattatgaaatgaaaaaaggaaacccttctttaagtgacaaagaaattgctgacattttgaaaattggaactgccactctaacgagatggaaaaaggaaaataattcgtaatttttcgtttttcttatttgt

SEQ ID NO: 32359 - DNA, 1214 bp, Heterodera glycines
tgcttaaggttttgaagctgcaaacgccggtcaacgcagtttatctgaagactttggcggtgatgagtcagcagcaatttgcggagagaaaagtgatgccgaagagggaatatcagaaggaactgtgagtggtcgggggggggggggaatttgtaccaaacactgatcagtgatcacccattggcatcgggagggggggggggacttttattgccggccatccttttttaccgtacttattttctccatcattccattacgcattaccgtaactcattccccaccattcattaaatcgtatatttcagtctttcttcaaaattacccgttagttcattacagttttcctcgttctttaccgtattctttttgcttctcttacagtacgatggttccctcatggatgatttccgctagcacgacgacaacagctgcggcgtcctcttcgaccagcgccgccagtggccaatcgtcgcccggccccgactcgcatctgccgcccttccaccaacatggcgacgtcggcttttgcgagttgccattggaggtcgaaggcaccagtaaattgggcagcgcactgctcaaacacaccgccacccgctcgtacagctccaacccacgggttcgtttcgcatttttatgatcactcatacaaattctgatcagtttttgattgtgatttcctcctttccctaggaattcttcaaatttggccgtaagccaaccattgccaagtcgcgcggcgtaatcgaacagcaacagacggacgcggtcacaggcggtgccgtcggtgcgagcgtaggcgactccgcggcgggtccgtctggcagcagcggcggtgtttcacagttgcgctaccgcaagtcaggcggaagcggcatgggagcggggcggtctggcgccgtttcaaaggacgcggagagcaggcgcaaatcgctgggcgcggccgccgcagccaatgctgtcgctgcgggcacaattctgcacagggacagccccgtgggcacgcccaccggcagcgtaacgggcgtaagcagcagcggaaggctgagcagcgcagctttggtgggtgtaacgaaagaaggactgatcagttcacactgatcagtttggtcaatgttttgctttcttttaggcggttggcctcgttgcccccagtgacattccctactatggcgaagtcgaacccccggaggagccgcccctggagcagg

SEQ ID NO: 32360 - DNA, 1733 bp, Heterodera glycines
cgagggcacgtctaacgtccaacagttcagatatgtcataccgtcgagacgccaaagaactgccgcaagagcgggcggagagacgtctgcgagccgtcgaatggctcgcgagagaactcatgcgccgactacagcagcagcgacaacgccgaaacaatgggcagaaggacgacgatgaggacgagcacttgagtgtccagctggaacgctatgccaacatgctggcgcggttgtcaggccgtgaagccgaacgactacagcgacgcttcccaaacttgcctgctcctcgccgtcgaaaggtggggaacagtttgggaggcagttcgggaagcaccgcggcgcgcaccgaaggacgcaaaacgaacgaaatggcgcagatgagccggagggaccccacacttcaccgggagatccactcccgactgacaatttcgatccctccgccattttccctcgcaatttcccccatttatttttgccaatttttcattttattcacaattctatttctctccctctctctgtcctttgcctaccgtacccaatcgtctcacttctccgaattgcaaagtgtttatgcatttcttcgccattttctcatctgccaattcatccccttttttgttggcctttggccgtcacttatccgaaaacattttctttgtcccaatttttgcacattttccatttcattcattcattcattcccccctttttccttttgcattaccattttgtttatctgatcggcctttggccgattcattttgccgtcttttcttttggattgtattcgccacatttcttcgggggatttttttcccccagtcccctcccccctcccttctgtcattgcgtaacttggccatttttcattcattgcgtttcattcgccaatttgtaagggggctcctccccctgcgctcttccgtcccgtcctcatttttccttttgtgcctaattatatcgcattttcaccattttgttttccactaatcaccgatggggagttgactcccccaaatttcaatttcccccaccacaaatcgcggcattcatgttttatcccctgccgtttgtcactgtcaccctccttttcttcggtttaattacccaagtttgagctgcttaataaattgtgcttttaatctgtgtgcttcaacgggtgggaaatgaaaaaagggagcaaactcccttcggacgaattcgcctttgcccacggacgggctcgcgcaatcgatcggtcacacgggactccctcacttggagtgcccagctcgccttagccctcgtacaggctcagcacgttaaaacgggactcctgcctccggagtgcccagccgtcccattttttctctcccttccccctcctcaacgtcctctctccccctccgagagtcggactacggacctcgtcagcgcaacacgggagaagcacactcccggcagttcaacttgtgggattggccacggagtcccggcttctccaaattctaagtcggtggtaccgttattcacatcactcggcgccctcgcctgcgccgtttgctgccagcattttcattagggagtcaatttctccctcacaaatctttgtttgcctccccgatccctccgcctcattccccttgggaaagggaccccaacggaatcgcgaatccgcaccgcaattttgaagagtgaggcggcgccagtggaaagggagaaactcccgaccaaacacgagacggagt

SEQ ID NO: 32361 - DNA, 1552 bp, Heterodera glycines
  unsure (1)..(1552): unsure at all n locations
ggacgaattggcacaggcggaacaccacgagccggactggggcgagcgtgcactgcgccgcatgttctgccaagtgtggacgagcccggcggagcaaattgtgcacgttgttgcacaaattgtggaccgaattggcacaagtgggcaccacaccgacccattgcattcattggcactgaccgtttagacgacagaaaaaacttttttggacgaaattgtgccaaatcatacccaattatctttttccgaatttgtatggagaaagtcgacggagtttacatatttactccatttctcctcctttcgggtccgttccctcttggagatttttaaagcaaaacagaattttctcaaaaaaataagtttttttcttaagcccttgagaaaaattcattttttcttaagctggaaaattttgctaaacttcttgtaaacatacgcattatttttttgttttttaatttcattttagaattttcttccagaaattggggatggcataatattaagtgccatccattccatatgaatgaatgcgtcccgttggagtttcatcgaaatgatcacattttgagtttttattattatgccccgtagaatctgaccctgctccggtggatgcgttggtcctccgtctgaacagccaattccccggcggtgacatcggcgtgctggcgccctttttcctcaactttttcacgctgcgcccgggccaggcgacctttttgggacccaacgagccgcacgcctatttgtcaggaggtgggaaaagctaccccgttttttgagtctatccgaatattttggaagtggagtcaaagcgaagcgtatgatgagagaaccctccctcctatccgaatatatcttttagtgcgatttacgtgtcgggactggaataaggggcgtgtacgtacccctcccgcccctctaatagtacccccactataaaattcctcccacttatttgaaaaatttagtttttttaattttctcaacgaaaactaaaaatacaccatccacatcattggcaccctcctttcttctccaaaatttggttgaaaagagtgagaaaatttagcgaatacagaataagatgttgtcgtagttcctaatagtctgagagattaccacgaacaaaaatccggcacataaaagccaatgtgatatgtaacagcctgaatatgtaaaaattgcaattttccgattgcgtggaatgcatggcgctgtcggacaacacaattcgtgccggactgaccccgaagttcaaggatgtgccaacactgtgttcgtcgctcacctaccgcatgtacgcgccgccaatctttgagcctanaatgctgccggacggtgtcattgaatacggtccaccggtggacgaatttgcggtccacaaaattgatgtgatttttgggaaggngcgggcacttgattaattggcatcaatttgaattttgagttaattgcgtagcactacacattggngatttcatttttgctcaaaagtaactaanattntcatttttttcatataatttttgtccaaaaaatatga

SEQ ID NO: 32362 - DNA, 1030 bp, Heterodera glycines
aatagctaaagcaaaacgcgtgcatgtttgaaagtatcgttcataccaataatgaggggtttattttaaatgaaattttatgataaaccttattatctcagaagctatttaattgattcggatgtttttatcgcggttaattagagcaccgaaaactggtttgaatcgtgaagtttatcatttctaactcacttctcaaaattgttgataaattgcaaatatatttttccaaaagtctgttgacactttctgaaaataaattctatactcatgtattttccacttattagattttgcaggcttattgctgcatgttctttgacacttcttcaaaataacctatgccctttattcgttcaaaacagcatctttgttgtttcgctttggattgacaagcccgatgataaatagctcgagcgcaaaacgcgtgcatgtttggaaagtatcgttcataccaataattgagggtttatttttaaatgaaattttatgataaaccttattatctcagaagctatttaattgattcgaatgtttttatcgcggttaattagagcaacgaaaattggtttgaatcgtgaagtttatcatttctaactcacttctcaaaattgttgataaattgcaaatatatattccaaaagtctgttgacactttctgaaaataaattctatactcatgtattttccacttattagattttgcaggcttattgctgcatgttctttgacacttcttcaaaataacctatgccctttattcgttcaaaacagcatctttgttgtttcgctttggattgacaagcccgatgataaatagctcgagcgcaaaacgcgtgcatgtttggaaagtatcgttcataccaataattgagggtttatttttaaatgaaattttatgataaaccttattatctcagaagctatttaattgattcggatgtttttatcgcggttaattagagcaccgaaaactggtttgaatcgtgaagtttatcatttctaactcacttctcaaaaatggtgataa

SEQ ID NO: 32363 - DNA, 1362 bp, Heterodera glycines
ccccttttgggcaatttttggtggtaagaaggggtatcccaatttacaccggcgtcccgggtactacggtggaaaatgaagacccgaaacaagtgaaggaagccgatcaaaccgaaatcaccacacgtccctgactgtacgtaaaattccagtttgacaatgagcagataatattgaagaagcaggggaaggtaaaatgcagtgcaactaaatatgtgcctaccagaatttccgaagccggagtttgagaagccgtcatttccgaagccgccgccaccgcccgaagtgggactggtgacggaaggacgacgctccgattgaccgaatccgccgccagaagaaaagtcgttgttggagaagccaccgcccccgtcgctgtcctgacgattctgtcgaccgaatccgccgccacctccgcccccgcggcctccaccgcgtcccccgcctccgccgtcgttccaacgattgcctctcccaccgcgacggttgccatccgactgattctgtgtgtcgccatctccgaagccttgaaatgacaataatcaatattttccaaggcaaatttcaaaaaaatcttatattagaaaatcttttacgaaaattctttaaaaaaaaattttttgaaaatttttttagcgattttttgaaattttatggcgaattacatacactaaaacattaaaaaggggtggggtgtgaaaagttttttgcgaaggggggtcggccgctgagattctgatgactttttttttcaaaaccattttttgcggcgcactttttccaaaagaaaattcggggacatggggccggcggagccgataggtgccgccgggaaatttttgcgattttgagccaattttttttaagaaaaattgagatttttgggacttcgttgaaaaatttttcaatgatttttttcttgaaattttctcataaaaagaatattttaaaaaattcgggggggggggatgaagtgcactattttagtttcaaaaaagattgaaatatgattcgaacgaatagtttaacattggctacttatggcgaatttaatggtaccagaatttccgaagccggagtttgagaagccgtcatttccgaagccgccgccaccgcccgaagtgggactggtgacggaaggacgacgctccgattgaccgaatccgccgccagaagaaaagtcgttgttggagaagccaccgcccccgtcgctgtcctgacgattctgtcgaccgaatccgccgccacctccgcccccgcggcctccaccgcgtcccccgcctccgccgtcgttccaacgattgcctctcccaccgcgacggttgccatccgactgattctgtgtgtcgccaaagccttgaa

SEQ ID NO: 32364 - DNA, 1052 bp, Heterodera glycines
acaatgatttatttaaccttggtttgcttaaccatggttaaaaaaatttttgtaaaaataaaccgcggttaaggcgttgaaaccgcggttaatttaaccgggagcagggaataatgccctaggacctataatgagcgcccgtagctcagtcagttagagcattccacacagtgaggaaaggtcgtgggttcgagtcccaccgggcgagttatcttttatcttctacaccagggacctaatttagcaaaatgcattgaaaaaaattggcaaaatttcttaaattttggcaataatattttgtttattctttttttttaccaaatgttggtttttgcgataataagccattaaaattgtctccctaaaattaaaaacaaatttttaattttatttattatttttttaaattccaaccagaatcatatcgccaaaaaatcctggagttttagctgttgacattttgctgctattcgctgtcttgatgagcgacacaagagcataccgtatatgctctaattatagcccagtctctattaagcccgcagtctccaattatcccccagtgtacgaggtgttttgaaaaataatccctctatcataatcccccagtctctaattatccccccttttctgaggaggttgaaaaataatcccccatgggctataattagagcatatacggtatgtgcttttaacgggtattgaagtgcaaaaaaagagggtgcacaaatttttgctgccaatgcgaaatcaatgaaattttggccactcaacgcgacgaaagggaacaacaaatggccagataaatgcactgactcaaaagccgaaagcagtgccaacagaataaacgatgtgccatggagacttctgaataggaaattttgttttttttgatgcccaaaaattcacttaaaaaacccttatcgggactggaaattcccagtgcttcttccttaaggtcctgccagaaaatattttgggtttatattttaagaatctcttaaaaactcagtaaagttttcaaaaaaaaacaaaataaaaaccaagaattt

SEQ ID NO: 32365 - DNA, 1716 bp, Heterodera glycines
ttgtcttatgattatcatcatgctgtttgactctctcacatttattttgtacctaaataatcaacaatttactgataattaatgcattaatttcctggtccatcaacggttttttgtgcaccgcaaaccctacgaatttcatcaaaatgtaaagaatctttatcaaaatcacacacaaattatttatcattttttgtctgtctgcttatcctttggcgtgcctcgccaaaaaatttttgtgtgatcgatcacaatttaatgtgtgcgtcagaaaggtgatcagatggggcagaatgggagtgaaatgctcggaaaaatgacagtgttgactgatcactcgacaaaggtagctttttaatatacaaaaaattggaatggagaaaattttaaaaaaagttaataaattattttcaaataaagaagaaaattttttttcaaatttaccaattgataaaaaattatttttaaattaaaagaaattttttgggttttttttaattttaaaaaatgattttgtttgtaactgttgttttttatataaatcaatgggttgtgccgaagtacattaccaatctaagcatgaacttgtaccaattttctatcagcatattttcataattaacatttttgtgaatttaatatacaaaaagttctttttattattaatcctttaccatagggttcagccccgaccccgagctccccgaccccgatccccgacatttttgggcttattccccgccccgacatgtcgccccccgaggtccccggcccccgactttttgctccccgacattaattcggggaattggggactccgagcattgtaaaaagttaagttatttcaacaaatatttaaattttacccaaacactaagccaaataaaaaattttcatatttcatatttttttaattaatagatattttaaaacttaacttcacatatttttcaatttttatgtgttaatagatttcatccaattaattacttctaatggcttcaaaagcatctgatatttggaattttttcacgaaaatttcttcagaggttgctaagtgccggctttgtgaaaaccaattagcgtgtaaaaaatcgtgcacaaaaggattgtgggggcattttaaagcgaaacacgctaaagaatttgaaaactatgcaaaaatccgacccgtcaacggtaatacaagcttccttttttattgaatataaaaaaaattcagaaaaaccaaggcattacaaaattttttggcaatgaagacccacaaaaaaaggcggatgaacaaattgcaaggctgatgataagaacgaattgctcttttttatttgttgaggcaccggaattacagaatttgttctctttggcctacccgaaactccaagtaatattttttacccatttttactattgtcatattttttaagcttcgccgcaaagattattttcggaggaatgtaattcccaaaatggccgatgaaattcaacaaaaaattgttcagggaattggtcaggattttttttctgtgacctctgatggatggtcgcaaattacaaaatcaccagcgctcttaaggttctataatccttttcatggattatacaaacagactttagcgttaccgtacatcatataaatgaacatttgaacggcccgattttgtacttgatgtgattccaatgacaaatcacacaggagcagacatagcggaagaaatg

SEQ ID NO: 32366 - DNA, 1142 bp, Heterodera glycines
tatcagagtgcgaaaatcgcatgtgatctagcctagcaaaaatggtgtaagtaaaaatcgtattacgctcaaaaactcctcaaacattttagcgctcccattcctctacaatcgccttatacatcccattatgagcgctaaaatatcagagtgccgaaaatcgcatgtgatctaagcctagaaaaaaatggtctaagtaaaaatcgtaattacgctcaaaaagcttctcaaacaattttagcgcttccaattccttctacaatcgcctttatacatcccattatgagcgctaaaattatcagagtgccgaaaatcgcatgtgatctaagcctagaaaaaaatggtctaagtaaaaatcgtaattacgctcaaaaagcttctcaaacaattttagcgcttccaattccttctacaatcgcctttatacatcccattatgagcgctaaaattatcagagtgccgaaaatcgcatgtgatctaagcctagcaaaaaatggtgtaagtaaaaatcgtaattacgctcaaaaagcttctcaaacaattttagcgcttccaattccttctacaatcgcctttatacatcccattatgagcgctaaaattatcagagtgccgaaaatcgcatgtgatctaagcctagcaaaaaatggtgtaagtaaaaatcgtaattacgctcaaaaagcttctcaaacaattttagcgcttccaattccttctacaatcgcctttatacatcccattatgagcgctaaaattatcagagtgccgaaaatcgcatgtgatctaagcctagcaaaaaatggtgtaagtaaaaatcgtaattacgctcaaaaagcttctcaaacaattttagcgcttccaattccttctacaatcgcctttatacatcccattatgagcgctaaaattatcagagtgccgaaaatcgcatgtgatctaagcctagaaaaaaatggtctaagtaaaaatcgtaattacgctcaaaaagcttctcaaacaattttagcgcttccaattccttctacaatcgcctttatacatcccattatgagcgctaaattatcagagtgccgaaaatcgcatgtgatctaagcctagaaaaaaatggtctaagtaaaaatcgtaattacgctcaaaaagct

SEQ ID NO: 32367 - DNA, 1412 bp, Heterodera glycines
agaagttacatcagaaatttttgcaggtacaggattcataagacgaaggtaactgattgaaaggtatatttttgtcatttcagaacaatgtcttcaatgaccaaatcttttaccaacaaattggcttcagaaaagtcgccctatttattgcagcattcgggaaatcccgttgattggtcagtgttatgggtacttaaggagtttaaggttttaatttaaaataactaggtatccatggggtgacgaagccttcaagaaagccaaagaattaaaccggccgatatttctttcgggtaaatatcaaacatttttacataaagtttcacttcatttagtcggctattcaacttgccactggtgtcatgtgatggaacatgaatcgtttgaggatgaagcaattggcaaattactaaatgagaattttgtcagtatcaaagttgaccgagaagaacggcctgacgttgacaaactctacatgagctttgtccaggtgggtttttaggtaatttattttataaatttgttgagggtttcattcagagtcttacgggaggcggcggatggccaatgtctgtctttctaacgcccgacttggagccgatcaccggtggaacttattttcctccaaaagattcaatgggtcggctcggattttccaccgttcttcgaatgatttccaataaagttttttctttttgttttcttatttatatattttaattatgtcagtggaataataattcgcaagaagtgaaagagcaaggccgggaattggccgaagccattcgcgaaggcattcaacaggcaaagtcgtcgcagcttccaattgcggacgaagccgtacagaaaagctatgctcggcttgttcgccaatttgacaaggaaaatggcggcttcggttcagcgccaaaatttcctaaagcaggtcccctaaaaacattcaattctactgtaattgagcattttagttgatttggactttttattgtatttttcggttatcaaaaaatccaccgaagaatcggataacgctttgaaaatgttacgactgacttttgagaaaatgttttgtggtggaattcatgaccatgtcggaaaggtgttatctccgctactttaaaagtttttttaaagcaaatttagggattccatcgctattccgtcgactcagtttggcacgtgccgcactttgagaaaatgctttacgaccaaggacagctgcttcgttcatatgcccacttttacatgataacgggcgagcaaatggcgtttgaagcaatttgtgacattgctgattatattgccaccaacctaacgcacgctgtgagttccattccataaattcgtttgaaactgaattgatgtctacaacagacaattttttcattttttgaaaactaactaaaaagcag

SEQ ID NO: 32368 - DNA, 1815 bp, Heterodera glycines
ttcattttatcagatttggaccctccaaatcaggacccttttgataaataaggacatcgaagccttttacaaaatagaccatttttattttaaaaatgctttaattatcgtattttattccaagaagcaaaataaaggattttttaattaaaagatgtattttatttaaaaataaattaaataatttttatacatatttaactcactaaatattaagattcgttttaggcaaatgcctagaatttctgcgcacttaatacacataatacccccaacaaattttttttccttgacaagaatttttggcttagaaattgtcctcctcatcctagatttatctaataatctgcaaacaaaaaaaaaattgttaactttcaaaaaaagttatgaccagaagttttttcgatcactttttgtcgtaacttttttttaaattaacgaaatttttttgaattttaaagataattgatagataaattgttcaaaattagtatttaactaaaataataaataggcaaaatatgttaggcctcgggtgggcatagaacccacgctcccaccctgtccatgggcagcagctctcccattgagctaccaaatccaagggttttccatgttttaaaccacgcattcagctgcttccttacataaaatttttcaatattcttcgattaaggaaacaagcctgcattggtgccgccttttcagtgccaagcaaaagcaatttgggtgccgatggtcgtgtcactttggttggcatttgggtgctaatttggtgcgacattttgtccaacaaaggtccaagctgaggcgttagaaccattgatgggattggcactggtattcgtcgttgggaagacaatgaaagtgccgcattatcatcatcagcttcctcggatgagcctgaaaattgtcaaccgggatcccatgttaaaaatttagattatttaatccatagatcttattctgtgatttttgtgcatatgaataaattctttctaagaatttaaatggttttagaatcaaaattttttaatcaagtgatcaattttcaaaaattgagcatggcactttttacaggctctctttaaagttaaaattattaagtagcacaaaaaaattccatttgaatttttacccatgcattttccagtggaattgtcgtattcataacataggcaaagataggcaccaggcgtgttctgttaaaggaatcatggaattttgttggaaaatgtacaaaatttatattataataaggcaaataaaattaataaaattcattagttaagttttattaattcgaaataaatttttttgaaattatcaactgcaaaaaatctttaaaaattggaaaatgtgtgatgaaaaaaatcttcgagttttaccatacaatcgggctgttcatttgggcatgacactgattcatcttggcattcatcgatgtcctcgtcacagattggtgcacctttccatccttaaaaaataatataaaatttataaatgttttaatttaattgttaactaagcaatagttaattttccatttttgttttttaggtagtgaaaattctggtaaaatcatgaaatttttacttgccaaacatctgacctaacttcttacagatgagcgaaatttcgtgatcggagaggaaattccccgacaaattaaaatctataaaatattcacaaaaaaagaagaatattaactaatgcagaaaagcgaaattttgtcttaattaatatgaaaaataaaaaaaaaaatcattattgaggaggcaaaaaatttttgactttggccatttttatatgttt

SEQ ID NO: 32369 - DNA, 1177 bp, Heterodera glycines
aaaatgaaaaaaaataattaaaaaaaaaataattgctggtgtgggtaagggggaaggactgtgtttcctccaggcaaaaaatttttaagaaaatttaataagcatttgtagggtttttcagcagtttcccctgcaaaatttggtgagcttctgatcagtctagaacgttgtgtgataaaatgaaaaaaataatttaaaaaaaataatgctggtgtggtaagtgtgaagaactgtgttcctccaggcaaaaaattctaagaaaatttataagcatttgtagggttctcagcagtttccctgcaaaatttggtgagcttctgatcagtctagaacgttgtgtgataaaatgaaaaaaataatttaaaaaaaataatgctggtgtggtaagtgtgaagaactgtgttcctccaggcaaaaaattctaagaaaatttataagcatttgaagggttctcagcagtttccctgcaaaatttggtgagcttctgatcagtctagaacgttgggtgataaaatgaaaaaaataattaaaaaaaaataatgctggtgtggtaagtgtgaagaactgtgttcctccaggcaaaaaattctaagaaaatttataagcatttgtagggttctcagcagtttccctgcaaaatttggtgagcttctgatcagtctagaacgttgggtgataaaatgaaaaaaataattaaaaaaaataatgctggtgtggtaagtgtgaagaactgtgttcctccaggcaaaaaattctaagaaaatttataagcatttgaagagttctcagcagtttccctgcaaaatttggtgagcttctgatcagtctagaacgttgggtgataaaatgaaaaaaataattaaaaaaaaataatgctggtgtggtaagtgtgaagaactgtgttcctccaggcaaaaaattctaagaaaatttataagcatttgtagggttctcagcagtttccctgcaaaatttggtgagcatctgatcagtctagaacgttgggtgataaatgaaaaaaataattaaaaaaaaataatacttgtgtggtattaattcataaatattttttttcagaaaatgctctgaaacgcaccaaattttatttacatgttagtttaggcactctgatgctttttctatcgaaaagggagatgaataaattttaaaaaatttt

SEQ ID NO: 32370 - DNA, 840 bp, Heterodera glycines
cgcgaagcggccgaatgtcccccaaaaatttaaaaaaacgggcgcgaagcgcccgtcctgaggccgcgaagcgtccgaatgttcccacaaaattaaaaaacgggcgcgaagcgcccgtcctgaggacgcgaagcggccgaatgttcccaaaaaattaaaaaacagggcgcgaagcgcccgtcctgaggccgcgaagcggccgaatgttcttaacaaaattaaaaaacgggcgagaagcgcccgtcctgaggcagcgaagcggccgaatgtcaccaaaaaattaaaaaacgggcgcgaagcgcccgtcctgaggccgcgaagcggccgaatgtcccccaaaaaattaaaaaacgggcgcgaagcgcctgtcctgaggccgcgaagcggccgaatgtcccccaaaaattaaaaaacgggcgcgaagcgcccgtcctgaggccgcgaagcggccgaatgtcccccaaaaaattaaaaaacgggcgcgaagcggccgaatgttatcaacaaaattaaaaaacgggcgcgaagcgcccgtcctgaggccgcaaagcggccgaatgttcccacaaaattaaaaacgtgcgcgaagcgcccgtcctgaggccgcgaagcggccgaacgttcccacaaaattaaaaaacgtgcgcgaagcgcccgtcctgaggccgcgaagcggcccaatgtcctcaaaaaaattaaaaaacgggcgcgaagcgcccgtcctgaggccgcgaagcggcccaatgtcctcaacaaaattaaaaaacgggcgcgaagcgcccgtcttgaggccgggcgtgggggggagggggaggcgtgggctgagaggggtgtgggggg

SEQ ID NO: 32371 - DNA, 1262 bp, Heterodera glycines
aattaaaattaattttcttaacctattttctgattctctagcttttttagtcatttgaaaattcaaattttcgaaaaattacgtataggaaaaggcttatgtatagattttaaagagaattgtgaagaaagtcaaaaaatgttatcaatttttcaatttttctaaagacttgcgaatttggaaataattttgttaaaaaaaattccaaatttttcgctgattcattgaaaactaataaatttttctctttcaattctaaataccttatcaattattgttctgggttaaattaatcaaaaaagaaaaatggattataaaaaagactatttaattgctttcaaatggagcactttcgcttacgaccataccacgttgaaagcacgccatcccgtccgatctggcaagttaagcaacgttgggccttcttagtacttggaacggagacgtcctgggaatcgaaggtgttgtaagcttttttcttctttttccatttttattttttgttttgtaagaaaatgaattattttttgtttgtttttgttaaattattcatttgcttgaaattacttcttcctataactttgtggcttgttaaaaagctcttcttatttttaataatatttatttgttgcctatggaagtcgaaaatttaataaaaatttaaatcgctttgagaaagaaaaatagaatttgctgaacaaaaaatgtgaaatgaaaagtgaacaaattttaaaagaattttcttttaccctaagggccaaaagaatctttttaaattcgaaagaacagctataaagtcaggctaaacatttgaatttaactttttttaattcattagattttccaatttaggcccatcatttttaaatgtcattcgctttatgttttttatcgtcataagcttgaaaaaacatttttagtttggttttgaacaattaggatgaatttttcgtcccaattttgcctatttgtgcattttgtgccgaaattgtttttttttggttttttatcggaataaaaaaaatggcaccttaaaaaagagtgacttaaaccactaagaacggaggatacttgtcttaaaaattgacaattaaaattaattttcttaacctattttctgattctctagcttttttagtcatttgaaaattcaaattttcgaaaaattacgtataggaaaaggcttatgtataggtttttaaagagaatttgtgaaagaagtcaaaaaatgttatcaatttttcatttttctaaagacttgc

SEQ ID NO: 32372 - DNA, 1465 bp, Heterodera glycines
tttctgaaaaaatttttaaggaattaattttgcaaaaaataagtaaaaacggaaagctccaaattttcgaaaatttttttgaaccaacttacttggccctcattttcagtgtaagttattccttttcccggggagtttccctgcaaaatttggttcgctttttgctcaattaccaaaaaatatgagtgatggaattttcactaaaaaagttaagcctccatttttggcatttttaaaaagcaattaaaaaattttttaatgagaattcatgcgagattttctggaaataagcttaatagggcctagttaagctgtaaaaaaaaatttggggcgatttgaaagagaatagaaagaaccaggttcgatgaagttttggtaagccaaaaaaaatccaaacatttaaaaatctataaaaaatttaaaaatgagaattcatgcgagattttctggaaataagcttaatagggccttgttaagctgtaaaaaaaatttggggcgatttgaaagagaatagaaagaaccaggttcgatgaagttttggtaagccaaaaaaaatccaaacatttaaaaatctataaaaaatttaaaaatgagaattcatgcgagattttctgaagcttaatagggcctagttaagctgtaaaaaaaatttggggcgatttgaaagagaatagaaagaaccaggttcgatgaagttttggtaagccaaaaaaaatccaaacatttaaaaatctataaaaaatttaaaaatgagaattcatgcgagattttctggaaataagcttaatagggcctagttaagctgtaaaaaaaatttggggcgatttgaaagagaatagaaagaaccaggttcgatgaagttttggtaagccaaaaaaaatgcaaacatttaaaaatctataaaaaatttaaaaatgagaattcatgcgagattttctggaaataagcttaatagggcctagttaagctgtaaaaaaaatttggggcgatttgaaagagaatagaaagaaccaggttcgatgaagttttggtaagccaaaaaaaaatccaaacatttaaaaatctattaaaaaaataaaatagtgaagttttaaaaattaataaaaatttataaattaagagttactggtgttagcatcatagcggtgcttttccttgtctttttgatgcccttgcaaaatctggtgcgcttctgatcagtttatataaaaaaagttaagcctaaactttttggcatgtttaaaaaggaattaaaaattttttaaatatttattcatctccctttttgataatataagagtcagagtgccttattcaacttgtaaataaattttggtgcgtttcagagcagtttctgtaaaaatacttatgaattaattttgtaaaaaaataaataaataatgaaccctcctccttaataatttttctgcgcccaaggtactcactcggtcgcttcgcggcctcg

SEQ ID NO: 32373 - DNA, 1567 bp, Heterodera glycines
gattagaagaggtacaacagtgattagtagtggtacaacagtgattagaagagtgattagaagaggttcaacagtgattagaagtggtacaacagtgattagaagtggtacaacagtgattagaagagtgattagaagaggtacaactgtgattagaagaggtgcaacagtgattaaaagaggtacaactgtgattaaaagaggtaaaacagtgatcagaagaggtacatatctgattagaagaggtacaacaatgattaaaagaggtaaaacagtgatcagaagaggtacaacagtgattagaagaggtacaacagtgattagaagaggtacaacagagattagaagaggttcaacagtgattagaagaggtacaacagagattagaagagtgattagaagaggttcaacagtgattagaagaggtacaacagagattagaagagtgattagaagaggtacaacagagattagaagaggtacaacagagattagaaagtgggcattcaaatagagcatttatggtaattaaggaattgtttttaatcaaaatagataaaaaatcgatgtgttatatttttcattttttaaaatataatacactttttattaatgaaaaacaaattatgaaatgtataataattgaatagttatttaaattgaaatgaaaaagattttacaattaaattttaaaataatagctgaaattctttaattaaatataataaataatttaaatgaaaatcattattcatcaaaaaataatttaattaaactaaaaaaatttattattaataaaaccaaacatttaagtttattaaaagtaatgaaaattaacccaaaaaatataaagaaaaataatgtacaccgtccggcttcgaactttgcccccccccccaaaaaatgatgcctcagaatccccaatcacacagggattctgaggtcttaacgatgtcaaaagtaaaatctgatcacgtattcgtgatcagcggcccaaataacccctaaagacatgttttggtacaatggtggttagaagaggtacaatggtgattagaagaggtacaatggtgattagaagaggtacaatggtgattagaagaggtacaatggtgattagaagaggtacaatggtgattagaagaggtacaacaatgatgagaagaggtacagcagtgattagaagaggtacaacagtgattaaaagaggtacaacagtgattaaaagaggtacagcattattagaaggggtacaaatctgattagaagaggtacaacaatgatgagaagaggtacagcagtgattagaagaggtacaacagagattaaaagaggtacaacagagattagaaagtgggcattcaaatattgcatttacggtaattaaggaattgtttttattcaaaatagataaaaaatcgatgtgttatatttttcattttttaaaatataatacactttttattaatgaaaaacaaattatgaaatgtataataattgaatagttatttaaattgaaatgaaaaagattttacaattaaattttaaaataatagctgaaattctt

SEQ ID NO: 32374 - DNA, 2093 bp, Heterodera glycines
aaatactaactctgtccgaatccaaaaataatttttatcactcactatctttctgatgatcattaatgcatccttctctccactgctcaattcaactgtttctctcttctctctctctctctcgctttctcttttctccctctctctcttccctctctctctctctctctcttccctctcattatctctcttctctattattagtgcgttgctattttgatttttaaattatccaaaaagtaagaaattaaattcaatatgcaaataacacgcaccggatatcgcgaatttcgtgcctttgggtgaatggcacttttttccaatgtgccaatgtaataaaatttgacaaattttcctacaattttgggttaggaataagaaagcatttcttaaatgagtttgtagttggataccgtaaatgctctaattatccccccggggggattattgttcaacctcctgtaaggattattcgacgcatttccctcatttaattattccttattggccattatcaattcaatcacatttatccattttcacacgtttttccttttctcattgtaatgtttctccgcccattctcttcgcattttctctttccccagtgatcagttagtcagtagtgatggaacagacttcaattattattccgatttctcgcttcgtaaaaatccaacagcgaatgaataaacacatctttaacagtcaatgagtcgtttgggggttcggggcttggtcaaaggcgccttggcttttccccattccctcccaaactccatccgggataaacggtgcattgttggtctgggggcacagtgcgcatccctcactattctaaatcatattcatttatcggagtcaaaaggtggtatttattgtttttaatatctaatatatagttttttgtttgtacaattttgtaccgattttttataatattcttttttcgtgcaaaaaaataatattctcttctctatttattattataatcattttttcatttatattttaaaaataaaaaataattgattatttcatctaaagctttcattatattaacacatagaaaaatgctatattaataaataaaactttcaattttttaatattagcacaagaagctctaattagaattgttgttttaattataaattattgcatctaatcattaatttgtctcaaaatttttctgtggataaaaacgaatttccttcgatatcatagatgttgtgcactttattatcggtcgcgcatatattgattcatttaaaaattaaataaaaataaaatattaccaaatatttttattcatatttaatttgtttgcatttttttgtcgttgtatttccattttttccttaataactcttttacactctttttgctcatttatttttattgtaataattgtttctggttaaattaattttaattaatttacctttttgcaaaaaagttgagagatatcaattaaactaaatcgaaccccgaaaatacacccatcaggtctataaattaaattattttcactatttagaaatttatttatttttttaatatttacattttatattcactgatgctttttaatttgaaaattcaaaaattttacggttattatttaaatgattatattgcatgcatgccatattaatgaattaatatttttaaaaatattataaaatattttttccaaattttaacatttttcataatctttttctgagaaacttttaatttctacgaaaatttgtgaaaaataaaatttccatttttggacttttgtagacataaatttttaattttttattgagaaatacctggaaatgaaggtttttgaaaatatttcggtacttagagagaaaaaaggctactttaacggaggtgaccgatttaatagaggatttttcaaaatgccaaaatatacttaatcgcgaaatatgcaaaaatatgcacaaaaatggtaatacgtcctgaagcttcaaaaagctaaaaatttgcctttcatgcgtttcttgcctcccacattccaggaacaaacattatgcatgtaaagataataaaaaatattttaattataaattcttgat

SEQ ID NO: 32375 - DNA, 1090 bp, Heterodera glycines
  unsure (1)..(1090): unsure at all n locations
tatgcgttctttattcttttcattttaacttaaaagagagaaagcatagaacgaaggaaaagaaacagagaaaggagaatcgataagacggggaaaagcatacaaaaagtaaaggacgagggacaccgggtaaaagagagggcggaggggcactcccccccccccccccacgcgccgtccctttgctttggccccacgcaaatagcgaccactgcccaacgaattttgtgccgcttcacaccgcccctttcgcatcgcgtcacaatcccacccacccttttccccatggaatggacaataaggaaaatggcaattaaatggaagggggcgggggattagcgtaagctaaatgagagaaaattttgttacaccaatgaaaccccaaaaggatgccaaaaaatatcacagcaagtcattaaaattttcaattgaaaatatgttctccattttctgctgtattttagaattatgagttccaaaaatatcacaaccaatataaatgctttgaaataaatattgcatgttttttgtgtcttcacacaatacgttccttcttctgtcatcattcgcttcctctctttttggcgattttcttcgttaggacgggggaccaacggattgaaactcggccaatttgagagccttgaatgattttggttggttaatcattggctttggggaggggaaggataggaattgtactaatcgccctttgtggctgctaatcttttctccacctgctccttgcacagcttccgcaaatcctcgttgtcgtacttcacttcctcgatggtttccaggcaaccgccatacatctccaacagattttcaaaacgttcgtgtaattggaaaaggttggagtgggccgaatccaattctgtccgtaaatgttcaatcgaaccgatgtcgagctattaaaatcgttattaagtgggcggggaggggggggggggggtcgttagattctgaccgagtaactgttggtgggactctgctcgccttgcaaagtgtccaacctcatttggctcgaagttgtggaagcgttgccaaactgaacgaaaaagggaacatttgagttgctacaanaaaa

SEQ ID NO: 32376 - DNA, 743 bp, Heterodera glycines
gcacccttaatttccaatgttttttgtgcatattttgcgatttttatgcatatgtatttgatgcatatttcacgactttatttgcatatttatgcgcatattttggccgctttcgtgcatatttttgcagccctgttaataataatttaaaaaatatttattttaatttgggattgaaactccagcaaaatttgataataaatttttcaggcaccgagacttgggagaacttggaattcactatgggtcaagcccaatgttagacaaaattactaaacgcgattagcaatttttaaaaataatacttttaatagagtgtgccgaattttattagatttcttaattaaaatatatttattatgttttctgaattaaatatcattaattacgtaaatatgcaagagcttggtcaatcagagaatatttaggtatctaattttcgtacttatgaaattttgtaaaaaacacagacagacagaatggcacgcattctttggcattccgtgcagcaagttttttttaaatttatttttgatttaagcattggaagttaagggggaaattgaagggaccacacgggaggcaaaaaagcatatttaagaaggaggagggccaatgtgacagtaattcattcattcatttgccggacaaaaagcacctttccaattaagcaaatggaaaatcagacaaatgacagcgaaaattcatttaccgaagcacaattggtaggaaagggaaaggag

SEQ ID NO: 32377 - DNA, 1227 bp, Heterodera glycines
gggtacaccccaaaacgtcgccgccgaaacgtcgccgggacataacgtcgcaacaaaaaaaaatttttttttttcaaaattataagaaaattaaaaattaatttagtttttttttgaaaatctaagtgttaataaaaactaaatttgatgaaaaaaaaaacttgaaaaaaattttttttccttaaatttcttcataaatttttttgaattcttcaagaatttttccgaaccaggctaggtaactaattttttgataattttaaaaaaaaaaatttgtgtgacgttatgtcccggcgacgttttgtcctgctcccaatatatatatattttttttttttttgccacattcaaattgattaatttgttggcaattaaaattaaaaatttccgcatttttttgccattaaaaattcagcccccccccctccgtcctccaccatccaaccaaccttttgcacggcggacacaaatcgtggcccgaccccattgcgcctgtccatgtacgcggcctgctcctcatcactcgtcccctgccaatgtttatcgttatttttttttattggaatgactgatttcacgaatctgacattcatttagactaatttcgaatgccgaacccgaattcgaacaatgccaaaatccgatttttttaaaaattcatatatttttttaaaatttctgcggcgagatttttgacggggacgcagaatgacacattttctatgatttttttcttaaaaaatttctgtttgatttcttttggtttttttttaaatttctgcggcgagattttgtctcggcgagatttttgggtgtatcctttatgacacggcattctttggtttgtgatcgattttttgtattttttaaaatcaatttcagggaaaaaagtgcaaaatttgtaatttgtaattttgattttttttttttttgcttgatcgaacgggagcaggacaaaacgtcgcggccgaaacgtcgccgggacataacgtcgccgcaaaattttttaaaattttataaaaaaattatcaaaaattttttagttacctagcctggttcggaaaaaattctagaaaaattcgaaaaaaattgtttttttaagttttttcgatttttttttcttagaaataaacaaatttagtttttattaacacatagattttcaaaaaagctaaaattactttaaattttattaaaatttttaattttttttttgcggcgacgttt

SEQ ID NO: 32378 - DNA, 946 bp, Heterodera glycines
cgccgccgaagcggcgcatgtggcgaaagagcgtgagattgaagaacgacttcatcagaagaaggaaagagaacacacggtttgcgaccaaactccgacagtccaaagcacagaagttgaggagaaagtatgtttgggtgggattgaccaatgcatagccaattgaatcggtcattgtgtgttatgccaaattcgaagtggtctttatgaagcatttttcacaggaccaaaagactggtggcaatcaagaagtggaaatgattgacgcagcaacagaattaaccgggtcagaaacggatcgaccctcatcgaaagtaggggaagagaaggacaaagaggagacgtcggaagagaagcaacaactcgaggaaacgacggaggagcctctccatcagcaacaacagccgcacagagagccaaggccattattcaaattcaacattgccgacggagggttcactgagctgcactcactttgggtcaacgaagaacgagttgctgtgcctggcaatgaatacgaaatttggcaccgccggcacgattattggctgatgtgcggcatcgtaacgtaagcggatttatttgttcaaattgcgccttgttgttagctattttattgaattccttattttatatgcagtcatggctacagtcgttacaatgaaattcaaaatgatcctcgcttcgcaattgtcaacgaacctttcaaatcagaacagggaaagggcaactttatggagatcaaaaataaattcatccaacgtcgatacaaggtaaaagggcaaaaatattcataaattcattgcctaaattgtaagagcccttttaatttattattttagctattggaacaagcactgataatcgaagaacaattgcgtcgggcggcctatttgcagattactccaaaaagtgaagaacatttgccgcagaaagaaagcggcgg

SEQ ID NO: 32379 - DNA, 1012 bp, Heterodera glycines
  unsure (1)..(1012): unsure at all n locations
aaaaaaatatttaaaaaaaaataaaaagaaaattggatattaaatacttttaatttaataacgcccacccgttaaaaatggttttggataaaaaattattatttttgattttgataccagcaacaaatgacatttttaattggctataaattcacgaataaattaaataaaatacctaacaattcttttaaaattaagagagagagaacttaaatttagtcttatntaatttagtaaaaatgatcgcaactttggcccgatttatccgcgtataaatattagaatttaaaaaattatattacattaaaattttaattacaaaattcaacataattaatgtaattcgttaaatatgaaaatgaaacaatggttatacaaataataaaaaagataatctacagcaattttatagaagcaaaaatataacaataaattaaaataaactttcaaaaatgttcgcctaatgcgttaaagcaattaatttacaggaagaataaattagtaaaaacattcagaaaaaataataaattttaaaggtattaatgaatgaattaaatgacaattaatattaaaattaaatagataattatctaaaaataataatccctttgaaagatatagaaattatttttatatatatgtaaaattaaagaaaactaaactaactaaataagaagaagtcctggtcattaagatttgaatagaaacttaagtgaaaattagtcttgaatgatacagaatgtaacattatagccgcaccccgtttttgagttttaatttactttatatatatatatatatatatatatatatatgaaattagtaaatcatttaagataacttacgattaataacttaattttttatggcatatgaacaagttcattttaataaataaatttaatacttatattggcttctttaaaaatagggtattttttaatgtttatttgaagcagcttagagcaagaagcgagagcgtcagatngtcattttgcgnntaatttaaatt

SEQ ID NO: 32380 - DNA, 1323 bp, Heterodera glycines
  unsure (1)..(1323): unsure at all n locations
acaaaaatgtcggaaatttaaattttcgagtttaaatacacggaagggacaaactgaactagtgccaaaatacgttttccttgtaacttatgtattcgaatttttgttcgaattcgggcccgttttcgtaattttgcaaaacaaagatcatattcgtgatcaagtcacatattnaccctagaaatgatttttatttgaaaattcaggaggggtctcaaaacagaaaagtacatgatcattgattgatcagtgaaaattttaccgtaatttcaaataagtttataaactcgaggttaattctatgttctgaatccgaaagtgcccaaaaagtggcttaaaggttttccttgaaaactctaaaataggaaaaaagttttttacttatccgccaatagttttgcttcaaaagttcaactccttggattataaaattttgcaaaaaagaatttttttaaacatatgtgcatacctatttggcaaccttaaaaaagattttcaattccaaattttttcagatttggtgtctcgcaatctctgctcacaattttatataatattattttgcaaactgccgaagaatttaaggaaattgctgaaccaaacataacgcgccgttttttgacctttttaatgaaattatttgccaatatgctccattttttgccacaaaataccaaggcttcattggcggaccataaagttttggcccatggatgggattggactttccattttttgacaactgctggccaacaattggcacagttggaccattatttagcagcaagtgccaaacagagccaaaatgttgccaaaactgatactgaacagagtgccaaaagaggcttttggcataaaaattgtactaatttcgcatcgggcagcggaacaaagcagcaaaactgatcagttgaataaaaaaaagagcggaaaaaaagaatgatttgtaataaatgatcatgatgatgtatgtgtttatataatatatttaaataagaaatgatgtacattatgtaattctgcctaaattagtcgaagtaacacagtaaaacgagttggccaaaatcgattgggtttacgtccttctttcatttttaaaacgaagagaaaatactagagtagtatgggaccgagaattttgggcaaaaccgggacttgccgggacctgagaagccgggaccgggacctcgatttttgtccgggaccaacagggaatttttaaaaattaaaaaaaatcaaattttaatttatttcaagtgaaaaagaaaaatattgacaaaacccccaaatagtgttttcttaggaccgaaagggacttcaatc

SEQ ID NO: 32381 - DNA, 1884 bp, Heterodera glycines
  unsure (1)..(1884): unsure at all n locations
cctccatttgcctttaactgtgatggccccccatattgtcttctattctttaaccccccggttattgatttttgttctgtggcctcagtgccctccatttcctgtcccatcccggtgcccaattccatttgtgataattccccggtgatggcatttctgtaatcaatttgtgataattcgttcaccatttcaaaattttggtttaattacccaagtttgaggtcatttcccggaataaattttttattaattctgtgtctcgtccctgcctaccccgaccccagtgcccgacctttggccccgaacgcaatcgggacaaattggcgctcctgcagctggatctgtgaaccacggactgactcaacgaatcccgttgacacaggggaagggaaaagcaaattagagagcctagacaaggaccctctgaggcttgtctagtgttcatagtttcgtgtagttattgtcctccgaggcataacttcacgagggacgtagcggacttagtgtttgccctccgaggaaacatttcgtccgagcagagggttgtaaggtgttgtgtagtggacgtagtacttgccctccgaggaagtacttcgtacaaaaagggtgttaagcgcgcactaggccacttacaaataaggaaaaaaggcaaactaacagtcctccgaggctttagtttatccataaggcaaaaggcaaacaccttgtcctccgaggcaggtgtttagtcacagaggtcccatcaaaagccccagggccaagaccagactgatcccggcaaaagacacaaaacaacacacgcacaaccaaactgcacgcaatgtctgggccaatacaaaaagggatcatcaatgcactcaaagctctggacaatgccaaaagcgccacctcactccttctacaccccgacccggacctgtcaaactgggaaagtgccgtcaacttggaggctcaatttgatcgggtcgtcaaggaaatccgcacaatggaaatgcagatggacagtctacgagattcatccaacgcttggattgaacttctcgcccgcctgatcggagacgacaaagacaacggcgaaaaagaatacgtcaaattcgacaagaatgagaaaatcgccggcgatacgacgcagcgattgtttttatctgctgaaaatacaattaataaaatagagtttaaattgtatggactataatcaccaaatatagacataaaatatggattaaaagctcaaaaatggccaaatattgaccaaaatatagactaaaatgccgaaccgaaatataaattttaattctcaaattttccaaaaaaatatgtttatattcaatatttaatatcagcagacgacagctcttgtctctaataactgtacgatgtacgaatgcgtaaatttatgttgttgttgggaaacattccctaaagagatacagacagatccgggattctggagtgttcaaaaaatgaaaagaaatttaaaaagaaaattatatctttttttatttttaataagtaaatcaaacgcatttaacatggtgttggatgtgaaatgacatttaatgtggaaaagaagaacattgttttgaaaaaggtcaataaatgcacgatgtgatggagcaggagatgtgggggagagatgagaatggacaatttttggccaataacaatgactaattggatcgatttttataaaccgaccccaaatcccgatcaaattctcgacaaattaaattttttanaattaattacctaccggaagggtaaaataatgaatttggaattaatactttggccctanaaaacagcgcacaaaacaattgaatgagatatgtttagctccaaaaaatgccatagggatggctggattatggatttccatacggc

SEQ ID NO: 32382 - DNA, 1407 bp, Heterodera glycines
  unsure (1)..(1407): unsure at all n locations
cggagcccaatttgaagaaaacaaaatatttttataaaatatttaaggattttagttcaattgcatctctgaattgtattagccatatctcttcccatgttgtcacattcatttcctattcctcattttgccattttttcggttcccatttttaccatattccgtatcgtatccatttttccatgtttccgttccccattttgccattttctttcgcttccgattttgccatgtttccatttcccattttgccattccatttgcttcgatttccgtggccacctgttttccctcccaatgctttttctcccccccccccccctccctcttcaattatcgttatatttttgttgtgtctcttccaacaaaatcaattttatttttgcccaattcttcgaacatttgtccctcttctcttccctccaatgcctttcttcctccatcattttccttctcgaatttgtccttctccgtcatcgcttttccgttgtttccctgcctttgtaaaacttttcattggcaattccttccgaaaaatattaccaatttttgtccatttttcttaaccccccccccccccttttgttcagcttttcctcccttttctccaatgtccgccccctccggcgcccctcccgcccctttaaagcccaccgacgaagcattcctcaactattggctgtacaattcatactcgccgatgtacgcttcgcctcgtgacatggcattcaacagaaacggctcggtgtacagttggctgttgcggaaatcgtaccacagcaacaggtccggcacgtacttctacaggccgtactcgcgacggcacagcaccagcagcagcagcctttacacaccgggaaaatgaaaggatggaccaaacaaagtgccaattaccaaaattgggaatactaattaggcatttttcatcttttgaattgacacagagaaattccaattttcagtaaaatgacgaaggacaaacgacggaaaaaggagatgccaattcccaaatgaatcttaatgttttaaattgctgtgcaatttctcaggaataaatgtggacaaataaacacacacaattaaaaataactcaaaaaaaattgttcgggcatcgattggccaaatgttaaaatcacttttttaaatatatttataaaattgaataggaatgtcattaattattattaatgttgtttattatccccttatggtacaatattccgattaaaagttgaatcattctctctctctctctctttggcccttcatctctttctttttgggcattcgcaaattttgagtccgatcacattaatggccttgatcggagtacctccgaaccgatcactttgcctgatgccaaaatgactccgagcgnggcattgcgtcggtggtgcgatcgctttt

SEQ ID NO: 32383 - DNA, 971 bp, Heterodera glycines
acgggactcccggtcccggtggtttgtccaaaaaacccgggaccgggagtcccggcaaaatcccggcggaatcccattcccgtccggtctctactaaatatactatgtatgttacaaagtattaaataaaactagtgtaaacataagcaattgaaaaattaaagagttgaaataatagacaaatacagatgggatggctcggcaatgagtgtgtgaaatgcgtgaagttttctccatttttttgtttagacatttgtcaatataaataaataattatgaaagttttaagtgtgaaatgtttaatgatggaattggtgaacttggaaattgagtgatcaaataaatgattaaaaattaaatataaaagtttcattattatcaaatttttttttcaaatactaaaaattaataacgattgagaaataactcaaaccgtgaaaaaggagttgacaaataaataggttaaatgaaacgaaattttcaaaacttaccatttaatagaccattcaaaaatacaaaaaatcttaaactaaaataaatattttttccagaagaaaactttttacaaaaaatatactaactaaggacgatttcaagagaataaaaaactaaaattccgcaaaccaaatgaaaacaaaaattaaaaatccgagaatttttttttataaaatataacaaaaaaaaatctaaaaaaacaataaaaaaaaatttcaaatacctttaccttaataaaataattactcaaatgactcaaataataattgttaaatttatttattatgaatgtttgctttataatttttttatgtttatatttattaagttttttattttaatatttactattaacccatagttatatataaactattttagcgtataaatttcaggaattttaatacacgttttgattctttgcaaaaattaaaatgtagtaattattttttattaaatttttttaatattcatta

SEQ ID NO: 32384 - DNA, 1103 bp, Heterodera glycines
aatgaagaaaagaggttgggaaaatatacttccttaaagtgccatgaaaatgggtcatggcattcccgcttcgtactcgagtccgtagtcctccagcagagaagtgtccacgcggaaaaagcctggccatgggagggatcggtgaacagggcattaagactgacaatgccctccaattgccaccaaaattcattcccgatattttcgttccctaatttttggcaaatccgaccgttttcgccccattgctctccgaaactgttcaccgccacccaaaacagatgatcgtcttcgtcatggccccagccgatgagccgcacgacgtgccaataaatgatacggtcgtcaaagtgttggcgggggaaagggtggaaaatgcctgagggaattgggaaatgaaattgaagaaagcacaaatgggaaatgaattcaattccaaatgttccatttatttgtaggcttttgccccggagcagcttgtccccccaccgcgaaagttttttttaatttttcagcgattttttcaaaattttatgttgaattaatatttttaaaaaatattcaaataattttacgtattgcgccccttttgcccacccgagtcgtaatgcaaaaattcttcggtcagcggcagtgccaaagtggtgggcccgtacagaaacagctccttgcggatgatcgtccgaatttgttccatcgtcagagggccggcggacgacgttttgttgaaatggccgaccactgaaggcaaaaggacgcggtcattgcccgcctggtcgacgctcattttgcgggggaacaaagtgtaagcgaaggaaccttaaaaagggtgggggggggggggtaattagtggaaagaggggtaattagggataattaacgaaaaaatgtgaaaagagatgaaatatgatgttctaatagcccccaaattgaccaatgttcagttaggtaattggttggcccaccctttcgcttgtccgccgcgtattcccctccggcactgtttttgtaatatgccgtttggcacttatccttccggcacttccgtttcgtctgttcctccgcgtaaaggttgggcgtacacggcgtctgaatggcggcgt

SEQ ID NO: 32385 - DNA, 1442 bp, Heterodera glycines
catagaaatgtaaattccgtttttctctattaacagagataaagaaaaagtccgccaaaataagagatgtttttttctctgcactctctatttattgacacatgtctctttttttgactcgctgtgtgtacagaatgaccattctttgatattccaatggtttgtgaccaaatttagcatgttttaatcaatttaggaactaaagtgagaattttggagttttagactttttgttcgaattcgggtccgggattcgaaatttgtccaatgaaggtcatattcgtgatcagcgaccctgaaaaccccccataaacatgtttccaagacttttcagaacaaaaaaactcttcgtcacaaggggggggggggggggggtaccatctatagtattacccgcttttcttcttaagaattgattagaaagtatgtgattacgccataaaaaaagttttccttttatttgtagaggctttatttccttttatcaaaacgaaatgcgccacacgcaaagcggcgggccaacgcaaccgccgaacggcacaatgactccgccccacccgcaccatcgacgccagcagcagcaaatgccatcggcacagtctgtcggcagtgccgcccaatttggacgacaaccattcggagccggcggtgggccgataatggcgaacaatgcaatcgcaaatcgaaaaaagcgcagatttgccgacaaaatggtggcaccggaggtaaaaatgggctcggatgcctaataatgtcattatttgcaattgccactgcttattgctcatgttttttcacagattcgttctttgatgcccgaattggatgcttacgtcggccttttgtcctacgagcagaaattggacgcgataatttcgcgtaaaaagatggaaattcaagaggcactgaagagacccatgaaaatcaaacgaaaactgcgcatttacatttcacactcattcattcaagcacgggaacccgaggttggtttaatgaaaaattcaattcgcggaaaatataaatttgtgaaagaaaatcgtttccctacacttatcggcataaaaattttatttaaagtatcttctaaactgcacaagtaccagaaattcttccagaaaatttactcatttttaaaaaacactatttcaagaaaaaaaagccaaagaattttttgcttttcataatattgaaaaggcgctttaattccgtcgggagaaatgtaaatcacatggtttagacactgtcgggaactttatcttttttagtgtcttttggacagattgtgtcgtaaaaatgaccattcaagaaaactggaaaaatacggaattctaatgaactacaaagttcaaatatggtccagtcttcaaagcctgttctcccctttttataattaattctcccttttctcggaacgagtcctccaaaattcttattattttttt

SEQ ID NO: 32386 - DNA, 1076 bp, Heterodera glycines
  unsure (1)..(1076): unsure at all n locations
taaccccgatgcttaatcgttccgggagagccttttcaaaatttttccattaccgtaagagctgcggaaattgtgaataattctcagaaaaatggctatctctttttaggacaattttctatctcgtaaccccgatgctaatccgttccggagagcctcttcaaaattttttccattaccgtaagagctgcggaaattgtgaattaattctcagaaaaatggctatctctttttaggacaattttctatctcgtaaccccgatgctaatccgttccggagagcctcttcaaaattttttccattaccctaagagctgcggaaattgtgaattaattctcagaaaaatggctatctctttttaggacaattttctatctcgtaaccccgatgctaatccgttccggagagcctcttcaaaattttttccattaccgtaagagctgcggaaattgtgaattaattctcagaaaaatggctctctttttaggacaattttctatctcgtaaccccgatgctaatccgttccggagagcctcttcaaaattttttccattaccctaagagctgcggaaattgtgaattaattctcagaaaaatggctatctctttttaggacaattttctatctcgtaaccccgatgctaatccgttccggagagcctcttcaaaattttttccattaccctaagagctgcggaaattgtgaattaattctcagaaaaatggctatctctttttaggacaattttctatctcgtaaccccgatgctaatccgttccggagagcctcttcaaaattttttccattaccgtaagagctgcggaaattgtgaattaattctcagaaaaatggctatctctttttaggacaattttctatctcgtaaccccgatgctaatccgttccggagagcctcttcaaaattttttccattaccctaagagctgcggaaattgtgaattaattctcagaaaaatggctatctctttttaggacaattntctatctcgtaaccccgatgctaatccgttccggagagcctcttcaaaattttttccattaccctaagagct

SEQ ID NO: 32387 - DNA, 796 bp, Heterodera glycines
  unsure (1)..(796): unsure at all n locations
tttattatntttgcaaaattaattcataaatattttttagaacgtgctctgaaacgcaccaaatgttaattaaaagttaaataaggctctctgatgctttttctatcaaaaggaagatgaataaaatttttaaaaatttttaatccctttttaaacaggccaaaaagtttaggcttatattttaaaaagtttcatcgaacctagcgcattaaaatcgatataatctctccaaatcttgcaggccttctccattgtaaaggactaacttaacctgaaaaaatgccaacgcttgttgtttttaaaatttttcgaaattctgactttttcattaattatttattattttgcaaaattaattcataaatattttttagaacgtgctctgaaacgcaccaaatgttaattaaaagttaaataaggctctctgatgctttttctatcaaaagggagatgaataacatctttttaaaatattttccttatattttggttatttcgttctactttcggtggggtgcttggaaaattggaatcatgcgtacccgtccgatctgacaagttaagcaacgctggctgactagtcaaaaggatgggggccgtgatgaaacgaaaccagcactgcttaccccgcggcacccggcacggacccccgaaggaatggaattaattaaattctcgccttcggggatttttttccattaggtcgaccgttagctttcgattggtctagtcaaatttttttattaaaaaaaaaaatttgttttttgaagtgttctgatgaagggcgggggggggg

SEQ ID NO: 32388 - DNA, 928 bp, Heterodera glycines
tctttctaccgaaatcctcctcaaatttgcgctgggtgtgcgaaatgcagctgccatggtcactggtggtgaccatgtcggtccagcgacttttcgagtcggagtgccgctgcactgtgtggttaagcgtctacaaaaaaataatgttattttatttaaaattatttgaaaaaaacaccttaaattttccaaactcggccaccaatttggtgttggagcagcggcccttggtgtggccatcctgcaggcagatgaagcagctgttgctgttgtttctgtctgcaacacggttgaagtgcttcttgaaagggccctccaactgaagaaaggcagcggcccattccactgcaaagaaaaaaaaaatgttacaaaaaaaaattaagaaaccccaagcttccaaaatccaacactccgccggcctgtggccgatacccaggcagcacacgcatgccacccgggtaccgccatttggccctgtcgccttgtaggaggggcactctgaaggacggtgccggccttcggtgcagaccgggcacaaattctcgtgcccggtcttccaaatgctgttggcagcggcccaaccgccgttgattatgctgctgttgttgtacataaaaacgaatttacgaaggaggtagagagagtagtagaaatttcgaagttaaaatgttcaaaataaacaaattaaaaaattttaattttaaaaacaaattaaaagacaaaataaatttaaattgttgctcgtttggcattatgttattagataaatttgaaataatttttgtttaatttaatttacttattaaattttgcctgcggctttgtaagccatccgcttatccccccggtatcccttttatcctaaaaccggttttttctgtagaaggagggatttttctaaaattaaagcttaatttcaaatttgtat

SEQ ID NO: 32389 - DNA, 981 bp, Heterodera glycines
aaagacaggccaaataaaacaaatttaattctttaatttaaatttattttagcaaattttctgacgccgccgttgcccaaaatggcgacgatgagccgcaacagtcgccggctgacccggaacaagcggacggcgagtcggagcaggcacagcagcacaacccgctgcagtaccggccgcgaacgcatcgccgacgcattcgaatggcggcgatggctgccggcgccgggggcaatgaatgaaacgctaattaaccgacagattaattaccaatattgactaattaataaaagcagatggtgtggggacccgagggtatgagctcctatatttttctttttgagtgaaaattcaaaaaatgctgccatttttgatttgatattatttaaaaaaatatatttttgaatatttaatgacatcgggcacccattagcttaacatataaatatttttattaaaaatatgagtctgtaataatttcaactaattaattagtgattttattgcttcacccatattttttgatttgtttttgaaatatttaaagaaaataaaacattatttaattctcatcaaattaagaatgatcactgatttttgcataatttacagaaaattattacaatttgaattttcgattcacaaataattaacaaatattttttatatagttttcaatttttattttattttataatatcataattataaattggtcaaattaacaaattctgcttatgaatctatttttaacatcatcattgtttctatcacttgaccaaactgagaaaattgtagcacatttattgctaaaaatattacgttattatttttcatttacaataattcaattcaattattattcgtttgaataatttaatcgaaatgttcttttaatttttgaaagaaaaaagtcaaaaaactataatattcctttatatatattatttgaatttaatatccgaataattttcatagccc

SEQ ID NO: 32390 - DNA, 1243 bp, Heterodera glycines
  unsure (1)..(1243): unsure at all n locations
cagcgtcatcggtgtagtcgctgtcgtcgtcggaagactgactctcactctcgactcactctcgaccaccgcacattggcccatacnacacacagaaacagtcagcggtcgatggatgtgtgtgctgcttggcccccgctgtgtttgcgcacgacatcgacggatggggcggcggtggcggcggcgactcnccgccgacggggatttcttcagagtccacccccaacttcatcgatctgctgctgctgtccgattgtctgtttgttgttcgcgacattcgacctcatctgcagcaggagttattctcaatagccttctcaatctgctgaatgttgcttcctcattggttcaacaaatttcttggaaaattccaatggggggcaattagtgacaaatttgttgctcaataaatatttgtcatcaaaatggccaaaactgtgtcaaattctggcaaattcaaaagaagaaaagagattgtgcaattaaattaaatttggcaaatggatttggcattacaaaggttgagaagcattgtgaaaaaacaaacgtatctttttaaattaaaaataatccaatgtacattaaactccgattttcctgggcctatttcaattcagaccatatctcagatacgacgtgtcatatatcatatgtacgtttcaattatgaactgacgtgccataaggtcatatcgtatgcggaacttacatatgacggccacatatgacatgaaatcatatgtgagtgtcatatcagttttgggctgtttcaattaaaattgctacatatgatgtatttctatatatgatgcctacatatgataccaaacactgggataaatataagctcattaatgagatctaggccgtttaaatgcaaataaattaacaaaaatgaataaaatgttaacttttttttatttacgtaaaaatatttttaattttaaaatatttttaaagtgaagaaattaagggcacataccaaatatgtttttctgatataaaaataaagtctaaaataggcattgaaagtcgaaaaatagcttaacagctgcttaaaaagtttttcacttttggggtacataggagaaggaaaatttagggataaattctanatatctgaacaaatgaacaaatttttgttggaaaatanagtanatctggaaataatanacttttataatttaagggncgtgtctgaaatagtgattttgaacaaacaagattgaaaaagttaaacgaaa

SEQ ID NO: 32391 - DNA, 1532 bp, Heterodera glycines
ttgagtcggcaacgccacacagaaaacggacgggccccccacgaaggaccagcaacagggccaatttgtagaaaattttcttggggaacgaagtctaagggggggggacaaagcatcaaaatggacaaatgactaaaagaggaaggaaaaaaataagcggagggacaaagcataaaaatggacaaatgactaaaagaggaaggaaaaaataagaggagggacaaagcataaaaatgaataaattatcaaaagaggaaggaaaaaataagaggagggacaaagcataaaaatgaataaattatcaaaagaatgggggggggtaaagcaacaaaagaagaagcgatcagataaataaagaaaaacagcaatgagaagagaccagagcggaaaagcgaatcgaataaaagaaaaatcagccaccaaaatgtgaagccatcggcgacgaccgatgttacgaatgtcgagcaactcgctgatcacctgatccaacaaatgatcaaacactcccaattatgccaaaaattggagtttgaattttcgttaaaaagagacctgaaaaagtgccattccgtagaccaacggctcggaaatcattcgaagctaaaaacaaatgagcaattcgcatttttgtttttttttattcttgggttaactgtgccctcaacgccgaacatgccgtacttccacagatgacacctcggctggtcaaagtacaaattgtctaagcaataagaaccaattagctgacaaattgcaagattagcccattttacgcttaaacaatcaaattaaatatttcataccggtcatagtttgtatttaattcaagaaaggatgaagccactagcaaagccttaaatttaacaaaacctactgaaaattccgaatgatccatcattttgggtgatcattctgtcgctgatcagagtcaacgcatttgtgctggcatcaaccgccttgtgattatcaaatgctaatttgctaattgggtgctcattactcacttggcccgtccacgaaacatttccttcagtgattacccaagtggtggcggaaaagggacgactcataaaagcgacgaaagagacgatgtagaaaatgcaaaagccgaacagagaaatgaaccaactgatcagagacaaagggagaggggaagggtacggtaatggaccaacagaggaagagtacggtaatattggcgcaccgttttttagcgaaagctgaaagaagtgaaatgaggtttatttatacatttgactatccgatcagaatgaccgatcggtgggcaatgagtaggggggggggtgggagaatctcgactcgactttcgacatttttcggctttttgggtctctgtaaaactcttttctcgcacacccctagcagtgagtgagtaattaatgaacaaatgatttagtgaccttcccattttgcctcaagcaaatcctccaacagtccgtccaacagttccaaatgtttcgtgctctcaaatgaattgcgcattgtcaggccatcatcattttccgtgttgt

SEQ ID NO: 32392 - DNA, 1457 bp, Heterodera glycines
  unsure (1)..(1457): unsure at all n locations
cccccccccccccccccgcccccccncattgactcatcatttcttatccctctttttgtgcacttttattctttgacattttatgtatgtcggaattgtttattgtgagtgaacaatntagtaaaatgcttgaaaagatcaaagagtgatggcgaagaatgcgtcagaaacagaaacgttattgnaaaggattttaaaatttgtattgtataaatcttttgttttttatcggaacaggacggttcggtgcagcccaagttttggactacaacttttgtcgttgttggccaaatctaacaatcttggtatcattcgaaagcgtggtgagtcattccacaaaaaagctcagtgtgggcgatccacaaaaaagctcagtgattgattggtcattttccggaagcctatcgcaccactttcggggcaccaaaagtgcctgatccggaacccggaccggcccggttaagaacaattttctcccaggccgggtccggttcttgatccattcacttgaagcccgtcatgggtcgggcacatctgccggaggaccctcagcctcgcccccgaccctgtcgatggccaacccaagctaagcttgccggtaccagcgccttttttgtacagctcgatgagctctacaaaatggtatcaatggcgtcaggctatgtctactacaaatggagaaaattggcgagaagtgatgtcaaaaattaaaaaatttgaaaatgacttgcgtcccgccgtacattagtattaaccggacggcaccgtgttttgtgaattgaataattaaatttatttatttaattttatcgatcactgagcttttttgtggaacgacctagcaccattcgaaagcccttcacaagctctattagccttacaaaaaaacaaaaaattttagcttgtaaaaaagttattaagaaaaaactttcaaaattttgttttttttgttatttcactaagcaataggttagaaaaagcttcgaaacatataaagctttcgaatgataccaagattgttagatttggtcaacaatgaaaaaagtgttgtccaaaacttgggctggcaccgaaacggcgggcaccaaaccggttttttattaatctcaaaaatgcttttagttttcgtaggtttaatcttttgctgttgtaactaattgctcttgatttttgcattttttccggttcgttaagaaaggaactacttcgttttgggtcagtgtgccgtttttatttgctttcgtcgtttaaagtccaatgaaatcatgttcctcatcggcaagtacttgttcgacaggtgacacaagcagtaacacagaggcagcagaaggcacgtttttttcaccaattttgatttacgctattttttgaggtaataatagtatggtttacagctcccacaaaaaaagaggcaaaaagggggttttatgcaattcttcaaagtcctttatggttct

SEQ ID NO: 32393 - DNA, 1321 bp, Heterodera glycines
taggtttaaaagtttgacccggaataggtttaaaatctttgacccggaatttgtttaaaaagttggacccggaataggtttaaaaagttggacccggaataggtttaaaaagttggacccagaataggtttaaaaaggtggacccggaataggtttataaagttggatccggaataggtttaaaaagtttgacccggaatagggttccttgtttgacccggaataggtgtaagaagttggacccggaacaggcttaaatagttggacgcggaataggattaaaaagttggacacgaaaatacgctaaaaatgtgtgaccaaatccggacttttacgagttgcccatataaagatttttgattatatctgcgaaacaaatcgaattatttaagtgataaattatgtatcatatcgcaaccattaactatttatatatgagataaaatgcgataataataagcattattcaaaactaccttataacttagctaaaattaaatatggcctaatctgttttatgaaaatcctagttgcgttttccatcggtaaattgcgctatgactatcacccaattttcgcgtaatcattttttgaagtggtctggtgggcttctggtagaatgtgctcgtgaatttttctattattatttcacattttgcaattaccgtattttctctttttataaacaaagtgggataaatggagaaggggggattatttttcgacagatttattttgtataaaatttttgatattttttagaacatgtcgccaaaaaatgtcatcgagtcaaagaaaaatcatttttaattgcattttttaaaataaattctgctttttctattttttaactatctataatgcacaaaaaatacattctttttcaaaaaattttgttttagcgccactttcatcactgggaagggtcggggtcacttcggcgcggaccatttcggcgccgcaaattttgaaatgctataacttttttatttgtcagttagctttagccaatctggcatcatttgaaagctctatgtgtgctctatatttacatgtaaaaatagaaatgaatgattcaaaaataaaaaagttatgccacgcggcgccgaaaaagccaagaaaaagttaatttttgaggttttttggccataacttttttgtaaactgacgaaattttttgaaattttacaggctaatagagaatctgaagagctatcgaatgatatcaaaaatttttaatttggttgatcaggaaaaaagttatttgaatcggcgccgaaatggccggcaccgaagtgggcggttcccactgggaatcggt

SEQ ID NO: 32394 - DNA, 1339 bp, Heterodera glycines
aaacgaaacaccataataaaactaaataaaatagaaccacataatgtggagaagtggactcatttcttggggaattgaggattggaaaaggcttttatcgcttgtcaattgaacatttcaaatgcacattctttcgctttcccgtcttttggccctccgttcgtccgatcagtttggtggcaatgcattggcgattagttcccgcgcggcaggcgctatcgaatcggggaagcgcacgtcaaactccaccaccaagtcgccgcgtttgcccgtcttagggttcggaatgccacgatcgtggattctggaaaaaggaaataatgataagggaaagtatacgtgtcctttttaaaaacaaaagaaatttttcgaaaaatggggggggggaaaactccactattaattgtattcatctcataagggcgctgcaaagtaaacaaaatttgtccacctttttacatttacctaagtccataaattcagtaaaatttatcaaaacgcttgtttgtcagttaattacctgggccgtctacattttcaatttaaacttttttatgtcgatacataattttttccaagattccttttttcaacacttttaaagaagttacctttaaaaaacttgagaaacctataaatgtatttttatttttttggtctgttttttgtttgtttttgggagtttttgttattttgaaatgataggaaattaagttcacatacatcgagctcgaaattagccaaattccttgatagaaatccaaatgaaacccaccgttgtgtgctgccaggtttggtcacgtgcttgatgttcaacggaatgatgtcaccctccaaagttggcacttttatggacatgccgcaaagtgcgtctcgcaatggaaccacttgtttatacctttttaatgatacaaattaatcttgggaatgttcctccaaaatgctaccgaatgtctgagccatcccttctgaatttggggtgcggtttgtctttgatgacaaaagtgatgtctgctggcatacggttggggaacacgtcgccctctttggggaaagtgatgcgggtgccgctcttccagcccggcttcacatttatcgtcaaaactttgtcctccgtccgcgacgtgccgtcaggattcacaattttcctggaattttagtaaattaagggacaggcattcagtggagccaataataggtataaaattaatgttaaaagtatttcacaattttcttgtaaaccttagttcttgtatggttttttggcatttatttatggccctctctgctatggcaaatgccttcaaaaatattttgctaaactcctaactgtgagtaa

SEQ ID NO: 32395 - DNA, 1447 bp, Heterodera glycines
tcagaaaaaaatttttgtttattgcgcaccattttatccttcctacgaaaaatatttgtttaaaaaaccgaaattagaaccttggtacgtttttaataatttgtgaataagaatgtaaaaaagagggctgcaaaaaatatgcacgaaaaataatctaaatattcgcatagatatgcaaatagtcgtgaaacatccaccaaatatgcacaaaacttgaaaattaggaatgcaaattaattcaaaaaaattttccgcattattttatcggttgtttttttttcttaaggattttcaaatcggaaaatatttgactaaagtggtaaaaaatgtaaaaatctgaaaatatgcacaaaaaatggcaaaatatgcagaaaatccaaaaatatacaaaatatgcataaaacccaaaatatgcaaataaaaatcccatccttatacgcaaacataaaaaagaagtgtttttcctactatttagagcattgagaagccaggaaaaaaatcaataagtatacttttacagtcctgctaataaataaagaaaggggagggagtaaacaaaacaacaaaatcgacaaaaaaatcattgcagtaaagaaaaaaaattgtttttacgggacaaatcaaatttttcacgaattgtctgaaccgagcgaatcctagtagggcatcaattaaattaaaaaaatgtgacttaatattaaaaaaatgaactattaaataaccactaaaattactatttaaatgattttgaataaattggaaatcattacaataattgaaaaatcaaaccggtgtaaaccccttccatcacaaagaaaatttggcagcaaacctagcaaactgatcaagaaataaatatttcagagtgatttaaacaataagaaacagaaaaattagtttttttttggttattcgtgacaattatcgttttgccaaatttttggttaaaatgatgccaaatcgagaaaagcttttgtttgatcgcataaattatgattaacgcgtaaaagttgattgaagacaaaaccgtaggagaaacacaaaccatcctaataaaatccaaattaatcagaaaaagctttttaaatatatttgtgattagaatttaaaaaaatctttttagtgtacacaaataatgaatttttttatttatacacacttgaaagatcattaaaaatttgcaaataattttgttaaagcaagcggaatatacacctaatttaattgctttatttttgtcattcggaataataagaaagaacgtaaaaaaataaagaaatcgaatttacgggattgattatttcataactgttattgcttttttgtttgtcaaaactaataacaacaacaattctcttttcccccctttaattctcaagttttcgcttcaaaaaataatccatttaaaatgtgatatacggagtcacacatcaaattagtatagtta

SEQ ID NO: 32396 - DNA, 1480 bp, Heterodera glycines
gtaggcgccgttcggtcgattacgacacgacagagacgggggcggatggtcgccttttgattaatgcgggaaagcccgactcggacccggaagtatttgtggcagaacatctcacaaatgttcttcagcctcatcaaattggcggtgtcaagtttatgtaaggggttgagagaaaaggcacagaaatatgtggcatttaaagcgagtcagcttttgctttcttaaccaataccaaggtttaccaaaaaatcgttactcgattcggcacttttgctgtttagggccccaaaaaaagttcaaaggagcgacccttttgtagagatttggaattggttgaaatagcggtatttatcccttttgtgacaccctctaaattttttttctacgataattataggctctgaaaaggaatctgatccatgcattttacgtgagaacatgaaaatgcgtgttaatttaaaataaatttcttgttcgttttcagcgcaaaaaattaccctaaaaaaatttaaaaaaacttccgaaagggattcttgtttttatttttgttcttagaagcaaaggcttttctgaaattggctctcgttaaggtacgacaacatcatcgaatcgcttgaaacgttccacaagtctgcagggttcggatgcattttggcccatagtatgggtcttggcaaatcaatccaagcgatcacttttctcgaaattttgtttgttgaaggacctaaaccttcgatatatattttttgttttagcattcgaattaccggcaaaaggcacgtgttgcttatttgtccagtgaacgttctgcaaaattggcacaacgaattcaaccgatggatgccagaaactgacgcggagacggcgcggcccattcggcactttgaactgtttgtcattggtgactcagtgaaaacattggaaaacagagcgcaaatgatcggtgcgtaggaaaataaataacattcattttaaaattatttattcagagaattggtatcagtcggggggcgtccttctgctgggctatgaaatgtttcgtcttctcgtccaccaatgtgaacttttgggcgaaaagagtgcgcaacggaaaaaggcatccaaaaagcaaccgttgcggacgatgtacgatttggcggacgatttgggcaaaaccaacgagcaggaaaaggcacaaatgacgcagaaggacgaattgcagaggaacatccgccaggctttgttaagcccgggccccgacttggtcatttgcgacgagggacaccgtatcaaaaacctgaacactgaagtgtcatgtgcactctccgcaatcaacacaaagtaccaggaaagggcatttttgaggaatttaaaccaaacacaaaaggcgccgcattgtgctgacgggctacccaatccaaaacaatctgacggaatacttttgcatggtcgaattcgtccgtccatgctatttgggaagcaaaaaggactttcaactgat

SEQ ID NO: 32397 - DNA, 2121 bp, Heterodera glycines
  unsure (1)..(2121): unsure at all n locations
tttatatgatattaatataattatatctaaatgtgttatgggattatgcgnntaataatgattttttaaataaaaggattaaataaataattatacagtntaatntaacatatnttataaaaatgtattntaaccatttatttttttatttattggtttgctatatntcataaaaatttggcccaaagaggaaaaattgtcagtataatattatttgttgtttttataaatccatattcattaattattttgttagtagtttttttttcctattttttaacatgcaaaaataattataaaggtatttttccgaaattgtttattttcttctttgtcttttaattgctccattcaaattttttattaaaattactaatgattattatgttgctttagtttatgctaattaaaaataaaatcggtttattaaaaattaaaaattaaattttttaaagtttggtttttttttgtttatgaattctttggcattcgttatttttcatcttttaaatctcatgattccgagcctcatgaagatttacaaaataattaattttttgaatttttatggcataatgtcattattttatcaaggaaaaataaggtttgtggcaaagttgtcatttttttacagaaatctgttaacaattcgcattaacaattacaatgtttttccggtggagcctaacggcaccgccggaccctatcccctcgcccatttcccaagtttcttaaaaaatgcgccgcaaaaaaattgttaaaattttaatttgttgaatgcactaaaatttacgatttactaatttcctcccaaatcggaagcaaaaaatataatatttaaacagctttattataaataactcatgcttttttgttgtacgtaagctatttatattcttaaatatttaaattatttgtgttttttttttgtttagcataataaataacactctcgaatttattacaatatattatattcgtttattaagtttttttatactgaatttataataataaaattaaaatttctatttttgggtaaatatgttaataaatttatattaatatttttaaattccagtgccaaattatttttattttttatctctaagaaaacacttaaacataactaataattgagttttttaataatataacttaaatctgtccagagtttatgaacacattttgaataacttttaaatttttcatattatttcaaaccaaaaattaatcatttttaatatttaattattataagaaataataaaatatccttttatttttatttttgaatgaaaaattttctctatttttctttttttaataacataactcatgcttccattttcactatttgttttgattaagttttttcatataaatttgattagtttttttatattattttcattttttttaatgttttagttattttgactcactttcggtataattttaaattcatttcaatcatttttagattatttaagttgaaatttgtgcataattctataaaaaataattcacatcttttgattgagttttttttaaactcctttttggctcgattaatatctcagttttattttctctaatttcgagtattgaatttttaaaataatggtttttatgaagatataaaaagaaaaatagtcaaattaatttttggccaattactatttttaataaaaataatattcaaaataagttttaatttatgtattattctttttttattaaatctcattttttattgtagtattttaatgtattaataaatgttaagaatattttcttagatgttgaaaataataattaattaattttaaaatttgtttttatttttaaattctgtagttcatccccaatgcgaacaacattttcattttttctatattattttgaaataaaataaataaatctcaaatattttatctgttcaatccctctttactggtatgaaatttactttattatttgttaaattttcaaaagagcataataaatattttttttanataattaattatttttcattanattgatgattggatttgttaactaatttggcctaaataataatttttgcagttttgcaccaattcttacgaaaaatat

SEQ ID NO: 32398 - DNA, 1703 bp, Heterodera glycines
  unsure (1)..(1703): unsure at all n locations
aaaaatttgggagtcccgacatcgagcngattaaattcatagatttctgcacttatggggggcgacgttttaaanatcattcccnggtgtgattggtctttctgaaccgggtctacaaaaattcttcatacccagattatgaaaacggagatgcttggataaaacgtcaggttctgcaccatcaaaagccgagtcaagaacgcaagtacatgaccgaggtataataattattcacttgtgctactatctaatcaataggttgaagtaaattatggcgtaaattaattaggtatatttcagatcatggaaacgagacatgcctacccattaccatgtgatttgttggcgagcactcacctggtcgagttttacaatgcacacacaccatctgacggattctttttgcgtttattagaacacgaaagtcaattgaaacacgtggaatcagaattgaggctagtaaaggctaatgaactttgaacagagtttacactacacttctgtccatttcacatctttcctctttttcaggcgatttgcccgatttccccgggaagaaagagaacgctatcgacttcacaagaatttcatctttgagggcacttgctgtttggtggttttcgaccacaatgtgttttcaacggacagaaacggtgaacataaattaatggaacgaacaaacgatttggtggtgtgcaaccgatgggtccgtcgttgtcaaattgttggccaaagtaacggaatggcaatggtaagtcaatgtacaagaacaagtaccggtcttaagttgctttaaatttttttcctgaattcagatttctttttgttcaggtccaatgcgtggattacccatacatcggacttgtcgatttgaagaatattttccaggtgacaattaaggtatgttccattaaactctgttttaatctcagattccgccttctctgctgggcatttaccaaaccggggtttatgccgttctcaaagactgtcaaatggcttctcaaattgaggtagcaagacatttatcacagtttcttttcacaacagtaatttgttagtgcgagcattggaggagagcggttgaggaattggggtcggaagattttcggttggtagcacgcttttttgagaaagcagcgcgaattgactacagcggacgcaaaagatttggaatttttaccgcgactgtttcggtaaataaatttggcgacgtctgccccgtcaggatgatcccggattggtgttgatccgaacttttttttgaattgttttcatgattcctcttttcatttgctcattttgataaatttatttttataaagccgtttttgcaaacttaggtgtcaataattgcttgctcgtaccattacgatgtttatttaacgatcatacgatctaataccatacaaccataccagacctctataattatattttgattcttagaatttccgcgcaaatgtcattttgttttagagatcgctgaaaaaaaaaactccgtgagcccggaaccgggattccccgtaaaaatcccataaatttttgacggggctccagatcccgccgtttctagtttaatttggagccccgacatttgcggcccagacatttgcggtccgacttttgcggtcccgacatttgcgcctatgtcccaaaatcggactcaaagttgaatttttgtctccccctgatagcctaat

SEQ ID NO: 32399 - DNA, 1051 bp, Heterodera glycines
aaaaaatggtgtaagtaaaaatcgtaattacgctcaaaaagcttctcaaacaatttaagcgcttccaattccttctacaatcgcctttataaactattgctccattttatacatcccattatgagcgctaaaattatcagagtgccgaaaatcgcatgtgatctaagcctagaaaaaaatgggtcaagtaaaaatcgtaattacgctcaaaaagcttctcaaacaattttagcgcttccaattccttctacaatcgcctttatacatcccattatgagcgctaaaattatcagagtgccgaaaatcgcatgtgatctaagcctagcaaaaaatggtctaagtaaaaatcgtaattacgctcaaaaagcttctcaaacaattttagcgcttccaattccttctacaatcgcctttatacatcccattatgagcgctaaaattatcagagtgccgaaaatcgcatgtgatctaagcctagaaaaaaatggtctaagtaaaaatcgtaattacgctcaaaaagcttctcaaacaattttagcgcttccaattccttctacaatcgcctttatacatcccattatgagcgctaaaattatcagagtgccgaaaatcgcatgtgatctaagcctagcaaaaaatggtgtaagtaaaaatcgtaattacgctcaaaaagcttctcaaacaattttagcgcttccaattccttctacaatcgcctttatacatcccattatgagcgctaaaattatcagagtgccgaaaatcgcatgtgatctaagcctagaaaaaatggtctaagtaaaaatcgtaattacgctcaaaaagcttctcaaacaattttagcgcttccaattccttctacaatcgcctttatacatcccattatgagcgctaaaattatcagagtgccgaaaatcgcatgtgatctaagcctagaaaaaaaaggtctaagtaaaaatcgtaattacgctcaaaaagcttctcaaacaattttagcgcttccaattcctttaaaagtcgccattatacatccccattatgagcgcctaaa

SEQ ID NO: 32400 - DNA, 991 bp, Heterodera glycines
gagcatgcacaaaattaggatattatggcatggcacttttgggtgacggaaaaaagggggacgggaccaaatttcgccgagacaaagtatcgccacagaaaatttttttttaatttcaaatttagaaatttttttaaatttctgaggcaagatttaaatacaaaaaaaaattggagaaataaaaacaaacctcgggtgatgccacctgggcccggtccgacctccacaacaaacgcatccgtcagatcaccggctctcctaaccatctgtttaataagaaaattgggaaaaagtcggaagaaacgcccgacagaataacaggcaacggtgggaaatgaggcacgacggaacgcattttaagcattttgcagatccattcgaagagatattaactcaaattgtggtatttatgcctccaaataattttggcgcgtagctttagcaattctacgcgcccgctgttgatttaaatttttttttaactttggccccaaaacggaaaagtaccgcaatttttaatgttgtatagaaaagacctctcacgacatatgcgcactttttcaatttccatacatttccatttagggtaataaaataatgtgatttctttgtttgctatttcgcatagacattgagttttaatgactatgtactgtatttgttgttttttttttgggttagacgagcaaatgttcaaaacttttatagtacgtttgatcgaaaaatcccaaaattcattttcaaaaatctgggccaatgtgattgactggcctagatcgcaatcatgttcatatgtgcatgtcccgagattttgaacttgttttttgagggaatcaagaataacaaaaaaaaaaaaatttggagcgcaatgccaagactatccgaatcccggatccgaatttgaacaaaaagttatttttttccaaaaatacatttaatcggtaaaaaaaacgaatccaggtttttatttttgtttgtttattattgtcgg

SEQ ID NO: 32401 - DNA, 2115 bp, Heterodera glycines
  unsure (1)..(2115): unsure at all n locations
gttgttaattttcattgtcagaaattttattatatcttttataaacctcaatgttttttaatttataatatgattttacataaattattttcaaattcttataaattttttatgcattcagaacactataaataaattatttttgaccttacatttctttcttcaataaatgaaatagtatagtatttgtaataatttgcagttattaaaaacaactatcttcatttattttaaataattaaatgatttaattaaaattaagggctaagttggaatcatttcattgttaagtgtttcatgtatatcattaaagcaactctatatgtttttctcatataatttccaccaaatgacgtcacattcattaaatttgtgaacatattgatgaattctcggcgatggtattaaaagatattctggtgtttttgtgtttgatatcttcataaacattatttttattcattcttttgttttataatagggcttctggaattcaataatttttcgtaacaaaatgcattgtgccataaattatttacttaataaattttagttgatagatgaatgaatcgttagattagagaaaattcaaattattaattgatgcgttctttggagtttttcccacttgattaattgttattttgttctttatggagcatattttaagcatattacttatttttgtaaattcgtatttggtggtagtctacagtgtgctagtcatagaagtaaaatagtttagaaattaaaatttttaattacattcatgtataccacctataagaaattgatggagaatttattttattttttactgaacaatattgatcatttttccatttgaatttgattttttccttgtttattccattaaatttttaaagaaatcataattgtataaaaggaataatatgtaaatgcaaaataatgttttattaaatcttttcagatatgaattaaagaacatagtgttttaaatttataaacaacttaattttatttcaaaacaaaatttaaaaaagttacgaaccggttgaaagatgtatgtataggcaggcatgcagcgaattgttgaaaaaacttcaacatggcgagatgcaaatattataaagaattaatttaaataatgttttttaattaataatttaaaaatgtagaaaaagtagaatataataaaaaataaatgacgaaaaattaaaacaaaaaataaaataaataaacagaaaaaataatagcatgttaaaactaaaaataagcgtttaaaaacaaatattgaattttttttaaattttatctataattatatataataattaacttcaattacaattactataaatatttctaaaagcacaatcattaaataattgaagcaaccacaaaacataaatcagcccttttatatattaataaaataatctttgaatacattgcatattgaagcatgaagaaatgtatacaaatgatattaaaatataaaattaaatattattaattaaaattatacaaattttacgatcgaagttgtactaaatataaaacaaagtcaatccaaataagtttcaaaatacttacaaaaaaaatataatttatttaaatgttttaaaataaaatatttaaatgaagcatttctcattttaagtattttctgcaatgttcgtgtgcgcgagtgcaaaatttgaaaaaaaaattttaagttctttttaatattacgaaaaaatcactttaaaaaagaaaaaaaagcaaaatgtattcatatatgattttttgaaattttcaatcaactgcccataacttttgttaaagtcaacagaattaaatattcttggtatcattcgataggactaggagttctctaggactaagatttctttattagctcacctanattcaaaaaatgtggtcaagtttgagcnaagttatggccaaaagtacacatgtggccaggttttcgaatattttgggcataactttttgaacctaacgaaattttttgaaatttgcagactaatagagggaggacacatangagtatcaactaatagcaagaaaataaaaaataaaataattttgccaaatgggccaaatatggactaaaaacacaaaaagggc

SEQ ID NO: 32402 - DNA, 1557 bp, Heterodera glycines
  unsure (1)..(1557): unsure at all n locations
gagagatagcgcaatagagagaaagagggcgaggggcggagaggggagggagagagagagagagggacgagtcggagagagaggagagagagagatagagaaagagagagagagagattcaaaaaaagaaaatttcaaatacgaaaagtaaaaattaaaataaacaaaaaactttttaattcggtctttaaatttaattttaaacagatttatatctgttttaaaatttaaaatttgtttattttctcgtatttctctttctcgcgaagtccaaaagtattgaaaaattttcgcctgcttcttttattttacattttaatgttggaaataacctttttaagttaatcatttgaataaaaattttttttatgtttataaattttaaagaaatttatattgtacaaataatttataatttcttttatacaattcgtttttataaaataatattaatttattttccaattttgaaaaatattttattttctattatatgtattcatatattcagctgttctcagtttataataaattgcttttttattattcgattttctatgttatgccatattctccacatgaattaatttcgtgttttacaattttctctaaaattattctaactttattaaaatattcatattttaaatattgtttatttatatttataagttggaatttcgctatttttaatttatattaaactcttgcccttatcttttgactcatacggcctcgaatttttagcccgccactttaatgtgttttttatttgtaaattattttgaaaaatttattaatgggtataatttttattttagccttttcgcaaattgtgagtaatctgtttttctttatttttattatacgaatttaaatttattttatttctcgctttcattttatatttgtttttagtagtgttctcgctgatcgagtgtgatttattttcttgaataacgaatgtttgaataataaaattaaataaaattgagtaaaagaaaaaaaagtaatggaaatacgcccttgaatttagccaaaaaatgattatgttaattttgtcgaaaatgacagatcctgatagatttttcaaaattctccaaaaaaaaaaaattctcattcactcttgaaatttttttcttgttgttcatttcgggggaagaactacctggttagtaaaccaaaaatgaaaaagagaatttgtctgagctcaatgtcgggatttccaaaatattttatagggatttggccaatttggttggatcagtaaaaagaatttgttgaaaaccagttaataanactgaaacaggggtataataatggcattgctttaaactatccttaccaccccacatctatatataaattttcgtaatgtatgtcanncaagtaacaaaaatttaaatanagtattgacgcttgttttatttggatagaaagaataaaaaattaaaagacaagataatagaggagagagagatggaangagagagaagaggatgagagagagaaaaagaggagagagagaaagaggacagagagagaaaagagacagag

SEQ ID NO: 32403 - DNA, 1281 bp, Heterodera glycines
agagagagagagagagagaggaatagaaacaagagcccccgagaatgagagagagagagagagatagagaaatggtcagttttcgcacatttgctttttgtggccctaatgaggaccgtttggattatattgatccaaataaaaaaaaaaacaaacatatttggtcattcattcattccttctttcttttctttgcgtcactctgggccaattttttcaaattgtcgcggcgcacaaaaacacaaacttaacttttttttattcattaatattttcgattgtaaaaattaataaatttttacgaaatttattttttagatttttatttttaaatatctaattaatttttattttaacctttctttttccccataaattgctcaataattttcttctcttttttctctctttcctttttttcttttctcgcatttttttatcggcgagaattacgcgttgcacatccttctcataaatttgccgccttcgtccccctttcgcgcactttgtttgtgccaatttggcacaacctccaatcggggcattttctttgtccccttcctccaactcttcctccttttccttctcctttatactatccatccaaatgtcagaggtgtagtcgaaaaaaggtgtgaaatcggctaaaacgccatttattattatttttcaattgttattttaaattaatttaaattatttttaatatttatttaaatttatattttaatttaattatttgtatttaatggttttttatttttattttcttaataattatatacatttttgtaaatatttatttatttatttattttttactttttataaaagcgtttaaaacttcggatgaaagtctggggattttttccattttttgggatgcaacaggttgcgtagattcaacagaaacagtttgttgtgggagcgcattgccagtctgcacatgggcgctctcaagctggaacgggtgtgggtccggatcattatgtgcagcatgacgacggtgcgcggcgtccaccacctcgttgggagatgctgaacaatttattaattgtatacacgtaacatttgaaattgttggagaatacaaaaatagaaagcactataatgtttaatttttagtaaattattaggaggtcaatgtccagttattaatgacacatttcgaaatgctggcgaaacagggtcagacaccgaagcaagcggccctcggttcatgcactcttctgaatatcaaaaagtttaaacgtgtttttgtggatggaaagcttaccaaga

SEQ ID NO: 32404 - DNA, 1565 bp, Heterodera glycines
ttcagaacaccaacactttcaacaatccgcaattatttgaactcgaacaagcggccgccctcggcgttagtcgtgcgaaagacgtcgccaaaatattctctctgatgctttccggcgaactgatctcgccgaaatcgctgacgcggctgttaaaacctcaatttgttgaccggattgattacgtcatgatgatccccgtcagtcgtggcttcggctttatgtatgaaaagcacccgagaaaatcggtaaggaaaaaggagagggcatacgattggaagagaattttatattggacgctttctgtttatgcttaagggcaaatggctgtttggacacccgggatttggaggatcgacgctaatggtggacccggaggaggaattagtcatcgcttatgtgtgcaacgggatgaagacaggcaaatgacattccgttaaatagcactagctaattgagtggctattaaggcatgggcgaactgaccggcacttaccgacgactgcgcaacgcggcaatcgatgccgtcatggccatttccgaccaacgaccttcttaagccgaagagggcattcgcgcccattttcttcctacgatcgaaattcttaaagtcgaccggggacggcttttcataattcattttacgattacttttttgtatttgctaaacttttttcatttaatttctttacccatttatctgtcatcaaagcgttcgtttctcttttgtattaattctttttgtactgtgaaacatttatccgaacgataaaattttccaacattcatttgcctcctttttgatcactcctctcctccgttctgtcactccctttgcatctgtcgaaacgctcttccatgcgatcactcttctctcctccggttactcttccgtcctgtcacttttccatgcgatcactctcctctctctctctctctcttcacttccctttgtctctccaacttttgtttcctctcttcctttctctcctttcaccacatttgttggtgcccattgttcagtttgcgtttgtttttgcgtgccttcagcttttgcttgtccttcttctgcttgtaattcttcttcttctccctgtactgctcgtcatcgatgtgtccctgcgctctctgtgttttcagtcttctcagtttgtccttttgcttttgcttcttctgcttcgccttttgcattttgtcgctgtacctttgactctttccgtttactcttccgccgcttctacggctcctccgacaacaaaaacgcatattattgcccgaattccgttggaatagtttgcagtagaaaccagtgccacaatacgtcgaacttctcgaacattctgaaaatgtcggtttggcatttgggggaattctccccgccgatcggtccgttcgccacggcacggctcactttgagttgggctatcgcccgcggggcattgctccccctggtggagttgggcgcgtcctccctcctcctccccgtttctcttttcctccgctgtttcgtcttcgttttgcccgtggcattggctgatgaaaaaggcggcaaagacaatcagcaacag

SEQ ID NO: 32405 - DNA, 1156 bp, Heterodera glycines
catgtcctcactcttctttgacttggccggtgcactgcttttcattcgactcagcacgtcgatgcagaccaataaatatttataaccgtcgttatgctttttcaactggtcaaatatgcacaaatcgcactgccaattggtatggaagccacttggtatcgtctttagtctcgggaatcttttcctgatgggcttgtgaatcgtgtatgttttctgcttttttaggaatttattaacgtcatcggttgtaattttcgggtcaatctttttggcctcattaaaaattttttgaattccagcaaaacttgccggagattttaaattaaaataaattttcgataaaattttctctacagtcttgcccatattagtggtttgaagggtttcttctctcgcactatgccgggtgtttttatagattttattgcctttttccttccacgtccccacatgacttttgatttatcaaccatgtcttttactgttggatccttcagtaacctatctttgagaaattttgcaccccggggtgtttcatctttcttccctgcgagatacaacaaaacatctctataattactgttttcaatcggcaaattcatgttcgactgtacctttccggccgccgtaattttaaataaatctttgttttcctttacgtacctaaaaggaccgtttaaaagggtcgggtgtataatagttttgatcggaatgggtgtttttaatgtggatgttgtttggggctccggagttaactcatttattgtatcattatccgattccggatcaggagttttctcttcaagtcttttcccaggaataattattttccggggttcatcggtctcctgtagtttggattggttattgaggcccagatatggtgcaacgttcggaccgggtacatgattctcaatcactaccttctgtggtctattttcaagtatcccctttaccgtacgcctttctttatagagccaatcatgtctcttcgccttgatgtcctcgcttatgccggggtcttgtaaattctgagaaatttttgcgtctaaactcgctttttcattttggagataatcaccactattcatcgcactccgtagagccaaatattccgcctcgggaatcattaacattttctttacaaatttcatga

SEQ ID NO: 32406 - DNA, 1361 bp, Heterodera glycines
ctttaaatgaacgagttcgtgaactttgcagcaacccactgttgcgagtcgcaatgctacttgatcctcgatttgcttacacagaactgttttctcagcaaaattggagggttttcgaacagcaattaatcgaatttgcaaaagagagttggttgaattattagaatatttggtaattaaaatatgaatccctttagaattggtctgcccaacgatagaaatggacgataattttgatgtgaacaactttggtcaggttgaatcaggaattgaccgtacatttgctgatcaagaattgagtccaagcagcaacgagagcatagagaaatgtattgacgattgcatcacataaatactttattttctttttagatgatatctgggcccaacgaaaatcaccatgtggtatttctattccctcaacaatttccggagatcctgactctgattttttatcaaaaattgaggctgaacttgcttgttttaaggcaggccaaaggatggaagtgaacggagacttattttcctggtggaatgaaaacactggccgtcttcccgaattgtcaaaacttgcaagaatggtccacagcattcctgctacatcagtcagttctgaaagactgttctcaaaagctggacttatttttgccaattcacttcgaaataggtcagaaatcaataatgtattaatttattttataatttaaggctttccggcaatactgtgcgccaaattttgattgtgaaggccaatttggacgcacttttactggcaccaacaaatgaatatgaatcagatgaggaaagtaaagaaaaagacgatttttgagttttgaagactttatttactagcattgaaaaagaaaaattattattttttggttaaaatataaatttgatcatcccccgaccggggtccccgacccccgacaattgagctcccccccgacccgacccccgacatgtcgccccccgaggtccccgacccccgactttttgccccccgagggctcggggcttaaccctagtttattcaaaaacttacaaattttcatttttatgagctttttaaaaaatgaggttttaaggagtcgaaacaaagattttttccattatttaattattttaataatttatttcattttttaaattagttaattttacattttatttcttttttttctaattttttatgttattttaaacaattaaataattattttaattaaattaataaagtaccaaattaattaaagtgcttaattttattcatcattttggctcgaattttaatgattagcaattaaaatttcattattatatttcatagcaaatagataaaaaaaacagctaatcaacaa

SEQ ID NO: 32407 - DNA, 1184 bp, Heterodera glycines
  unsure (1)..(1184): unsure at all n locations
aaatttgtttttggggtaaagtaaaaatgtacatgtggacgagatattcggcatcaaaacggttcaaattgattgaatttgtctgaccatcccgccatttggccttttgtttgtccgtccgtcgtccaattacgaagtggccggacagaatatataaaacaaatggggggggggggggggggtggagatggctaagcaaataatttttcttttaaattctcaatttcccttccgaaaaagttaaataaaaataaaaatatttactcaaagtctttccaagtctatgttttcgaaaatcgaccatataaaactacaaatgagaaaactagcttaaaagcagggttccaagatctgaggctttagcctcattttgtggttttttgataggtcaatgaggttaaattttcaaaatgaggctttttgtggttttttgagaaattttgataaattggcataatgtttttggccatatttgtcgacaaatctgttaacaaatcgtattaaaaatcacaaaatttttcccggcggcgcctatcggcaccgccggccccccttgttccccaaaagtttttttgaaaaaagcgccgcaaaaaaatcaacttcggtttttcatgcttagaatttcacaaaatgtttatttcgaacaaaaaattgcttaaattgatcatggatagggttgtaaattatatggactaaaaaacgcgaaatatggacattaaatatggactaaaaaagcccgaaatatggactaaaaaggacaaaaatggccaaatatggaccaaaatatggataaaaaatgccaaaatatatgttgtaaacccccaaaaatcccaaaaaaggtgtgcatatttaatatttgcttaaataaacctaaaaagtacaataaacaaccaaaaaatggggtttaaaacttaaaaatgcatattttttattgttgttcgttgtatcaaaaacacctccaagtttgccaaatttcgaaaaaattctcattaaaaaaaagaaatgttcgcaaaaaaatgacgaaaatatttattgaaaatgccaaaatgacgacgaaaactcaaatttttcgtgttttgtggggtgtaatttttaaaaatttccaagaagttgatctttaggggtgtatttttcattttttttttcatttttcttgtgaaaatttccaaaaaanntggcgacct

SEQ ID NO: 32408 - DNA, 1255 bp, Heterodera glycines
gacggaagggatgccgacgccgaaacgattggccgattggcatttcgggtcggtttgacaagtttttgtgcgagcgtgggtttatttttgccggattttatgcgatttccaataaaaatgcatttaaaaatgtatgactgaattaatatttgaattttgcttattgtagttactcttttaaaataaccaatttttagtggcattatgacatcactctgtccgcattatccaatcggaattatttgggctttttcgggcgagtgatcaatcggacgcgcggttggcccttttattgccccgagtcggactgtggaaatgttgcgaatgtgctttgaatatatattttttttttgctccaaattgttcattctgtcgccttctaattacccatttaggggtccatctattcgcttctgttgtacgacgcaatttacaattacggaatggcactgaacgaatctttccgccaatttggcattcgtcccgaagtgtatcgaaacggcactctgttggcgcagaacaacaggaagccattcatgggcaagaaataaaataaagccgcattttcattccatttgcttaaggtttgacgggctttgtgacggtggaaactagtcagaacacgcgggtgttcgttttgtccaatcggaagtcgagcgacaaaggaaatgcgctacgcattttaatgcaattcgcatgggtcgaggggaaattggtgagaaataaagaaaaacaacaataaaaaataagaaatgttaaaataaaacaaatgttttatgatgccatttattctccgccccgccgaattccttcgaatttttaaaaattgccgcgttaatgggaaatgaaaaaaagcgataattaaaactgttaccagtcaaaacagcttttatttttcaaatatgtaaaattctgtgctcagcaaatatcgttgcgaaatggcagcttgtccatgtggtcctcccgcggtggaagcattcctccggcggtgccaatctgcggcttcgacggcaaagggtgtgccgcgtcggtgttcgaaatgtataaagtacgaaatgttaaaaaattttttgatgataaattcttttttcagggctatttattgcttggaattgctctttttgtagtgacaataagcggtagcacttttactgtcggctttttgatacagtaaaacggaattaataaaataaacaaaaaaataaaaataaaattcagcgctaaatttgtggaaggtcggagaagcaacatgagt

SEQ ID NO: 32409 - DNA, 841 bp, Heterodera glycines
atctgatcgatggtgtgcaattatggcagtctaatagacgttcaaaaatctgaaaaaacaactaatttttggtaattttcttttattcattcgcttaaaaacactaaaatacagccgtaacatatggggggggggtttgaacccaactccattttgttgaccatctcacaggcaactgagacacataagcaatttttttttgtataccgaatggtatgttcagtaagcctccttgatgaaaaacggcttcaactcagcttcagtccatcgggattcgcggacgaaatcgtagagcttctcctgtaattatttaacatcagaaacaataaataaaagcatcagaataattggtccatttcaaatgtttggataaacacaaaacatgcctcgccaaataaggtgaccaacagcgcctgaattgaaacagattataacgcacaacaatttgttggaatacgtacccaactagccaagaaacggccaggattcgcgacgcagatctaaatagtaagacaattctttgtcgtccgacacatttcccattcattgtcagtcgacctgaatttgctccgcatagtacgcgggctgtaccggaccaattgcctcgttgaagcgccgcacgacctaagaaaataattagggaaaaacaaaaggatgttgcaccgaagtgggctgcggactcgtgggtaagctctctccacgcaaaagtttggccaccagtggattcatttgctggtcgtcactcgaagtcggcgggtccgttcgccttccatcacgtttgtcccagcgtttctgcattgattgtctcccgtaaagcttgttgcgcgatatctttcttctt

SEQ ID NO: 32410 - DNA, 974 bp, Heterodera glycines
cccccccccccccccccgcatcgtttctcctccgagaaattaaagaaaaaacttttatttgagaaaccaagaaaaaatcataaaattttatcttgagttactaagattttcaaaaaaaaattttccagaaaatcgctgaaggttttcgaaatttttttttggaattattttataaaaaaattttttctaacattaagatagttttcttgaagaatttaagttttaaaccttggctcgatcggttctgggttcgcttcccattggctgcgcaatgtttttacatgatttttttatgcccgtcaaaaatacaaaataaaaggaatttattttttggccctcttgggcattaattaatttacattttgaaaaccttattaaccatccattcaaccaacagcagtgacagcgagcggtgccgtcgtctccgctggcggtggcacgccgcgcatcgttgtgccgaccagtctgagaggcgctgtttggtagacggggggatgccgtgtccatccgacggacagactgactgatcaatcaattctcctctgatcgatcggttgattgatggatggcattggcacttcatccctccttcccccatcctacaccaccatcacactataaacattaatgaccgcagcaccaccaccaccgttccgttaatcactgttgtttttgctgtttttttttgtgaatttttgacacatcgccacaccaaagaatatttgaacggacaaatcgcccgccaatctctcccccatttaaatgtgccgttgttgttttgttttgttgttgttgttccattattgttgttgttgttgttttgtttttcaccttaaatttgttgttttaagcccttttgccataattcccatggacattttatttttcacacaattttgttggaattaggaaaaaaattataattttccttggaatttggcatatatttaaaagcaaaaaaataaaataaaaaa

SEQ ID NO: 32411 - DNA, 1712 bp, Heterodera glycines
  unsure (1)..(1712): unsure at all n locations
gtctctcccccttcattctctcccctcctctctagccatctctcccccccttttccccccaattccccgcccccggggggttaagatgaaatggtcgagaatgactgagcaaattgtgcatgcattttttggccgtttgattgtttatttttgtttgttattttctgttgtcgttgcgttgccctttccctttttgggagagaaaacgcgcaaagggaccaaacaccgaagaaaaggccccccagggcagaaaagttaattgccaaatcgctctcccatgcccccccccctccccccattttcgcattccctgcgcattttccaattttatttggtctcgtcccaatcgatttgattccccaacattttgccatgacaaataaataaataaaataatcaaacaataatttggcattggacacaaaaatattaggctaataggattatcataaaataatataataattttcattagtccaatagattaaacacaaaactctctcttccgttttcaatgtggggaggttacggtggtggttactacgacggctatggctacggtgggtactacggttcacaggcgagtgacattggcatttttgaagataaaaattagggaaaagtgccatttcgataataattaaataacatttaaataatttgataagtaattagaagtgttcgttttttcattccccaatttccattttcagatcattttggtcgtcgttctgctgatcgtcggctgtctctttctcacttgcgttgtcgccggcctttggctgctttattcagttcgaataaaatattttatcaaaaaaataattttaaattaaatttaaatttaaaaaatattttcgcgcagagacaacagaaagaaaggggcgaagtgcggcaacaacagcagtattacccccaatattacactcgcaacggcggaccatacgcaaccaaagaattgagcacagaatttccctaaaaatggcattgatcagtcgccacaattggcattttaatcggacaaatgaaggcgcaaaaaaattgaaaattcaaaaaaaaattagcaagaaatgcgcatttattgaacgacaatgaatttagcatatcattaatatgtacatacatataattttatctgatcaacaaccctcgtcaactaacggatcacttgccttttaattttaacagtttataattgcccaagccggtgctaacagaaaatcgacagttttggcttgacacaaaaatttaaaattatgaaagttgaattttagtgaatttctgtaaggacgaaaacttaacgtcggatgtcatggcctactaaattcttttaaatatgattttgattttttgatggctgagttggaattggacctgaattcctatttatcctgaacctgtattttctggacaaaattttggtaaagagagaaacgaagaattcctgggccagaccctgtctcagacccaaatcgatcaaattaaacgagaaaaacaaatgaaacgggaatgatttccttcagagttaatctcccataacaatcggatgatttcatccgtaatataagcatcgattgctatcagattattattcatgtccaaaaaagaagcattttaagtcccgcagaagttcttttgccccgcattttgtcgccgtcaaatggtttcagtgctgtctgtcgcccatcncgtccanagaccgccgaattgac

SEQ ID NO: 32412 - DNA, 964 bp, Heterodera glycines
ctagtcagcaatcgttgcttaactgtccagatcggacgggttagagcactttctgaaaaaaatatttatgaaacaaaaaaatcgatttttcaagtgtccgtttggggtactcaaacattatcggggagcaaaaatccaacgcagaattaaagtacaggctatagggaagctattcccgaaggattcggtctccccataaatctgggcgcatcggttcggggggactgccccgaaaacaaaaaaatcgattttttcaagtgtccgtttggggtactcaaacaattatggggagcaaaaatccaacgcagaattaaagtacaggctatagggaagctattccggaaggattcggtctccccataaatctgggcgcatcggttcggggggactgccccgaaaacaaaaaaatcgattttttcaagtgtccgtttggggtactcaaacaattatggggagcaaaaatccaacgcagaattaaagtacaggctatagggaagctattccggaaggattcggtctccccataaatctgggcgcatcggctcggggggactgccccgaaaacaaaaaaatcgattttttcaagtgtccgtttggggtactcaaacaattatggggagcaaaaatccaacgcagaattaaagtacaggctatagggaagctattcccgaaggattcggtctccccataaatctgggcgcatcggttcggggggactgccccgaaaacaaaaaaatcgattttttcaagtgtccgtttggggtactcaaacaattatggggagcaaaaatccaacgcagaattaaagtacaggctatagggaagctattcccgaaggattcggtctccccataaatctgggcgcatcggttcggggggactgccccgaaaacaaaaaatcgattttttctagtgtccgtttggggtactcaaacaattatggggagcagaaatccaacgcaga

SEQ ID NO: 32413 - DNA, 926 bp, Heterodera glycines
ctttgtataagtctcacactttcagctccttatcctcttaaaataaactgtatcagtgttgcggaaggatcgagttgattgatggaatcgagtccaatttaaaaattaccatttgcaagtggatatagatatatttagaggataatagctgaaattttgaaaatgacaaaaaggagaatataaaaataatattaaggatatgattagcgctatcaactcaatgatttccacaacactgatgcagtttatatttagatgataacgagctgaaattttctgaatttcacaagggtgatagagaaaataataaatctgagaatattattaacaagccccttctacaacactgatgcagtttatatttagagattaagtagcggaaattgtgagattctctatttactattttcatggcaatttcagaactttatggcataaatataaattgaatcggcgttgcagaaggatagagttataagcgctaattatctttcatttaattatttctaatagcaactttgtataagtctcacactttcagctccttatcctcttaaaataaactgtatcagtgttgcggaaggatcgagttgatacacgctaataatctccgatttacaatttctttaagcaaatttatatagatatatttagaggataatagctgaaattttgagaatttcaaaagggagatcgtgaaaataataaaccgggtatgattagcgctatcaactcgatatttccacaacactgatgcagtttatatttagatgataacgagctgaaattttctgaatttcacaagggtgatagagaaaataataaatctgagaatattattaacaagccccttctacaatactgatgcattttatatttagagattaagtagcggaaattgtgagattctctatttactattttca

SEQ ID NO: 32414 - DNA, 651 bp, Heterodera glycines
tctagatgtcttttcaaaatggtctgttgcgtccaagtagtaccgggctaacctcacccccgaaccctgaaaatttcctgcgctcaaacgtggaagtgctgaaggcggaagccgaacgaaacggccgatgagtgccgtaggcggcggcgtccattacggaaagtctgcgctggtgttcccgatggtgatgaccaaaatggggtgggaggatttacgggattcggtcaattaattcgccctcccctccgccaatgctttgttatttgtacatggctgacaacaacggattgttcatccgccgattgcttttggccatcgtcgacgattccttccgcgcggcccaattgaccaaagagaattccaaaagagcggctaacaaaagcggagactggtcaaaataaaggcaccaaaaagaaaccgaagatgaagccggtgcaaacgccgatccaaatgtcaacactctgagggggagaagaagcattggcacaattgggggcaaaatgaaagaagggcaaaaccaaaggatgtctcactttggtgtaactgacgggcggaagtttggcatttatgccggaggcctaaaaaagtcggaggaatgaaagaaagaaaagaaaaaacgccaaaaaaaagaagaagagaaaccatcgtagt

SEQ ID NO: 32415 - DNA, 1235 bp, Heterodera glycines
tcagtcgcgcgactgcggacgacgccaatttttgtgctgtgcgaacgggtggtgcgattgggcgggagagtgcggggtaaaaaatgaaaaagaaaagccgaaaatggggggggggtaaggacaaatgagcacaattcggacattttctgcgcttcacagatggccaaattctgtttgccgagctgtgagatgaccaaactcgcccatttgtccgagctcagccccgagggaatgccgcgcatcgatttgctatacgactgacaaatgagcagcaaatggggggggggcgaggagacggcacttcgagagtcaataattcattcgcccactctcgacctcattaacggcgcggctttgcttttgttcttcgaatgtcaaaagaatgaacgaaaaaagcgatggcataaaacttaaaagacaaattaaaaaattcgttgttttaatttttattcctcattttaatgaaattggtgtacatttttcgcattttcaaatttcctcctcccattcgtccccctcttcttcttcctcctcttttcccttctcctcgtcgtccatttgctcctcaatttcgttgttcgtttcctcacggccaccggcggacggagagccttaaaaaattcaaattttcaaaaagattataattttgacgaatggaaactcgattatgttggacaataatgacttcatttgcacttacgtcccaagtccggcactccgccgaccgcgccactttcaatgccgcactcgtcggagccacgcaaaatgcggaagaatccgtcctcgccccagtccgtgttctttaatttcagtatttgcgatcaaataatcggccaatagtggctttggcatcctcatcctccccctttgctcggcactttcggcattccatggcatttttatacccaaaattttttgattacaaaatgcgttggcattggcaccgctaaaagtgtaggggtcctatttttccacatgccctaccccaaagtgatggcattggcaccccctcccgtccccctttccccggtcccttctctacccatgagttggcaaccagccaatacggaatgccattgtccgcgccccatccgagcagtttcaccgcgtggcccccgcccaattttccggcgacatgctgagaaagacggaaattacagaaaggtggcaaaataaatcacgtagtaaacgccgcccttgtagttcagaaagtcctcatacacttcgaatgccac

SEQ ID NO: 32416 - DNA, 638 bp, Heterodera glycines
gtttcgtacgaaaaacctttatttcgttttcgtgtttcgttcgccaaaattttttcaatgtcatccatggtgaacgacgcctacgttccgcaatcaacgtggtttctgctcatcacatcccatccggtcgcattccctgaatttgacccgctttttccgaacaaaaaaccaaatccaaacaaacatgattccttccatctttaaaggccaaaccgccaggagtacaggttttaaaaatgtacaaatttatgattattttaaaaaatgacaattcttttccgcatatttagaaaactctgatttttgaaagtatttcgaaatttataattttaaaattgaccaaatacagttaaaaaggtgctaaccatttgaaaaccattcccaaaaatccggtctgggtcgttttcgccttgtcattttcgcgtggggacgttttcgcgtggctggggcacgttttctcgtggccgttttcgcgtggggtaccttttcgcgtgagtacctgattaggactgaaattgggcgaatttgtgctaaacatccatgtttcgaatcccgaatctgaatgcggacaattttcttgactttttatattctgtatttaatgcagctagtatctactagaataattagtgagtttg

SEQ ID NO: 32417 - DNA, 901 bp, Heterodera glycines
ttttgacttagagaataagtgcaaaaataacaagaacccccctactttaatccctttttagtgcatatttaaattaatatactgaaaactgttaattagataataatttaaatatgagcaaatttatttgattattttactaaataagtcgcaaacataagcttcggaacaataatctttatatttctttaaaaaatatatctcagttacttattttttttaatttatttatttaattaattattatttttgtattgcttttttaaattaattaatttatgagaataaaaaatgttttactttgtttttttggtctcataatctcatggccattgggactattaccattaaaatttttttaacgatttaataaattaagttttatctattggcaattttaatgcttttcttactatttaatgttgctcaacttatgatttatttttccatttttaaatattattgtaagaaataagttttggtttgaagcttaagcggatattaccttttctttgtaaaacttatttgacattttttgaatccaattttttgtcgtttatctatcattttagttgttttttataaaaatttattgggaattcttaaagaaatttccgttgtatctctgtttataaaaatatacttaaaaaaaaattaatgataaaaataatgattttaatgtttgaattattattatttttctttttaaaattaaagaaatcttttataaatatttaatcattactttaaattagagtgccacgggaccaggacctggtagcggacaactgagtacaactgagtaccaaggtcccggttttgaccgggaccgggactagtcccggttttttcccggttttcccagctaaaaattcccggttttttcacccgaaaaggtccc

SEQ ID NO: 32418 - DNA, 1327 bp, Heterodera glycines
  unsure (1)..(1327): unsure at all n locations
atttgatcgctgttttaatgccgcttacatgacatcggctcccanttggggtttgtgcaaccatattgnaccggtcaaatgaggccgatgttgttgctgacttcagtgggaatggtcattgtcatgcttctgatgggtccgtcgccgctgctcggcttgcccaagttggttgtgaaattataattttaatgaagatacggataacgacggacttgtcgagattcccgagctagacaggacctaattacggatttggtcaggaaacccatagagacgccggctcaatagattattcgcaattgaaacctaatcaaattacagtttaatgataaccgccgtagcctttgcattgcttggcattgttgctggtgctgcctatgtgcccttgtttaaatggtgcgtcgacgctgcaaagtctgtgccgtgttggacggagtgaatcatatagcgtaattgtcccaattaagcaacgcgggattggacggcacatcgtctgccatttgcgggtgtatctccggattcatacagtcggcacttgccctcaggtgtgacgacgggaaatttttgctttcattatctttaatgacaagtcaaagatgctgaccccagtctttatctccaactgtttagtgctttcttggccacaagtgtcgggggactgagtgcccagcatttgggcctcccgtggacggcgacactcgtggcagccattcaattggcattcgtaagtcgtgccaatttcgggttgaactcggattacactagcctgggatttcggaagtctgaagagactggcctcggtttgaaatcaccctattttccaaaaaaacccatgcccctcggtaactcttaggttaggttgtaatattctaaaaagttttttcattatttgcttcgtcagatcgccgtccaaattttctattggcttctaatgagagttcggcgcgaaaggattcattacatccaattgcttaattagtccattaattatcatctttcattagtttttttcgcacaaagagatataattgaataaatattgtttgcagacttttacggggtattcatatagtacaacctggaccttgatccaccaggtccagacatgaacaaactggatttcctgaattatattttagaatttgttattttgaatgactatcttttaagttaaccaaatgattaaatagcttttaaaacattaaataggttttaaaacatattattattgtcaattagcaattagatgtttttaggtgttcctaagtaattaattgatttttcaaacatttgtttgctattttaaacaaatttcaaaaaaatccag

SEQ ID NO: 32419 - DNA, 1442 bp, Heterodera glycines
ttttttttgtaatgttttataagaacaattgcactgttcatcgtcacaatatgctttgagctgtgcctgaattttctgcccgctttggtcagcattggcttcaaatatgtgagtactataagggttgagcgccagcggcggacggttaaaacgcttcaaagcggaggcataacggctctaggaaaatccgacaccggaaaattcgacactggaaaatccgacacaacaccaactttaaatttaaaaaatattttttgattattgagttaatatctggctatgtttatcaagttttcgaattgaatttaaaaaaaaaaacggttgcgccattcgatgggatattgctggcaaataataaaagagttgtcgattgttgcgagtcgcataaatctctgtgagattcatgtcttgcaccacgtacactttcttatgcttcatgccctttcctctgattcgatttgccgcattttttacaatttattgagatgatcaaaaaagggcattgaaataaatataattattatatgcctaccctaaatagattttatagcaataaaatatttattttaaagaaatagtttttatagcaataaaaatattaattttaaagaacttaagtgtgttactattatcacatgttttttaaatattctttgcatccaccaatcattaaatattttttaaatttaaagtgggcgtcgtgtcgggttttccagtgtcagacttgccgatagtgtcggattttccggctcccggggggggggggggggggtaaacgtttaagtccactaaaaatcagtcaaatggataaaacaagtgtgcgtgcgcaagaaaagtgataattgaccatcattgagaacactcagccatttcggttgtgataggatttcgtcgttgccactttttgtcacattgccattgttgctaccggtcttcgtttgctcttccgaccgctgcgcgtttgtgttatttgtcagtgttgctgtgccgatggaattaattcccgtgtttagatgacgcaaaagtgccaattcagtgcgcaacctttagaaaaatatcattcacacatataaaaaaatatttgcattttttaacccattgataaaaggcaaaatgataactgacaacgggaagatattattattagagatcgacattttgaaaaaagcctgggtccaggacgatctctagatattactatactatcggtttatataaaaagtacgtacctttcaacagtttgcgtcagattggcgacttggccggcaaactttcgtttctgttcaaactgaatataaatttgggcacttttgctgtttatccaccctgaaaaaattcctaagggggattacacttttttaattattatttttttatcaaaagctgtaaactcttgttcatggggtttttggggtccctttcaaccaattccaaagcgtcca

SEQ ID NO: 32420 - DNA, 1129 bp, Heterodera glycines
tcattagccgagaaatgaaagaaaagccgagactgcctctagggcttggtcaacggatctgatcatgataatctgcctttatacatacgaacacctctgaccaatgtcagttatttattgctcattctccaaatattttttagttcccaatttcaatagagcccttttaatcataaattacattatgaggaaatacttttttggattcgttgcccttgaaagaaaaaagcagtatttattttacaatcattaaaaaacaagaacattaaatgcaaatttgtctatttttgagtgaagtgcgcaattagcagctcaaccctttgcttctgagtgtccgcctcggagtccaaataacggtgaaactcgcgcaaaatctgaaaatccaaaaccgcgtcacaaatgaaaaaaaaattgtagcgtcgaaataagtcagagaaggaggcaactgaccggctccaactgtttgccgaccgatccgtcgccgagtcgcaacctgaacagtttctccacccgttcgtggcacccgggcgctcctttgctgcaaatttcggctaaaatcagcgccgccctctgcaaagtgtacaatccgttgttcaacttctccaaataaagctgaaatcacagattataaacaaggacgaacaagagactaattataaggacattcgaaacccgaagagtgaaaaactgtacttgttcaattcgtcttttgaatattatcattatttacctcctcagtgtccggcttttcttcctcagccaatgaagccattcgacgctccatttttgtctcaaaccgtcgcactttctcactgaaatgtttttcttttcttattaattaaaattggatagaaaagtgcctgtatttgagaaacaattccacggctcggtcgatcttctcgaaacaatggtccacaaatttctgcaaaacgcgttggcaattcgtcggattgcacgaaaagagcaaagcgtccacgacggagcagcaaaactcctcatggtcttcatgcaaaattcaattttgccatcaatgatttacttttaccctctggcgatgtgtctttgcgcttcatttttggcggagttcacataaacagcggaaaaagcgtagaaagacctttgttaaaaa

SEQ ID NO: 32421 - DNA, 1230 bp, Heterodera glycines
ccataatatctttccataaggctgaaagcagaatttgaatgggcagtcgatattacactgagcacccgttgaagcgggtgatgggaaggcatagcaaactgtattttaaaattctggcagcaattctaccaaaaacggtgtttagaccgcagtaactcggctcagagtgaagattaagggacgcaaaagagacgatttaaagcgattcgaaaattctatcgactgatataataacgatgcagtcgcggcgttgacaactgagatggaaccaaaagttccataatatctttccataaggctggaaagccagaatttgaatggccagtcgatatttacactgagcacccgttgaagcgggtgatgcgaagccatagcaaactgtatttttaaattctggccgcaattctaccaaaaacgtgtttagaccgcagtaactcggctcagagtgaagattaagggacgcaaaagagacgatttaaaagcgattcgaaaattctatcgactgatataataacgatgcagtcgcggcgttgacaactgagatggaaccaaaagttccataatatctttccataaggctggaaaggcagaatttgaatggccagtcgatatttacactgagcacccgttgaagcgggtgatgcgaagccatagcaaactgtatttttaaattctggccgcaattctaccaaaaacgtgtttagaccgcagtaactcggctcagagtgaagattaagggacgcaaaagagacgatttaaaagcgattcgaaaattctatcgactgatataataacgatgcagtcgcggcgttgacaactgagatggaaccaaaagttccataatatctttccataaggctggaaaggcagaatttgaatgaccagtcgatatttacactgagcacccgttgaagcgggtgatgcgaagccatagcaaactgtatttttaaattctggccgcaattctaccaaaaacgtgtttagaccgcgagtaactcggctcagagtgaagattaagggacgcgaaaagagacgatttaaaagcgattcgaaaattctatcgactgatataataacgatgcggtcgcggtgttgacaactgagatggaaccgaaagttccgataatatctttccgtaaggctggaaaggcggaatttgaatggccggtcgatatttacactgagcacccgttgaagcgggtgatgcgaagccatagcaaactgtatttt

SEQ ID NO: 32422 - DNA, 1301 bp, Heterodera glycines
tcattcatttgggagtcgttcgcacggaaggccaaccttttgggaaacattgacgttccgattgtcagacaatttccgtgccggcttttcgaggtggcaaattgcttggctggtgagtgggtgccaaaaatttacacaatgccaaattgccacttttttacattttttgtaatcgttgccccaaaagtgcgtcaataaatcagaatttcttatatttttaaatttttaaatggaatttattttcttaatttatataatttttaaaattaaaagatatatatatatcaggggtgggataaattttcatgttttgaagggtaaacgatgctcaaattcgtattgatgagctcaatctgcattttgtgtaccgtttgggggtgatgccggataagcatttgctgatgtaagtctggcgtattgtttttattttcaaattaaattcaattaattaataaatgcccttttttatttaaacatttttttaattttaaggtattgccagaagaagttcgacatgctgtatgtttaaagagcaatgaatttttattttcccaatttataggaaattgaacatttgtaaattcaagccctcaaaaattttctttttaaaattttccaaaattattggcttaatcggtaaaagtttttgtcccaatttttaaacacagccttggggccaacttgctgtttgcccttaaattgaccatcgaatatggcgaacgaggaatcacccgcaggggcaaaattgccaaatttttaaccgaagaagaaattcggcgcgaaatggaggacacctactgaacaaacgaaagaaagaatgaataaatggacaaaagtgatcgatcagagtgtgtgaagagaaacagaaatcaaacaaataaacacatttggtgcaatttggaaataaatttgtccttattttttgaaaatattagaatttttctacaaatttgccggtgtgtctaacagttcatacaatggcgacaatttttttaaattttaattaaaaactagaaatttttcgtccagaatcagttttttttttctaaaaaaacgaaaatattttttgctaattttattgtttatttggtgattccctcctaaataaattgatcagcaacaaatatctgagtgaatttataccaccaggcatacatatacaatatacatctactaatataatggaatacacattgtatgaagaaatagaaaaaattatctaattttgcgattttggccatttttctattataaataggagtttttggggtccggcggtgcagataggcgacgtcggagaa

SEQ ID NO: 32423 - DNA, 1012 bp, Heterodera glycines
  unsure (1)..(1012): unsure at all n locations
cagtgtccgttntggggtactcaaacaattaatgggggagcaaaaatccaacgcagaattaaagtacaggctatagggaagctattcccgaaggattcggtctccccataaatctgggcgcatcggttcggggggactgccccgaaaacaaaaaaatcgattttttcaagtgtccgtttggggtactcaaacaattatggggagcaaaaatccaacgcagaattaaagtacaggctatagggaagctattcccgaaggattcggtctccccataaatctgggcgcatcggttcggggggactgccccgaaaacaaaaataaatcgattttttcaagtgtccgtttggggtactcaaacaattatggggagcaaaaatccaacgcagaattaaagtacaggctatagtgaagctattccggaaggattcggtctccccataaatctgggcgcatcggttcagggggactgccccgaaaacccaaaaaaaaattttttggataaaaattatttaaatgaactgactagataatatttaaaataggttatttctcttcctttcagtatccctgcaaagtttggtgcgcttctgatcagtttctgaaaaaaaagttaagcctaaactttttggcctgtttaaaaaggaattaaaaatttttaaaaattttattcatctccctttttgatagaaaaagcatcagagtgcctaaactagcatgtaaataaaatttggtgcgtttcagagcattttctgaaaaaaatatttatgaattaattttgcaaaaaataaataaaaacgaaagactcagattttcgaaaatttttttgagccagctagctcggcgctcatttcagtgtaagttagtcctttaccggggagtatccctgcaaagtttggtacgcttctgctcaattagcaaaaatatgagtgatcgaatttcactaaaaaagttaagcctacattttttggcatatttaaaagcaattaaaaattttttaaatttataatttcct

SEQ ID NO: 32424 - DNA, 1054 bp, Heterodera glycines
acggtaggggtcaactccgtctcgccaactccgtctgggccaactccgtcttggggccaactctgtctcagccaactccgtctggccaactccgtctggccaactccgtctcgccaactccgtcttggggccaactccgtctggccaactccatcttagtgcataaggggccaactccgtctcagacaaaaaaaaatatttaaaaatttttttcgacgaatttttcaaaaaatatacccctaagaaattaaaaattttctcaaaaattcatctgcaaatctatttatttattttcatgttctgatttttaaaattattcatcaaaatatcgctttggcttaattttgttacttttaaaaataaatttaccgttatcatttattagtatatacttacctaacagtttaaagtaccattaattttttagccttgcgaaaatggaaaatgctgaaattaaatctcaacgaaaaaataaaaaactcgaacatgaaggctgcctgtatgtcttccatttgttgaacgccgatggtgacgtaaaattttggcgctgtgaacatcagcacggcgaattcaaatgtcgagggcgcattcacacaacgctcaatgacgtcgttctgaagacaattggtatacacacgtgcaaccacagcgcggcaaatgtcgtcgcacaaaaaatcaccaccggcattaaactcacgtgagaattttttaaaattaatttttaaattctcaagacggccaaggcgatacaagctcgcctggccaagaaaagtgagttttttcaccatttttactcaaaattttttttttaatttcagccgctccacagctgaatcccaatgccgaaatgccaccgcaggacgaagcagggccgtcaacatctgctgcatcggccgaagaagcgatggagccaccaccaccaactccagcaccagtgccaacgccggagatggacgaggaaattttggaatttggcttttcgctgccatcgacatctgtcacacctatcggcgatttggtgccgttttcgacaacaccaactgcgccaatggac

SEQ ID NO: 32425 - DNA, 1231 bp, Heterodera glycines
ctgatcgccgtccaatacatcgaattgcaaaatattcaccttcctgaccaaagtcacggggtttgctgtgcccacaatccgatcactcactgtttttgttcctttggcagatttgcactcgccgtttcctcctttggtgggcatttcgacaaatttatgccatttccaccgaagattattgtgttcattagtgaaaatgccatgcctaatccttcggtagaataactgtttgatctgtcccccctccccacccaaaggtcggacattaatgttctccaattggtgtcctccgttaatctgatggtttggtacattctcccgttgactttgctctttacaatttacgcgagcattgggtaattttttacgttttttttggtcttttcgattattatttgattttttcgtctcctcggccggacctgtccttgaaaaacggctgccaaattcggcctgcccgtttctcatttgtcagcccccctccccctccgtcctctttctctattagtacttttctcccccaagtttggtactgattcggacaactgacgatgattcggtggtgcgcacttcgcatttgaccaggccaacaaaaaatgccaatttggggacgaacccaaaaagttggcagagtgccaattttgtctccgaattgttagcttttagagagttctctgctgctgctcaatggttctgtgttcggtcggcgccactcctcgcgcgacagtcccacccaaaaactttcgatggtttccgccggcggaggacgaaaaagttcgcaattgagccaacggaagttgtcgcagctgaacagtttgggcatcgaagcggggggaggagggcatttgcgaagactgccgaagattgaggtggcacgacatttaacggcacgaccaatcctagcggagcattcattttcattttttagttggtggacagccgtcgccgtgtcattcgcctttgtgctgtcattgtgctcgcattcgctgttctttctttgcctcgatacgtataaatatccgaaatgaataattgtcgttaattgctcacaattgaacagatttacttcacttggtctgtttggagggaagttaatggtgggtatgcttattggaaaataattgcaattacctttttaatgaacaacattcgtttctactttcctctctcttcttcctcctcccccatctccctctctcactcttcttcttcctctcccctctctctctct

SEQ ID NO: 32426 - DNA, 992 bp, Heterodera glycines
  unsure (1)..(992): unsure at all n locations
agttggagcagcagcaactggccccccatttaggctaattagattttcaattttctgcaagctttttctattttaggcgctcttttgtaggtttttaaaacctaaattatgtatcgcgcccttcaattagttaatgatgtgacaaattatgatggcataataaactttcgggggaccttcgtcagtagcggcggatgatggcactttccctcctccaccaccaacaatgacagcagatgccgaagtcgtcgcagaagcgatcaccgtatgtgtgctgttcccgctgctgctgcccccgccgctgctgcttccgctgctcatcgacgcggcgatcaccgaacgtgaggagcacgcggcggaagcggtggtcgccggctgctcaaccgaccgctgctgctgcaattgatgcggcgccgccgccgcttgctgcgtcagagtcagcgaggtggcagccacgccgtcgccaccgctcacaaagggtgccgagtaacgccgcgcctgcggcgaagtcgacgatgccattgtctctaccagctcgggcagtgcctgcagcccgccctcctgctcaccgctgccgaaaaaacgctgacgcccgccaccggcgccgcttttgcacgcatcggtggggccagctgttgccgacggcgtcacctgtacaaaaggcacattgatgatgctttttgatttatttgagtaaaaacaagacaaatgaagaaatttctcaattttcggtggtttgtggtctcggttaggtcaaggctggcattggaaaaactcgctttccaaggacgggtaggtatactgatttccaagaacccaatagaaaaaattcgtgaatttcaaggacacttgaattcaaggatattcgtaattttcaagtgagagggtccaatttcagcgacgtccttgccattcaaagactaatggcagccctgnngtcaggtatgctggcatttgctgtgccaacaattctccacacctgtgtgcttggt

SEQ ID NO: 32427 - DNA, 929 bp, Heterodera glycines
acttataataaataaataaatgcaatacgtaccaatgcttcttgtttgtgttcccactgagcttgtgctgcaacttgtttgtggtttgtcgttggatttgttcaaatttcccaagggttggcttttccctcctgcactcaaagcagaaacgacttcatctttcgcatttcttaaatccaattaaatttttaactggcatctaattcctcttcatttttatttgattaatctatcaaaaacccattcaattttttaaaaaacggcgcacttcgacgttggatcaaaattggatgaaagcgcagagaatgtcttcaggtccagcgacacactcaaatttttgcattcgtttccataatactagtatttcctcccctccataccttcgtccatggccctttggcccattccccgtcgaattgtcacagttatattcgcggaaaggcggcagaggcggcggcccccgtgctgtggccgcaaataagcgcgcaaattggggcagaacttgggaagaagctgcagctgacaaaagaacttttcgagtttataaaacagagtcaaacaaaaactgaccatttaacgcagttggatgtcctaaaacaaataaaggaaaagcagtttaataaatcagtaaacagaaccaaccatcgactagcaatggcgggacatctgagaatttggcgatggtcatctaaattctaaacaatccaacaaaatgcaaaaatacagtggataaccggtcgctgggaatttaagtggtcatcggacagagagtgctgcttgctgttgaccgtctgttgttggccaacagactgtttttcaccattttgacattcgaaattgggaataatcaatttataaagtatttgtaattgaaagattacttttaattcgatcgctgcttggcatttgactatttgatgactgtgagt

SEQ ID NO: 32428 - DNA, 2056 bp, Heterodera glycines
  unsure (1)..(2056): unsure at all n locations
aaaaaaatttcaaaaaatttgatcgtccataaataaatttgtaattgatcagcggctcaancaatttttgcagagatacgtatcggagcactacaaatgcnttactaatttttctagattttttttaaaccgctgaaaaaagtttaagcctaaactttttcggccctgtttaaaaaaggaattagaaatttttaaaaatatttattcatctccctttttgataatataagagtcagagtgccttattcaacttgtaaataaattttggtgcgtttcagagcagtttctgaaaaaaatttatgaattaattttgcaaaaataaataaataatgaaccttcctccttaataattttcctgcgcccaaggtactcactcggccgcttcgcggcctcgtggctgtaaaaaaaatttggggcaatttgaaagagaatagaaagaaccaggttcgatgaagttttggtaagccaaaaaaaatgcaaccatttaaaaatctataaaaaatttaaaaatgagaattcatgcgagattttctggaaataagcttaatagggcctagttaagctgtaaaaaaaatttggggcgatttgaaagagaatagaaagaaccaggttcgatgaagttttggtaagccaaaaaaaatccaaatatttaaaaatctataaaaaatttaaaaatgagaattcatgcgagattttctggaaataagcttaatagggcctagttaagctgtaaaaaaaatttggggcgatttgaaagagaatagaaagaaccaggttcgatgaagttttgttaagccaaaaaaaatccaaacatttaaaaatctataaaaaatttaaaaatgagaattcatgcgagattttctggaaataagcttaattgggcctagttaagctgtaagacacccaccacttttgcacttaaaaaaatttcaaaaaatttgatcgtccataaataatttgtaattgatcagcggctcaccaaattttgcagagatacgtatcggagcactacaaatgcttactaattttcctagatttattaaacccggtgaaaattttttgcagacacccaccacttttgcacttaaaaaaatttcaaaaaatttgatcgtccataaataatttgtaattgacaggggctgactaaattttgcagagatacgtatcggaacactacaaatgcttacttattttcctagatttattaaacccggtgaaaattttttgcagacacccaccacttttgcacttaaaaaaatttcaaaaaatttgatcgtccataaataatttgtaattgatcaggggctcaccaaattttgcagagatacgtatcggaacactacaaaagcttacttattttcctagattttttaaacccggtgaaaattttttgcagacacccaccacttttgcacttaaaaaatttcaaaaaatttgatcgtccataaataatttgtaattgatcagcggctcaccaaattttgcagagatacgtatcggagcactacaaatgcttactaatttttctagattttttaaacccgctgaaaaagttaagcctaaactttttcggcctgtttaaaaaggaattagaaatttttaaaatatttattcatctccctttttgataatataagagtcagagtgccttattcaacttgtaaataaattttggtgcgtttcagagcagtttctgaaaaaaatttatgaattaattttgcaaaaataaataaataatgaaccctcctccttaataattttcctgcgcccaaggtactcactcggccgcttcgcggcctcgtggctgtaaaaaaaatttggggcgatttgaaagagaatagaaagaaccaggttcgatgaagttttggtaagccaaaaaaaatgcaaacatttaaaaatctataaaaaatttaaaaatgagaattcatgcgagattttctggaaataagcttaatagggcctagttaagctgtgaaaaaaatttggggcgatttgaaagagaatagaaagaacacaggttcgatgaagttttggtaagccanaaaaaaatccaaat

SEQ ID NO: 32429 - DNA, 361 bp, Heterodera glycines
  unsure (1)..(361): unsure at all n locations
cgtttccaggacgggtatgccgattttcaaggacatctataaagagaangcangaaanccaaggacaaaaaagaaggatcttatatgcaaagcaaaacggagaaaaaagatgcaaaaggctgggataagacaccggaaagaacagatgccaagaaaggaggtttcactacggtgtgtcgggacgggaccgggtctgggcgagaattaccggtcacggtttttcccaaaattcccggtcccgtaccactctagttttcactgatcattttcctaatttgcgacgccttttttctgctttaaaaacgctttttttgcggcgcgctttttccaaaaattttgtggaacagggggggggggtccg

SEQ ID NO: 32430 - DNA, 1093 bp, Heterodera glycines
  unsure (1)..(1093): unsure at all n locations
cccccccccccccccgcccaagggaattcgtcgttattttggccggacaatgctttagggccaagaaaataatttccattcgaaattgaaagcattaaatcaatatctgtagggctaggtcgttttgtaaatccgctaagtttggtatttttagacaaaaaattgcatattttttgcaattttattataatcaaaatataataaaaatggcaaattacgagagaaaaaatcgctgcgaaataattaatttgttagcgtaaattaaattagattttattcgccatttaagcaaatgcttcacacaattctgttattcattttcacaattcttcatttaacatctgcgaaagttgaattcagtgaacagcaacaaaatttacgaattggtacagtcaaaaatgggaaaattgtacggtagaataaatccaggataacgaacggtaccgatgccgatccgctcaattttttgggaacacccgcctcaaaagctttaatttttttggcccatccctccccaaagcatcaacttatttagctcattatccctaccccaattcccgactttttggtaggccacgatcccaaaaatctgtcccgccccaaactcctgactttagtgacaagtcaaacctcggcactctttactccaagctcccataatttcttatatagccatgacaaaaaaaacaccacgccccctcaggcgctgtttttcgagcaaaagaagacgcccatttggtggctgcgttcaactacagcttgcactggttgcatgaacatcagaacaacattttgttggtgccgtcggcggcgaatgccaacaaaaataatgaaaatggcggcggagatggcaatgtgattggatacatggagattttggaagacccggaggattactatgagctattggagaagggtaaaactaattgcattacttttttattgaaaaagctttagaaaattttcggcatttttggggtttccaaccatggagtttcaatttccgctttttaggcctacgtttttgatccattccattcacactgatcaattaagtttcattacccanntnangtttgttaatccaatatgt

SEQ ID NO: 32431 - DNA, 1728 bp, Heterodera glycines
actcgaatatcactgggttggcatgcagtcagtcacctacgtgtccagtcgatgagtgcccgaacagtggtgccgccaccgccgccctttgcctgctgctgctgctgcttaatgccgtcatcgtcagtactatgatttactgctgctgctactactgcttgatgttgttgctgttccgcaattgttaggtcaaagaacacattgcgtccgatcgggtttccgtgcaccaaacactcgggcaatcccaactcggcgcaactctccgtagtcaactgctccagctgtgcagtggtggccattaatgggtcgagcagttgctgaaaaatctttataaataaaaaataatatttttttttaaaagaaattctcttagaaaattatattttaagaaaaaatggcatttaaaaaaacattattgaatttttcttaacaagtttcattagtggctccagcagttgcctcaaaaaaaaaaataaaattttatccgatcttttttttttgatttgccaaattttatagcacccaaaaattccaaaaaactgaaaattttcttaaataagtcttttcaaaatatctttaacaaaacttcagagaaagttaaaaaaattttgttttttaaaaaaatgttccacgacctttaagctggcgactgaaaatttatttctcgtttatgtacataaccaagaccctgaaaaactcaagccatgatcgtcccacaattcaaaagcattttaaatggattatttatttttaaaaatcttttattgacctaaaaatgccaacccacccgaacacgttcagtgcccagcaaatccgctgaactgctcccgccgggcgcagacaatgaagtgatcagtgcaccggcaaatcgtccaatctgttggtagagaaatgggggcagtcgagcgccgtccaactgacgatgccattcctcacggcacaccatggacaaggcgtgcaactgggccaacacgcggagcaaatcacggacaccttaacggcacaagcgttggcttgggcctgatcagtgatcaccaatagtgacaaaaaataataatttgaaaaaatccgcaatatttgaaaatgccaaaagctgagagaacaccttcaatagcaatgccggtgccgagttcgttgatttgtgctttctcgctaaggtcctccatcacaagcaaagcattgcatgaacgagaccattgtttctgaaatgagtccaatggtggatggagggtgaaattaatttggcattgaactttcgaactcggttaaatgcaagaccagaaatgccaatcccggctaggttcgtcagctaaaaccagtcaaacaaaaaacccctgagatttcgaatttgattgaattggtttcggcttaagagttttgtttagaaaacaaatagcattgatcaaattgccttgatgacaaagatccgtgggattgccacccgacgatgtttggacagccattcataggtaagacattcactaaaacagaaaaagcaatggaaatgatgtgtacatattttggtggcattcagtttttttgtaccgcttgaaaagttccgatgccaacgcggcctcctaatgtgagaaaatgatgttgattgattaatttaaaacgaaagtttttgccttgggcggatcatcctcgtgcctctcgcaaatcttcaacaccacactttttggcaattttgcattttcccatccaaaagtgatgcgcaacaccgttgtt

SEQ ID NO: 32432 - DNA, 1413 bp, Heterodera glycines
  unsure (1)..(1413): unsure at all n locations
cctggcttggcaatttccgnaagcagtatcctggcccgagggtccgtccgggtntgcccatntcgtccctaatcaatgcattttcgtgtactcaatagcctttcgttttgatcgcttttccgttgtcgtcccaaaattcctgatcaatggcaatggccaaagatttgttccgtcaaaagaattttccggaggctttcattttggcttttcctttttgatacgaaacgaaaccttggccaataagcagagcattttacggccaaacattgtgtaaccgaagagccctctcccctcttcatcccatccttccgagattcaacccccaagcgttgattatctcttttctgactcattttgcttccccaagggtatttccgcttttatcccctccatccaatcatatccgccgtagcctccggccccagcatcaatcagccagcccaagggcacattctctcgttttttttctatccccttctctctctctctctatccgcttgtctctctctccttctctctctttctctcggcccttctctctccccttctctctctctctctcgctctctccacttctctctctctctcggcccttctctctccccttctctctctctctctcgctctctccacttctatctctctctcggcccttctctctccccttctctctctctctctcgctctctccacttctctctctctctcggcccttctctttccccttctctctctctctctcaggccttccctgtctctttctcctcccctttctctctctctcgccgtatgtcatctgtctgatcactgttgtattggccccttctcacttgttctatctctctttctctgctgctgtgccctgtgggccaaacacggctgcttttaagcagcatttccgatcagtgagagcatcatcgtcaatcagtcagtccctggaattcccttccccccacacaccttctcccctcgggggcaaaatgcgtgggaacagagcagcacagatggcctcgggggacggatgatggaattgccgagagggggtcgagaacagccctcccccgtcccgtcccccgcctggagagaaacgaatcgcggctaaaagaggcgaagaagcacagcaaagtgatcggacggatcagctccgcccccgccttgggcgtcggctggcgactgatcaatcggttggttgttgaagccgccactatctgttgagacgtcggcgggctctggcaattggcatacccctcatggcctgcccaaaatgatccctccccccccacccaggggacggcccccgcggggccatccgggccaagccaagacaactgtcattaagccgacaggaaagaggagcaatggcttaagtaatgggggcgattggcgtcaaaagccccatcaaaagcaggggag

SEQ ID NO: 32433 - DNA, 1054 bp, Heterodera glycines
  unsure (1)..(1054): unsure at all n locations
atcagagtgctaaaattaagttgtaaataaaatttggtgcgctttagagcactttctgaaaaaaatatttatgaaacaaaaaaatcgattttttcaagtgtccgtttggggtactcaaacaattatggggagcaanaatccaacgcagaattaaagtacaggctatagggaagctactcccgaaggattcggtctccccataaatctgggcgcatcggttcggggggactgccccgaaaacaaaaaaatcgattttttcaagtgtccgtttggggtactcaaacaattatggggagcaaaaatccaacgcagaattaaagtacaggctatagggaagctattcccgaaggattcggtctccccataaatctgggcgcatcggttcggggggactgccccgaaaacaaaaaaatcgattttttcaagtgtccgtttggggtactcaaacaattatggggagcaaaaatccaacgcagaattaaagtacaggctatagggaagctattcccgaaggattcggtctccccataaatctgggcgcatcggttcggggggactgccccgaaaacaaaaaaatcgattttttcaagtgtccgtttggggtactcaaacaattatggggagcaaaaatccaacgcagaattaaagtacaggctatagggaagctactcccgaaggattcggtctccccataaatatgggcgcatcggttcggggggactgccccgaaaacaaaaaaatcgattttttcaagtgtccgcttggggtactcaaacaattatggggagcaaaaatccaacgcagaattaaagtacaggctatagggaagctattcccgaaggattcggtctccccataaatctgggcgcatcggttcggggggactgccccgattacaaaaaaatcgattttttctagcgtccgtttggggtactcaaacaattatggggagcaaaaatcccacgcagaattaaagtacaggctatagggaagctattcccgaaggattctgtctccccataaatctgggcgcatcggttcggggggactgccc

SEQ ID NO: 32434 - DNA, 1301 bp, Heterodera glycines
gcaggccgctgtaagacaatatatttgtgttcagtagagtcttaataattgtttaagaacattcctcctccggcagtttgtaacagatttgtcgaagggttttcaagcgtttatgtgtatgtgtgcagtttaatgcttttgagacaataaagttatttaggttcgaaacccgaccatcttcacatggcggtgcttttgcattccgctacgatgttgaaatggtgcaactgactagaaacaaaagtttgacttcgggcggtggcgacgatgggaaaaatggattgctccgcggcgtttgttttgaattgatcaagttcgtgcacgactcgacgcagggatttggacaagcggtaattccctctaaatcgcattcaccatttaccttcattttaggcacaattcgtttacgacaaccgtaaaatcttattcacgaacaaacgaatcgaacaatttgtttgctttttgtcttttaacattatgtaactatataattttaggcattggaaattgacacggaaaaagtccaaggaatcgttcgcgatttcctgcgtgggtctccagtcaaaattgaggttaggccttgtcagactgataagcatgagctggatctcaacggcattgtttcttcgatttcgcaccatcctgatcaacaatcggacagatctttgcggactttccttgaaatgctgtcttcccagccatttctcaatgcgtaattagcagtatttaatttttttaagtttattcttagtgggacacatgacatcattggcgctggtcgactttttaagcgtcagatctgcaaagagctcgaagatggcattgtcacgcgcgagggtattgctaagggagttcgcgtcattgacaacaatggtgaaccaaaggcggctttgtttgctgacggtttactttgtattttgttggttgagtgcttaagaatcgcttgactttagattagtgcattctcttgacttctcaagcttaaggaactcgaacggctacataaagggaaagagaggaacaccgaccaaaccaggaacgaaaatatatgcacccaagcgaccgcgaagttgatacaaatttcaaaaatcagttaagacccaatccagttgtttgttacaattgtaacgaacctggtcatatttcacggaattgaataagacaatttccgcccaaaccgaaatgaatttccatcgtctttgcctcaacggaatcaacagcaaaccccaaatactactgcaactggagcaaaccgagttttcctatagtcgaaaaaacgtaatgccctcacccgggcgctc

SEQ ID NO: 32435 - DNA, 1149 bp, Heterodera glycines
  unsure (1)..(1149): unsure at all n locations
aacgcacgaaaaatagttattgacaaaaaatggctattctgaaagtcacgattaaatccctaccgggaattggacaccaacttttgtcttctgttgtagcgctgaataaagcactaatagtgtgtttgaaaacgcacgaaaaatagttattgacaaaaaatggctatctctgaaagtcacgattaaatccctaccgtgaattggtcaccaacttttgtcttttgttgtaacgctgaataaagcactaatagtgtgtttgaaaacgcacgaaaaatagttcttgacaaaaaatggctatctctgaaagtcactattaaatccctaccgggaattggacaccaacttttgtcttctgttgtagcgctgaataaagcactaatagtgtgtttgaaaacgcacgaaaaatagttattgacaaaaaatggctatctctgaaagtcactattaaatccctaccgtgaattggacatcaacttttgtcttttgttgtagcgctgaataaagcactaatagtgtgtttgaaaacgcacgaaaaatagttattgacaaaaaatggctatctctgaaagtcacgattaaatccctaccgggaattggacaccaacttttgtcttctgttgtagcgctgaataaagcactaatagtgtgtttgaaaacgcacgaaaaatagttattgacaaaaaatggctatctctgaaagtcacgattaaatccctaccgggaattggacaccaacttttgtcttctgttgtagcgctgaataaagcactaatagtgtgtttgaaaacgcacgaaaaatagttattgacaaaaaatggctatctctgaaagtcacgattaaatccctaccgggaattggacaccaacttttgtcttctgttgtagcgctgaataaagcactaatagtgtgtttgaaaacgcacgaaaaatagttattgacaaaaaatggctatctctgaaagtcacgattaaatccctaccgtgaattggtcaccaacttttgtcttctgttgtagcgctgaataaagcactaatagtgtgtttgaaaacgcacgaaaaatagttattgacaaaaaatggctatctctgaaagtcacgattaaatccctaccgngaattggacacncacttttgtcttctgttgtagcg

SEQ ID NO: 32436 - DNA, 1203 bp, Heterodera glycines
cccaaaatacgggagtaaaaaaatccactggtaagaattgaaatttttggcaaaatgaataattttttgatcgaaaaactgttaaatatatacccaaaatttcaaaaaaaatttccggcggcgcctatcggcaccgccggacctttaaaatccttaattttcttaaaaaaattgctcaaaaaattgcaaaaattggtcatttttggacaaaatctgacaatgtattgtattcaaatataattttttcccggcggcgcctaccggcaccgccggcctccctcctcctccctggatcccaaaaagttttttcaaaaaatacggcgcaaaaaattgttaaaattaataaaggattcggaaatacaaagtttaaacctttttgttcgaataaattgattaaaaaaaattatttgaagcaattttgaaaaatttttctgattttcgaccctaaaatctattttttttttatttcgtttctgcatattataatttttctgtattttataaaaggattgtccttcaaatttgtgcattaaaaatttttttgtgggtatttaattaaattttcgaattactcccgctcccgcccgggactcccgttaaaaatggacgggagttttcgggagcgggagttttacgggattcccgctcccgctcccggaaaaatttgaactcccgctcccgtaaattattttttaccggtctctaatttttatacatagtagtcatatattgctcaatttattagtcgattttcacatttatataaacatagtcaccaaataggtctaaaaaattaagaatagggattggaatgacatagaatacaataagagcacacagcaaatagtgggcaacagttaattttagaatttctaggaaaggaaaaacaatccttgagaaaagcataaggggaaataaagaaggaatggaataaatgtcggtcccgggcacattccgtcacaatggagaatcagctaatcagtcagctgcaagggtacatcagaaacaggtcgcaaatcagaaataatcaagtttgcaatcaagaacggtcaggatcagactcaaatgtcaggatcttccagggatgcagttacagacatagggttcagcagctcggtaagaaatggataagaattcggggtttttcattattgacaaatcctgatcctgtcgcgggtcattaatgaccggatctgtgattta

SEQ ID NO: 32437 - DNA, 1410 bp, Heterodera glycines
  unsure (1)..(1410): unsure at all n locations
ttgaatttcaaatttgagagcctagaaaaatctgaaataattcatgctaacataactttcgatgctgatcaaaaaagtcttttacacaacttgatcagatcactccttcatggtgatctggcaccccaaaatacactggaaatcggggaaattttcaaaaaaaatcctagggggttgggaaaaattttctggaaaaaaccgttaggttcatcagaaagaggacaaaacggtctacagtatgcaaaagaccgtaagtctctatgacttatacccgctgaggtatgggtacttcaattttgatttcatcatttctactgtaaaatgcactatggccataaacatatgaccacgcgaaaatggggtgtaccaccaaaagtctggaagtgatctgacaaaaaattctcatttcgactaatgattggtatcatttgaaagcccacaaaaaatgctacaaaaaatgttatgacacttctggtcatacgtttcttggtaactaattattaaggaaagtgtttgttagcagcaagtcgccataaacatatgaccatgactgtatctcaatacacatttggcttaattttgctactttttttgaatagcttttgtcgttttacaccactaaattttaggtttttatttgtttattcagaagaaataaaatatccaacgaaggggtgaccacttacacgttaattagtaaattagtcaagtccaaggagcgcttttacagacaaaattttttgtttgactcaatccatttactcataccttttttgaaactgtcaacagatggagcatctgttatatctttgttgagtttggaccatattaacgccattctgttgataaaagaattttagtggattgtgattttaacacaactttacgtctaagattgtaggggattcgaccagaaaattgaggaaatatttccttttaagatgtgtaagaccattaatgattttgaatgcctgaactaaatcaattgtttttctcctttcttctaaagtttgaagtttgaataaatcaagtctttgtttgtaaggtatgtaaggaagtctgcatttaaataaaggaatttttgtaaaatatttttggcatctttttagtttatttatatcttnttttgtatgtcgggattccaaatttcaggcgcatattctaaaagaggatgaatatatttttataaattttggttccaatacgtatagagctggattttagattttgggcatattaagaatcctaaataagcagcttaatatttttagaatatggatagaaagcctaatttattaatcattaaaatgcccaaatcactaatggattccctccttaataattttgtgaataatttatatggtggttttggattttttttggtaaaaaataaaaaaaatggatttattt

SEQ ID NO: 32438 - DNA, 1392 bp, Heterodera glycines
aaaaaaatttcagttggcaaattgccagcggaccatcgcgagcatgcgatacatcatttgccgagagatgaagaatccgaccgaagcgaagaatctgctctcacgtgagtgttttgacagaaaaaaataatgggaaaatttaattaattaatttatataattaaggtgtctcagaatatctccaacaacaccacaactttgggcccacccctccgctcgacgtctctttcccgaattatgtgagttaacacttaaatttgtaacacaaacatattcaattcattaaattagggttcctccccgactcctcgggggggggggcaaaatgtcgggggccgggaacctcggggggtgacatgtcgggggtcgggtcgagggtgagctcaattgtcgggggtcggggacctcggggggcgacatgtcgggggtcgggtcggggggctcggggtcggggaggaaccctacattaaatattcaaaacaatgggcagggaggggttggaccccaactttttggagagtaaaagtcggggaggaaattctcggggataaaattgtagtcggcagctttatgaattaaaaaatgccagcaggcagggaaattccgtaaaaaagggtccctttttcttttgtcaaaagcctcggggagtgcccccggcttttggtctaaattttaattaattttaaatttaaaaattttcagttgaatgaaaatgttacttttgctgctcggttggtcacccaatttgccgcacagcccactaccacggtggaacaaatgcgtaacatcgggatttgtgagtttcaaaaattttgtctccataaaataaaattgggcaaatgagcggtcggggtcctttttgcgcgggcacgagttttagaaatctaaattttttttcattgtcaaccaaatccaccaatcttggcataattcgaaggaatgttttgaaattgttacaaaccttttgctaggcgattcagtaattatcgtcaaaaaagttgtaacatgagctttttgtaaggctaatagagcatgcgaagagctttctaatgatgcccagattgctagatttgggtgaaaaaaagaaaaaagttcgaatccaaaaactcaggcccgcgaaattttaaaaatttttgcgatgggaacaaaccggcgttagccccaaatggaagaccggcccaatttttgggcgacttctggggctttttaaaattttaaaaattattccttaatttgcattttcccatcgtttttgtgattaataattattcttctgactgttttgggaaattttgagttttgaggtctcagattaatattcattattcacccacaaccattaactattctttttaagtcttgtctacataccacactcaactgcaaaaccgt

SEQ ID NO: 32439 - DNA, 1335 bp, Heterodera glycines
ccgccggaggaaattttgaaaatttgagttaatttgttaacagattttcaacaaaaaaggctgggtttcgggattaataggctcaacaatttgtacggatttccatttaaaaaaatgataaaatgtgtcaattaaaataaaactatgaataatcatattttgtcgataggaaagccatgagtatacaaaaagaaaactcaaaataatttaatttctgtgtagagagatttaaccaatggaaagaagaagggaaagtcatggagactagccactaggccatccgcacaattggcagaactgcttttaaagaatatattaatatatttttaaaattttttccttttaactccaattttcttcactaatttttcactcagacacccattcttaccagtgcttgtttttcccggttcccggttgctttaccgggaccgggacctgagcttttcaaaatccgggaccgggacctcggatgaccgggaattcccggcccggtcccacttcaatgatatcattcgatagatctatgtgttttctattagcctacaaaattttaaaaagtttcgttaaatttcaaagaagttatgaccaaaatgtgcaaaaaaaaaatttggttttttgtaccttttttgaatgttaattgatttttacaggataataggaaacacttaggctatctaaaaatatcaaaaattttattcattttcgctaagttatgaataattttctgtcaaaaattttccacttgaaagcacataatttgttgcttcgtctcactcataaaatttaaaaaaattaaggaattaatgtcaaaagaaaattgaggcgcggaacaggacaaaacactgccgccgaaatacagtcgagacataacacagccgagaataagttttttcaaaaaaatcactagaaaattttttttacagttttctagaaaaattttctaagatttttaaaatttctgtttgaaaattttttaaatttattcccggctgtgattttttctaattttcttcctaaacagaagaaaattcagattctaataagaaatgccaactgttcgcgaaatacttgagtgcaaaagcgagtaaaaatgcccagcattcctacaaatgatgaatgggcagttttaatttattggacgggatgacgacgaagcaccgattcaaggcactcattccgccagtttacgttcggcacccctttttaactattgtcaacgcggcaccgtttgagttcatgaatggctggcgcattttggcaaaccttacattggcaccactcaattcgagattgatcgtggatcggaggcatttgaacccaatgctgatgtcg

SEQ ID NO: 32440 - DNA, 917 bp, Heterodera glycines
tttgtccacttactgctattttgtaaccccgaactccacacaatttgttcgaaagtcgaaaattttggtagcagaaccaaaaagtgagcaaaaatgtcgggatatttgcggacaaaaatcgcaatagagctaaaggctcttgaaaaggcgaaaactgcaacagaattgtatgctgagccggaccaaactctgacctcattggaaaatgcaattctcctggaaagcgcggcagagagaataaagtcagaggtggaggcagtgaatgccaaaattgagcaaatttggataaccgcaagcaaatggcatgacgtcatacaaaaaatggacaaggacgaaagaaaaagtgagcagacagcgtatgaacaatttcaaacaacggagaaactgaacacaaaaatggaagcagccaacacaaagctaacagagctgaaggacctctggagatgaaggtagaagcgggagcaaagctgcaacgctccaaagcggacagagacgcgcgagtggagcaaatagaacatgcaaaagcaatgtcgaagtcaaatgcagaagcagacaaagggaatagccgagcgagaggcaatgaaatgactgccgcattgtaccaattgccaacactaagaattaagccgtttgggggagacaaacgggaatggcccatgtttgaagaagcatttaaagtggctgtggaccaaaagccaggaagcaaaacggagaagctaaatttgctgaaatcgctggttgagcgagaggccgcattgctcatcggaggcctacgcctggaagagaaaaattacgaaattgccatgaaactgttaaaagacacctatggggataaaggcgaatacgtaaggaggttacatacggaattgtcgaacctcagaacagatataactacggtggaagacacaaagcaattt

SEQ ID NO: 32441 - DNA, 1065 bp, Heterodera glycines
aaaagtctatgattttcaaaattcaatgataaaatcaatgatttttgcaaatctgatatcatattcgtgatcagaagccccgaaaaccctcgggttgatcttttcataacaaaaaaatttttgggcggagcccagattctccagtattgccattatttttttgtgataactttttgattcattttatttttttatttgggtcattttttcattttcatttgttgtaaattattattaattaattgaataaatatggatattttgtttccgtctctttttcgtcgtattccaatcatcagtaaacaaaaaaaaggatatagaattgcagcttaaaagacgatttttgggattaggatttcggctgggccttttagacaaattgcatttttcagagccgtctttctgctggccgacttttggatggcacttttatttaggagagggaaattggcatacttttaccaatgattctgacgcaaattaaggctcaccgtacctcggactgttataattaattaattctaattaattattgtcgtaggctttaaatttcaatggattccgttaaacagccataaatggggagaaaaagaacaaaatatccaacatacacttggggaaacgcgtaacaatggccaaaatcaatattatggccaaactgctgacaaaaagagttggcccattcagagcattttttatattacaatattttatttattatttatttgttttcgatgcaaaatatgagcaaaagcacagaatatcaaaacattcattcgttcgttcgttcgttcgttcgtttaatgcgttaattggccaacgaatgaatgactcattattcttttgacttttccattcatttgactttttcagacaaatatttgaataggaaaagcttacattaattagttagttgtttgttcccttttgatttgttggctccctttttctttctttttttatccgtttgtttttcactttcccccaattcgctgcctttggatttgtttgatcacttttcttctgtctcgcttattattattatcattgttattatttttatta

SEQ ID NO: 32442 - DNA, 1197 bp, Heterodera glycines
ttatttagggccaggttttgtataaattatttgggccttccaatgaattgccttattttgggcttaaattgaaattcggcatattatgagccttgaaaatttttgatgaaaagcttattttgcctttttgttttgtgcccattttggcttaaaatgatgaaaggaattttgccttttgtttttgcccctttttggcttaaaattgagtttggcttcgctcttaagattttcatttctttttaattcgaaattgagcggaattttattcatcggccggaatttttcgtcggtcggaattttgagctttggcatgatatggaattacctcgctctcaattatttttcgagatctgagcggtatatatttattttttttttatttatttatttattattttttttttaatccggccggatttgttatgttgggctgtcgcccctgcgcagaatactccctaaataacaggcgccacaatacaaaatggaaatgtgcacatataatttatataattgaaattgtacaatggatgaaagaggagaaaagagaaaagaaaaaaaaatggaggggaagagggaagaaaaaaaaatggtcgaccgtctcccgaatccatcccaaggtcggtggaaaggttgtcattcgacaaccatcccttaatatagttaagctgtgccgtgtttcgggattcggcctgcttagttccgacccctgagatcgatctcctccgtccaccgacggattgttggactgggccgtagcccccgcggaaaggctccgtcccatcggtcggcttagggggagggccagtagtgggagtgatgactggggaattgactgactgacctcgatggctgggagagccatcgcttaaaaggggaatcccggtgggcgttccaatggggaggagcctctcccctccaatcccaatcggtagccgagacccgagtcccggcttacacctccacccccagggcaggaaccgtcgctggttcctcaacttactcgaaattttgcgcgataatcctgctgcgctccaaacctctcacccaaagaccattttcacgcattctcacaaattaattgcccttcagtcattctcttctctcgcctcttcttctccccattcgccctctttccatcaccaccgcccccttcttccctcctcaaagctccaaccacaggggaaagacttctcctcc

SEQ ID NO: 32443 - DNA, 1254 bp, Heterodera glycines
  unsure (1)..(1254): unsure at all n locations
gttttcgatcagcggaggtgaaaaagaaaagaagaaaggggcgcctttccttttccccttgtccgttccgttgtttctttgtccgtttcttttcttccaacccttcgattattttttgttcagaattttctgcagggggaacgatcagtaacaaaaaaagaaaaaaagataaaagagtgagccctggccaaagagccccttttgtgggattgcccccccccccccccccgacaatcggcgactgacccaccgccattcgcttgtcttttgctcattgcccactcaacttgcatttttaaatggactaattgggtcatcgtcgcatcatagtcagtcaattagtctaattactcaacagaattcaaatattaattatgcaatcaatgccttttaatctatttacctacgaaccgttatttagttaagtggaaaagtattgaaccaaatttttttttattttgaaaaattgatttctcaaaaatgtttgatataaaggccttattagttaatgccagaagaaacattcataattgtgcaaaccgattaattttattgtcgtcgagtaaaatggtccaagaacaaaacagcccctttttttgtcggtgcaaaagtaatgctccaaaaaaggggaatcgcaccaatttgatcagataacctcaaatttgatttttcaaaatgttctatacttttgcatttgactgtaaagattagaagaccaaattcactttcgaattgccttgaataataagcaagaagcatgcttttttgtctttttaatttagcgaattttccccgtttttcttcacttttctttccttccttttctgttctcttctcggcccttttctcgagaggtcattcactgaaagagattcgcagcctttgcataatatttgcattaatctttaaatccatcgaactgcggataaataaatcatttcatccgatttaccttttgatgacaaatggccaatgggcgaaattttggattggaaattgatttaacgttaattggtggataattacaattctgtatttgacaaaattccattttccctgcttcatactcatacacatccagctatttattcatttactagttgcccttgcgaaacgccgaaacggaccgatcattaggggagataaaaggggtcgccggggataacccagggacgattcgttcattttgaaaagggtgcccgcgcactgcgcatggataaattgtacattttttctaangactaggactaaatt

SEQ ID NO: 32444 - DNA, 1544 bp, Heterodera glycines
cttcctgtaacccttctcgatgcggtagcttgtctctgcatcctttcttacgcgcgccaactcctgctcatagaagctgcccttgaatttctctccgtgttcatcccgcagtttgtaccgaatcgggcgcaccgctttcaacacctcgtcaatctccaggatttcgtccccgtaatttggcagatatcccttctcaaattgccccttctctctgctcatgcggacaaattggtcgttatgaaagcgtggcgtccgcctttgaagggctgggtgtccgtacaatcgcttccacaccctttgcgcatttgaaaagttaacatcaatggggcgcattccgtgaacgcgtgacggcgagctgttaattccgtccacaatttgctgtactgtgtccacccaattcagcgtctccttttccgcaaaatagcggtacaatcgctgcttcacattgcggatggcccgctcagcaaccgatgccttgacgaacgaatgcactggctcatgtttctcaatttcctgctcctcgaagaattccctgagcaagcggttcttgaattcagtgcctttgtcggagaagatgcgatgcgggaccatgggcatttggtcaatgagttgtttgaatgcctccaacatctcctcggctctcttgtttttcagcggaacaacaaacaatcgttttgagagcacatcaaccgctacaagcaggtatcggtgaccccgattgtggcgcgaaagcgcctgaaaatcgaccaaatccacttgaacatcggtcatgaaccccgccgcaacggttcgggcccttggaaagtgcaccctgcgggggcgcatcagagtgtacgtgcggtgtccctccaaataatgctgtacgtcctttttccgtaaatgtttaatcttctttcgcgcctctttccacagtgcggtaacaccagcgaaatgccgctggggatgatggatcattgtacattttgtcaagagtggtgttgatcagctccattttttcgggcgaaattccttcttgattgtccgttccgtccgggtggttttgctctgtgacggtctctttggtggggccgtccatgaatacaaaattgggtccttcctaagccgctcttccaataggttcgctccaggtggtttaatggtggggcggcccgctctccggtctattatatacttgagggccattcgcaaattgctatgcgccaacggcttgccgtttgcggtgttaattgtatttccccgaacgcccatacgatcagcgtaacggttgcatttgatgtgcagtcgttcaatccgttgagtcatggtcagctgatttgacgggatggcaaacggttcacgctgctgttgttgttgctcatccctttgtgcagaagttgatgggcccggttcgggagagtactgtactctcacccttctcgcttgcctcacgcgttttcttatgcgcacctcatcagcatcattttcaccgtttacggggtagtggcgtttggtcccccgcctaggcagaggaatagtgggcatttcttcttcgacggcagaagcag

SEQ ID NO: 32445 - DNA, 1082 bp, Heterodera glycines
  unsure (1)..(1082): unsure at all n locations
gggagggggatgtccgtcggtgccgataggtgccggcgaaagtttttcggaattttaggaatttttaattaattttattaagaaaattgtacaaatttaaaaattttcaagagtccccaattccccgagttagtgtcgggagtcgggggataaaaagtcggaggtagggggctcggggtcggggagcaaccctattataaacccccaaaataggtgctaaaaatggaaatgagataaatattttaaaaatcaaaaatgtagtcaagtaaataaataaatgaatatgaatttttgataaaattttccatttctcaggggtgtatttttcgtttttattgcatttttgttaataatttttttcaaaatagcagaaaaaattttacaaaaaattcttcaaaatgaaaaagagcacaaaaaagcaataaatttatttttattaacaggttatattgctccaatttgattaggtttttttcggtttttcataaaagtcggtcggttgtttcggttttttgattatttcggtcggtccgtttcggctaaaaaaccaaaaaaaaccgaaccgaaaaaaactgaaaaagtcaaaaatttctcggtcggttttttcggtcaaaaccgaaaccgaaaaataccgaaaaaacccgaaaaaaaccgaccggtccgatctctaattataattgaaagggtttatatttttaaaaatgaataaaattgaaccttgaaaaattttttttaaataagcaaatttaatattttaccagttaaattttttagtttttttgccgaaacaattatatccttagttggacatgcttatttattaatagaagtcaattatgacaaaatattattttgatctataaaacttatttcgcaaatttctttttaattatcattcacatcgcattaaggtttttgtacgtgatcaaggtcgcaaaacattaccttcatcaatttttcagaaaggattttttatttaatcggtgtgccccgttcttaattaatatagttattgtgaatatattacaattattaataatgggtttttttcctactnatttttaattattaaataatttttt

SEQ ID NO: 32446 - DNA, 974 bp, Heterodera glycines
cttgaaaaagttaattttttgagtatttggcagccatgacttatttttaagaaagaatgaaaatttttaaattttgctagtttaaacattttcacgctctttcgaacagtaacaataaggtttaattaattagaaaaacatctcatgtatggatccgagactcaaaaatctcagaaattccgaaccaaaaagggtccggatttccggaaactgaatccaatccccctattgcctttttgggatttggtttttccttcaaggactgcctttgattttccatgccaatttttgtcatttttatgctaataaaaacctgtgccatttgtatgcattttcgccagcattacctgataataatgcttttgaatccgatcactttgctgggcaatgctttgtccggcattagcaatgttttggcccgtgaattttttattgccaattcggtggtgccatttgcgccaattttgtggccaatgcgcacaaatccaagcgcccatcgccgcgttttgaagtgttcgtcgaccaaacagtcaaatcggcggctgagcagcgcaatttgaaggccaagctgagtaggtggaagcaaatggaacacccccagccaaccgtcgccacaaatgtaactgaaccggactaaattaacgccattaattgctttaattagtggggctccctgacccgagtcgggggataacaaatgcttacattttttttatacgttttatgcaaatcttacccccttgggactctaaaaagacaaaaacattgaaaaatagattgcaaacagttcctctaggtctgtactgaaagaatgcgaaagaatttttggacaaaaaaaactcagtctctctaaggaattggttttcttccaaaattctttcgggtttgttcgttatagaccaagagtaccggatgctatatggatttataaaggatatcggtgttgtcagcattcttcaataagtgtctagctc

SEQ ID NO: 32447 - DNA, 1116 bp, Heterodera glycines
aaatattcctataaaaaaatttttctaagaattttttccttgaaaaatttctaagtttgatattttttttttgaaatttctgcggcgagatttcggccggcgagatttcggcggcgagattttgtctcggcgagatttcggccggcgagattccggccggcgagattccggcggcgagattttggcggcgagatttcggccggcgagattccggccggcgagattccggcggcgagattttggcggcgagatttcggcggcgagattttggggtgcacccgaaaatcccatatttaatgaggaaaaaacatttcaattcatacaaaaaaggggggtggtggggtgccttaaaacaattccgttcgggttgaccccctcccccatcttttttccatttataatttccaataatctcttttaaatgccttttttacgcttttccatgcttttccctccctcactgtccgtgtgcgtgcttttaggtgaaatacccgcagctgcaagtggaccaaaccaacgaatgcgaaggcgtttatttcgagcgcaacgaattcgtggacataattctgtccaatgttttgtcaaacgccggccgacggcgcattgttttctcctcttttgacgccgacatttgcacaatgtgcggacgaaaagcagggggaaaatatgaaatcgacgaacacaaattattgggaattaggggcaattaatttattggacagttagaattggcattttgccctcttaatgcgccaaatcatttcaatacgtcgttaaaaatattctcgtcatttaaacttgaattcttcaagaatgagagagcattttttcaggttgtcggtcaagcagaagaagtacccggtgctgttcctgtgccttggcgattcgagtcggcacgtccaatacgcggacgagcggacgcggttgccaatgtccgcagtgaaatttgcacatgccatcggaatagtcggcgtgaacttcaacaccgaagatcttatgaaggtggacagtgaatcatttgccatttttaatacggcctgattttgtcccgatcaaaccaattacgcgtaattattaccgattttcccccaggacgcgtcgccggtggcaaatcga

SEQ ID NO: 32448 - DNA, 1046 bp, Heterodera glycines
cacgtcataactcactcagtccgttgcccgaccgacgctctattttatctgctcgactgatcgccgccgccacagccaacccatcgactcagccgaattggctgcgattaccgacttaatcggattattgacacatccatcagcacagaaagactgacgcgtcccaagcgataaaaaatgtcgcaaagggtaagcaatggcacagaaggaaaacaaagcgaaacaagcactaaattggcaaacaaacaataatgcatttgaaaattaagcaaagaaagcaatgactccaataaataaacgaattatttgacggggagagagagagagagagagcatttgcaaatgaaaaagcattccctcagttgaaattgcaatcaaataaaacaaagtggtggtggagggaggacgaattgtgatgggtggggaggggagcaattgaattgacagacggcactgccgatggcacactgtccgacatttgcaaattgtacgactttcctacctcataaaatgatgcccgcccctccgttcttcccccccccccctccgttctcaccaaaatatttattgccattcattaatcttttctcgcttatctccactcgcaactcttcccaattattttttgctgccaaactaataaatttgagctgtttaactgccccccaatattaatagtgccggcgatccgccgtttgctgaccttcgtcctcccattatccgcccgtccatctccaattgcccagtttctgaatgggaggccaatttgaatcgaagttaaatgtgaaatctttttgtgaattatggtagtctacgcaaccaattgactatgtgcccattgtctcactcagaataaacatgcgattcagcatctctctttgagaaactttcgtccattgcttgtattgagcaattttgggtaatggaccaaaggctttaaagtgtaactcactccaaaaatgataagaaaaagcttaatgagagaatataatcgaatgaacgaaaggagggataaaaggtgaggtaaaagaagggtaaaaggaagg

SEQ ID NO: 32449 - DNA, 984 bp, Heterodera glycines
ttgcgtatgagacggagggctgtgcacaatcgccatttacttcacgagaggatttttatatttagacggtatcccagaaaaatggctatctctttttttgataaattttatacacatacaaatgctctcgagcatgatagggagggctgtgcgcaatcgccattttatttcacagggaatttttaaatttatacgttatcccagaaaaatggctatctctttttttgagaaattttatacacatacaaaagctctcgagtatgagagggagggcggtgcacaatcgccattttatttcacagaggatttttatatttagaggttatcccagaaaaatggctatctctttttttgataaattttatacacatacaaatgctctcgagcatgatagggagggcggtgcgcaatagaccttttatttttgagggaatttttaaatttatactctatcccagaaaaatggctatctctttttttgagaaattttatacctcacaaaagcgcttgcgtatgagacggagggctgtgcacaatcgccattttatttcacagaggatttttatatttagaggttatcccagaaaaatggctatctctttttttgataaattttatacacatacaaatgctctcgagcatgatagggagggcggtgcgcaatagaccttttatttttgagggaatttttaaatttatactctatcccagaaaaatggctatctctttttttgagaaattttatacctcacaaaagcgcttgcgtatgagacggagggctgtgcacaatcgccattttatttcacagaggatttttatatttagaggttatcccagaaaaatggctatctctttttttgataaattttatacacatacaaatgctctcgagcatgatagggagggcggtgcgcaatagaccttttatttttgagggaatttttaaaagaaggtctatcccagaaaaatggctatctctttttt

SEQ ID NO: 32450 - DNA, 2141 bp, Heterodera glycines
aaagatttctgttgctcaactccccattcccatttggcctccttcttaagcaattcatccagcgggcctctgagctctcgcatcggtttgatgaatttgccgtaataagtgagtgcgccgaggaatgatcggagcgttgatttgtcggtcggtgccggcattttctcaatggcttctgcccttgatgggtcaggtcgaatgccattttcagagataatgtggcccaggaaaagcgtttccttttgcaggaaactgcattttttcaattgaattcgaaggccatattcactgattttgtcgaaaaccgcgaaaattgttgaggtgtgatcggtcagtgatttattggcgatcacaacatcatccaaatagacgaatgcgcctggaattccggcgatgattttgtccatcaatccttggaaaatcgcgggtgccgatttgactccaaacggcaaacgctggcactgaaacaggcctcggtgcgtgttgagcacgcaaagatttttcgggcttccgacaactccaactgcagataggcatcacgcaagtcgacccgtgagaaaaacttagcgccgccaactgcgttgtagatgtcctcaggtcttggcagtggatgacgatgcagttcgatcgcatcgtttagcccggtcgaaaaatcgatgcagactcgcgtttttccgctctttttcttcactgccaaaatcggagccgcccaatggctgaactcaatcggtttaattgcgccaattttcgaaagacgatcaatttcggcattgacttcatccaatgctccatgaggaacaggccgagccttgcagtagaccggcttcgcctcctttttcaggatcagatgagctctgaatttggtgcaatggccaagttcaggtccaaaagtgttggcgtaattggtttgaagtgccgaaatgagtgacttttcatcactgatttgtgatgaaattggcttcgttggcagtgaattgacgatttgcgacgaatttggaaacatcaattccttcgggattatttccaattcttcaatccaaggcatgccaagcaaatcctggtgaatttcgtcgctgacgtaagcaattaggcttgccgttcgtcctttgtacaaaacttggcatttgaatttgccttcgattgggaatgctttttcattgcaattcctgacggtgatggccgttttgcctagctttggtttgccaagcttttgccatgagtccgttttgatcaccgtgatttgggcagcggtgtcgacattcattgggtgatccatcccattgatttggatgatcacttcccaccatttgttgctgcttccttcaatagccatacattttagcttaattgagacggtgtgaatgtgcgtgtccttcacggaatcagtggccactgcacgaacacgtcggatctctgtgccgcttttgcatgctttcgcaatgtgaccgttccgtccgcatttttcacacgtcgagtttttgaaccagcagtctttttgccagtgacttttgcctccacatgaatagcatggctgatcacgttggtccacttttcctttaggtgccgttgaatttttcggcaggaaattttggcctttgtggctttgctgcggcttcgttttgggcttctgcttgtccctgatttgctgcggtttggctcggatggcactggtgctgcagggatttgagccgagggagagcgcgctttcctttaggatttgatattttcggcactcctctccaagctcttgcagtgaggttgaccgtccgctcgttcgactgtcttccaagcgctgaaggcatttttgcctcagatcggtgaattcgtcccgcaatgcaatgatcagtatcatgcatttgagctcctctttgctcagcgacagatcggcattttcgcaggacgagttgatcaatgcgatcaaactttgcacgtcctgatgcgcgtcttgacgaatttggaaacagtcgaaacggcggagaaacaatgatcgggtttctccgaacaaatgtttcaattttgcggtcgtctcgtcccagttgaaatcgttctgcgtctttggtgcgatgctgtcgcagtaccgcttgtactccgcttcgcccatttgccaatcaatagttggactttgactggtcgctgagtgc

SEQ ID NO: 32451 - DNA, 905 bp, Heterodera glycines
ccccccccgcccttcaaaattttgaaaaaaaaataaaataataggagactcagaattttgaaaattttttataaaaactgatgacaagctaatgtgataaaacaggttaattcttttcctttcagtatccctgcaaagtttggggcgcttctgataagtttctgaaaaaaaagttaagcctaaactttttggactgtttaaaaaggaattaaaaatttttaaaaatttattcatctccctttttgatagaaaaagcatcagagtgcctaaactagcatgtaaataaaatttggtgcgtttcagagcattttctgaaaaaaatatttatgaattaattatgcaaaaataaataaaaatttctaaaaatttgatcgtccataaataatttgtaattgatcaggggctcaccaaattttgcagggatacgtatcggaacactacaaatgcttactaattttcctagattttttaaacccggtgaaaattttttgcagacaccaccattttgcacttaaaaaaatttcaaaaaactttaaaaattcatagaaaatttaaattcataggtactactgctaaatcaacgcagagacgcctttccttgacctttttaggcccctgcaaaatctggtgcgcttctgatcactactcgaaaaatgagtgattgaattttcactaaaaagttaagcctaaactttttggcctgtttaaaaaggaattaaaaatttttaaaaattttattcatctcccaatttgatagaaaaagcatcagagtgcctaaactaacatgtaaataaaatttggtgcgtttcagaaccctttctgaaaaaaatatttataaattaattatgcaaaaaacaaataaataatgaactctcttccttaataattttcctgcaccgaaggta

SEQ ID NO: 32452 - DNA, 1634 bp, Heterodera glycines
  unsure (1)..(1634): unsure at all n locations
ccccccccctttnggccctctcctgattaaaatatttaaaaattaaaaatttttctagcttaagttggccaccgttgagagtgtaatggccgaattgccatttagcgttttggaccgtttgtttttcgtcggagtgccaattgtggacgcagaagtcagagagcgatttcgaagactatggtaattggaaaattataaaataaagattaattctcaaattaattaaggtatgatcggccttattggaaatcatcaggcaattttgaaggggaggagcaaaatgaggagccaaaaatgccaaatgagaaaaatggtttaaataattataatttgaaagtctatttaaattctcaaaattattttactactttttaatggcactttttgccgtgcctttcttttcagtggtcgtcgacactttgccaatgtttttgaatgtgccgcagcccgtcctccatgagcccgtgggacgcgcctcaatccgttaccagcagcaccaaatgccaatgccatcgttcacttctgccgatatgccgcactttcctcccccttcacccgtagcggtgccaatttcgtcgaaggttttacgtaaaaaatttgtttataatacagaattttgctcaattaacggtgccaactagtgtaacaattgacgagcattacaatgtcgcggcaccgccagcagcacagcggagccgcggtctgtgcgcggaatgcaacggaatcccagatgcaatggcatcgctgtccaacattatgggcagccatttggctggcccactaatgccaaaggcaaatgcgatcgaaaacagtgccgacgctgatcagaagaatgaaaatgatcaacgcactgaagtagcagagttggcacaacatcaccaactgaagcatggaaatgcggctgaacggagtcccatcttcaaaatgccaacatttggaaaaggaaaaagggccgatcagcggaatgaacaggacgggagtggcagtgagcatatggttcatcttcagcatcagcttaataagcatgttgaccgagtacagcatttggggacaacaccttttggaggaggagaaaatgcagcggacggaggccggagagggacacaaatccgagtgccatcgtttgttcccgaatcaaacggatcggtgcagcagccggcggcgccaattacgggggaagaaacgggcaacggtaatcactagcaagcagaaaagggatttgttttgaattctcacaaatataccgtattactgaaacagaactccacttaatttgaaccccagcccctgaaataaagtccacctttggaggggggttgaaatttggaacccccgagggctctaattcataagtgcggtatctcatttatgccaatttttttttgtaaattttcctttgttttagtcattttgagcgtgccgagcagtagcgaggccaaaccatcgcataataaaaatgatgatgtcatggtaaagtcaaacggcgacgaaaagttggagcaatcggaggaggaggaggaaaagcggcaacaaattgggaccaaaattggcaagagggaactgctgacaattgacggggaacagcaacggggacaattgagcaccagtgatcagcgcagagcaatgatcatccg

SEQ ID NO: 32453 - DNA, 878 bp, Heterodera glycines
ctccccataaatctggggcgcatcggttcggggggacttccccgaaaacaaaaaaaatcgattttttcaagtgtccgtttggggtactcaaacatttatggggagcaaaaatccaacgcagaattaaagtacaggctatagggaagctactcccgaaggattcggtctccccataaatctgggcgcatcggttcggggggactgccccgaaaacaaaaaaatcgattttttcaagtgtccgtttggggtactcaaacaattatggggagcaaaaatccaacgcagaattaaagtacaggctatagggaagctactcccgaaggattcggtctccccataaatctgggcgcatcggttcggggggactgccccgaaaacaaaaaaatcgattttttcaagtgtccgtttggggtactcaaacaattatggggagcaaaaatccaacgcagaattaaagtacagactatagggaagctattcccgaaggattcggtctccccataaatctgggcgcatcggttcggggggactgccccgaaaacaaaaaaatcgattttttcaagtgtccgtttggggtactcaaacaattatggggagcaaaaatccaacgcagaattaaagtacaggctatagggaagctattcccgaaggattcggtctccccataaatctgggcgcatcggttcggggggactgccccgaaaacaaaaaaaatcgattttttcaagtgtccgtttggggtactcaaacatttatggggagcaaaaatccaacgcagaattaaagtacaggctatagggaagctactcccgaaggattcggtctccccataaatctgggcgcatcggttcgggggggactgcccccgaaaacaaaaa

SEQ ID NO: 32454 - DNA, 1591 bp, Heterodera glycines
  unsure (1)..(1591): unsure at all n locations
ctattcccgagggattcggtctccccataaatctggcctcatcggttcggggggaatgccccgaaaacaaaaaatcgattttttcaagtgtccgtttggggtactcaaacaattatggggagcaaaaatccaacgcagaattaaagtacaggctatagggaagctattcccgaaggattcggtctccccataaatctgggcgcatcggttcggggggactgccccgaaaacaaaaaaatcgattttttcaagtgtccgtttggggtactcaaacaattatggggagcaaaaatccaaagcagaattaaagtacaggctatagggaagctattcccgaaggattcggcctccccataaatctgggcgcatcggttcggggggactgccccgaaaacaaaaaaatcgattttttcaagtgtccgtttggggtactcaaacaattattaaaaatttttagatttttattcatctccctttttgatagtgaaagcatctgagtgcctaaaataacttgtaaataaaatttggtgcgtttcagagcagtttgtgaaaaaatatttatgaattaattttgctaaaaaaataaaatagtgaagctttaaaaattaataaaaaattttaaattcagaattactggagttagcatcatagcagtgcttttccttgtctttttgatgccctcgcaaaatctggttcgcttctgatcagtttataaaaaaaaagttaagcctaaaatctttcgcaaattttaaaaacaacaagcgttggcattttttcaggttaagttagtccttnacaatggagaaggcctgcaaaattgggagagattatatcgattttagtgcgctaggttcgatgaaactttttaaaatataagcctaaactttttggcctgtttaaaaagggattaaaaatttttaaaaattttattcatctccctttttgatagaaaaagcatcagagagccttatttaacttttaattaacatttggtgcgtttcagagcacgttctaaaaaatatttatgaattaattttgcaaaataataaataattaatgaaaaagtcagaatttcgaaaaattttaaaaacaacaagcgttggcattttttcaggttaagttagtcctttacaatggagaaggcctgcaaaatttggagagattatatcgattttagtgcgctaagttcgatgaaactttttaaaatataagcctaaactttttggcttatttaaaaaggaattaaaatttttaaaaattttattcatctcccttttgatagaaaaagcatcagagagcctaatttaacttttaaataacatttggtgcgtttcagagcacgttctgaaaaaatatttatgaattaattttgcaaaataataaataattaatgaaaaagtcagaatttcgaaaaattttaaaaacaacaagcgttggcattttttcaggttaagttagtcctttacaatggagaaggcctgcaaaatttggagagattatatcgattttagtgcgctaggttcgatgaaactttttaaaatataagcctaaactttttggcctgtttaaaaagggattaaaaattttaaaa

SEQ ID NO: 32455 - DNA, 2013 bp, Heterodera glycines
gcaaaatttggtgagcccctgatcaatttacaaattatttatggacgatcaaattttttgaaattttttaagtgcaaaagtggtgggtgtcttacagcttaacaaggcccaattaagcttatttccagaaaatctcgcatgaattctcatttttaaattttttatagatttttaaatatttggatatttttttggcttaccaaaacttcatcgaacctggctctttctattctcattcaaatcgctccaaattttttttacagcttaactaggcccaattaagcttatttccagaaaatctcgcatgaattctcatttttaaattttttatagatttttaaatatttggattttttttggcttaccaaaacttcatcgaacctggttctttctattctctttcaaatcgccccaaattttttttacagccacgaggccgcgaagcggccgagtgagtaccttgggcgcaggaaaattattaaggaggagggttcattatttatttatttttgcaaaatgaattcataaatttttttcagaaactgctctgaaacgcaccaaaatttatttacaagttgaataaggcactctgactcttatattatcaaaaagggagatgaataaatattttaaaaatttctaattcctttttaaacaggccgaaaaagtttaggcttaactttttcagcgggtttaaaaaatctagaaaaattagtaagcatttgtagtgctccgatacgtatctctgcaaaatttggtgagcccctgatcaattacaaattatttatggacgatcaaattttttgaaatttttttaagtgcaaaagtggtgggtgtctgcaaaaaattttcaccgggtttaataaatctaggaaaataagtaagcttttgtagtgttccgatacgtatctctgcaaaatttggtgagccactgatcaattacaaattatttatggacgatctaaatcttttgaacattgttctaggtgcacaagaggcgggtgcagagtactattatcaatggtcatgatcaacatcagacaacaacaacaccaaaccggtgctggctttccggtggtagccagtatgctgacaagcattctcttaccaatgttaatggacaaattactgccaaaaactaattgataaatagataaaaaataaatatataaaagcgaaacagctaagagagcactcgtttaattaaacatttagaagagcgcaaaaaatgcgtcacgcaatgcgaatgtttctcgtcccggaggacgtctttcagtcggtatttgttcaaccccaagcagcaacagcagcagcagacggtgccgacggtacaccaattgggcttttgcgctcacgcatccaacaaattgagcgtagcagggagctgaacgaagagcagaaggccgcgcaataccatcaggaattcaaacggctcaacaaactggtgcgcgagcaggaggagcagccgatcaatgttcgacttcagcacgaaaaggagagagaaaaaaatgcagcaacgccgccgccgccgcaaacgatcgatcattcaacgccaaaaagattggagaaaaacattgtaccatcagcgtttgggttgaggaggcaaagacaccactacacacaaaaggcgggggcattatcaaatcgcagacctgcccaaaaacaacaaagaaaagcagcagcagcagcagaaacaccaaacagcagtggaaatggagaaacggaaaaagaagagggtgatgtagatgatggggaacagtgggacgacgcacaatcatcatcatccacggcgtcaacaggtggtgtcgcaccaaaaagaatgctcagagcaagagatggggaagcaggaaaaggaggaggaggagaaacggctgatcgccttcaacaaaacacaactaccagatgaccaaaaatgcactgatcacacacattcaaaaaaaggggcacagtctggggagtcagtgatcaagggaaaggttttgcgcacagatggggcccgaggttaaaaacgag

SEQ ID NO: 32456 - DNA, 1306 bp, Heterodera glycines
gacaatgtcaaaaaaacaatgaatttttaatgggtgttttggcaattaactcattaattataagtgaattcaaacccaaaagttcccattttggattttctctaattttataaatattttggtccttgggatggtataagtacccccctccctccctccgtctcattgtcagtctctgtcaaccgtttccccctcccccctgtccttcccccattcactttgaacattgtctccgtccagtggccttccaatgcgccggtgtccaccagcgtcagtgtgtcggtgttcaccgtccgttcgtccagcacaagtcgatccatcaaatggttcagtcgcaattcctgctgagcgtgtgccactggccttgctaagtcgagctctttgtaaagcggcgcgtaaaaggcgcgacccgaccaaatttgggcgttcatattgctacggtattgttggtcaaggatgaaaacggtcgactgaatttgggtggaatttgcacaacaattagtgcaaataacctttcattttagggttacctcttctctgttgggcgcaatttgctgcacaacggaacactgaaaaggcgtctcttcgctatcggcggacggagggagtgcaatcgaatggtgggggtcactgaacacccgcaaaaggggtgcctaaaatgggacaaaatacaatagtggaaagccaaaaattggacaaagaatatggaaaacagcacagaccaacggaagaaaggaacgccaatcctccgcacttttcaacgcggcgacgtcctccaaaacgacggcgtcgaacaaagcggggggagacggaggagaggaggagggggaggaggaggaaatgcggacggagagatgttcaagcagggcgaaaacatcgtcaggagtggcgaaaactatctgaaaagctttaagttaaatttattaacagatttgttagttgctgttttctaaatttcattaaaatttctccctttttaccatgcattttggcttttctgaaggttttacaaaatggcgctgaccctgtacaaatttactcttccatgcagcacttttggcgttgtttggtttattttcttataatgagtgccgtgtcacttacccgtgtttggtgtcgtgccgacggactttccaagactccggcaatcccagaagtgatgtcgttccgtttcggcttctttcgactgatcattttcaccaaactccgtttgtccaatgcttcgcgtgccgccgggtgatgagcataaatgtgccggcgaatgtttggcataatgcgaaacgccgccttttcgtcaaagggctga

SEQ ID NO: 32457 - DNA, 1527 bp, Heterodera glycines
tttctgatcggtcctcgcaatcgcccgcttcggctcccttaaagtgccaatgcaatagcgatgcatcatctccttgtacacctacaaaaagttggaaacaaaataacatatgacacctttttggagcttgtgccatctttttttataattgccaccaaaatgccaaaaataaacgaattcgcaaaaaatttcaatttttaaatgactttccacgacggatggcaccaacctcattgttgcacaaatttttgttggacggacaatcgtcgctcagatcgccgtttacccgagcggcggctgaatttaaatttacataattaaaattaattagaatatttaaattaatatttaataaattagaatattgaaattgatataataaaataataataaattggaatattttaaaataagtttgtaaagaataaaaaattaaaatatttataaaattcaaaatttttatgccttttcattaaactattaatattaaaaaaatagtttaattgaaagttaattaattaattaagaattttttagccgcctgaaaattcaaaaaaaaaattaaataaaattaaaagtatttccgtaaattaataaaaatatagtattaattaataaataatttttatagcattttgtgctcaccgcccccgggttggcccgtcattgcggtcacagcggcgctcactttgcgcgtgtactgctcgcaaagctggttgttcgccgggtcgttgcacgtcaacgcgcacatttcggccgcgtcggcggacgcacaaaggcccgattcctgtagaaagcatattagcctaagataaatctaaagatattccaaaaaagattctcaactttttgtctaatattcggggagttttcgttcaacagtgccaaagccatttttcaattttcgatattttttgatatgggctcaactttcaatttttttggcaaaatgccgtcgccatctccttcaaatccatgcattgccaatattaaaaattttgacaataaaattttgacaaatttggcaaaatgccatcacacccatttattttttggcaaaatgccatttgtccttttcaaatgccattgttcaagtgcctgctcaatttctcagcaaaatgccattgccatcttcaaattaggtttttttattattgtcattgccagcattcaaattttgagttttttttttttgctaaatgccattgccactattttcaaattcgtcctcattcccccggccaccttcagcatcatacagttgtcaacattctccgtatcgtcacaatatttggtttgctccatgctgcgcaaatagtccacgcatcgtccgcacgtgcgcgggcacactttgaccgcaaatttctccaccgaacaaagggacggattgcacggcacttggggagtggtcgcctgtgccgactgttggtcttaaaaaatggcacaaaaaattgcgattacatactaatccaggagattggaagaggttgtgccatctgagggattttcttcattttttgaaattat

SEQ ID NO: 32458 - DNA, 933 bp, Heterodera glycines
  unsure (1)..(933): unsure at all n locations
ggaattttccagtacgggtttgtccgtgaaaatttgaaaaatatttccaaaaatccctatttcttttttctatccttgtggactgagtcggcccttgaaattatatagcagtgaacccaatacttccttggaattttccagtacgggtttgtccgtgaaaatttgaaaaatatttccaaaaatccctatttcttttttctatccttgtggactgagtcggcccttgaaattatatagcagtgaacccaatacttccttggaattttccagtacgggtttgtccgtgaaaatttgaaaaatatttccaaaaatcccattttcttttttctatccttgtggactgagtcggcccttgaaattatatatcagggaacccaatactttcttggaattttccagtacgggtttgtccgtgaaaatttgaaaaatatttccaaaatccctatttcttttttctatccttgtggactgagtcggcccttgaaattatatatcagggaactcaacactttcttggaattttccagtacggggttgtccgtgaaaatttgaaaaatatttccaaaatccctatttcttttttctatccttgtggactgagtcggcccttgaaattatatagcagtgaacccaatactttcttggaattttccagtacgggtttgtccgtgaaaatttgaaaaatatttccaaaatccctatttcttttttctatccttgtggactgagtcggcccttgaaattatatatcagggaacccaatacttccttggaattttccagtacgggtttgtccgtgaaaatttgaaaaatatttccaaaaatcccattttcttttttctatccttgtggactgattcggcccttgaaattatatagcagtgaaaacaagactttcttggaattttcccagtacgnggtttgtccgtgnaa

SEQ ID NO: 32459 - DNA, 999 bp, Heterodera glycines
  unsure (1)..(999): unsure at all n locations
ttcatccacgcccccgtatccttcgtcaatgaaatgaacgtaagcaaactgataacagcgttcactacgcgcattcaccacctccaccaattgagtaatcttaatatatattaggtaaatcaatttgaatttattttttgttacatactcttcctcgagaataaacattttccccaagcggtgccatcacatatttataaagttggatttccgaagaaaagggcgacgaagagtaagaaccacactccttcgtcctcactcgaagctgtctcttcagattcgtgtcttctcttgtttcgtgcatcagttgaatttattaactccaacgcactcaacggctcgctaaaatgagagactaataaaattgattttaattaatgcattttacgttagatgaatttgcagttgatccgttatatgattgtgcagtttgaaccatacacagttgggtgattgaatgtgagccaacttgcaaattgctgatgacccagaaagaacaatacgatgaatctgactatttttttacaattcaatataaagacgtagtatatatgtttgtaagattatttaattaaataacacaatttgccttttcctcatccgttatcaattcacgctgacgtcagccaggtccttccaaacgcttaagaatcggagaatttgaccggttacaagaagacattccagcactttcactgtttaatgagcccgatttttggttctacagtctgttaagaaattatatgtaggtccaagaattttttctacttcacagatcgttttcgcgccagcccgaaggcgccgctcggtaaaatttgaaaatttgagtgtggtttgttaattaacagattttgcaccaaatacataatgccataaattaataaaaaaaaaattgtataaaatttcaaaaaactagcnggggtcagcgccttcggcgcatcccccgctaggcagtacgattgtgttatagaattaagaatgataaatcgactggttcgg

SEQ ID NO: 32460 - DNA, 1075 bp, Heterodera glycines
  unsure (1)..(1075): unsure at all n locations
tcaatcggttggtctgatcaattaattgcattcatttgttgcgtttcctttgcattgtccgtttttgccaagatttttgcttttcgtccgttttttcagcttttccttttcccttcccaaaatgagcgcacatcaaagtttgcttgataagctttccgatcagcaacagaacaaaaaggcggcgccttcgccttcgtcgcccgagcgaaaagtgtcgccaaatgcatttccaaaaatggaaattgaaatggccaaaacgctgtgcactcttccgacgaatgtgcgcgacgaaatggcagaggtggaaaaaacggggagacaattagcaaaaggggcagcaattagtcggagtcaatggaccaattaagggacaatctgagagagggggagatgatcattctgagggcatggaataaacatttttgtaatttgtcagccaaatgtcaaagaggaagagagcaaacagacaaaaagcgaagggatggaagtggtcaaattgggagaatgcgagcgcgacgacggcatctgtcggtaatatgattgtgacttttttttgacttttttatatttttgggatttttatgaaatttttgcacttttttttgactttttcgtgactttttaaggcaaaatttggattttagtgaagaaaattctgaaaaataaagataatgcaaaaaagtccatgaaaaaaatagccaataagtcgcaaaaaggcaaaaaaaaagcactaaaaatgcaacaaaaaaaaagcctgaaaaattaggcaaaagttaaaaatcccattttttaacaactgtattagttgattatttataaaattttactgcctaaaaacccgggtctctatttataaaatgctatcctataaattgttgaaaaatgggattttttaacttttgcctagtttttcatgacttttttgcattttttcgtgcttttttggcgttttttgtgacttttttgnggatttttaatgactnttttagtcgactntttggagatttttcgtggcttaattctcagccctataaatgacacagcgaatcactggncacaatttaaccagtaaaaa

SEQ ID NO: 32461 - DNA, 1102 bp, Heterodera glycines
  unsure (1)..(1102): unsure at all n locations
aaaatggctatctctttttcggccaattttgtacgatcaaagggaaaaatgcttaattcaggccccaatgtgcgcctgaatcgctaattagctgngcacttcgnaatatancatataaattagccctctcaaattctccttcggncctcagaaaatggctatctctttttcggccaattttgtaccgatcaaagggaaaatggcttaattcaggccccaatgtgcgcctgaatcgctaattagcttggcactttcgaatattacatataaattagccctctcaaattttccttcgggcctcagaaaatggctatctctttttcggccaatttagtaccgatcaaagggaaaatggcttaattcaggccccaatgtgcgcctgaatcgctaattagcttggcactttcgaatattacatataaattagccctctcaaattttccttcgggcctcagaaaatggctatctctttttcggccaattttgtaccgatcaaagggaaaatggcttaattcaggccccaatgtgcgcctgaatcgctaattagcttggcactttcgaatattacatataaattagccctctcaaattttccttcgggcctcagaaaatggctatctctttttcggccaattttgtaccgatcaaagggaaaatggcttaattcaggccccaatgtgcgcctgaatcgctaattagcttggcactttcgaatattacatataaattagccctctcaaattttccttcgggcctcagaaaatggctatctctttttcggccaattttgtaccgatcaaagggaaaatggcttaattcaggccccaatgtgcgcctgaatcgctaattagcttggcactttcgaatattacatataaattagccctctcaaattttccttcgggcctcagaaaatggctatctctttttcggccgattttgtaccgatcaaagggaaaatggcttaattcaggccccaatgtgcgcctgaatcgctaattagcttggcactttcgaatattacatataaattagccctctcaaattttccttcgggnctcagaaaatggctatctctttttcggccaattttgtaccgatc

SEQ ID NO: 32462 - DNA, 1896 bp, Heterodera glycines
  unsure (1)..(1896): unsure at all n locations
acatttcttttatttttataaaaaataaataaataaaattgcatggaatacaatgagcgtatttgtctcctgcttactctgtgtgatgctccggagtaaaatttttcaattaatccgcttcacacaaattgacacttgaagaccagcaattaggcacagcaaacacaaacgaattgaaagtccaaaacacagacaaatttattaaaagtgaagcacaataataaagaaaaaatgggaggcgatttgagaaacaaaaatatccaaaatcacaaaacaaaaaaaaccaaagtccagaagtcccaaataaataaaattttgagataagaccaaaaataacgaaacaaaacgccaaaattataaattttttaagaaatcataataaaaaatttggtggctagtagagaccggcgcgggacggattccgcgcgggattttgcgggatcccagtccgcaaaaaaattttggattccaatcccgcagcgggatccgcaaatttgaaatttccggtctctagtcgctaccccataatctgaatattcttataaccagaacatttctgagaaatcagaacagagcgagcacagtgctaatggataaatcaattaaaaacatttaaaaaattgccaattttaataagcgccaaaatttttaatagcattgagaaaccaagtgatatttgaagcggatcaatttcgactgatcagaatgtgcatcctgtggtggacaattgaaaaacgccctcattaggtgcaacgtataaagtcactccatgtgacaatttatgtggcacaaatatacgttttgaaattgtgcaattcaatccggcaatcggctggatttcgcagtgatgtggccctggaaatttaaatttttaattatatgatcgatcgaaatttttctgcttttgcctattttttcctgagctcccattgacctgaagcgcaccaaaaacatgttttttggtggttgttaagctacttttcgagttattagggcctattttctaatttttttatttttagagccaaaaagccaaaaatatcttaaaaagctatttttgcctattttggcgttatgcncaaaatttattagtaaaaataattttgatttaannnaattatatatattcaatactcattttgctttngctgctttgaataaaaatttgtccattttacaccccttaaatttgagcttttttgagcctcttttccactttttagtgcctattttatgcatttactcaattgaaaaacaataataataaaaatactgataccatttttcaacgaaattattcttacgggaatattattcatgaaaaaaatgtgagacaatttttagcttttacaaaattttatgtttttaacagagtgttcttcaaatcttttcgttcattatgagtttattcattatttttacctgggcattccttcagcttcccagcagcccatgcaatcatgaattttgaatagcaatgcgagaattgtctcccgtaaaacacttgcatgggaaatttacgaaaaatttcagggtgttttttcaaaatatttttgttaaatcgttcactgattcgttttgcatttttttcattgatataaaggttccaccaaacacccgccagagggtcgtcagctttctgtaattcaaatttatatttaaaaaatttaatataaaaatgattaaattttaattatagcaattagttttcctaccagttttatgctcatgtatgcttctgtcggtctcaattcatcaagctgaatatgagataattttgggttatgaaaaatacaataatttaatgtgtgccctatgagactcgagattttcagtttttctgcgattttgtttcgctaccaaaaattaggttttgcaaaaattggatgtcaattt

SEQ ID NO: 32463 - DNA, 1547 bp, Heterodera glycines
  unsure (1)..(1547): unsure at all n locations
ttagtaaactctaataatatgtacataaaaaataacaaccttattgaataaaaaaaaaagttttgagaatatgcaaatggaaaagccattaaatatttaaaattccggaaaattttttgaatttactatttttttttgcctgttcgaaaactgcgggatggcggtcgaaaaagtattcgttaagcattgggtcgtagttggactgagcgggcgtcagacgcgacaaccgagtggcggggatcttcttcagagtggcctaagaagaacaaattcatcaatttatttcataaatttgtcaatcctaacaattttttgattcgaataattaggacaaatcccaacaaattatggcattggcatatccctccggcacttcctttacctggtacgtctcgtgccgaattccgccaacgttgagcaccactcgctcgtccatgcacgtcaccggcgacactgacaataattaatgggtgcgcgaaaataagtaaaagaaaaaaaataaattatccaaatgcactgctaatacggtaaaaaaaaaaggagaagagtgacaattaggggggatacggtattgaaatgaataacaaaaattaagctaattctgatggaattagcaaagagtcgtaaaaataatgttaaaaatgcaaccttttacttgccaaagccaaatcaataatttaattaattaagctgttggttgaaaaggcggctaaggccatttcgggcaataaaattctcccaagagaaaaaaaacccattaaaatggtcggccggtgccattcattcattcattcgttgttcattcggttttttcaattttggacgtgcggcatttcccccccccccgccgatggcattgcttcggcgatgaattttttgcctacgggggaatttacatcattccattgaaatggacgccgcccggcaaagcacaaaaccattccaaaaatgggccactcaaaaaaaagatggggggggggggcattttaatggaaaattaatttatttggaagagagagagagcaaacattttgagacgatttggattaccattaaaaattaaatacacaataattatttaaaggatgttaaaaaataaaaaacgatttattttatttgggaaataatttccaaaattttttaaaattaaattattttttaattcataataaattttatgttccattgacctgggagttgtgctataatgtattacaacaatggcacattaataatggtggtaattaattgctgctgtggtttttttgatggtctgttgatccgccgccgatcgcccgtcactcccccaggggacaaatgccaccagcggagttggccgggggacagctgtcgccaaattttgcttttggcaaagcaaaatgcctttaggagagtgggggagagggaactaaaagcacccagccaaaggtcgaaataagcaaaaaaattcattttcaaaaaaaaattaaaataatgacgggttggaggaaggggaattaacaaatatttaattanataattcaaaaaataaataaacaaataattta

SEQ ID NO: 32464 - DNA, 608 bp, Heterodera glycines
tttcagttatttggtgataaatatgcctctaaatgctcttgaaaatgtcgttatgaccagcaaaatatttcctcgagagacgtccccctctcccctccccctcccccctccccccccccctcgcccatctttgagaatcggattagcccccaaaaaattaaacagaaaattgaatagtgacggaaggagaagcggtacttaagcattgttgattaaatcaataaaccacaattaaaattgtgtttttttattaagtgccaaacccaaattggataagtgaaaggaaagggacaataagggaaaactaatgatgaaaaatgatttgtacaaataaaataaaggaaaggcaatgaaaagaaaagggaaaaaggaaaaagttggcaatggaaagggaaagggaaaggcattggtgacacggcacgaattattgccgaggcaattcgggaaaaccggcggaagaaaaagggcaatcggaggaatgattggaggggggggggggagtaaagtagaagtggcacttatggggagaagcgcagaagggcaaagacgaggcaaattggcaaaaagaaaaagaaaccgaccgaacgaagagaaaaaggggaaaaagg

SEQ ID NO: 32465 - DNA, 1085 bp, Heterodera glycines
ggggacctctagagcggaatgcattttcggtcaaattatttctataattattgactctatataattttaaataaataatttattaattgcttccacctctgcagtacactgattgccaaagaggaggctctttttgggcggatcactgctgcttcgtccattgtctgttctttgcgatattttccattcaaatttggcatcacaaaattggcataattttgctgcgcggcacttaacaattttttcaacatctatataattttcattttatataaattataactatgtttatcttctgtttttccctacaaaggtagaatttcagaattttaatatataattaaattctgaataaaatatttaaaaaaatcttatggcaggcataaaacttgtaaacaaattagcgctgcatgaatttttttttaaaatgattgcccgagaatttttgaggcaccttcattctcactttctgatgtataaattttaaaatatcagtttagccaccattcggcgctgtattcgctgccactgccgtgttgacgattttggtgcacaccgccagcaaattgcatgccattggcactgatgcgcggcgtgctgggccgaagcgacgcgatacaacttccaccaacctaaaaaatgaaactttggagttttagcttctaaaattaaaaaaaattgcactagaaaaaaagaaaataaaaaatttttgaatttattagtcagagcttttctgaaatcaaacctaaggaaactttttgtaagctatttaaataacactttgaactatcgaatgatacaaaataaatgtaaatttggttgcttctgagcaaaagtattaagggttttcaagaaaatttaaaatgacatgtcttcatctcccgtagatctctataattatttaaaagacggaattttaaaaataaaaagaaatcatgaaaatatttattaataaacgattagaaaattactaattacttaatataaaaattttaaattcgaatttcccacttcgtcatgcagcaatgattgggttgaacattgaaaagaatttgtgatcagtcgaacacatcgctggcgaaagc

SEQ ID NO: 32466 - DNA, 1374 bp, Heterodera glycines
  unsure (1)..(1374): unsure at all n locations
tcccgcaaaaattttttgagttccaatcacacagcgggatcagttaacttgaatttccgagctctaactaaagccaaaattttcggcacttttgccgtcatttttccaaaattggtcatttcccacacttacaataattagctctgtccaagtgagtccccatttttacacaattcactcccatcgaaaatagcagccccatccccaaactctcacaacgcatattcccccccccgtgccttctttccattctcttaaaattttgttcctcaagtacccccccccctcctccggcacctccaaataataattattacttttagtgtttgcccctcaaggtgtgccctccccccncccccccggggggatgggtccctctcaccctctctctctctctgtctgtgtgtccatccaaaactcgtcaactttgtctgtcgcgacgacgtccttcgactgatgagagtgaatgagtgacccccccccatgcccaaatttcgtcccctcagtcgccccggggcgaattttggctggggacgacggagtccatttggaggggagaagaagcggctttacatatatactttacctttctcaattggcaggcttcctcttttgtatgtattgtaatttgttgatgtctgaaaaggcgtcactcaaaaaaattgaaaagtggcaaatttttgggtatgccataattggtggatgttcaattccaaattttcaaatgcggcaactttaatggcgactgattgatcagtcagtccatgatctaaaaaccgataatcctggaccaacaggtgaacactctccttggtcaaactagcaattccggccagtctgatcgatttgaaatgattattcagcagttcctttgtttatttgctcagtgacttctttccattttcggaacactgatcagttcattattcttttgtttaatgatcagtgacttcttcccactttctgaacactgatcagttgattttttatttttgtgaccgatcagttgcttcttaccagttatttctttgttttgagactgatcaatgggctttttcccattccaatcactgatcagtgtacgtttgctgtctcgcttctctcattaaaccattttcccagttggcatctcaacaactagcagattaaacgattaatcctaccttacccgaaatctcccgtttgaattttctgatcagtgatttcacggcttttctcctccattttcccccacaaatttcaccgtccgtccgtcgatgccattaataataatgaaaattgcatatgcgcatgcctctttccgcaacagcattttcaccatttcatacgcaatgacaatggatgatgaatgggcaccgattggggggggggggg

SEQ ID NO: 32467 - DNA, 774 bp, Heterodera glycines
ggaaatcagggacggtcccaggattttggcttggggggggggcacctccccccgggcgacgaccttttttttttttgcttttcacacccgttttttatgtagcgcggtttttccaaaaaaaaattttgggggacagggggtccggcggtgccgataggcgccgccgggaaaatttttgcggttttaaatgcggtttgttaacagattttgtccaaaaaatgaccaaattttgtgattttgagccatttttagcagattttcattaaaaatttgtggattttttgaaaaatttagcgacatttcttggaaaatttgggtgtggctaggtctggggggggggtaccagcccagcaaggaaaacctaaaattttcagccaaaatattatttttccttaaaaatttttggacccgggggggtcttggcggcgcaactgtcgcggcgcaagtgtcggcggcgcaactgtcgcggcgcaagtgtcggcggcgcaaacggcagcggcgcaagtgtcggcggcgcaagtgtcgcggcgcaaatgtcggcggcgcaagtgtcattttggctgggcggcgcaagtgtctgcggcgcaaatgtcacatcaccttttctttcacaatcatttaactcttttcaatctccccgaaatgtgactgacaagggaaccacccgaactgtaagtcggaaaatgcatatgtgttatataccattggatagagcagggtcgacttctattgtgaattcttaatattacgcccccataggaagaaatcaaaaag

SEQ ID NO: 32468 - DNA, 1443 bp, Heterodera glycines
  unsure (1)..(1443): unsure at all n locations
taaattgtatattgttcactgccggattgtccgctcctcctggattgtccagtcacgtttttgaggcacaaaaacttctttgccaaaaaaactgtttttgatgaaaaagaaccccaaatttaaaaaaaatctccaaaatatttaacccaaaaaatttttttatctgccaaaatccataatatttgttaatgcgaagttttataacagcaaataaatgttctaatttattatttttaatgaattttaactcaaataaataatttttctcagagatgctttcttaccaatgtataaaaattatgtgttttctgccaaaatacgaaacacgaaaaaatcaacaaccatgtcttatagctttattaaatttgacaaaatttgctacatcataatttagcttaaacataatcaaattaaatcattcttgttattgagtgactttacatgtcctccattgtattataattttttataatctagcaaaaatttacaaaaagttataactagggcagcaacttttagtgacgaaaaataccgaaatagttaactaaaatagtgagtaaaaatcccaaaatagtgaagaaatagtgacaaaaagtccgaaatagtgacgaatagtgacataattttcagccaaaaattgagcaaaaaattttttattcactgattgcagttacaaatgagatacatttcctttataaaattctcttagcaaatattgacattttttaaataaaaaattttgtcatgaaaaaaaatttgcgggaagaatttttgagaaaatttttcatttattaggtgtgaattttcaaaaattttcgaccgtttcttaggggtgtatttttttgaaaattttggggtcgattcttagggatgtattttccgtttttattgcatttttgttgagaaatttcccaaaaaatgtcgaaatagtgacaaaatagtgataaaacgccaaaatagtgatttttaactattttagtgacgaaacgccaaaatagtgatttctagtgacgaaaagtgacgtccaaatgaaaaaattttaacgcagaaatgcgttttttgagctcctttcttcaaaacaattgagcaaaaaaaagttttttcactaaaaattgctgccctagttataaccaaaaaattcagaaaaattttgactcactaattttgtcgctaacttttttaaaattcaataaaattttctgaaatttcacagaataataaaaaaaatctttgggctatttttcgatcaaggtcggtgtgaatttaagtttgaaaattttatgcatttaaacgaccttacattttttgaggaccatttaaatatgacactnattaatttgtttataactttttanagaaagaacaatttttaatttntgtttagaaattttaacaacagcaagccgagaaaaagagtgttgccgagcaatgagacgaaatgat

SEQ ID NO: 32469 - DNA, 1214 bp, Heterodera glycines
  unsure (1)..(1214): unsure at all n locations
aggtaattagccagtttatataagtagccatagtcacaaactcaagcgttgtccattcttcgtgaaaagtgcaaaacacttggcgcgttgccaaattcagtccgcaaccgaccacatcgccaatgtgaaatgagggcacattgtccgaaatgattacatcatttccattggcattttggccttcaattctacgataatttgcataaccgtatgnaaaacagtacaaaatccaaccaaatagtccaaggacatttcttttgttggtagtccaatgagcaaaatgaatagacaaaattagagatcggaccggtcggttcttttttccgtttttttccgtttccgttttttaaccgaaaccgaccgaccgaaaattttttgagtttttcggtttttttcggtttccggttttttcggtttttataccgaaaccgacagatcgaaataatcaaaaaaccgaaaaaaccggcggacttttttcaaaaaccgaaaaaaaaaccgaatcaaattggagcgatataacctgttaataataataaatttattgcttttttgtgctctttttcattttgaagaattttttgtaaaatattttctgctattttgaaaaaaattattaacaaaaatgcaataaaaacgaaaaatacacccctgagaaatggaaaattttatcaaaaattcatattcaaaatttatttatttatttacttgactacatttttgatttttaaaatatttatctcatttccattttgattaaagtgaaaaaaggaagatttcaagcatttaaagagaaaatttgacattttgccccccccccccgaggggtcggggagcggtgctacgtcatttcgcgacaagtgcaaaaagggcacttcgcgacagtgcaaaaattgggcacttcgcgaaaaatgcaaaaattgggcacttcgcgacagtgcaaaaatggtgtaaaaatggggcgtttcgcgacagtgcaaaaatgggcacttcgcgaaacgtgcaaatttaaccgaaagagaccgggcctcatcagtacggtgtctctttgggttaatttatttaaattaattattatttgtgtttcggccctaaaccgtatacacacaaagccacagcaatcaagcaaagcaaaataaattttattaagcaaacgtaaatattttatattggtttttaatttactcttttaactaattatatttgaatatgattaa

SEQ ID NO: 32470 - DNA, 1220 bp, Heterodera glycines
  unsure (1)..(1220): unsure at all n locations
agttcgtgtgtttaagtaagacaaagcaagcatatcgacaaacgattgtcatcaaacttttttcaagtctaccgaattttaaatgattgaactcattagatagttcattactttttaaagaaagtgatcctttttgagtttgggacatagctgataatgaatgaatgatatttattttattctgcactgtctttgtatgaataatatcactgaaagtttttttattgggttcccggtgatttagtagtcagctaagtgttttcgtcattattagatataaatacatttgtctgatgggttctggcgaaagcatttactaaaaaatcaacaattgattggaatcaaaatgataaataaattcgtaatacccctaaaaatatcttgttttaaacataaatctaaaacaatgtttaaatttttcaggtgttcggatatgttaccaccggtggtcttttattggtatcaagaaatataatatgaaataataataataataattaaataacataaatcataaacaggttcacttccagcacatttgtgctcggatattgtgttccattggtgcttatcatttatttcaattcacgcctaatccgaaaactgtacaggcacacaaagtgtgatgtggaaattatagaattgtttcttttcctcaaacaaatttaatttttaagacagctcagaagtggaataccactccgtcaaatcactatatatacatcgtattttaatattttaatttataaattaaattattatttttatttgagtctgatcgccgctttgtatttcatttgttggactccatattggtgagttaacattaataagtttgaaattgtatcaaatttcaatttctaatataattggttattaaggcggatttcgcaacataattttcacaaaataaggaaaatttatttgaaaatattatcgtcaaaatttttttctaaaaagtaggcgaatttatgtcaaaaataagccaaaatttgttttaagggaattatgacaaaatttttctctcacaataaaattaatttgaatatatttttttgattgtttcaaatgtccccaaatttcttagtttttcttccctgaaaaaggttctaccttcgttaaggtgcactgttttatacgcaatttggatgagcgcattcgctgaggatggccattcagagtcaacatcagacatgctactngtcatcatttactgtctt

SEQ ID NO: 32471 - DNA, 785 bp, Heterodera glycines
ttgttcttatttcttaaaattattcaaaaattttgaaattttatggcgaaatgtcactatgtatcaagaaaaaatataagatttgtgtcaaaatttggaatttttgacaaaaatccgttaacaatcgctttaaaaatcgcaaaaatttggccttttttggtgaaaaactattaacaaatcagaacaaaattacaaaaaattttccggcggcgcctatcggcaccgccggaccctccctcttgcccaatacccaaaagtttttttggaaaaatgcgccgcaaacaaaattgttaaaaatgggattttttgatcccgaatgctctgaaatgtacgatttgcttatttcctccccaaaattgttaaaatcgataatgggaggcgaaaaataatatttaatacatttttggccgaataaattgtaaaaataactgatttgaagccattttgcaaaatgttcttattttggactctaaaattttatttttttgccttgatgttcttattttgaaaaattttcgatcgaagccctgtatttttgagcccttttcttcattaaaagggcaaatttgcaagtagcgcccgcatttttcgacggtgttaatgattcttttttattaatttaaagaagtttagaaaacccctaaatgatatgtgaagagaaggaagtgagagagtttcgatgacatctgctgaacactcaaacttttgggcttaatttctcagtgatttttggggtgtccgaatttaaatgatttaaaaaaacaaaatccatgttgatcattata

SEQ ID NO: 32472 - DNA, 1435 bp, Heterodera glycines
  unsure (1)..(1435): unsure at all n locations
aatcatggagcaaataaacctttttttgctgccttttttatttttttgaataaaattttcacacttggtgttagttccattcaaataaatcacaaanaatgtataataaaatttttnttggcaataagcaaagaaaaataaattaatggaagaaagttgttaataaaacttaataggaagttattgatatctttatttttttagtcagtacaaatttcagaaattgttaaattatttaataatgatttgattacaatttctataaaataccaaacattttatttaatttaagataataaatttaagtcattggcaaaaaacaaaggaaactgaaaaataaaggctaactgtttcaatcaaattctaataatgttaaactatttaaaaaggtaattggacgaactaattaatcaatgctataaacatggaaaagaaataattaaaacgagaaagctcattaaattaaaccaatataattaaataatgattgttaagaattcccagaccaaaattaatctagagcacaattaattctggatttaatggaacatataagaataaattcaataatacatctttaaccgcagaagtaattaaaggcacaaaattcgaaaaaattttttacatttatgcgtatcaagtgaatcaaaatgctattcttaaagtactataaccttgaaatgagtaattttaataaatttttgcaattttacatttctacaaatttgaatttatctgtaaaatttcacagtcagatgccaataaaatattgatggtaaagaattccacataaattattaactattttttcttcttatgattttcatttttaatttttgttactcatataaattttttaaattaaatagttgacctttatttatataacccaatctttgccaaagtattcaattaacaaaattttcatctgattatgtaaacatgaaataattttctcaattaaactttttcattaaacatttaagtaaattaattaattatttaatttatatatttttcatataacttcagcaggagaattttatgagcaaaaaatttttagatatatttttaaatttagtttataatttttatgtattcatgcttaaatatttttttgctttaaataaattttgtttgtgatataaactataatagtcaattgcaaaaatagacattaagatcatactttagaaattttcagttaaaaattttattttgactttgatgtatttattcgattctgatgtgtaaacttgattgaaattgtttattagcaatttccatgataaagtaattcagcctaagcataatttaatatatttattaattataatcgcttatgtaaaaaaatgcagaaagtatatatttaagtatttgtcttatattgttattttatttaggtattatttctgaatgaagtattttatgattt

SEQ ID NO: 32473 - DNA, 989 bp, Heterodera glycines
  unsure (1)..(989): unsure at all n locations
tttttagcaaaatcaattcataaatattttttctgaaactgctctgaaacgcaccaaatgttaattaaaagttaaataaggctctctgatgctttttctatcaaaagggagatgaataaaatttttaaaaatttttaattcctttttaaacaggccaaaaagtttaggcttatattttaaaaagtttcatcgaacctagcgcactaaaatcgatataatctctccaaattttgcaggccttctccattgtaaaggactaacttaacctgaaaaaatgccaacgcttgttgtttttaaaatttttcgaaattctgactttttcattacttatttattattttgcaaaattaattcataagtattttttcagaaagtgctctgaaacgcaccaaatgttaattaaaagttaaataaggctctctgatgctttttctatcaaaagggagatgaataaatattttaaaaatttttaatccctttttaaacaggccaaaaagtttaggcttatattttaaaaagtttcatcgaacctagcgcactaaaatcgatataatctctccaaattttgcaggccttctccattgtaaaggactaacttaacctgaaaaaatgccaacgcttgttgtttttaaaatttttcgaaattctgactttttcattacttatttattattttgcaaaattaattcataaatattttttagaacgtgctctgaaacgcaccaaatgttatttaaaagttaaacaaggctctctgatgctttttctatcaaaagggagatgaataaaatttttaaaaatttttaattctttttaaataggccaaaaagtttaggcttatattttaaaaagtttcatcgaacttagcgcactaaaatcgatataatctctccaaattttgcaggccttctccattgtaaaggactaacttaacctgaagaatgccaaacgctttgtgnttttaaaattttccaaaatctgactttttc

SEQ ID NO: 32474 - DNA, 1322 bp, Heterodera glycines
cgcgcaatttgatcagcaactgtcgacgcaccaattgatcagggttaacgagaccctggcaagaatgttgagttaaaattttaatttctaatgatttcctgaaaatttttgagattttgcgagaatgagtgtggaataaaagatgagttacgaaaaaacttaaaattgccaaaaattaaaaatcaataaaaaatccaataaaatgtttataaaaatgcatttgcaagaaaattaattttaaaaaatttcaccttgcatttgggtcatattatcaaaaattaggtgctgttctgtttaaaaagatatgccacacatttcttgagtcaattaaatttatgccaaaatttttgtgccttcagcagatggcacatttgctgcttgctgctcacctgctcctccaccttgaccacctccaacgagttgcgcacattgtccacatagtacaactgttttgacatccaatcgaatgccattgagaccagtccgtcgttgtgggtgaccagaattggtgctgccccttccccgtccggcttcacccggtacagcgtgttgtccatgatgtcggcgtagaagaagctgtaaatggtttttatggtgcgcgaagtgtgctggtttttcaaaaatatcttaatttcggcctagttttttttgatttttgataaattggctaaattaaaaattttttataaattcccaacattgataattacctaactgttttatacgaaaattttagataaatacgtaattctccgtaaccctaatatattatgattcttgatcaatgcgccctcaatagtacaacctaatacggtgcaaccctcgattaaattacaataatacggtactatagttctcgatcaatgtgcaaaaaatggcataattctcggccatttcgccctaatatggtataattctcgaccttgtatcccctaataatgcatattctcgtcaaattcacattaataatggtatagtttcgctaaatgcccaatgtctcgcccgctaacctgcccccgtgtacgtcacattcaaccgcaaaaaagtagccaatgcgacgctgtgaggacggcgaaattggcaaaattgcttccgccaatgcgttctgcatgatctccgggtaaatggcacgcaccaccttgttgctgctgaacaacagatagtccatggccggcacacagcgtttgccgtccaccaatttctgtaaaaatgtttatagcatttggaatggattccatgcttttccaggataagtggacaaaaatccaggaaaatactgaccccaaaaaatccaggctcttctgagccaattgaccgttcct

SEQ ID NO: 32475 - DNA, 1059 bp, Heterodera glycines
tgggataacctctaaatataaaaatcctctgtgaaacccccccaagattgtgcacagccctccgtctcatacgcaagcgcttttgtgaggtataaaatttctcaaaaaaagagatagacatttttctgggatagagtataaatttaaaaattccctcaaaaataaaaggtctattgcgcaccgccctccctatcatgctcgagagcatttgtatgtgtataaaatttatcaaaaaaagagatagccatttttctgggataacctctaaatataaaaatcctctgtgaaataaaatggcgattgtgcacagccctccgtctcatacgcaagcgcttttgtgaggtataaaatttctcaaaaaaagagatagacatttttctgggatagagtataaatttaaaaattccctcaaaaataaaaggtctattgcgcaccgccctccctatcatgctcgagagcatttgtatgtgtataaaatttatcaaaaaaagagatagccatttttctgggataacctctaaatataaaaatcctctgtgaaataaaatggcgattgtgcacagccctccgtctcatacgcaagcgcttttgtgaggtataaaatttctcaaaaaaagagatagccatttttctgggatagagtataaatttaaaaattccctcaaaaataaaaggtctattgcgcaccgccctccctatcatgctcgagagcatttgtatgtgtataaaatttatcaaaaaaagagatagccatttttctgggatagagtataaatttaaaaattccctcaaaaataaaaggtctattgcgcaccgccctccctatcatgctcgagagcatttgtatgtgtataaaatttatcaaaaaaagagatatccatttttctgggataacctctaaatataaaaatcctctgtgaaataaaatggcgattgtgcacagccctccgtctcatacgcaagcgcttttgtgaggtataaatttctcaaaaaagagatagccatttttctgggatagagtataaattaaaaatccctcaaaataaaggtctattgcgc

SEQ ID NO: 32476 - DNA, 1015 bp, Heterodera glycines
  unsure (1)..(1015): unsure at all n locations
agtgggaaacatgattcaaaaatttcaatttttttctagtctaatttactcaaaacggttcagaattcgataaaaataacattcacggtgcgaaaaatggggtttgaaaagtttattggggaaaaaaagactacaaaataatacccctgggagaagggagtgggaaacatgatttcaaaattttcaattttttctagtctaatctactcaaaccggttcagaattcaataaaaataacattcacggtgcgaaaaatggggtttgaaaagtttattggggaaaaaaagactttacaaaataatacccctgggagaagggagtgggaaacatgatttcaaaattttcaattttttctagtctaatctactcaaaacggttcagaattcgataaaaataacattcacggtgcgaaaaatggggtttgaaaagtttattggggaaaaaagactttacaaaataatacccctgggagaagggagtgggaaacatgatttcaaaattttcaattttttctagtctaatctactcaaaccggttcagaattcaataaaaataacattcacggtgcgaaaaatggggtttgaaaagtttattggggaaaaaaagactttacaaaataatacccctgggagaagggagtgggaaacatgatttcaaaattttcaattttttctagtctaatctactcaaaacggctcagaattcaataaaaataacattcacggtgcgaaaaatggggtttgacaagtttattggggaaaaaagactttacaaaataatacccctgggagaagggagtgggaaacatgatttcaaaattttcaattttttctagtctaatctactcaaaccggttcagaattcaataaaaataacattcacggtgcgaaaaatggggtttgacaagtttattgnggaaaaaaagactttacaaaataatacccctgggagaagggagtgggaaacatgatttcaaattttcaatttttctagtctaatctactcaaaccggttc

SEQ ID NO: 32477 - DNA, 735 bp, Heterodera glycines
  unsure (1)..(735): unsure at all n locations
tacagagaattgagaccagcggattcagtacgggcacccaatgcatcggaagggtggcgcacatttggacagccaataacgtggagacgacacttcaaatttgaagaccaacaattgagcgctgaccaaaagattgataacattgacaatcaatggcaaaagtgcctgaattttagacaaaaaataaataaattttgattttaaatatcatttaatttgtaaaaatacgataagataaatttctgaaaattggtttgagtaaaaatacataaacacataaattttttgcacaattttggtattttttcaaaatttttcgatttaggggcgcattttccaaaaattttccattaggggtgtattttcggttttttttttgcaattgcagaaatatggatgcaaaaaatgtgaaaagtatggaaataaaaagaccctataagcatcggtgtaccgacatttgcgccgcgacttttgcacctcgacacttgcgccgcccagtaaaaatagacatttgcgccgccctacaaaacccatttgcaccgttcttanaattttaaaataatccaaataattntatttanactataatctacagacattaatgtgcctaattaaattgccattatttttgcttttcttagcattaaatttgcctttggtgctgatgcgcgcagtgaaaaaaactatttgtcaatcgttgtaatttggttctttgtattcctttattgctttttt

SEQ ID NO: 32478 - DNA, 1139 bp, Heterodera glycines
tcacttccaaagagtgttcttgttcttccgcatttctcgctgcttccgtcctctttcacaacaaataattttgtgcccttcagcgtttgctttttcgttgtcgccgttgttgaacttccttcggttggttcttccaaatcccaccattcctaaaatcgttcaaatttaaactgttaaatcgcattaattaaaattcattgctcgccttgggagggaaattctcctccccttttcgtttttcgccttcttcccattcgaattccttctccggcacttccacctctttggcactctttttcccgtcctgcggttcgtccaaactgaagtccaaattcagcaggtcgtactccgtcagaaagtcgtcgttcagtgtgtcgtattcgctgacagtctcggcttttctcggccttcgcttcatcggcttattggcgcctgctgacagtgaatgagtgatcaagaaggtaattgctcttaatctctgatcagaaaaacgacctttcggttgcaattcgccggtgtttccaatgtccaaccgatcattcattggaatggttgtggtccgtctgatcggatttttcaggccctctcggctccaaactgactgggccaactccggctccaaaatgctgaatgcgtgtctcaaatggcccactttggccccgtccgacctctccggcatgtcgaatccgccatcgtccggcaatcccgagatgggttgcccacttctgaccacaccggtgagcaacagcagcggcagcagaacggggaacagtacatgaaggacagcctcatcggaccaggaaatttggtgtcgcatttttggggaattaggtcagtgtgtgagcccacagcccgggggctttttgctgctgccgcgggcgatctccgccgatcatttggacttccctagcccacccgacggtgcctttacacatcgatcggaggacaaaagccggttgttcgcctcgtcggggcctggatattggacggatcagcgaccgaccgatccgatgcacacaccgccacactcattagccacgtaattcacaccaattgctgctgttgtggcgatgggaacggtccccgccccttctccccctcccctccccccggccatccatcattcgaaaaaacaaagc

SEQ ID NO: 32479 - DNA, 968 bp, Heterodera glycines
cattaaatagtcacatttggcaatggatgaaagtgtgcggtcggcgcttgcagcttcagtttggcaaaactgcttgacaacatttgttgcggaattcagcaaatactcaagctaaataaatatgcgtattaaaattttacatttaatgtgtttagttttttaaattatttaataattaaggattatgaaattagtagagaccgacttttagggtatgcctttttatgcgcattagttccgattattgagcataaaaaaacccattttcccttctacaattgacttttattatgccttttttggcattttgccgtttcggtgccctttttggcctttttttgttgttgttgaaaaattccattaaaaatttaataaaacaggaaaatacacttctaagagaattttttaatttaaacgattcattgaataccgtatatgctctaattatcaccccgggggattattattcaacctcctcagaaagggggggattattagatacggaggataaatggagacggggggattattttaaaagaaaaatgactgaatttttagtttgtgggttgacaacgccattggactgaacgggagacgaaaaaatagcttgcttcaagccgaaaggggcaattggaccgataggaagcaaacttttgcgcgagtttagggcaactgaaacgatgaaagatgggcgaaatgatcacgaagaagctggcctatctgatgatgatggtgatgtagagttcgatcaagtcggagatgaggacgaaattcttattttgttagcgttttttctattgttttttttaaattgatacaattttccaaatacaaattccatttatccccctggggtgataaatggagaacgggggattattggttcacctcctcagaaagcgggggataataggagccagcgggattaatggagacagggtgataattagagcaaatccggtaattat

SEQ ID NO: 32480 - DNA, 983 bp, Heterodera glycines
ccaatgcaaaagtccggtccgcgtaatgttttaatttggttttatttacttgctggtggttttggtagttattccatagaacctaaatttgtccaaaccattaaaaaccatattttaacattattaatatgtatgatttaaattgggttgcgtccccgaccgtcggggttgaaaaagtgggggttcgggtggggtcgaccaaatcgttcggggtcgggttttttcaatttttgccttatgccatataatcaaaaaaccttatattatttttgcttaaaattttttataattcataatattaattttgttttttaaatttcataaatatttttgtatagaattaattaaaaacgcataaggcatttagtcgccttttatacacttttttttgccccactaaatttttccattttcgggaattttcattttttgttactaattgtaagtgtctataaaagggaaggcattggaaaatttgctctcattcgttgcgcctgtctggttttaatgcctctatttgccaattgcgtcaaagcatcgttctgctgctccttcagctacaaaatatcacagcaaacggaagaaggcgtcacacgtggcgacattatggagaagatcgtcaacttcaagctgatgcaatttgtgctcactttggcattcatttggcaactcatttcaatgcgccaattctgcggcacttttgccgacccaaaagtcaattcatttaaatttcacaaatgatcaaaatgttgtgattttcaggccttcatccatgaaaacatttcagttggccattgcaaacgttttacgctcataggaaaggactcaaaaactggcgatttcggcgctgtgttcgaccaggacaaatggcacaaccaaatgtttataaatagcaacaatggccaaccaaccgaagaacagaaacaccaattcatggacgaattggccgcgaaattgccacccgctgggcgccattgcattcc

SEQ ID NO: 32481 - DNA, 890 bp, Heterodera glycines
  unsure (1)..(890): unsure at all n locations
tcgattttttcagtgtccgttntggggtactcaaacaattatgcgggagcaaaaatccaacgcagaattaaagtacaggctatagggaagctattccggaaggattcggtctccccataaatctgggcgcatcggttcggggggactgccccgaaaacaaaaaaatcgattttttcaagtgtccgtttggggtactcaaacaattatggggagcaaaaatccaacgcagaattaaagtacaggctatagggaagctattcccgaaggattcggtctccccataaatctgggcgcatcggttcggggggactgccccgaaaacaaaaaaatcgattttttcaagtgtccgtttggggtactcaaacaattatggggagcaaaaatccaacgcagaattaaagtacaggctatagggaagctattcccgaaggattcggtctccccataaatctgggcgcatcggttcggggggactgccccgaaaacaaaaataaatcgattttttcaagtgtccgtttggggtactcaaacaattatggggagcaaaaatccaacgcagaattaaagtacaggctatagtgaagctattccggaaggattcggtctccccataaatctgggcgcatcggttcagggggactgccccgaaaacccaaaaaaaaattttttggataaaaattatttaaatgaactgactagataatatttaaaataggttatttctcttcctttcagtatccctgcaaagtttggggcgcttctgataagtttctgaaaaaaaagataagcctaaactttttggcctgtttaaaaaggaattaaaaatttttaaaaatttattcatctccctttttgatagaaaagcatcagagtgcctaaactagcatgta

SEQ ID NO: 32482 - DNA, 1394 bp, Heterodera glycines
acgaggccgcgaagaggccgagtgagtaccttcggtgcaggaaaattattaaattttaaaaattttttaattgctttttaaatatgccaaaaaatgtaggcttaacttttttagtgaaaattcgatcactcatattttttgctaattgagcagaagcgtaccaaactttgcagggatactccccggtaaaggactaacttacactgaaatgagcgccgagctagctggctcaaaaaattttcgaaaatctgagtctttcgtttttatttattttttgcaaaattaattcttaaatattttttcagaaagggttctgaaacgcaccaaattttatttacatgttagtttaggcactctgatgctttttctatcaaaaagggagatgaataaaatttttaaaaatttttaattcctttttaaacaggccaaaaagtttaggcttaacttttttttcagaaactgatcagaagcgcaccaaactttgcagggatactgaaaggaagagaaataacctattttaaatattatctagtcagttcatttaaataatttttatccaaaaaatttttttttgggttttcggggcagtccccctgaaccgatgcgcccagatttatggggagaccgaatccttccggaatagcttccctatagcctgtactttaattctgcgttggatttttgctccccataaatgtttgagtaccccaaacggacacttgaaaaaatcgatttttttgttttcggggcagtccccccgaaccgatgcgcccagatttatggggagaccgaatccttcgggaatagcttccctatagtctgtactttaattctgcgttggatttttgctccccataaatgtttgagtaccccaaacggacacttgaaaaaatcgatttttttgttttcggggcagtccccccgaaccgatgcgcccagatttatggggagaccgaatccttcgggaatagcttccctatagcctgtactttaattctgcgttggatttttgctccccataattgtttgagtaccccaaacggacacttgaaaaaatcgatttttttgttttcggggcagtccccccgaaccgatgcgcccagatttatggggagaccgaatccttccggaatagcttccctatagcctgtactttaattctgcgttggatttttgctccccataattgtttgagtaccccaaacggacacttgaaaaaatcgatttttttgttttcggggcagtccccccgaaccgatgcgcccagatttatggggagaccgaatccttcgggaatagcttccctatagcctgtactttaattctgcgttggatttttgctccccataattgtttgagtaccccaaacggacacttgaaaaaatcgatttttt

SEQ ID NO: 32483 - DNA, 1168 bp, Heterodera glycines
aacccggaactgattggaaatttaaattgttcttaatggagttttattttttatttgtcccatgcattttttgggaaatcttttcgcgaaaagttgaaaaatttcaaaacggcagacaacagatgcatttcaaacaattcaacaatataatataaaatttaggcaaaaatttttgttccttcctctttggaaatggtcttaaattttgcttgtaaatattcagataacaagttttttttactgaaaattttttacacactacaggatgaaacgcaataaataatgtttgtagacaaaagaaattggcgaaaaaaattgcctcaacaatcagtggtgaaactgaaagaaaaaaacttccccaaaaaatcggagcttttccgacggcatcagctgcatttccaacagttcaaccgtataaataaatatttggcaaatgaaaaatttttttccttcctctttagaaagtgtctaaaaatttttgttgttaatattcagaaaacgtgttttttttagtgacaatttttttcaagagaaggatatgaacaatcacttataaggctcatgcttggagataaaggaatcggaaaaaaaaattatctcaacaatcagtcgtgaaacagttcaataattcggaagcagtgccatattgggaaaagatgcacaagtagagtaggctcgaaataaaggcaactgccgaagattaacaaaaattcaaatttattggccccgttctgctttgacaggccatatctcgccagggagtggcggtagaccctttgttgatacatttgaaaatgtagagcgcgtctagctcattcgaataacatcaaactggtttgtttttgtcacgaaacaacccgctgatggccacgtcgaagaaaagtcccaaaatttgacatccataaaactccattttttcataggccagcgtgtttaaagcaaacccgaaactgataggaaatttaaattgatcataatagaagtttaatttttatttgtcccatgcattttctgggaaatcttttcgcgaaaagttgaaaaatttcaaaacggcagacaacagatgcatttcaaacaattcaacaatataatataaaatttaggcaaaaatttttgttccttcctctttggaaatggtcttaaattttgcttgtaaatattcagataa

SEQ ID NO: 32484 - DNA, 1098 bp, Heterodera glycines
  unsure (1)..(1098): unsure at all n locations
cattnaagcttcagtcaaatcactanttttaattagggctctgctgacaaagtgtccattgatgatgaatgattgtcttttgtctgtaatttntcataagcaaaacatgttatataatntaaaacaaacttttgcatttttcatttgtcaaacgatgctttttacattatatacatataaacatatgaattgtatttatttcttatgtatattaatattacaaattgccaaaagaaacaaatgtacatatcgcaatgtttttctataccaatatattcctgctcagatcgtaacatttttcttgaaaaattgttggaactcaaagccaactcgctctttggcggctttaatccatttatgaagcgccactcgcaaatcctccttaaatgcgtttttttaaataattttttaattcaataatttaaatttaaaaaagtatgtgtatttacagcatttttattgtttccgtagtgttcgccttttaataatttgaccattttattgtaaagatgcataaaaaagaacagaatttctgcatgagcattatttttcttctcattgtcagtttcatttgattggtttctaaaaaaaggtttttataatttaattttaaaattttaattatgttttgtaattgttttgaaaaaaagggatttccaacaaaaaacttactcaaataaaagatgtccaaacatgtctttggcttgcttttggatttttttaaaaatatggcgtaataaattgtcatttttgatcttttcatccttaaacatttgctctttaatccgctcttccaccattttggcatccatttggcgtaatatttttgttaacaattcaaattgccattgaacgtctggcgagtctattggcgcgccttcaatgaccagtgccaatggtttttcaatgtaaacgggcagaatgccaagtgctgagaggctcagttcgaacagatgcagaacaacggacacgaaaaagggggaaataaataaagtttaaaaaaattatataattctattttggattttgaaaagattttaaattttaatcaaaatttacaagaaaatgacatattaaaagtgattaattcataaccaa

SEQ ID NO: 32485 - DNA, 1925 bp, Heterodera glycines
agaacgtgtgtagtaattaatgcgtcaataatgggatggaaggaaatgttagtttgtttggtggtgtgggaagggaagcggccgggccctttgatcactccgatcgcttttccaaatgtgtaaattagacctaacagtatgactaagcatcggaacaattcaacccggtttgcactaactgtggcttgattgccgaaactgcgggtggaggaaaagccgactgatttatcaaaggaggtcccagtgcccactaattactgtgtttgatcgcttgataatcatttttgcgccgagccttcctagcggagtaagtttttcttttccgttgtcttaactttggttctaatttacacattttgtcccaactttttggtccaatccctcctccaaatttgatggtcccatcgctctgtctgctttcagcttcatgccagaaacatgcagtcctcgctggttgggtccaaataagtgtccgtttggcatgccgccggaccgccccgcaagcggacgcacttgccggagtgcttctcgacctgaaccggatgagcaattacaaattgaggctattttctctcgggaatcccgggtcgggctttccttttggatgggaccccgattttccgatatgagcaaatttggcgcgattagggccatcatttttgccatttgtctgcaaatgcttttgtccctgctgcccaccttgtgcactttgatggtgcagctcagctcctcctcctgctgctccgtctcgtcctccgtcggctgtccgtctcccacctcttccgctctgtcctcctccgttccgtcgtcctccgccgccgccgcttcgttcttcggctctttgtacgtatgtacccatccgcccgcacttttcctcaccattttctgctgatgcttctgctggttctgttgtgcttctgccgccgctgccgaaattgcatttgccgaggcaattttctgctgactgtcaatgagcagcacgaaaaggacagagcaaagggcgaggaaagtgccgcggcacaatttgttgccgccgctgtgccgatgtgtgcgatggtggaagaagggcgaagttgctgcgatcatgacagtatgaataagaatgggtacggtaatgcccagggattggcgaatggttcaaaaaatcaaattttttaaaagagtttccaattgctgcaaatacaaacaattagcatatcaaatggatgaacattgtcatagtttctcttatcctttccatctacggaatttaattcttttaagtgagtgacccccaaaattaatcgctagcccattgccaaatattaattgatcagggataattaatgccataacaatgatcagagagagttggaacaatgtatcgtttcattcaaaaaggaccccaacttggcacgattaattaatggtccctaatccgttgcgttttgaattacccaaattttctctttctcgcgctcctttttgcttttttcggcctaacaaaagtgcagttgctgctgcttcctttaggtttggcttatatgccattgcttctttgctcgtgggtggcatcggtgggggtggtgccattggcactttcatctcggccctttggcggggggggggggggagcccataatcagaacacccgatataggaaagatattccccattgataccgtctccccataacttgagcatcatatacccggcgcgactgtccctaaaacaatcatagatctaacttttcgagcgatcgacagggctaatcatacgatcaagcttatcaaaaatccctcccacaactatatgactcaacaggatgacctatcaataacgtctaattcctaaacatggatataactgatgcctgagtaagctagtcatccgatctctattgctccctacataaaagacacaaccgatcctggtcattacagccg

SEQ ID NO: 32486 - DNA, 987 bp, Heterodera glycines
gagtccagcactagcagtagtcgcgcatcttcccccctccccctttattttcccccttttttgtaatgttccaaaaagtgcatataatccatccatttctgattcgaatttccatttaacttcgccagccttttgtttttgttttgatcagaaatggcattaaaaataacagttgaaagtcgcttcctccgatttcgcgccgttggggtgggcgaacgcgcggtaaaagacaaacggtcaaaaaacaaattgtaaacgcaagaaaggaaaacggcggtttatccgtcgccattcattcattaacccttctctcctccgcttcgttttgtgctgtttttttatttcttctttcgaccaaaaaaatggactgaaagatggaaaagaaaattaatttatcacaattttcgtcattctttcttcaaaacgaatgaaagaatgtgaaatttagtcgtttcacaaatcgtcaaagttaaattagtttataaaatgttttaattaatacaaatatatatttgtttttcccttaaatttgacactttttgaattaatctctctcaatttgctttgactgattataatcagattcaatttcaaattcatgtctggtgcttatcagaagtctattttaccattcattttcccgctttccatgttttttaaaattaattttcgcttccttttccgctttatctttcttcgcttcccttttcaagtttttgcccctccgttgtcctcgtcaacgacaagcactaacagcaccgccagcagcacaaccaccatacccaacaccaccaccggtagcagcagcaattgcggcgattactgctcgagacccggccgtgttgggtgccgtgccgcatcgagttccgcaccccggccgacttccccgccgtggaaggcgtcgcggccggccgtttccaccgccctggccgcactgtgccgcgttgtgtgtgccgaacggaagccggggaacggcttgacgacgaa

SEQ ID NO: 32487 - DNA, 1610 bp, Heterodera glycines
tttataataaaaaaacaacattttttgtttcagcatttttcttttttttggcctctttgagatacactttccgcttcataaagcaaattcatttttccattaagccaaaagggaggtggaggcggcttaatcactgaaccgagcttgaaattaaaaattcatattaattcttaaataatgtgttactaaatttgaaatcctttcattggcgttctaatagattattcaagttatttcaacagattttttaaatttgaaaatacataatttaaaaaaaaaatttatattttattttatgaaaaacaacaaaaaaaaataataatcttctcaaaattttaaattctctcatttccaattttgacttttatgtaagaattttcaaatattttttattggataagaagaaatatttttggcatttttttttgccatttttggcaaaaaatcatgtgggcaatgattaaaaattcattcacacaacaaaaaaattttctgctaaaatttgccgggccatttttgtccattgcatcagcaattctctcaccaatgtccaaagaacgaagaattttgttaaaaatatttcttcgggaattttatttaactgtttctttttttgtctaaacattaacaatttttatttcaaatttaatcttaaactaaatttcactaataaaaactctataatttttataagattttttagctttttgccatgacccacatttgcgaagcgccaaaaaatatttaatttcaataaatttttccatcttaaagtaatttattttaatttaattgttaatcgaattttacaaatttgtttaggtagaaataaaataatttaatttacatataatcattttaccacaaagaaaatcgtaaaaattttcttaatacgtcggttgattatcacaaattgagtcaataatgcgttggagcgacagcacaaattcgcaccaaggcaagagaagtcattcattgatttaaaaatttaattatattgaaggctttcgaataatgccaagttgtaaaactgtcagattgaaaaaaaagttatgccccgaaaaatttggcccagaaggagtttgcctgacagagcataatcacttctaacaaagagcattccttgatatttatgaaaaagcggatcagtcatataaatttcggttgatctcattccgttcaaacgtttccgtgccagggaggtttaagaagccataaattctttcacagttgaccaaatgaaacaatcttaatgttaccaaaagggtacaaattaccaaaatttgaaaaaaatctatttttttgaattgtttcttaataactttttccattttgcaaaaaatattatgattttatagaactaatagagctccagatttttgaattttaattaaaaataaagttttggcttcttaaacctccttggcacggaaacgtgcgcactgcgcatggaactgagtcgaactgcattaaattagaataatttcaaaaaatgctttttttgttagcggtcaaatcagtccgatcatcgagcagtaacggacactacctcgttaacaatgatgatgataagcagcactgttcaattgacgaagagctgcgcaatttgt

SEQ ID NO: 32488 - DNA, 954 bp, Heterodera glycines
ctagagctcggtattttgaaaaaagcctggacctggccctggacctggattccatgttggacctggatttcctggacaaaaatccaggaaaatccaggtccaggaaaaatccaggctcttcgagacctggatccaggcctggacctggattttttgaaactcatcttaaaaatcaaaaaaaggtttgaaaaaattaattaattgcttagaaacatctaaaaatatctacttaataataataataatgtatttttaaattaatttaatctttttttgaaaattaaaaaaaaacatcggtcacttgaaataataaattctaaaattttgtccaggaaaatccaggtttttcgtgttttgcctggacctggacctggatttttttttcacattggacctggacctggatttcctggacaaaaatccgggaaaatccaggtccaggaaaaatccaggttgccgaaaaatgacctggacctggatccaggaaaaatccaggcctggatccaggaaaaatccaggcctggatccaggtccaggccgagctctatgtttacattaaaatatgattgcaattagaatgtttttttaattctttcctatcatttttatttaaaacaacacgagactgggaccgagctggaaaatccataccagatcccaaaagtttattttatttaaatttttcttgataaataataaaattaaaattgtttgaaatcctagttttctggcccaggcaagtcgtggtcacgaatttgccaagtttcggtttccttactttaaggtattattaactaaaaataaggtatttttttcttaattgagcttggtttcttgtatttaatcaaaattcaactgatagagacttaaataattttttcatttttcataataaaaatctcttatgttttttaaaaatttttttgttttgttttttgatatatttagaaattt

SEQ ID NO: 32489 - DNA, 1780 bp, Heterodera glycines
  unsure (1)..(1780): unsure at all n locations
gtatgggatgtgtgccgagttctgatcactcagtgcggagattacatttcccagtgcggataaggagaggttgatcctgatcagtaagcgttgtccgatcgcttccctctccgtccctcgacttgcctcgtcgcctctcgaaagcgttgtccctctgaacctgtcttgctctgtcgttcactccccgccaggtcgaccaggttcaatcggcccacccttcattggtattcctatcacttctctgtccaccagtcgatcacctgatgtgtgtttgtccgtcctggtcagtctcagaacattccaccgtaatgacctcaaaatattgccatttcgtttaggtcttactgcattacggttaagccttacaaagatggcatgggagcgtgagctgtgctcgttcatatttgtgcggccgactgatcggttggaatggccaacactgatcacttcttccgtctcttccacgctgtgccgtgccgttttgcctttgctttcctttccgtttgccttaccttttggtgacaaatgagctcaaatccttcacgtacactccaatgtccggcctttccttcagctccaaccgtttgttggcacttcggttcagcaaatcccgaatttcttcctggtaaatctccagaaaagaggcgcgcaccaaaaactgctgatttggcggagaatgggcgatgtgttggaaaatgtgctaaataattgcgggaaggggcgcatcgaatggcatggaaagggcacaaaacccacttggatggcatttgggatgacaccccgctgagtgggctcccccctcgtcccctccattgtgtgcgttttgccggtgcccgtctgtccgtaagcgaacaccgtcccgttgaatcccttggcgttttgttttgtccctccattctttctttcttccctttcccatttcgcttcacctgtaataccgaatccacaattcctctcaccgtttcatcgtaaatttcgaattgtttcgcgctaaattaattgttatactcccaataaattgttcaaattgctgcacttttccccgaagacggagtcgaagaaaaagcttttggacgggcctttggggctttgcaactcgacaaagccccgggcgacgtccgcccggacaatgttcgaatggccctgggcaatctcagccgaagagagaggccgacacccaaaatgacacggcaaattaaaaaagtaaaatgcaaatggtccttctaattatagtctctcaccgccttacctcaccgcaactttgacacattcgcctgtgttgctgctactgcttgccatcgatgcgttcgatgaaagtgccgttggcgtttttgccgatgaaaaatttgggcgattgcgggaaacagaagccgccgcgtttcccaattgagtcatcgtcgaatttctgaatgttttggcataaagtttagcgaccgatatagacagctgcgttgatttttctttgcttttcttccctttattaattaaatcccttttttaattaatgtcgatcatttggtttaatccatcggttatctttttgtgtccctttgccgctgcttccattagtctaaagattcccttcccccctcccccccatttcttcacccaattggtcgtcgtccttagtaacggggaaaaactgaacaaaaagcgatagagagagagagagggggagagggagagagaggaagagagagaaagagggagggggagggaaagagagaacacttagggatatggaagataacaaattgngttcaatcgtacaatatgaaag

SEQ ID NO: 32490 - DNA, 1233 bp, Heterodera glycines
gtccgatcattacggattgatcagtcggtgatcgatcagcgccagttgggcctgatcacaggtcactgactgtcgtgaattaatcaccaatcacattcgccctgctagttgaatttaaataacgaaaattaaaaaccaaaggcgtcgagggcactgaaagaggccgccgatgttatccaagcgaaccccgtggcacttcagctgcgccacctgcaggcactgagcagcattgcgtaaagctcgaattgcaaaaacttttttaaaatatattttattaaagtgcggaacacaattcgaccatcgttttcccggtccctgtggaaatgttcggtgagttttttttgggggggggggcgtagggaccgtcgttttaatttgaaaaaaaatattggcaaataaacctatcccataagaaataagcacccaccgcgaatgaatcggcgaattctgatcagttttatgtatttttgttttctgatcaattcggtccatccaatcaggcgcatttatgaacaaaaaagaggagtaaaacgaacgaaagaacaaacggaaggccaaaaagaaacattggcacggacggagtgacaaaatcaaaagcagcaacggattgggagcatttcttcttcgttttggcatttcacattcacacattatgcgacagtgctgtgtttatataattaattttctcaatttcccctccacaaattttaacgccaataaaacaaaacattcccggcaaaagttgtcgtttatgtctccttttttggccaattcggatcaaaaatcagtgatcactaattctgatcattcaatttcaattggataaagaattggcgttaaaaatgagtcccaactttgtcccgtcgtccttttattcataggaatgtgaacatgaaaccacaataggactcatacaaatcgttttactcagctttgtattcaaaagttttattggcattttattccatttgataaataataaaattcaggaccaaaatttaaaaaatcctcagatattttgtcttttctcttagtttcccatgccattcgagctgaaattattggtttaaaacttttaagtaaagagtttctttttttctaagcaaacctttaaaaacgcaaaaattttcaacagtaaatgaaaataaattgagttggctaaatttagcgcttcataacttttttatttaaattttctcgaacaacataatgccatattactggggttattga

SEQ ID NO: 32491 - DNA, 1369 bp, Heterodera glycines
  unsure (1)..(1369): unsure at all n locations
tctcgaccagggctgcacgcaactggatttgcaattacggaaatccgtaattcgtaattgcggcgattttgttgaattttttttaaagtagtgaattaataaaaaccgaaaaacagattttgggatgccttttctttattttttatttcaattttataaagaaattataattttgtttctgaaaaaaattcattctttttgaatttttaggatttattttggaaaattttttgaaagtctgatcaaatcgggtaaatcggggtcagggctgcacgaaatttcgtgtcgttttcgtcttttttttcgttttcgtgtttcgtttttgtccgttaaaattttttgtttcgttttcgattttcaaaatttcatttttcgtttcgtgtttcgttttcgagttttaaaattttaaattttcgtttcttttcgttttcgtcagacggaattttgacgaaaaagacgaaaatatttacaccttaagaatgactttttttagtaaaaaaaaaaagtggtttcattgaactgtaactgttttagtttagtcgtgcaccttcagatttttgttgtttttttaatatgggttcgatcccatatgcccgcactatattttaccgtttttttcatttaatttactattttaattactaaatctgttgacaaattacactaaaattttcaaaatttaccccagcggcgcctatcggcaccgccggcccacccaagttccccaagttttctgaaaaaatgcgccgcaaaaaaattgtttaaaatctgatttatttaaccctattgctctgaaatgtattatttttaatttcttccccaaaattgtttaaaatggataatgggatgtgaaaatataatattatgtgcattttgatggatcaattataaaataactgagttgaagcaatttttaaaaattccttatttttgactcaaaattttattttttccttggtgttattaattcgaaaaattttcaatcacacacccctgtactagagccatatccgcttttccacctactattatctgcatacactcagtttgaggatataattttaaagatttataaataagttaaaaaaaatttcggttttttcgtttcgtttcgtacgaaaatttttttttagagtttttgtgcagccctgatcggggtccggcggtgccggtaggcgccgccgtgaaaattttttgaaattttaatgattttattaagaaaaatcgataaattttttatgattttcataaatgagtaaaaaaaatagtttcacaaaaaagggatacctctaatttgttgtggctttccgngtttatttctgtattttgtttgtttttatcaagaaatggaaaaacaaaatattagaaa

SEQ ID NO: 32492 - DNA, 1797 bp, Heterodera glycines
aaataaaaaatattaataattaaatggaaatgtaaaaattttttcatttgtgttacatatatttattgatagcaaaatttccgaaaacaaattagaatatgttgtgaaaatataaattagaaaaataaataattacaaataaatcattgtaagcaaaaaatcaaaacaaaaaattgtccccaaaaaatttcaaaaataaaaataatcaaaaataaaaatattgtataaaattcaaacatacgcgaactaaaaacaaattgataaataaaatgttatatatatagcaaaaataaataataaaatatataaatatgttttcatacaagaattttgcctatttgagaagaagaacaatttgaaaatgtgggctttgaacacgaactagaaaatgaagattgataaaatatttagaaaataaaaaatgaaacatttaataaccaaatactaattgtttacaagacgtgccattaacaaaataaaaaatgcaagaaacctactcgaaaaattatgaggaattaaattttcaataataatctaagcctaaaaataataggaatatttaaaattcataaaaaattgacactttggtagaaaacaaatataggcatttaaaaatgagaaaaaaacataattattttgattgaaaataatgataaaaaatcattaaaaaatttcaaagttgactatacagagttcttcagttaaaccgagagaatgcaaaaattgaaatttaaaaataaaatactttaaaattataatcaaaaaaattcgtataaaaaatttacactgaaaaaaatcgatacctatgaacaggggaattgacatgaagtaaaatgaaaaattaattgttaataattcaaagttcaagaaacaaaaaattttaaataaaatttgagaaaaactgatttgaaaacaaccaataaatttataaataaggcaaagtcaagaaacaactaaaagaatatcggcataccttgaaaaaatagaatttccacaaatcacaagacacaagattacgaaaaatattttacaaaaacattaataatcaagtattacgtgtttataagaccaaaatctgactctcatttatcactctctcactgcattctttgttagaaaatccacacaaaacgacgcgcatccatcgaaccattggcgtcatgccctcacagcacaacattggcattgccaccccctctcatccgctgagtcgcccccactcttattctccacttcatttcatagtgtaccttttgcatcaattttttctctaattaatagttttttctatttatgtaattgaatgagcaaattgtaatttctattaaggtttttactaggcccgtacagaaactaaatgaataaaaaccaatttaattaaattaattatgcagtaaaccttgacatattagaaatatatacacaaattaaaaaataatataacaaattttaaaagtaaatattcaaaaatttaatagaaaaattcaagaaattcaattcattaatttctgtaatgcattaaacaatagaacattgtctttaaacatgtcaaaatcatttcaaataaaaaaatgttcttaaaaaattatttaattttaatattattattaaaacaaaaaattatttataaaaaaataaaaggtttaattgcatatgagttacaaatcagtgtttttattttctgtccatgagatgcatattaaaaaatgcatttatcaatgcaaaatttttattatgtgtcgaataaaaaaattaggtggtttttattgaattgttttggttattttaaataataat

SEQ ID NO: 32493 - DNA, 1104 bp, Heterodera glycines
  unsure (1)..(1104): unsure at all n locations
tcggtacaaaattggccgaaaaagagatagccattttctgaggcccgaaggaaaatntgagagggctaaggaaaatttcagagtgctaatttatatgtaatattcgaaagtgccaagctaattagcgattcaggcgcacattggggcctgaattaagccattttccctttgatcggtacaaaattggccaaaaaagagatagccattttctgaggcccgaaggaaaatttgagagggctaatttatatgtaatattcgaaagtgccaagctaattagcgattcaggcgcacattggggcctgaattaagccattttccctttgatcggtacaaaattggccgaaaaagagatagccattttctgaggcccgaaggaaaatttgagagggctaatttatatgtaatattcgaaagtgccaagctaattagcgattcaggcgcacattggggcctgaattaagccattttccctttgatcggtacaaaattggccgaaaaagagatagccattttctgaggcccgaaggaaaatttgagagggctaatttatatgtaatattcgaaagtgccaagctaattagcgattcaggcgcacattggggcctgaattaagccattttccctttgatcggtacaaaattggccgaaaaagagatagccattttctgaggcccgaaggaaaatttgagagggctaatttatatgtaatattcgaaagtgccaagctaattagcgattcaggcgcacattggggcctgaattaagccattttccctttgatcggtacaaaattggccgaaaaagagatagccattttctgaggcccgaaggaaaatttgagagggctaatttatatgtaatattcgaaagtgccaagctaattagcgattcaggcgcacattggggcctgaattaagccattttccctttgatcggtacaaaattggccgaaaaagagatagccattttctgacgcccgaaggaaaatttgagagggctaatttatatgtaatattcgaaagtgcccagctatntagcgattcaggcgcacattggggcctgaattagccattttccctttgatcgntacaaaattggccgaaa

SEQ ID NO: 32494 - DNA, 1180 bp, Heterodera glycines
tttttatatttaatagattttcagaaaaaatggctatctctttttttgagaaattttctatgcaacaaacgctctcgaacatgaaacgaagtgcggtgcgccatggccattttatttttcaaataatttttatatttaatagatattccagaaaaatggctatctctttttttgagaaattttctatgcaacaaacgctctcgaacatgaaacgaagtgcggtgcgccatggccattttatttttcaaataatttttatatttaatagatattccagaaaaatggctatctctttttttgagaaattttctatgcaacaaacgctctcgaacatgaaacgaagtgcggtgcgccatggccattttatttttcaaataatttttatatttaatagatattccagaaaaatggctatctctttttttgagaaattttctatgcaacaaacgctctcgaacatgaaacgaagtgcggtgcgccatggccattttatttttcaaataatttttatatttaatagatattccagaaaaatggctatctctttttttgagaaattttctatgcaacaaacgctctcgaacatgaaacgaagtgcggtgcgccatggccattttatttttcaaataatttttatatttaatagatattccagaaaaatggctatctctttttttgagaaattttctatgcaacaaacgctctcgaacatgaaacgaagtgcggtgcgccatggccattttatttttcaaataatttttatatttaatagatattccagaaaaatggctatctctttttttgagaaattttctatgcaacaaacgctctcgaacatgaaacgaagtgcggtgcgccatggccattttatttttcaaataatttttatatttaatagatattccagaaaaatggctatctctttttttgagaaattttctatgcaacaaacgctctcgaacatgaaacgaagtgcggtgcgccatggccattttatttttcaaataatttttatatttaatagatattccagaaaaatggctatctctttttttgagaaattttctatgcaacaaacgctctcgaacatgaaacgaggtgcggtgcgccatggccattttatttttcaaataatttttatatttaatagatattccagaaaaatgggtatctctttttt

SEQ ID NO: 32495 - DNA, 858 bp, Heterodera glycines
cggtccaaaaaatggctatctctttttttggaatctggtaatagaaatctctttggaaacaatgacagtggctgtcatcagttgttatgctctaaaaatgattttcgggccgtttgagtatatgtgaggtatggacggtccaaaaaaatggctatctctttttttggcaatctggtaatagaaatctctttggaaacaatgacagtggctgtcatcagttgttatgctctaaaaatgattttcgggccgtttgagtatatgtgaggtatggacggtccaaaaaaatggctatctctttttttggcaatctggtaatagaaatctctttggaaacaatgacagtggctgtcatcagttgttatgctctaaaaatgattttcgggccgtttgagtatatgtgaggtatggacggtccaaaaaaatggctatctctttttttggcaatctggtaatagaaatctctttggaaacaatgacagtggctgtcatcagttgttatgctctaaaaatgattttcgggccgtttgagtatatgtgaggtatggaaggtccaaaaaaatggctatctctttttttggcaatctggtaatagaaatctctttggaaacaatgacagtggctgtcatcagttgttatgctctaaaaatgattttcgggccgtttgagtatatgtgaggtatggacggtccaaaaaatggctatctctttttttggcaatctggtaatagaaatctcttttggaacaatgacagtggctgtcatcagttgttatgctctaaaaatgattttcgggccgtttgagtatatgtgaggtatggacgggtccaaaaaaatggctatctctttttttggcaatct

SEQ ID NO: 32496 - DNA, 1300 bp, Heterodera glycines
tgcgatttttgttatgtaaaaaacatattaattttaaacttattattatttttaaataaatacaattttttctgagaatttttaaataaaatgaaactccacctattaatcgttttatttatatttttgatcactcaaattaatcaaatcggaacagaaaagaaaaagttggaactaaaatcatttgatgaaacatttggagaaaaatgggaagaaaagaagaagaaaaacgaaatgaagagaagaaaagggaaataattagcaatttctataaaataaaagagaaaataaaggaaaaaggaagaacttattcaaaaaaagaatggaataaaattaatgcaaaaatagcgaagaaattggggacaaatcgtcaatatattgctgaatggatcaaagaatttggtcttcaaaaacaaattcataaaaactataaatcaaaaactgatgaagaaaagttagaaattgtacagaattttattgaaatgataaatgaatataagcaaaaaagaaaatatacgagaaaagaatggcaccaaaattatgccgaaatttgtaagaaaattggagtaggccatggaacaattgaaaattggaagagaaaatttggcattcgcagtaaattaacaaagaatgaaaaaatggaaaaaatgaaaatttattcgcaaataaaaagaaaaaacccaaaaatgagtgaacgggcaattgcaaaaaagatgaaaattgatagaacgaacatttcaaaatggaagaaactgtttggataaaagaatcattgaagattgaaacgatgattataagaaaaattggataaatttgccgaaaaaattatcagaaaaactatgacaatttctagttttttttcaaattttttgtatttgtattaaaaaattattttaaataccctaaattttgaaatttttcttagtgaaaataagtgaaaacagtcaattcaaggattgggagggtatcataaaaaactgaacaatgttggaactgggctcccagtatgcgtaaattttcgattttagaggccctgtaaaactccttggggttttgctagggtgaaaaataaaaaaattaaaaaagcataaactaatattcaataacaaataagtttttaaaaaatgaaattgagaagcaaaggtttgggtcaaaataatctcaaaatgttgtataatttgcttaataaaatccaaaatgattagatttcactattaatgggccatttatttatttgtgaaatgatttaaaaaaaataaattggctttctaattaaaataaactataaaaaattagaaaa

SEQ ID NO: 32497 - DNA, 835 bp, Heterodera glycines
atatacaaaaaaaaatggaaaaaatcccgtcagaaaggaaaagtgccaatgaaaaggaagataaatgcgcagcatcaattggagaacggacttaaaagattggcaacctgtgaaatgagcaaaaaaggggtcggccacatggaaacggggtgcttcgcttctctgccgctctacatgaacctgtagtaaataccaggtttcttccatcttagtctgatatgtatctaaataaaatatttgaaaggagaatctttttctaagcgagtgctaaacaatttgacatctcagtagagatagtacgccaaagagagagagaaattacattcaactttttttcgagttcgattcgggattcgaaatttgttgaaatggatgtcatgttcttgataagcgaccccgaaaacccaagaactttgtctttagagaattaaattgctaatttttttaaaaaatcaaaaataaaacccgaaaatttccgacttcaatcctataattggaaaaaaacaattttttgcagtgtcttttattcggagggtcttctactcgagtgaggtcttttattgttcaaccccctcaaattttgtagattattatgacgaagtcgaagtccagtagcggaacgactcgtaccaagaagcgtaccgctgaccaagttgtaaagacggtgttccgtcgcaaaatctgtctgttctgctttatggcctcactgattgttttcgcgctggtccttggtttggccatcactttgacagttatcacagtgaacaattgggtaacgaatgaatgtctctttcctttccataacttttcacgctgttttcagaaggaaatcggc

SEQ ID NO: 32498 - DNA, 1134 bp, Heterodera glycines
ctagtttatataccatagagaaaagggggtttcgtctcaaaaacaaaatctcccggcggaggcccggagcgccctgaaagtagtgaaaggttcttacaactttttgaggcgcatctgggaaaaatatgggttttcgctccggtggacggttcagcgccggcggcgctgaaacggcgtgaaatttttttatgtcgcgatttttggccccgcaactttttccagggcatcgggagcggaaaatgtttggaggtaggaaatcaagttggagtgtttggcacagcatgccgttggtttgggggttctatctgtaaatgccaatgctgcagaaaatggcaaaatttggcacccaatttcggcattttccgtttttcgggaataactcggccgggattgtgctgagcgttttggcgtcagaaaacatgatgtacagctcggcgagctctttcagatggaattttaaaatttcgaaaattttcaaaatttttcgagctaggccccctcgaaaatttttcgtttttgaattttatctttttttgccgatttttcccagggaaacgaaggacaccttcaaaacatagtttttcgagctctatcgattggtggcatttttgaaaaaatttccatttttgtccggaaatagaaaaattttttggcctgaccgggacatttcagtcccgggcctataactcgtcaggggttgattttaacgaaaaatcgtccaagagcttttttgtagagaatttcgagctctatttaatgtgctttatctcatatttttatctttaatataaaaaaagatataaaataaaaatgaatttttaaatgcaaaaccaaaggggggaccccatggatttgcatttcatgagaaacttttttgctcctaaaattgccaaaaaatacttttctgggctaatttgaggtgctgaacacgaatatgcactttatattgcgttttggattttttggagggtggtaaaaaaattttgaaaattcaataatttttggcccttgaaaattcaacctaaattttaaaaattcataactcgcctcaaaatggtccaattcagctcatttaaagcataaaaaatagcaaaaaatcgggagaattttatgagatttatttgaaatttatac

SEQ ID NO: 32499 - DNA, 1456 bp, Heterodera glycines
gtttgtttgggacaaatttggaaaattggctatctatttttctgctcaacagtaataggaattcctaccgcattctcagaataattacgccgatactaattgttctggaatttgtttctcggcgcgtttgtttgggaaaaatttggaaaattggctatctctttttctgctcaacagtaatagggattacaaccgcattctcagaataattacgccgatactaattgttctggaatttgtttctcggcgcgttgtgtttgggaaaaatttggaaaattggctatctctttttctgctcaacagtaataggaattccaacagcattctcagaataattacgccgatactaattgttctgggatttgtttctcggcgcgtttgtttgggaaaaatttggaaaattggctatctctttttctgctcaacagtaataggaattccaaccgcattctcagaatacctacgccgttatggatttaatatatcggggcgtttgtaagggaaatatttgtcaacaagaatatatacgtcatctcatggacttaaaatcgcaaaaattaggcagtttttggtgaaaatctgttaacaaatggcattcaaattttcaaaatttttccccggcagcgcctgtcggcaccgccagaccccccccccccccccccctctgtcccacaaaatttttggaaaaagcgcgccacaaaaaaagcgtttttaaagcagaaaaaagtcgtcgtaaatgaggaaaatgatcagcggaaataaaaaaatattggaaaaaatccattccggtgaaaaatacaagccatttgaataaatattaaccatttttcattgcatataataaaaattttaaatgtccttgaatttcatgaattttccccactatgtccttgcaaatcggcatacccgtccttggaagccgaccttggacgattgcagccctgccctaaagggtcgactactttagatgcttgaaaataactgcaaacttaaaatcttttgcaatattttttattcatatttttttttttgatttaaaaggcgggaataattttcccgtttcccttctcgctttttctgtattccgcttcaaaattaactgatattgatcagttcaaactaggaatgcactttgaaatctatacagattcatagtgattcatataaaccactgaaaatatttttcataatattgggttgacttgtggatgttgtcgtgtggaagagcttcctggggaagattaccttgactccgcattacatacacattctgatatctcttaagaaattctttcttcgtgaaaaacttcggaaatgtcgacgcaacaacaacaacgtaagacgcgttccccaattgtattggagcgtggagtctctggtcgtgtcaaatggttcgacttctggaaagggatcactccttccattgcaaactttcaattttgtcattacgtcgtaa

SEQ ID NO: 32500 - DNA, 557 bp, Heterodera glycines
ggatagaatattcctcacattttctttaccattattttaattaaaattttaattttaaaaaatattccaacttttttctttcatgttaagcatcctaaaacccaaaacttaatcaattggtcatttttttacaaattctgttaacaaatcgcattaaaaattacaaaatttttcccggcggcgcctatcggcaccgccggccctccttgtcccccaaaagttttggaaaaaacgtgccgcgtaaaaagcgttgttgaataaaaaaaaaggtaattgattgacattaattttcctgttcttagacccttatttttagagttaatcggattgttgatcacgagttttctgaaattccttttataggtattatatgtagaataaatcgataataggtataaaataggtattataaaagttatcttatacacctaaaacctataggaaaatgcttttttcgtgcttatctgcgcgtattaaatgcgcaaaattttaggtatttaactaaaaatcgcatccctataaatttctttttgttcatgatgaattgtgtgatatag

SEQ ID NO: 32501 - DNA, 1236 bp, Heterodera glycines
tttgttgttggtgctggtgttgtgccagcaattctcttctaataatgctaatggtgatgaccttctgccggggaatgtttcaattgcttttttttcgggaatggtttagagactcacaaaatcactcctcaaatggcatttcccttcgctttcgctttgtcactttatgcttcataccatcattcattccactctctctctattaaattagcattaatagccagatttgaatttaaaaatgagtgccatcggcgacggcactcacagcgatggcactcagatggaaaaaagtaaaaagtgtaaaaaggatcatgacgatgactcagtcattaaaggtaattgcgacgacgaataatattgggtggaagattttttgaatttcagctgaaaattgtggctgggaagagatgcgatgtgaccatgaaattgaagctgatttgacattgaataacaggccaattgaggacgaaaatggacgaacggaaagccaaggacaaagggacaaaggggaaaacagagacagttcgtcacccgctgctgatcagttgcgccacactcacagcttcgagtgccaacagtgcaacagccaattggacagttttgagcagtttatcagtgagtgtttacagcgaatgatcaatgcatggaaatgataaaatgagaaaagcgaattgatcaatgggacggactaagtgatcagagtcggacttaagaagcattcattgtaatacatggtgacaattaatgatgctattgatcagaacacatgcgaactgcgcatctgcagcactgtgacggctcttccgtcaaatgccaatgccaaatttgcgggaggcaattggccactaacagaaaggtcagtcagtcaattattcatctcatgctgttttttggcttgggttatgattcctcactcatttcaaaggagttcaatgcgcatttggcagagcatttgttggacacgcgtaccaagtggcactgtttgaggtgccacggcacacaattcgacgaggcggacgaactccgacggcactttagccaaagccatgttcaaaccgttttccgatgcacaatttgtcttgaactttttacggaacgagacgatttacaggtgaaaaggatgaaagggagtggctaattgaaatgtctaaccaattattacgaggttatgaatgaatagtcactgcttcatcgctctctttctctgtgccgtcatttttggcatttttcctttct

SEQ ID NO: 32502 - DNA, 969 bp, Heterodera glycines
gttttaaaaagttattggccaaaaatttttgaaaacccggtgccttgggtacttttggccataactttgctcaaacttgaccaaatttttgaaatttaggtgagctaatagttagggctatggaatgatatgaataatatttaatttggtttacttttacaaaagttatggacagttttttgttggaaatttccatttgatggttttttatataacgactcagcaccttctcatcatggggaaagtttcttaaaaatgaaagagtaaaaagacattcacaaaagcaaaaagtaaacaatttgtgattggattgacaattaattaattaatattttaattatatatatattagcattttcccacctttcttatgtaaatttcgatgattgaaccgagtaaaaagtaaagggacacagagatcagaaaaatgccgaccttaagggaatgaatgggaaggtgttaaaaagtgccattggataccaaaattaaaatggagccaatcgccgcttggcgccatcgctgctgaattgtcgtaagaaaaaactttttagaaaatttactctcgcccattctaaaaaaataaaatcattgaaaataaatgtagctgtttttgacgacaatcgatgaacaaacttttgcacactttcacaacagaaaatgggaaatgggtcattcgtttcgatggcattcgtcggggggggggggggggggcaacgaaaacggaggacaatcaatcggacgcacagcggcggcaaatccccgcaaatgttgcacaaagagagtggggagcgaaatttgagggaacgaatggaggggggcggggcgggggtaattacagggcaaatgggcaaattaggcatttgaatggtggacacttttaaaacgcattattattaatacgcatttttgaaaggatttacactttcacaacgcacatttgttaccctttaagaaataaataagtactta

SEQ ID NO: 32503 - DNA, 1050 bp, Heterodera glycines
cagacgcgacgagaagcacattccagatcgacgtaattattctgagaatgcggtaggaattcctagtactgtgtagcagaaaaagagatagacaatgatccaaatttttcccaaacaaacgcgccgagaaacaaattccagaacaattagtatcggcgtaattattctgagaatgcggttggaattcctattactgttgagcagaaaaagagatagccaattttccaaatttttcccaaacaaacgcgccgagaaacaaattccagaacaattagtatcggcgtaattattctgagaatgcggttggaattcctattactgttgagcagaaaaagagatagccaattttccaaatttttcccaaacaaacgcgccgagaaacaaattccagaacaattagtatcggcgtaattattctgagaatgcggttggaattcctattactgttgagcagaaaaagagatagccaattttccaaatttttcccaaacaaacgcgccgagaaacaaattccagaacaattagtatcggcgtaattattctgagaatgcggttggaattcctattactgttgagcagaaaaagagatagccaattttccaaatttttcccaaacaaacgcgccgagaaacaaattccagaacaattagtatcggcgtaattattctgagaatgcggttgtaattcctattactgttgagcagaaaaagagatagccaattttccaaatttttcccaaacaaacgcgccgagaaacaaattccagaacaattagtatcggcgtaattattctgagaatgcggttggaattcctattactgttgagcagaaaaagagatagccaattttccaaatttttcccaaacaaacgcgccgagaaacaaattccagaacaattagtatcggcgtaattattctgcgaatgcggttggaattcctattactgttgagcagaaaaagagatagccaattttccaaatttttcccaaacagacgcgccgagaaacaaattccagaacggcgtaattattctgagaatgcggttggaat

SEQ ID NO: 32504 - DNA, 1128 bp, Heterodera glycines
aaacaaaaaaatcgattttttcaagtgtccgtttggggtactcaaacatttatggggagcaaaaatccaacgcagaattaaagtacaggctatacggaagctattcccgaaggattcggtctccccataaatctgggcgcatcggttcggggggactgccccgaaaacaaaaaaatcgattttttcaagtgtccgtttggggtactcaaacaattatggggagcaaaaatccaacgcagaattaaagtacaggctatagggaagctattccggaaggattcggtctccccataaatctgggcgcatcggttcggggggactgccccgaaaacaaaaaaatcgattttttcaagtgtccgtttggggtactcaaacaattatggggagcaaaaatccaacgcagaattaaagtacaggctatagggaagctattcccgaaggattcggtctccccataaatctgggcgcatcggttcagggggactgccccgaaaacccaaaaaaaaattttttggataaaaattatttaaatgaactgactagataatatttaaaataggttatttctcttcctttcagtatccctgcaaagtttggtgcgcttctgatcagtttctgaaaaaaaagttaagcctaaactttttggcctgtttaaaaaggaattaaaaatttttaaaaattttattcatctccctttttgatagaaaaagcatcagagtgcctaaactaacatgtaaataaaatttggtgcgtttcagaaccctttctgaaaaaatatttaagaattaattttgcaaaaaataaataaaaacgaaagactcagattttcgaaaatttttttgagccagctagctcggcgctcatttcagtgtaagttagtcctttaccggggagtatccctgcaaagtttggtacgcttctgctcaattagcaaaaaatatgagtgatcgaattttcactaaaaaagttaagcctacattttttggcatatttaaaaagcaattaaaaaatttttaaaatgagaattcatgcgagattttctggaaataaggttaatagggcctagttaagctgtaaaaaaaaatttgggaaaagaagaaagagaatagaaagaaccaggttcgatga

SEQ ID NO: 32505 - DNA, 1360 bp, Heterodera glycines
ctctttaaaacctatacataagccttttcctatacgtaatttttcgaaaatttgaattttcaaatgactaaaaaagctagagaatcagaaaataggttaagaaaattaattttaattgtcaatttttaagacaagtatcctccgttcttagtggtttaagtcactcttttttaaggtgccattttttttattccgataaaaaaccaaaaaaaaaacaatttcggcacaaaatgcacaaataggcaaaattgggacgaaaaattcatcctaattgttcaaaaccaaactaaaaatgttttttcaagcttatgacgataaaaaacataaagcgaatgacatttaaaaatgatgggcctaaattggaaaatctaatgaattaaaaaaagttaaattcaaatgtttagcctgactttatagctgttctttcgaatttaaaaagattcttttggcccttagggtaaaagaaaattcttttaaaatttgttcacttttcatttcacattttttgttcagcaaattctatttttctttctcaaagcgatttaaatttttattaaattttcgacttccataggcaacaaataaatattattaaaaataagaagagatttttaacaagccacaaagttataggaagaagtaatttcaagcaaataaataatttaacaaaaacaaacaaaaaataattcattttcttacaaaacaaaaaataaaaatggaaaaagaagaaaaaagaaaaaagcttacaacaccttcgattcccaggacgtctccgttccaagtactaagaaggcccaacgttgcttaacttgccagatcggacgggatggcgtgctttcaacgtggtatggtcgtaagcgaaagtgctccatttgaaagcaattaaatagtcaatttttaatgcattttttctctttggttaacttatcattaatcaaaacaaggatcgataaaaaatttagaattcacttaaataaggtaaaaaaaaagaaaaattcgatagtttttttcgaaatgaaagagcaaaaattcggagttttgaattctttttttaactaatttcccaactgcaaatcggctaaaattaaaaatgatttatataaattttgaaatcatcgcaaattctctttaaaagcacatataaagcctttccctaggaacaatttaattgttttgattagaaaaacctcgaaaagcaaaatttcttaagaaaaattgggtttggtggtgattttaagaaagtcatccacccatcatttttagtgcttaaagtcatcttttgaggctccaatattaaatgttattgtattccgttaagaaaaatagaaatccatttcggcacaaatccaaaaaaggcaaa

SEQ ID NO: 32506 - DNA, 1936 bp, Heterodera glycines
  unsure (1)..(1936): unsure at all n locations
cgccaataanntcagacttcttgggctaaaatgcaatctaaaaggggtaaaaattgaagctccagagggggcacaaaatgtcgagttatgttgtgacggaatttgcggaagtagaaattatataaagccatttattttcccgcttatcgaggagagtctcctttccggttttacatgcatggctactttttgggtaccgcctagcacaaaccttcagcaaacggcaaaatgtgcaccaatcgatgtgtgcactttgcttgattgctatttatgtgagggtcgaattttgaacccccactgttcaccgatgatctcggctttcctaatcgggatgttaatgcaaaagatgaaatatgccagactcagaagagtagctagcgatggaagcagcgatgtggaagattataagcctcaaaaggcttataggggacgaagttttaaacccctcaccaaattgggcgatgcctcagcaatttttatattttctggtgttcctttctcttttggagaacctgcgtccatcaccgcaaatacagaagagtgcgaaacggactctgttggaacgaaatgtcgaataaattccgtaactctttagaatttgctcccggcaggacagccggtggatctcattgtccggaccaccaaatcggcaatattagggactctgacgtttaaattaaagggactagcacaggagtgtgtcccggaatccttaggattcattagatcataccagattaggactttagcaagcaaacgatgtcctggaatgggttcatgtattgataaaacatgcgaaaatctgttgactaatggaacagtgcccgagttagcggaagggaatgtatttccagggaattctttttgcctcgatagtagtagcttttggttccacggatgcggtgggaccaattatgcatgccttttttaccgcaactatgcagtaccgtcttcaaatgaagaacgaacggtctatgagatgtttaggtgtccagcatggcaatttcgggtcaaaaccgaaatcaaggtcaattttgccggaggcctagtaataaaggaagaaaccgatttttattccggccgtacttttcacctgaaaggggcaaatctatcagttaccccggcggtgttcggaaatccagcggccccaatcatgtcggagattttcttcggcggctgggacaaagctgctttggttcgaaatgttgaaccagccttgcactgtagagacgaactgtcggcctcgctgatgaagtgcaaactctcgttagacgcatgcacgaagtgcagacctgatcataatgaaggcatcgtccgatgccattgtagggagattgacgtcgaaaggtggttaggagagccgtccaaacggctgccactttcagtcggtcctctaaccctaaattaccgacagccaagacaagtttgggcagaatcggagtacgtcccggtacaggtggtcataaaaatggaagacctaacacttagtgttaggcaggatagggccacatgtcacattactcccggcggcctaaccggttgttacagatgccgaaccggcagtcgttttaaatttaaatgtgaagcatccctagggaatccgctggcagaaattctgtgtgataacggggcccggtgggttacacattgccccgagggagcaacggataaagacatatcattatctttaaatgaaggcgacgtggacactatctgtgtggtaagatgccctggcggcgtatccaactttacaatgaaaggaactttgcattatttaccttccgcaaagatggaatggcgaatttcgggaaaaaagaccgaatttggctctgaatggcctgatttttcccttatgagtaatattttcagaatttttaattgggtccttgtcgggccacaattttttgttgctgtggggattttcttcgcgggaatc

SEQ ID NO: 32507 - DNA, 1164 bp, Heterodera glycines
cccgagtgagtccgcgaagcggcctaataagctaaaaaacgggcgcgaagcgcccgtcttgagcctcgatgtggactaaaaacccctaataattttttaaaaattaaaaaaatctctccaaccaattcgatcaatttgaatcgcttcacagtctaggtagcgaagctccgaaagcgcgaagcgctttttcccagctaaatagccgacggttcacgcacccgctagttaaaagtagttatactttttctgtctgcagctgtttgactttgaatactgcggagtaaaaataggaattttttcttttcactaattgaggacaatttttgtcctttcttgattagctaataattttgaaaattactcaccaattaaaatatacttgcatttttcaaaagaggtattcataattttaaaataagcacatatttatagtgagactgttttcaactcgcttctattattaaagggttaaagtatgcgcataaaggccttaattaaacacaagaacatattcacatattttgtgtaattctatctcggactccctcctgctcaaaataatgagtttaatgcaaaatagatttgactagcggatactacgaagatagtttaaaattttcatctcttaattattttcatttaaaagtagttatactttttctgtctgcagctgtttgactttgaatactgcggagtaaaaaaaggaatttttcttttcactaattcaagacaatttttgtcctttcttgattagctaataattttgaaaattactcaccaattaaaatatacttgcatttttcaaaagaggtattcataattttaaaataagcacatatttatagtgagactgttttcaactcgcttctattattaaagggttaaaggatgcgcataaaggccttaattaaacacaagaacatattcacatattttgtgtaattctatctcggactccctcctgctcaaaataatgagtttaatgcaaaatagatttgactagcggatactacgaagttattttaaaattttcatctcttaaaattattttcatttaaaagtagttatattttttctgtctgcagctgtttgactttgaatactgcggagtaaaaaaaggaattttttcttttcactaatagaggacaatttttggcctttctt

SEQ ID NO: 32508 - DNA, 1172 bp, Heterodera glycines
  unsure (1)..(1172): unsure at all n locations
ccgaaaaaaagtggtggagaaaatcaaatctgaatttctattaatattncgatcatcttggtccaaaaatgattaatcgtttgaaataatcgaagaaaatttgtttgaaaatttcattaatttaatttattaaataaaaaaccaaataattttgtattattttcactcgatataaattaaaatttgaattttttttttaatttttaaaatttttttgaatttttaaaatttcccggttggtcccggttcccgggttttcttgcggtcccggtcccggtcccgaaaaaaaatcgaggtcccggtcccggtcccggcttctcaggtcccggcaagtcccggtcccggttttggcaaaaaattcccggtcccgtggcactctattttaaatctcgctactctgtttatttttttaaattttttgagattatttattcttgtttagaacattaaaataaatgttaagttaaaaatcattgaaaaatttttctgcgattttctttaatgaaattttcttataaaaatttataaagttgtttttcaaaaatttctattttataaaaaccggaccggccaggaggaggaagcgaagtaaaaaacaaaaacaaaattttgaatttttgttgttttcaagtgctaagttttttgtgaactacttaagtggtggcacctaaatttggctgaaacgaaaattaatttttacactaaataagaattgtgctcacctccaagtcgaaaagacgggcctgagcataagccaagaaaacattgcgcaattcggagatgggaatttgtaaacatggggcaaccagggcggggatattgtactttttggctaattaaaattaaaaactttattaaatttaaatttatcggaattaattcaccagcgtaaagcactgccattgcattgtctccgttcaattcactcaaatcacccgcgtaaatgaagctcaacataactttgaatgctgctggttcaacgtcgggcaccaccaccacagggcaattatcggaaactaattgaaaataattaggataattaccataaatattgaaaataattaattttaattgtttgcttgtatttttattactatttcccgcattttcattttgtgcgtcaaaacggaacattgcctcaaatacgtcggaagccaacttcaaaatgaatt

SEQ ID NO: 32509 - DNA, 1347 bp, Heterodera glycines
  unsure (1)..(1347): unsure at all n locations
tttaaaataacattccgattttcatcctcattgatttcgtttaaatcatcattttcgtttgactcttccaccgccggtggttcaggcaaacacatttcaatggcaatattatgtagaacagcggctgctagaatggaagttgcgatccgtttaagttgcaagcggcatgatgttctgaaatagcgttttttattttaaaaaatctttaataactttgcaatcgaaaatcgccgtttaaaaattccaaatgcgtgctcaataacagaacggcctttgcataaagcagtgttgaaacgcttctcggcaacactttttggatcacgaaatgggaccactagccatttttttaatggatagccactatctcccagcaaaattgaattgcctgccaagccggactcaaaataatcccatacatctgattgctttaaattaattatttttttaaagcttattcttttgaacctcaaaacaaaggaatcatgtgtgcttcctggccaccgcaaatcaatattcataaatttgcacctcatgtcgcaaacggcttgcatatttaatgaataaaatgcttttcgatttatataactttcttcgcggatccgggacccttaagaactataattaactcaatatttctttcttataacctcaattttatatgagaacagtcaattgatcccatcacgaatggcaaatcgcaataattcagaaaatcgcatttgattgcgatttcatgttgttgtgaatttggaaatttaataaaatcggcactcttatccgccaatgcctttgagacgcgatgaacaacaagtagcaataaaatcaatcccttcaccaggaaaattttaactggtgtttaatataaaaacatatcaattttcaaagaagttaaaaaaataaaagcaaaataataaataattttaaaattaaaaaaaacataagcaatttaaaaagaaaaaaagtcgctttaggaaatgttgtgtttattgcgcaaatcatcaaggggtatccaaattcaagttataaattaaaatcacaaaaagcatttataaatgcaaaaataaacacattaatttaaaatctaattcgtcattaatatttataataaaatcaaattcaggataaatttaaaaaatacaataaaaaaaaatcatataaataaaatacttacatttcattgatatctgaaatttttttaaaagaataattataaaattaagttatacaaagaaaatttaatatttaatttaattatatttcttcaaatgtngtatatttctcaattaatcccataantatttgtaccccttatatangtaaaagaataattaaatgnaatgatacttt

SEQ ID NO: 32510 - DNA, 1262 bp, Heterodera glycines
  unsure (1)..(1262): unsure at all n locations
ctttcgctctctcgctctctctctctctcgctctcagtctcttctctctctgctttttgttcatttccctattcttcacaaaactnggtcncacattatttctctctcttctcgctttcctctttctctctgtctcattagtactctcttcccctctttctctctctcgctctctctctctctctctctttccctctctctctctctctctctctttccctctctctcactctcctccttcattttctctcttctctcattctgttgttcgtctgatcgcgctatttgacgctttttagcagcgtgagcatttggcctcaaaaaatgaaaaataagtgaaattcatcagagaggcaggcagcaaatccattcggcttttcattatccacgagccataggatggatttatttttcttgcacttcttcggctaaatcatatgcttggtttcggaaaattaagttcaaaatcaaaaaacaaaaatcatttttaaatttagaggtaatttttaaaagttaatttaaaaaatgagacttttttcctttttaaataaattaaagtttgtgtttctaatttaattaaaaaatatttttccctttttaaaaaccgaaagtttggatttttgaacaaaattggaattcatagccaaatttttttcaattttgaatttttaactaaatttttaaaaaattattcgacttaaatttctctgccgattttctccacaaaaaattcgtttttttaattataagaaaaagcattatttatgttcaagcattatttatgttcacattttccatcagcgaatagaaaattttttgcttccctcagccttactttaaagctcgttttttataatttttcattgttcgtttgttttgagaaatttctttaaaattcttccccgccatttccaatccccgaaatgcttagggaaccccaattttccggccacaaattaatttggatcctacattttaccgggcggagacatccccgggagcctttttacctttaccctactaatcccccctaattctcccatgtttttacgccacgtcccttcttcttgtccccctgctcccattctcgttattaagctgagtgagtgttgtgtgtgatcacctattagccaaaggtgctgccggccgggagtgatcgattattgtccaatgaatgaacaaatgaatggatgaaaatgcttcttcaaaagccaagaagaagagggagaagaagcatgtgagaggaggagtgaaacgagaag

SEQ ID NO: 32511 - DNA, 649 bp, Heterodera glycines
ggccccaactaaattttaaaaacgggcgcgaagcgcccgtctggcccaaacaaatttaaaaaacgggcgcgaagcgcccgtctggcccaaacaaatttaaaaaacggtcgcgaagcgcccgttatgagtccgcgaagcggccgaatgttcttaataaaattaaaaacgggcgcgaagcgaccgtcttgaggccgcgaagcggccgaatgttcttaacaaaattaaaaactggcgagaagcgcccgttatgagtccgcgaagcggccgaatgatcccataaaattatgaaatgggcgcgaagcgctcgtcctgaggccgcgaagcggccgaatgtccccaaaaaaattaaaaaacgggcgcgaagcgcccgtcctgaggcttaacagccggccgcgaagcggccgaatgatcccataaaattatgaaatgggcgcgaagcgctcgtcctgaggccgcgaagcggccgaatgttcttaaaaaacgggcgcgaagcgaccgtcatgaggccgcgaagcggccgaatgtccccaaaaaatttaaaaacgggcgcgaagcgcccgtctgaggccgcgaagcggccgaatgcacttgctccccacttatcaaacgcgcatgcactagcaacgaagtcctttgcgcgaagcgctca

SEQ ID NO: 32512 - DNA, 995 bp, Heterodera glycines
  unsure (1)..(995): unsure at all n locations
ggggcagcccccccgaaccgatgcgcccagattttggggagaccgaaccttccgggatagcttcactatagcccgtccttaattaggcgttggattttgctccccatatttgttgagtaccccaaacgggcactcgaaaaaatcgattttatttttgttttcggggcagtccccccgacccgatgcgcncagatttatggggagaccgaatccttcgggaatagcttccctatagcctgtactttaattctgcgttggatttttgctccccataattgtttgagtaccccaaacggacacttgaaaaaatcgatttttttgttttcggggcagtccccccgaaccgatgcgcccagatttatggggagaccgaatccttccggaatagcttccctatagcctgtactttaattctgcgttggatttttgctccccataattgtttgagtaccccaaacggacacttgaaaaaatcgatttttttgttttcggggcagtccccccgaaccgatgcgcccagatttatggggagaccgaatccttccggaatagcttccctatagcctgtactttaattctgcgttggatttttgctccccataattgtttgagtaccccaaacggacacttgaaaaaatcgatttttttgttttcggggcagtccccccgaaccgatgcgcccagatttatggggagaccgaatccttcgggaatagcttccctatagcctgtactttaattctgcgttggatttttgctccccataattgtttgagtaccccaaacggacacttgaaaaaatcgatttttttgttttcggggcagtccccccgaaccgatgcgcccagatttatggggagaccgaatccttccggaatagcttccctatagcctgtactttaattctgcgttggatttttgctcccccataattgtttgagtaccccaaacggacacttgaaaaaatcgatttttttgttttcggggcagtcccc

SEQ ID NO: 32513 - DNA, 1027 bp, Heterodera glycines
ccatggccacgattatgtgaaattgttgagttggcaattaaaacgggaccctaaaaattcgaaaattataaaaaaaaaattagattatttatgctttttttgaaaaatagaatttttaattcaaaattttcttaaaatgaaaattttcattataattttttttccatttgtgctcaatttttgagggcaaaataaattttttattttggaaaaataacaattttacagcaaaaaaatatatatataaaaattcaaaatttttccagtggcacttatcacatgcaccgccgatgccctgaaggaacatttaaaatttttaaaattttatgcgaaaatcaaattcaaaaggtaaattttgtcgaaaattttattaccaaaatctgccaaaaaaatttttttaacctaccatcggcagcgactgttttttaaagtaaaatagttttttttgacaaaaattttcgattttccttattcgtatctcgcaaagaactcagtcattcaaaattttcaaaaattttagttaaattaaaaaaatccacaaaattagcatttttaaatataaaagtttgtttttttcattaaaaatcttaattttaaggattttaaaggtcgaggatctgaacatcggtcccattgtactgaacatggaaaaaatgtaaacagtgatttttaaaaaatagattataattttgtttatttttaaaaagtaaataaaatttttttaatatatttatacatgaataattttttattatttatgatttttattattttttttcctcacttccggctcccaaaagtaaatgccatcgtatgcactgcgctccactcggataccgttcatcaacggcggcacgccctccacatacagtgctggggtgacattttttgtggtactgtcatatccggcgtacaaaatgtccacaaattcgagccgactcagcgactgccgttgcaccgccacatcgtccgggtccaacggcacataagcgaacggcgaatggtacagttgaacgccttgagaacc

SEQ ID NO: 32514 - DNA, 1295 bp, Heterodera glycines
  unsure (1)..(1295): unsure at all n locations
gctgcgccagggcgcatgtttcaacggcacgtcccgcnntgcatgtggccgcactgttcgcatcggcggcaaaagcggcagtgatcggcaccggcacggacacggcattggcacggtcagtccattgattacgtcaccaaatcattcataaattgtgaagaattgtaatttaaaaaatttatatgatttaaattttacgatttttcagaattttcaaaaatttaaacaattttttttttaatttttacaatttttctgcatttttcaagaagttaactggcaatggtgaaaaatttttggtgttgtaaatttttgcaatttttctaaattttctaatatttaaattttaaaagttagaaatttagacgattttttaaggttttgaattgattgaaattcttattaattttctaaaacttctttgtgtaacttaattaattgggatgaaaggaaggaattacaaattaccctcaattagtgacatgagtgaaatggatggttaattacccttaattagggatgaaaatgtgtcacggctgttcatgaactcggacgaggtgttcaaaatgtgggaggagaacatccggcttgctgaagacgaaccataccaccagcagcagaatgggcgcggcacgcgcaaaaacgcgtcaatgcacgagcggcggggcgtgggcggtgccgcgcggcacggcggcagcatcggcattgtcagtggaggagacattggcggcacattacaaagggtgcgctaataagagagggtactgtagaaaagacgtgaacccggtcgagagggtaggatacggtaaaggaaaaataggaaacggtgaaaacggtagaaagtactgtataaagaataggaaccagtaggaaggtgtactgtaaaaaaaaattaggaaatggtattatagaaaagtggagggttgtacttaggaattgcatgagtctaatgttgcaattgattgatgcagaaattagagaggatactgtaaaaagaataggaaccggtaggaaagtgtactgtacaacaatttaggaaaggtgggtgtgaatactgtacaacattccgtcaaatctccctttttttgagaaactttacctatcaaatggggttggaaattgccataaacaaataccgtaataaagtaccggctttaagtacagtatgcgtatttctttatttcatgtacggtgacagtaccttctctcattcccaattaattgatttctctcccgttttctcatttttctttgataaaatgacacccccacaaaaaatgacgagtgggggtcaa

SEQ ID NO: 32515 - DNA, 965 bp, Heterodera glycines
  unsure (1)..(965): unsure at all n locations
tgtagactgcntagaaattcagtaccacnnttgtccacttcagtacccggcgaatacntcagtagcgttgaactgagcagggggtggccagcgaactttatgtagagtttgtaagcccgatttttccaaatttaaaaattttgaaaattttcaaaatttctcgagctaggccccctagaaggttttggggtttttgaattttatcattttttgccgatttttccggggaaaaccgagaccactttcaagcaaccgtttttcgagctctatcgattggtgggatttttgaaaaaatttcggtttttttccggaaatagaaaatttttttggcctaagcgggacatttgagtcccgggcccataactcgtcaggggtcggttttagcaaaaaattgccttagagcaaaattgtagagctttttaagctctattgaatggtatattacatgtcggaaaattttcaaaaattttcgagctaggccccctagaaattttcaaaaaatttttttagggcgagaagtggggtgaaaaatatttttctggggtaaaataaggtgctgagcacgaatatgatgtctgttttttgtttgggaaattttggaattttttaaatttttttgaaaatcggtcactttttttgccctcgggattttgggttaaagtttgaaaattcataactcagttcagatcaggtctattttagtgtttagaggctcaaaaaatggagaaaatatcggagaattttatgcatattatttgagttttctatcaataatatgaaaaaagttattccagaaattctggaaattttcgaattttcagaaaaaaattcactactcagttctgaaaagatattttgtaaaataaaaatagcccaaaaatccgcaatttttgctctatttgataaatattatttcatgattttatcattttttagtagaaagttataattataaaagtgatttt

SEQ ID NO: 32516 - DNA, 1642 bp, Heterodera glycines
ttggggacgactggtccttggcgacggccgccccccgggggttcgaccgtaccgaaagattgaaaagtaatggggcaattagcgaattgttttcggtcttaagaggggggtgggggagaagggtgatcagaacagaggggggtaaatgtggtgaaatgataaaatgatggatggatttgtgaagaaaggccaagtgcgaatgaacgtaatggacattaacattgtttgatttatcaaaaattattgagatattttttaacgaaattggtgaactcaaagggaaaagctgtgccattcgtaaatggtaataaatttcctgctgggatcattaattgtttgtaagataattagtctaacttctgttaaatgaaagactcaaaataagttcttttttgggacggtatatttaaaaagaaaccactgcaaaaaataacatgattttggttaaaaatttgtttttattgcttacatattatgtatgaaagttaatgagttaattagtactgaataatgagtagtgaatcttgctgaagaatggggatgtgtaactaatttttattttggattaacttgaaaatgttaagagccaaagtgatgaaaaatgggccagagaataatttcccaaaattgataaatgtcacattgaaaggacggattcgttgataaagcaaagtgaaaataatcaataatcaatagataatttgataagggggaaaagaaattgggaaacaaaaaaagcgattaaaatttaaacttagagggattttatatatgtaaataagcaaatgggcaaaagtgagatgaattaaatgatagtcaatagagagaaaaggattatagggggatagatttttcaaattgagaaatttccaatgtttttttttctcgaccttcaatcaatgatcaattctcagttctcgagtctgcaaaattcgactcgagcataatacaatccataatattcaaatgaactttccctcctcttactgtctccgctcaaaaaacgattggccaaaatataaatttgccgttgtttttacgaccaaaggcataatgagagaatggactcaaaactaattgaaagtgataaaaactgactaaaacactcaaaaatttaaacaaaccaattgttggcctttgagaaaaacaagggaaattgaaatgagggcaatttggattgaatcgcataagaaaggtgggcaaagggaaaatcgagaaaaatgggagagaaaggggaacagtgcttaagggaaaagcaaaacgcaagagaacacagagggaacaatgtgaagaggggagagcaagagaaaaagaaggggagagacaaagaaagagagagagagagagagacagagagagagagagtaaagagaaggagagagtggagagaaaaagccggtgctgacgtaagagaagatggccggacatcaaacaaacacagcggcaggccttttgacaaaggcagccattgctccgccattagcacagagaaagaagaggacagagaattgcccctcaagggaaatcgatcatttggcggcgtacgcttcaaagggaccgccaaggcgtacgcttcgcttcaaccaaagggaccgccacgctaaaaagacaccgccgccggctgctccccacgcagtcaaaa

SEQ ID NO: 32517 - DNA, 1063 bp, Heterodera glycines
  unsure (1)..(1063): unsure at all n locations
cccccccaaggctccccaatgttcgttcatatcgccccgcagggcacgtctatatgtttttaagagagagagagagtgtgtgtgtgagagagggagaaagagagatagcggagtgagagaggagagagagatggagagagagagatagagagtgagtgagagagagagagagtgagtgtgagagagagagagaggtccattaagagagggagcgagagtggtccattaagggaaaacagttcattagtacgaaataatggggcaaaaagaaagaaagtgaaacataatgaaaaaaaaatgaaataattagtagcacaggcgaaaaaaaatcgaaagcattagcataaacttgctggcatagaaacagacaaaatagcgaaataacgaaacaattaaagggacagagaaaaagacaaaaaatgagagagcatagcatagacaacgaagcccattcttaagcatgttttagatgctttggctagcgtcaaaaaagtgatgtcatagcagtccaacttttgctcgtgaggactcacaaaaagcgggcggcggagaatgggcggcggcttaaaaggccttgcaaaaaaagagaaaagaaaagtatgtttatacaatttaaaacagtaccgttgtcggtcggcaaccagttgatggcacaatggaaaataatgccattgccccccaggggaatgagtggttgttaaacataatgccaagcgggccaaattcgcccgctaattgccggacgacgaagacaaaacgacacacaattaagcagtattggcaacgatgaaaaacaaatgtgaacgaatcgaggcggttgagatgaattattgtgcatgcaatcttttgttgagagcaggaaataaatttttcatttttttgtttatagcaaaacaaattaatttggcacctaattagtatggatggcaaatttttggtaagaaaaattgcaaaataattacttaaattgtaaaaaaatgccgaaaagtagttagaaaataattacaaaaagcccgaaacaggtacaagaaaaattattaaatctttgagtagccanaaaata

SEQ ID NO: 32518 - DNA, 1455 bp, Heterodera glycines
aacggacacttgaaaaaatcgatttttttgttttcggggcagtccccccgagccgatgcgcccagatttatggggagaccgaatccttccggaatagcttccctatagcctgtactttaattctgcgttggatttttgctcctcataattgtttgagtaccccaaacggacacttgaaaaaatcgatttttttgttttcggggcagtccccccgaaccgatgcgcccagatttatggggagaccgaatccttccggaatagcttccctatagcctgtactttaattctgcgttggatttttgctccccataattgtttgagtaccccaaacggacacttgaaaaaatcgatttttttgttttcggggcagtccccccgaaccgatgcgcccagatttatggggagaccgaatccttcgggaatagcttccctatagcctgtactttaattctgcgttggatttttgctccccataaatgtttgagtaccccaaaacggacacttgaaaaaatcgatttttttgtttcattaaatatttttttcagaaaagtcatgcgcacccgtccgatttggccagttaagcaacgattgctgactagccaaaaggttcggtgccgtgatgaaacgaaccagcactgcttactccgcggcacccggcacggtcccccgaaggaatggatttaattaaattctctccttcggggatttttttccattaggtcgtccgttagcgttcgattgctctagtcaatttttcaaaatttttgttgaaatatttgtcgtgctctgaagggcgtgggagggggggggggggggcgaaggcccaccacgaggccgcgaagaggccgagtgagtaccttcggtgcaggaaaattattaaattttaaaattttttaattgctttttaaatatgccaaaaaatgtaggcttaacttttttagtgaaaattcgatcactcatattttttgctaattgagcagaagcgtaccaaactttgcagggatactccccggtaaaggactaacttacactgaaatgagcgccgagctagctggctcaaaaaaatttttcgaaaatctgagtctttcgtttttatttatttgcaaaattaattcataaatattttttcagaaagggttctgaaacgcaccaaattttatttacatgttagtttaggcactctgatgctttttctatcaataatggaggtgaataaaattttaattgctttttaactttgggaaaaagtttaggcttaactttttagtgaaagtttgatcactcatatttttttagtctaatctactcaaaacggttcagaattcaataaaaataacattcacggtgcgaaaaatggggtttgacaagtttattggggaaaaaaagactttacaaaataatacccctgggagaagggagagggaaacatgatttcaaaattttcaattttttcta

SEQ ID NO: 32519 - DNA, 1135 bp, Heterodera glycines
  unsure (1)..(1135): unsure at all n locations
cataaaaacgacgaagataaaataaacaaaattgcgcgaccattgtccctttattcncgtgacataattaattaattataactaattaactgattgattgactcacttccgtcggcncactcttcaacaaagcattgaccaaagacataatggctactcggactctgttcgtttccttcggactgttcccgtgttctcgatgcaaatctgtaaaatttaaatccaattcctttggttttgctgatttcctctttttctctctctctctctttctctggtttctctggcgtctctctttctctcttcactttttttctctcacttcgaattgtctcactattttctttccctaccgtccacaagtctttgaaagcgcgtccgttctcccaaaagggtttttgcttctgtcagtgctctcaaaacggaacggtggccaaagtcagcgacgacgcaaagaccggaaaggatttccagagaaagcacctgcagaaaaagagaaggacaatggtaaagcatcacaaaatggggagagggggggggagatcagagaacaattggagaatgacgggaagtgatcagagagaagtgatcggagaatgataaaagggcaaaggagtgttcagaaaagagtgatcggagaatgataaaaaggagaaggagagtgatcagaaaagagtgatcaaagaatgataagagagagaaggagagtgatcagagaggagtgatcggagaatgataaaagggaaaaggagagtgttcagaaaggagtgatcggagaatgataaaaaggagaaggagagtgatcagagaggagtgatgggagaatgattggtgggtaataagagtgatcagaaaataatgatagtgagacggagagtgaccggagaattaaccagattgattgcctcgaacgattctaattaattttttaaggaatgaagttgaacattgaaaagaaaaaaaggagaaaaatgacttacttttaaataagacacaaatgaaaggaggaaaagcatggcgaggaatggcacaaataattagcccaaatttaatagcaattacataaattagccgatgagagagagacttttaagcccatcggcagaaggcgaagacaaaaagaataaattgaagg

SEQ ID NO: 32520 - DNA, 1188 bp, Heterodera glycines
  unsure (1)..(1188): unsure at all n locations
ttttcaaataatttttaaatttaatagatatccagaaaaatggctatctattttttgagaaattttctatgcaacaaacgctctcgaacatgaaacgaagtgcggtgcgccgtggccattttatttttcaaataatttttaatttaatagatattccagaaaaatggctatctattttttgagaaattttctatgcaacaaacgctctcgaacatgaaacgaagtgcggtgcgccgtggccattttatttttcaaataatttttatatttaatagatattccagaaaaatggctatctctttttttgagaaattttctatgcaacaaacgctctcgaacatgaaacggagtgcggtgcgccatggccattttatttttcaaataatttttatatttaatagatattccagaaaaatggctatctctatttttgagaaattttctatgcaacaaacgctctcgaacatgaaacgaagtgcggtgcgccatggccattttatttttcaaataatttttatatttaatagatattccagaaaaatggctatctctttttttgagaaattttctatgcaacaaacgctctcgaacatgaaacgaagtgcggtgcgccatggccattttatttttcaaataatttttatatttaatagatattccagaaaaatggctatctctttttttgagaaattttctatgcaacaaacgctctcgaacatgaaacgaagtgcggtgcgccatggccattttatttttcaaataatttttatatttaatagatattccagaaaaatggctatctctttttttgagaaattttctatgcaacaaacgctctcgaacatgaaacgaagtgcggtgcgccgtggccattttatttttcaaataatttttaaatttaatagatattccagaaaaatggctatctctttttttgagaaattttctatgcaacaaacgctctcgaacatgaaacgaagtgcggtgcgccgtggccattttatttttcaaataatttttaaatttaatagatattccagaaaaatggctatctatttttttgagaaattttctatgcaacaaacgctctcgaacatgaaacgaagtgcggtgcgccatggccattttattntttcaataatttttatatttaatagatattccagaaaaatggctatctcttttttt

SEQ ID NO: 32521 - DNA, 956 bp, Heterodera glycines
ttaattgtgctcggacccgttttttaggtatgactcctgtccgtttttatatcattttaataaattgggaccatctcaccctctccaattacggaaaatagaaaaaaaaaaattttttttacattttttttttgcaaaaaggttttacttagttaaaaacaaagggatagacggaaagcaaataaagtttgttttggctttttaaaacaatagtgatttttcaattgaacctaattttgctcggagcaatccttccatatttatgtgttaataaattgggaccatctcaccctctccaactccggaaaatagaaaaattttgttttccatttttttttttgcaaaaaggttttacctagttaaaaacaaaggaatggacggaaaaaaaaataaaaaaatggacttaaaaaaagaaaaatttctttttcttgaactttttcacttcgaaagtaatgaacattatttccagtgcggtgtgctcgactcggtgtccatccatttgtccaggcccgggccgggccaactccatctccaggttcagctgcagcaaccggtcgagttggtctggtcaccggtgctgcatttgatggtcaacgacgtggtcaggtcagccgctgctgtttcacaaacaaacacattcgaagtcgaactcacctcctcgtgaaatttcttttttttatggccaggcctctaaattcggaaaaaaattattccttcctgggaatgtattataattttttaattaaatttatttttaagtgtgaggagcagaccacgtacggattcggggacaccatttaccgcccattaatcccgcggcttgaaaatcatcgcgtgttgacttcctttatcggtgaaatatccggtgctggccagtattttcgttacgacgacgacagcggccgtttctgtgtcgtgtctatcaacacgcatgaagctaacgtaattaaaaatta

SEQ ID NO: 32522 - DNA, 1632 bp, Heterodera glycines
aaactgtattattattattttttgcctaaatcttattttataatcgtttttgaccccagatacttgaatagtttaattcgatattaatatattcgtagacttcgtgattttttgaaattttttcggtgttttttccgggatggggtcttaaaaaaacataaaaggcccagagaatgagtaaattgggtggccgacgttacaaaagtgcatttcaagcccaattccttggcccaaaaatggcacggcatacctctttccatttgatgacacgtggcagcaaaagtttgtgcagcagccgacaggaagagagcgcattcgggacggctttttcggcagggataaaaggcacaatttcgaacaaaagttcgagcggaaggcatttgggggccattgttgggagaagcaggcacagttttgttatttggggtaattagtgagcaattagctgattagcattgaacggaaccgtcgcactggcactttgaacttggtttggcccgtttcgtcgcaatagcagcagaagcaatggccgttagtctctcttttccgtttgctttatctcttctgctttgtctgccttttccttttctctctccctctctctctttttatttttctctatgccttgcgttgcgttcgtcctttcacaatgattcggccgcttttcgtcctcgcccgaggggttttgcgtagaactgtctcgcttttctgcttccacttctaacgtgcacacttttgtctttgcttctctgttctcgctttttctcttctagcgcaacactctctgcgtttctcgcctttccttccgttgtctatctctgcgttctctatctctctcgctctctttcacttcttcgttttgaataggacagagaaatgaatccaacttttgttttttatgtatttttatagtttagcttttcctaaaattaatttgggaatgcttctcaaactagaaaattttattgggtaatttaaggcagttagggcctcctcatttacaaggagttcagaagagtgagtaaccagcagcagcagaggaaaaatgagcagccatcgatttgcatacagatgacaaatggcattttgggagggaatgccacaatgtaaaaatggcatttaccatctcattagtgtacaataattcatgtataattttatccgttgccgttttcatatttgtacactccgccgatggacaattaattaatcctccccatttttgctcactgatcaactgctgttgctgatcactccagcgaaaaagtgattaaattattgcattgtgtattcattttaatccgactccatctgctgctggttattgatgtccaagcatccaaagcaaagccgaccaataaatttcgcattcacagattaaacatatttatagaaaaattttttccatttttattaataaattttttaaaattttttttataaaattcctataggcattgaataaattccgtatattgccgggccaagaaaagtcgggcttggcttggggtccaagtttttaaactgggcccgggtatcactgcaaaccgaaaatacatattcataatttttcaaaaactaaaataattatttcacaaaagaatttgtaatttaatggtatttttgtttgtt

SEQ ID NO: 32523 - DNA, 995 bp, Heterodera glycines
ggattgacaaaaatagagggccatgcaattcaagaacggcacaaatactaagagagttcggggttgggggaaagggacaaatcggcacggaggcggtggcattccttcctccgttttctattgttccttctttcacctgctgctcccataatttgccgcgagtgcaccacacgccgctgctgggggtaatgcgccgggtcagtgctggcaaaagtgtgcgccgtcgtcatttctttgttctgatttgagtgataaatggcaaagttccttccaattttcacttgccgtctcaaaaattgtctccctccccctctctctttctctcccccttctcccttcctctcttctctccctctctcttttctccctttctcctcctctctctctctctctccctctttttctctctcccttccttctactattttgtctttttcccgtttttaagactgttttggcgttgtgtttgttgttgttatcacctccccttttcactttttccaatttgtcaatgtctttctcattccttcgtttagttgttcttccctttgttctctcttcccttgatttatttggtcctttcttcttccatttcactttatcttcttcctcatcctgcctctaatccctcccctccccatttattattcaatttttccccccgccccgccccaatttgattccttttccttctgtcccctccctctcctttgtttctgtttctctcaccgcgttgtcccaatcactgaaagtgatcagcaaagtgcacaggtggtcttttgactcgcgcatctctcttttcttccgttttgcctttttaatcaaattatttgctgcattttctaaatgtttctttcattcattatcattatcattattgagaaaagaggcaaaatgactgatttgattacatgaattataaaaaattatcacataatgtgatttgcaaatttcaattaaaaattagacaataaaagggaagggaaatgggtgat

SEQ ID NO: 32524 - DNA, 875 bp, Heterodera glycines
acgcgtcgcccgcttcagcagtgcgcgagacggcttccgcccttcctcgatgatctgaatttcgaagatttcatttgaaattttgattttaaatgttacaaaaccttaccggaacaagcgatcgtcggaatgcctggcgaatgtaccgcaacggggaggaggagaaggtggaggacgcgcagctggtcttcttcttcggcactccggtcacggtgctcgcccgctggcaatacgcgacggcgccgttcctccgcggcactgtgccgttttggccattgcacagcgactcgccgtcatggccttggcctgtcctggtgccgccgctgaacttctctaccatgctggtgttgatgcaactgttccggcgtcgatcagggtctgcgaagaagcagttggtggcgccgctctccagcaagaaacggtaggacgaggaaagtcccgcgctgctttcgccaccggcgtcgttccattctgccggcgactgatccccgtccttttgatcactttgatcaccgtacccggattgattaaaattcagctgattatgatgttgattgcccgagtcgttggtgttggtgttgctgccgtgccgtcctggctgcgagcggctgctaatccgaacggaacggcgagcgtcgccgcctcggcccgttgttctgttgtgatggtcaactgctgaaacgacgccgacagttgtggcactttcgagcactgaaaatgataatttttgggaaggggagaaataaagtgatttatggtgaaaaaagcaaaacaaagtgatcagaaaagcggacaaacaaaacctgatttttatgagctaattttttgttttctgaccgttgggctcggctataattgatcaggaaagaagcgcg

SEQ ID NO: 32525 - DNA, 1172 bp, Heterodera glycines
aatgcacaattaaactccgtttgtacataaaattttgcaataaatttttccataatttcaatttattaacagatttgtctaaatccgatgaattgacagaaacataactgctaatgcttaaacggagtcttaaattattatttcggtaatttattgaaaaatttatatgttttaattaacaattaaagatatttttaccgaataaaatattgcctttattttcccatttttaattgacaaataatttagtaattattctttctttccattctttgcttctcctttctttaatttgatttgaaccaattgaaaaatccatctgaaaaatgaaaatatattttttttctttttgattaatttttatatttgtcttcgacaatttgaggcctgtttatacagaaattttttctatcagtaatacttctaacttttatctttgcattaagccttggaaaaaccgaattaatcacttctgtacatttgactttatttatacatatgtagaagatatattacagagtttcatttttaagatggcgctgtgttaagcccaattccgtttatgtttttaattactgcatctttcttcaccggaaagaatggaggcaattaacagggcaaaaacgatgcagccgatgccaaacgacgtgtgcaagccgatcactccgctgttccaatcagcagggggcctaaattttgcgattccgataatataaatttcaaaaaatgtattttcaactaatgatcagcctttttgataggcatgggcctagtttaatgtttgaccagagaatacccactaaaaactcatgcctggatattcatcatttttaatttataattaaaaatatgaaaatccgtctcgtattaagcggtgaaaaaataaaactatttatttttcattgaaaaactgggccttcctaaccattggggagttactgaaaattttaatttttaaatgtttttatgtttgagtttgatcccatggagccctaaatactgtgatatgtgagcattcatccgaaatcattaaaaaagcaaaacaacaagcactttttccgataacacaagctgtcatgtgccattttaaggatgtccttgagaaaagcatttctttactgagttttttggtgcgacggcttttcggcatttgaatagatttgaaataaaat

SEQ ID NO: 32526 - DNA, 1280 bp, Heterodera glycines
agtaaaaatgattaaataatgaattaaatgtgcctgcgggtggagagcattcaaatggtgggtgtgcgtgcgcaactgttcgacggcacccgccctgaacgtatcgccggcggcaatgagcacgcgatggccattctcattgagccaaaaagtgatctgttggcagagaaaacagataaagggaacacttcctcctctgagttcaccttggccaaattggtcgatttgccaacgccattgacgccacagaacacaatcacatagggacgtttttgcgctttggcgtccaaaatgtcgcggagaatgtccacgcggcgctttggagtgagtaactgaaaaaaacgatatcaaatgatcttaacgaaagataatgtccaaggacataacaaccaaacaacaattttttaaattttgctctctccgtatttccctcctttacacctacccttcccttttttcgctataattaattgcctggacaagtgcttcgcgcatggcctcgcgcacagtcgacgcaactcggttgaacgttccgatcactttgccctccaatttggcagcaaccgactcacaaatgcgttcagcaggttccgacgcgacattttttgcttaaattggaattttactttttgattatattaaacaattttttaaagaaagaaataatgcttactgatcagcatttccttcattttctccatcgccggctcaatgtcgcctcgggcaagctgtttggtgcccaccagcgatttgaatgccgaaaaccaaccgccggaagccgaaatgcccttcggtttcgctccgctgaattttaaggctgacatacaaattttagttttaaagcacctttccccgtggtcattttcgctgtcgctctccgactcttcgctgtccccaatttgctgctctccttcatccaatccgggcaaatcgcccttcagcgtaccgacaaattttttctaaatttagtgtaaaatgcacaaacgcattcccgtctttcatattgcaccaatttctcaccgctgcatttactcgttgacgtgccaagccgcgtactgctccgccttcaggacgtcctcaacatgctgcttcagcatttccgtgttcgccaactctctcccacgtgacaatgcgagtcgaccatcaaattttagtgaactctaaacgaaaccgtaatagtaaaaagcgctaaaacctgaaactttggtagccgatcttcgccaaaaatgattttgcgctacaattgctccctttggttcactaaaattgggtttgttatt

SEQ ID NO: 32527 - DNA, 1347 bp, Heterodera glycines
  unsure (1)..(1347): unsure at all n locations
cagcatgcgcgttttgtgagggcgcgcattggaacgacaattgcgaaaagtacagaacttcgtcagcgagatacgcagtcgccagagagcgaaaattatgcgtcaaatgtttaagaagggcgcacgtggcgatgaagtgcccacgcccttcgaagtgctacttatgctacggcgaacacccaacagcactttgtcgacaagggaggcgacaagataggcctacgagggccatcaatcccgtcactcaatccaaaatgagaaacgagatggcggagaaggatcaattcaaagaaattggttcggcaccgacacaatgcaatgcattgaccaaggacaagtcaaaagtgcttctgcgaacaacggaagtcacaatcttcaatccatctgatccaaagaagagcacgattgcgaccgttttcatcgatgaaggaagcgagaggtcatttaaagaccgacatcgctaaacgtcttgaacttcccgttctcgagagggagaaatgttacctcaccagttttggggaacggaaccccagacattactcgagcaacgtggtcaagatcggattcctgggaatgaatggagacgcatacgtttgctctttgaacgaaatggagttcatggtgaaggcaatgccaatcgtggcactcaattcggtggatgaggaacagcttcgggaaagaaagctgagattcccgacgaagctacaacaaccggacattatgctcggaatggatatccgacatgacttgaacatacgggatgaagtcgaaaaactgccaagcggatttacactgtcaaattcgcgcctgggaagaatgataagcggaattggacaatgggagaaaacaatttcgccgtgggctcaagtgacgttcatcggttcgctcgctagtgccgtcctggaccaaagggaagaagtccatgaaccagaaaatgttctggaagaccaaatgaagtccttttttggactcaacatcatcgggatggatgatgacaacactcagttggatcgggacgaagtcatgaaaaccttcagaaaaaatctgacattaaaaaaaacggccgttatgaatgcggactcccatggaatgagagagtcaatgagctcccgaccaactacaagcaagcacgagcaaggctgtgcagcacgatacgaaagctgagagagcataacctcgtgagacagtaccaagaaattctggaagactgggagaagcaaggcataactgaaagagtgttagagccaagcctatccataggtccggtgcactacttaccgcacagatccgtgatcagagaaagataagcgacaacaaagatacgcattngtatggatgcctcagcca

SEQ ID NO: 32528 - DNA, 1425 bp, Heterodera glycines
  unsure (1)..(1425): unsure at all n locations
aaaaaaaaaaaaaatgtccatatttcccgccttcggaatttttatttttttttttgattacgggcctgtgattacagtgggtaaaatgggttcataattgtaaatagtatagcgacattcaaacacaaagaaacgcacatagcataaaccaactgtgcttacaatgacccatttaacccataattgttctcttactaatatcagatgcataacaaatacccaaaaaacaaaaaaaatggcaatccaaatacacttaacaattgccacccgtctttgtttatggattctacggctttgtcgatatatttcattgactcgaatattttgatcattatccatacgcttctttcgtcttctatttgttcccatgagtgttgcggtgatgaaactttttgctgaaaatggaaaaaacagttaaaattagagctcgacacttttgaaaaaagcctggacctgagactggattccatttttgagttggacctgggttccatttgtacctggatttcctggacaaaaatccaagtccaggaaaaatctaggctcctcgaggcctggatttaaaaaaagatttgatgatttttttaaaacttgaaaaaacatcggtcatttgaaataacaaattcaaaatttatccatccaggttttttcatatttgacctggacctggatttcctgacaacaacccaggccttgtgatccagatccaggtcgagctctaattaaagttaaaaaaaacaatttagactgttttaaaatattttaacaaatcttacatttaattatttgttgtaattatcgctattcccgcgtttaaatactcaaacattgtcgcaagattttgttcatttttgttgctgagaattgaagaatttttgattttttgaagaatggtttttgtgtcaatgatttgcttatcatttgatacaaatcccatcaaatctcccaatgcttctttatcattgacaaacattttcagcagattttcatttgaaaagtcttttctcatcaattcacaaaaatttttgcgcaattttccaaaatttccatccatttctaattcaaatttggcaaagtttgcatcgcacaaaaggccaaaagtatgctttttccaccatgcaatttccgattcggtattttcaatttttgatgccttgtccaccaattcatgggccaatttgaaataatctgtaatacatggaaagtttagtgtgtttattttaatcaaattttaccaattttggcatgagttttggtcgaatttggcactttttgagtgcttttcctcgctaaaagcatggccatagcaaagaaaaacaataattttggcggtaaattgaatgaaaccattttcgaagttttatcanaaatttaggctttcaagatttctannaattaattggaaatanattttaaatcactctt

SEQ ID NO: 32529 - DNA, 680 bp, Heterodera glycines
gctttattcagcgctacaacagaagacaaaagttggtgaccaattcacggtagggatataatcgtgactttcagagatagccattttttgtcaagagctatttttcgtgcgttttcaaacacactattagtgttttattcagcgctacaacagaagacaaaagttgtgtccaattcccggtagggatttaatcgtgactttcagagatagccattttttgtcaataactatttttcgtgcgttttcaaacacactactttcagagatagccattttttcaataactatttttcgtgcgttttcaaacacactattagtgctttattcacgctacaacagaagacaaaagttggtgtccaattcccggtagggatttaatagtgactttcagagatagccattttttgccaacatttatttttcactcgttttccttccttccttctattcctctatccattacctccctacctccatccacctttttcgctccgttccgtcatcattttattgcgtcgataggataggatcatcttccccccccccccccattgtgcggaacaggggtcattttcgcgtgggccgagtttttgaactattacttttttcattgtcaaccaaattcaacaatcttggtatcattcgatagccctaagtgccctctattagtctgcaaaatt

SEQ ID NO: 32530 - DNA, 1535 bp, Heterodera glycines
atccctctgatcggccctttcctccccaggggcgtcccttcggttggctgctttccctgcgcgagtgtaagcagcgaaatggcacaaaaattgagccaaacgcaacggacaaaaaaggcaacggcggagagaaaaatgccattgaatgtccagtggaaccgaaatgtgaagggatgacggaaaagcagcagaaggcggaggagggcgcggaggaggagggaccaatttgcgacagcaacggacgaacgcacaagtgggcaatttggggggtggggaaacaaacaataaataggggggaggggggagacagggggagaagcgattggcatggatgaagcaattcaaaaaataggctgaaatgccatgcccatgatcgaattacttaattgacatcgtcattcatttgggtcaaaaagtgtacttaaaaatgcaatggtaccgtatggaattgccgccaccctaccgtattcccaacaatcagttgttactttttcgttacaattccccatcacctatttgtgagctccctcccatccaggaacatttgcatgtttgcgcatgcccactgtttggcggccaaagatggccaattgttgcgaattgtgccaatcgaacgatgcgaaaattcgctgccgaaagtgccaggggaaacattttcccgccggggagacagtcaaacgacggacaaaacggaggacaaaatggggggcaataatggcgaatgcgaaaggaaatgggcattgtgcaagcggaacacgacagagcagcaattgcatacggtggatgatggcgcaccgtattgcggcaccgatttcatcacttaccgtacctcttgcgactttcaggcattttccattaccgtaatcctttttatttgccttacgcttcttttgtgttcagctggcacagtgcaaaagcgataacaaattgggcttgctttttaaaggcccgtgcgaattgtgcctggcagaagagtgccatcgatcggatcgcttttcgatcactgccgacgacgacgattcgcattttgtctgcgaccaaaacggcgagactttgtcgcgttgcgaatttgaaatgttacgctgtgttgtgcaaacaaatttgggctacaacgtcacatttacacatgtgaacctttcaaaagtgtgccaaccaatttttcttccgttttccaggagggaaagtgttgtccgacggaggcgaaatgccccccggcaaaaatgccacgcaattcgctggaggaagtgtgcgattcaaatggacgacgccatcagagtcggtgccaatttgaggtagcaaaatgccgagcgaagaaagtcgagcgagagacgaagccattggaggagagatactgcccatcggaagaacttggaaagggcggaagagaaggaaaatgggaggaagaagaagaaacggagggaaggggaggagaagaaaaaagaggagatggaagaggagaaggaaagggaggagggaaaagagaaggaggagaaagaggaacaggaagaggaaaatgggaagaagaagaaggaaaa

SEQ ID NO: 32531 - DNA, 1202 bp, Heterodera glycines
tttttttttttttttaattttttgtaaccccttttttgagtaagatttaaaataaaaaaaaaaaagaaaaaattttgaaaatcaattttttccccctccccttttccccaggggggtttttttttgtaaaattttttttttcccccaataaacttttccaaacccccttttttcgccccgggaaatttttttttttattgaatatgaacccgttttgagtagaatagactagaaaaaattgaaaattttgaaatcatttttccaactccttcttcccagggtattattttgtaaagtcttttttccccaataaacttttcaaaccccatttttcgcaccgtgaatgttatttttattgaattctgaaccgttttgagtagattagactagaaaaaattgaaaattttgaaatcatgtttcccactcccttctcccaggggtattattttgtaaagtcttttttcccccaataaacttgtcaaaccccatttttcgcaccgtgaatgttatttttattgaattctgagccgttttgagtagattagactagaaaaaattgaaaattttgaaatcatgtttcccactcccttctcccaggggtattattttgtaaagtctttttttccccaataaacttttcataccccatttttcgcaccgtgaatgttatttttattgaattctgaaccgttttgagtagattagactagaaaaaattgaaaattttgaaatcatgtttcccactcccttctcccaggggtattattttgtaaagtctttttttccccaataaacttttcaaaccccatttttcgcaccgtgaatgttatttttattgaattctgaaccgttttgagtagattagactagaaaaaattgaaaattttgaaatcatgtttcccactcccttctcccaggggtattattttgtaaagtctttttttcccaaataaacttttcaaaccccatttttcgcaccgtgaatgttatttttattgaattctgaaccggtttgagtagattagactagaaaaaattgaaaattttgaaatcatgtttcccactcccttctcccaggggtattattttgtaaagtctttttttccccaataaacttgtcaaaccccatttttcgcaccgtgaatgttatttttattgaattctgaaccgttttgagtagattagactagaaaaaatgaaaa

SEQ ID NO: 32532 - DNA, 850 bp, Heterodera glycines
catgatccattttcaagcacttttgtggttggtaattttctgtcgcttggaacatctttccggtccttgattttccggcaaccagcacatacaaagcgtttaccgtcatcttttttgactcctgcagatgtccatttgtagcaataattcggattttcggagcaatcagttgtcataactgttttagaaccaatacgcttgctcacggcgagtcaattttgggctccaagcgcaaataagtttattatttatttagtaatcagaacgccaaaactttgcaaaacttaaaatttattagggattttcccttgtaaaaatggaagagccgatctcgagttagaaaagaaactttcaaaaaacaaaagagaattcgatagagggggtcaaactatgggcctatgcaaaatttgaagaaaatttgaacatagggaaaaatttttcaactaggtgaaattttcaataattttaattcttttttagccaagtccacaatttaaggccaaaccaaataaaatttacaatattctccagaattttcccttcaaaatgagcataaaatggttttatttgctctagtattcaccaagttataagctaaaaaaatttcataaaattgtcgatgttggacgtaaccaacgctttttgaatatgattttttattgccacgaaaacttttattaatgaaaaaataattctgccttcttctttaaaagaagaaattgaaattaacacacaacatagggaggactcgaacttgagacccccttttggtgggtaactcacagaccactaagacaaaaaaaccaacttataggaagggagcccaaaatgactcgccgtgtgctatata

SEQ ID NO: 32533 - DNA, 699 bp, Heterodera glycines
tgaataattcataatttttgaattttcggctttaggttcgaattcgggtccggggttcgtaattggtcgaaatggatgtcatattcgtgatcagcgaccctcaaaacccaataagacatgtttttatgactttttagaagaaaaaaatttttattcaaaaaagggggggggggcaccagcttcactattaccaaaaatggttcaaaatcgcaaaacttggtcatttgctggagaaaatatgaattttatgctggcgccggaaaattgtaaaaaatttgagtgtgattttacaataataattggttctcatttttaggcactaaaaactgccaatatcaatcaatcaatcatttatacgcaaaagcgtgacgccgaaaaataaagaaataatatatcaaaacaatcaattggtcacttttggagttgaggtggcaaagaaatcaacaaattaagatcagatctttcaagaagtttggcaaactcattaggatttagtaatctcgtctctttaggtaaaagtctatagagacgagaggttcgaataaagaacgagttgtatctaacattagttgagcaataagctgttcttatagtgaattcgttttttacggggtttttggaaaaagaaaggtattcattattttgcctaaaattatttcatggaaaagttttaagtctatttttaacctacgactctca

SEQ ID NO: 32534 - DNA, 1345 bp, Heterodera glycines
tgaacaaatggcgtgacgcacttttttttatgaatgccttactttgaattgaatttttttttttttacttatagtttttcattaattgttgaatgaaaattgaaaaaatgttaaaaaattgcatcatataaattaattttaaataattaatttaaatttctttacatatcgtattaaatataaatcagttaatttttcagaatatgtttaattttgcatggaaatattttaaattaatgagcttttgatctgttttagaaaaattttgggggattaaaatttacaaaaagtgctggaatcagttttatcgacccccgaaaaactcccttaaaattgtaaatataaatttttggatccgcaaacgagaccggatgggatcaggatcccgcggaattttcacgggattccacttgggatccgtcttgcagactatctctaattcagtttcacaacaattctgtgtggtgtaccatatcacttgaatcaaaaatatttcatatttattaaattatattttaaaacaaaaattgtgatcactgatcaaaaacaaatcagccgacagatgatgccatttggcctccggcggccgcggcaccgccaagaaattggttgaatatgccgaacaaatcagtgttgccggctatgtttggcacaactaaaggagattttacattgtgaattaatttatgttaaaatggttataattgtcaataaatttatgataaaatggagatgcgagcataattttaaaattggaccaggacagattttataataaaaacaaaaattttgccaaattttgaaaatttcagagaattgtggtccagcgtcgcgcagcagggaaattttgaaaattatgaattttttttgaaaatataattaaaaatcctcatttttaaaaaatttttcattttggaattcggtggttaagaaggggcaattggcccccaggataggccccaattttccagcttatcctggctttttttcgaaaatttcaataaggggtcggtccctgggaaagccctgattggctttcctggtcctgtttgatcgttgataaagagattttaaaaaatcttaaattttaaattcaaaattccacttggcacactcggcggtggcctttgcgtgctgggcggtggcaacggcacacatttgttctgtgccgaatttgtgcgatagccacaacggcacagacaacggccccggtagcagccggaatgctcggggcattgttcctgggaaaatttttaacaatattaaattacacggggtttaattttttagaacaaattaaattaagaatttaaagacctggacgaagcaggcgcctccccagttg

SEQ ID NO: 32535 - DNA, 1212 bp, Heterodera glycines
atttgaaaattcataactcaatggaggactgatcaatttaagtgaattaaagctttaaaaatagcaaaaaatcgggagaattttatgagatttatttgaaatttataccacaaaaacaaaaaaaagttattccagaatttctgcaaattttcgatttttcagaaaaaaatttatacctcggttctgaaaagtcattagggaaaagtaaaatactacaaaaatccgcaattttttgctctattaaataaattttaattcatatttttatcacttttttaagaattattataaaaataaaagtgatttttggattcgggaccaaaggggtgagcataggattttcgagtggaaaatttttttcacccaaaatcttcaaaaaacatgtctttaggggttatttgggccgctgatcacgaatacgtaatcagattttaattttgacattgtttaggcctcagaatccctgtgtgattggggattcgaggcattattttgggggggggggcgaagttcggatccgatcggtgtacatttcttttttatgcattttttcgtcattttcaatccttttaattaatttgaacctttttgttttattaaaaattaataaataattttaaatttaaattaaattatttttgatgaataaattttttgtttcaaattagttaattttattgtccataatttttatttttttatatgccatctgtttattacattctcatgttgtacctcttcaatcacagttgtacctcttttaatcactgttttgcctcttctgatcactgttgtacctcttctaatcactcttctaatcactgttgtacctcttctatttcctgttgtacctcttcaaatcactcttcgaatcgctgttgtacctcttctatttactgttgtacctcttctatcactgttgtacctctttttatcggatttatttgggatttctttcaaaaattatgtatttaaggccctttaatgacgctgatcacgaatacgtgatcagattttacttttgacatcgtgaagacatcagaatccctgtgtgattggggattctgaggctaaaattttaaattaattattaattttcaacgttgtttttaattaataaaacgagtattttattataaaaaaaataatgaattaaaatgcattcgatttttaagcgcgaggcgccggtgaggaggccgcgaagcggccgaa

SEQ ID NO: 32536 - DNA, 1451 bp, Heterodera glycines
cctatagcctgtactttaattctgcgttggatttttgctccccataattgtttgagtaccccaaacggacacttgaaaaaatcgatttttttgttttcggggcagtccccccgagccgatgcgcccagatttatggggagaccgaatccttccggaatagcttccctatagcctgtactttaattctgcgttggatttttgctccccataattgtttgagtaccccaaacggacacttgaaaaaatcgatttttttgttttcggggcagtccccccgaaccgatgcgcccagatttatggggagaccgaatccttccggaatagcttccctatagcctgtactttaattctgcgttggatttttgctccccataattgtttgagtaccccaaacggacacttgaaaaaatcgatttttttgttttcggggcagtccccccgaaccgatgcgcccagatttatggggagaccgaatccttcgggaatagcttccctatagcctgtactttaattctgccttggatttttgctccccataaatgtttgagtaccccaaacggacacttgaaaaaatcgatttttttgtttcataaatatttttttcagaaagtgctctaaagcgcaccaaattttatttacaacttaattttagcactctgatgctttagtatcaaaaaggaagatggagaaaaaaatttttaaaaaatttttccttatattttggttatatcgttttgcttttggtggggtgcttggaacagtggaatcatgcgcacccgtccgatctggcaagttaagcaacgattgctgactagccaaaaggttcggtgccgtgatgaaacgaaccagcactgcttaccccgcggcacccggcacggtcccccgaaggaatggatttaattaaattctctccttcggggattttttccattaggtcgtccgttagcgttcaattgctctagtgaatttttaaaaatttttgttgaaatatttgtagtggtctgaagggtgggggggggttttttttaaaaaaatgttatttttaggggtgtatatttaagaccgaccccaagtcggggttaagggtcggggcacggggttgtcggggttggaagcgtcggggttcgggtcggggttaaccccgaaaaatggccaaaaatgtcgggattcggggtcggggcggggtcaggggtgcaaccctattatatatataaatctgtgcgtcgtttggtgcttttctaattcaaatctaggccccaaaaccgaaaagaaccccctttttcactacattcaatcaaaaaattttttacaatccccgctgctgctaaaaaaaaagtatttacgagacctttatataaataaatattcatttaaataaaaaaaagctttccaagaagccgcagatcacggtcgcatattgtgcaaaaatcctgcaatcggccatcgctgct

SEQ ID NO: 32537 - DNA, 895 bp, Heterodera glycines
gggtaatggaaaaaatttttaaggaggctctgcgggacggattagcttgggggttcgagaatagaaaattgtcttaaaaagagatacccatttttctgagaatttatttcacaatttccgcaactcttgcggtaatggaaaaaattttgaagaggctctgcgaaacggattagcatcgggggttacgagatagaaaattgtcctaaaaagagatagccatttttctgagaattaattcacaatttccgcagctcttgcggtaatggaaaaaattttgaagaggctctgcggaacgtattagcatcggggttacgagatagaaaattgtcctaaaaagagatagccatttttctgagaattaattcacaatttccgcagctcttgcggtaatggaaaaaattttgaagaggctctgcggaacggattagcatcggggttacgagatagaaaattgtcctaaaaagagatagccatttttctgagaattaattcacaatttccgcagctcttgcggtaatggaaaaaattttgaagaggctctgcggaacggattagcatcggggttacgagatagaaaattgtcctaaaaagagatagccatttttctgagaattaattcacaatttccgcagctcttgcggtaatggaaaaaattttgaagaggctctgcggaacggattagcatcggggttacgagatagaaaattgtcctaaaaagagatagccatttttctgagaattaattcacaatttccgcaactcttgcggtaatggaaaaaattttgaagaggctctgcggaacggattagcatcggggttacgagatagaaaattgtcctaaaaagagatagccatttttctgagaattaattcacaatttccgcaactcttgcgg

SEQ ID NO: 32538 - DNA, 1749 bp, Heterodera glycines
aaaataattttttttttaggaatttttttttttgattatttttggttggagattttttttttgggggggggagggggggattggcgccacccattttttaaattaaaaaattgattattccggcttctttcttacaccatcagttgaaaattgctacgccgccagcaattgcggggcaatgcgcaacaacaaaaactttcagcaattgttgcgtggcatgccggaaggaatgtgttccttacaatttttcgggtttgataatataatattttagaagttaattttaaaaaacagttaattttggttaaaaacaatgcagttgcttaaataaagcttggtgtttcgtacaaattggcagattctaccgtacttagatttcttaggctaagttttttttaattgtacgaactgcttctaattcttattcctgtcataaaattattgtaagatttatactattatcccgtaccacttttacagtgtttcgtcgcggtgtttgtcgaggaggcggacgtgttcagcgggcgactgttgcccattttggagcagttttgccgcgactcggacgacgaagtgcgcagcataattgcctcaggctttcacgatattgttgcacaacgcaaaattgcgccaatgggaacaaaaaatgccaaaaactcttcgtcaatttcgggggggggggagcgcaaattgtcgggggtcgggaaccccgattggatagtgatcaacaaacttttttaacaaaaaaaaaagaccaaattttctctttaaatgctcgaaatcttccttttttcactttaatcaaaatggaaatgagataaatattttaaaaatcaaaaatgtagtcaagtaaataaataaataaattttgaatatgaatttttgataaaattttccatttctcaggggtgtatttttcgtttttattgcatttttgttaataatttttttcaaaatagcagaaaatattttacaataaattcttcaaaatgaaaaagagcacaaaaaagcaataaatttatgtcaatttttaatatttttcgaaatttgttgcaattgcttccatcagcatgagtcatcatctactaaatgccggcacggccatggcatatgaaaagcatggcaaaaaattttttgccaattgccttttcatagcccaactgtgaacagtgaacaccaaaaatggaaaagacgaaagagcaaaaaatggagaaaagatttttgttcgttgtctgttgtgtggaatataattgacagctgctggtgtttaacgcccgagggaggagggggggggggggcgcaatcaataaaattgggaaaagcagggagagaacggagaatggagggagacagacagacatagagatagagaaatacggacgagacaatggagaacaatgttggtgagacactcagacagataaactgaggagataataaaatgttgagagagagagagagagatgaaagagacagacacagagagagacatagagagagacggagacagatagactagatagggggagagagagagggggatacgagagacaggggagagagagaacgagagaagagagagggggaggggggagagagagagagagagagaagagaaagagagctggggaatggtgtgatcgaatgtaatacataaatgttgtaccattcaccgaatttgggcaggatttcacgggatattcattcacttcagcagtgacattccccactacctcaggcagcaagctg

SEQ ID NO: 32539 - DNA, 1520 bp, Heterodera glycines
ttggctggaaaagtgcaaaattaaggaagagaagagacaattttgaaaatattaatcaataccagaaagtgtaagtatcatctaaaacacattttcgaaaaaattaaggataggaaagagtactttttggctggaaaagtacaaaattaaggaagagaagagacaattttgaaaaaaaaaattaattaccataaggtgtaagaaatattttgactgcactcatcacgcccttcacgagacattgacgtgtcttccggcgttaaaacttctcggtttgcagggctcatgctgtctgtgtagttgtcattacgaatttctgtgaaaatacgaccaagccaatctggttcgtttggtccatcctccatttcgcataattcaagaggatagaagcgatcctcttgtccttccggaaagctctcaacagcacagtggaggaaaggatgtcggagtttaatgtggtgacggacgtagaaatgtgcggccacattaacattgaaaggacgacccagacgtccataggccatagttatagcagctccttgtgctgtaattccaccaaaagcaaagcttttggtgtatccatttctgtctttgtatgttgttttaacacggtgtcctttcaacgctttcacaaccgtttcacaatcggaaggatgattaagccgatcacgtagctcgctgatacggcagtttaaaattttggcgattttttccgtaagaagcaccattttgagaatttggaagctacaattttgaaaaaaattaacgaatggaagagtgcaatttatagaggaaaaatgcaatattaatgagatgaagacaacaaaatgaaaaaattaagggataatatgctatttataataatttttaatggtccaatttattttataggttaaataaacattgaaaggtataaaatgcaaaatttttagttctttgtattattattcttccattttcctaaaaatgtccacatcctctaataaaaattatttaccaaaaaaccaatgcccaaattgtgatggtaattacaatttttccttactgtacacaaaaattttttaattttagatgaagaagttgacaatgacccttcacccgaagaagttgagaagtggacgccggaagaagtgatcgagtgggaccgccgctgtgaaggacaaatgccagctgaagaagagctttggcaagaattcctcgacaaaggagaggcaaatgtcagtaaataaaatttttgatccattttttaaatgatttcattaggttctgcgtgagttctttggcggaaaaggggcgcttgaagttgagaagagccttcgagaatacgcgaagaaaaaggaacgccgagacgcaattttgattgagaaaagaaacgaatacaaaaaaatgatggaaaaaaaggataaaaattgagtgttcgaatttcaccatccgctatatcaatggcttttattttattcaataaattttcatttctatggagggaaataaataggttaaacaaacaaaaatgggtataa

SEQ ID NO: 32540 - DNA, 1050 bp, Heterodera glycines
gcagcagcttcaccaacgccggcgtccaggggcctattcaaattagcatcgtatcaacgatgcgatgatacgatgatcatatgcgtgttcaaattaaagactttcgccatatgatgagctgtcgtttgcagctcatcatacgatgagatcgtacgatgatccaatcgtacgttctcatcatacgatcgtatggctgttcaaattaattttatggataagatgtgatgatatgatacgatgaatgcatacgatgtttaccacaaatcattttatgtcttaaaaatatttccattggcaattttaaaataattttaaattcgacaaaaatttaataaaaataattacttttaatattcgctgttattttctccaaataatttatacaaacctaataaggtagctgctgatcctttttttgtgtttgtttttgtttaaaagaagtgttaatatgagacgaaataactcaatgtgatgatgtgatggaaatgaaacaaatatttttattcaacgccagagtcagcagcagttagtaacattctcagcagcagaaatattccaaattttttctatcgacagcgggcaatgcaaataaactatcttttgcccatttacacccaatttatttaaaatttttgtagataaaatgaataaagccgaaaaaaatttgcgaattcttatgaaatgattcggagagtttttcaattatttaaaactgttaataatatttgatttgtaaatcagcggcattaacaacagtcactacaagaagcagcagttaattagttttcaaattaaaggaaaaatgcgttcttttgaatgttttatgtttttaataatttgactggcttttattggtactaaaaatttaaaatttatatgaaaaaatagctgagactttaatctataagaaatatacaaatattatttatttaaaagtctcccgaattttacgaatttttttcctacatacgatgtaggaaaatcgctggttccttccatgtatgtctacataagagtttcatagagggaggctcatcgtatgatgggctc

SEQ ID NO: 32541 - DNA, 1147 bp, Heterodera glycines
aatttatttaaatattcaatttttttagctttttttcgaaaaattttttgtcttttttcggcaggcactgcctctgacaatgttttttatttatttagaaaaataaattgattttttttctttttgatttattttaattatatttcatccttaaattttttaataaacattttcaaactttcaccttattaatgtaaggcgaatttgtccttttttaataaattctcttgtgaaaaggcaaaaaaataggctcttttaaatatgcctatttaaattactttcattgctttcctttgcttacgaccataccacgttgaaagcacgccatcccgtccgtctggcaagttaagcaacgttgggccttcttagtacttggaacggagacgtcctgggaatcgaaggtgttgtaagctttttttccttttttcacttgtaaatttatttaaattttcaatttttttagctttttttcgaaaaattttttgtctttttttcggcaggcactgcctctgacaatgttttttatttatttagaaaaataaattgattttttttctttttgatttattttaattatatttcattcttaaattttttaataaacattttcaaactttcaccttattaatttaaggcgaattttgccttttttaataaattctcttgtgaaaaggcaaaaaaataggctcttttaaatatgcctatttaaattactttcattgctttcctttgcttacgaccataccacgttgaaagcacgccatcccgtccgtctggcaagttaagcaacgttgggccttcttagtacttggaacggagacgtcctgggaatcgaaggtgttgtaagcttttttcctttttcacttgtaaatttatttaaattttcaatttttttagctttttttcgaaaaattttttgtcttttttttggcaggcactgcctctgacaatgttttttatttatttagaaaaataaattgattttttttctttttgatttattttaattatatttcattcttaaattttttaataaacattttcaaactttcaccttattaatttaaggcgaattttgccttttttaataaattctctttgtgaaaggcaaaaaataggctcttttaatatgcctatttaattactt

SEQ ID NO: 32542 - DNA, 1625 bp, Heterodera glycines
acaaattcaaagtgaaaataacgaaaacaataatagggtgtggattaatatttatgaaaaaggtcaaaaaaaaaaattatgaaaaaacgtcaaatctttacgaaaatatagaagaaagccaaacaagaatatttaatccacagcgagatccgaaaatttgattttttgcattatcccgcggaatcctcatgctttgtaatttttttttgaaatatatcattatgccaaataattttatattagagttgtgtaaaaaaaattcgcgtgaacgggaatgcagaaaaagctggaccggaaatgggaccaggattctcgcttataatatgaatagtggatcagagctttatgcatacacgggtacaggattcccacaggaaaaatttttgtgagtcccaataattgtatgttataaaaataattaaaattttgaaatttaatattccaactaacagggcccggatttttaggtgctaaaaatcgccaaataggtaccaatgcgtttatctcaacataagctatccgcaaaaaaataggtgtgaaaatctaaaaatccgtgccctgactattaataaaaattatttaattcgagtcaggattttgaggcatatgcctttttaacttggttttagatttaatttatagtgcctttttttcttttagtgcatttttatgctttttttcactcttttttgcctatttttagtgcctatttaaaaaaattttaaaggctcttgggttccaataaagattttttagtaacaaaaagatgagttttatttgggtaattgatttgactaatttataataattaaagaataaaattctaaaattaaaattaggatcattttcctagttttaagtaaaaagttaataattatgattttatttttgtaatatttcctaatattttggtcatttaattgcattggcagatgtcgcaatcggaaaaataaaacccattaatttcactgttgaattttacaaatctttgtgattagtagggtaaggatttttatttatttaaaatattttttcgcaactttgttagatgagcagtgcatcagggatggagttccgaggcactaaaaattttcggaagtcggaagtcggaattccgatgccccaaaaattttcggaagtcggaattccgaccccaaaaatgtcggaagtcggaatttttcaaaaaaaaaatataataaattttaaaaaaaatatttaataggctaaatttttaaatttttaaccatgtaaaaggtaatttcaaactgtttttagtttatttctatattttttaaaaagatcaaaatattttaagtaattttacattattttggattttttttttgggaaagttacacctttttttgcggcgcactttatccaaagagaatttgagaaactgtggggaaggaagggtccggcggtgccgatatgcgccgccgggaaaaattttgtaatttttaatgtaaattgttaacaaattttgtccaaaaaatggaaaatttagcgattttgagcaaattttcaagaaaattaagttttttttgagtccggcggtgccgataggtgccgtcggaaaaaaaattgaaaatttctatgcaatttattaacataaatttacaaaa

SEQ ID NO: 32543 - DNA, 920 bp, Heterodera glycines
cgcacccgcagttccatcgtttctgccctgctgtgccgatcttcgtggctgtgcgacacggacataggccttttcaaaccctgaatgttcttgaattattgaaaaaaatcaaaattaataaaataacaaccttttaacaggtatttgaagatgtatttgcaggccttctgtccgaacacgtactccacgttgatgtggcatccgtatttgagcagcagaaacgggttgtatggaatgactcggctgtcgtccatcagaattgcgctccggaccccccttttcttcttgtaatgcgtctggccatgttctcccttaataatcaattatttttaaatacaattaataaaaaaaataggtacatgctgcctcgccggaactcgtccttggtggggaaagcgctgatagcgaacttcggcccagtcccgttctgggtcagcagcaggatcgtggtggtcgtcgtcatggtggttgtcgtgcccaccggctcttccaaagaaggcgtcactttcgtcgggcggaatgcggacataattcgtgtaacggacctctttaaatttttataattaatttttagatttttaaaatgacaaaatgatttacccgatagttcagtccggtccgagtacggctttggaaaatgtttgcggcatcgcgaaccctccagacatgccgcgttgcagtcgtgcaacatcattgatgtcacgtagtgccagaggcgacgctgttggtgtgcctccggtgattggtccgaagattgcggaagggtagggatgcgcgcgcagacatattcgtccacctgctgcggagtgtcgatgcggcccccccgttcaaggatcaggagcatgtggatgtgtggcatgccttaacagttttataatttaaagggctattaattctaatgaattaccgcacttctgatg

SEQ ID NO: 32544 - DNA, 1784 bp, Heterodera glycines
acgtatttttctctggcactatccctttttggttcatctctcgttttttgaaagcgatttttgttaattcagtcgaaaaaattaaattccagaaatttcatttctgcccccaaaattgctcgtaccattctcactgcaagtcgcccttccgcctcgtacttttcggataacaagctgaaaaggaagaaataaaaaagaaagtgccaaaaattgtttaaggaacagaaaatgctttaaaataaaatatttaaatgtatttatacaattcaaatcggtctcgaaaaataataaattcaattagatgattatttataaatacagaaacattgagaagcacaaaatttaacaaaatgaaaaacacgaaatttaatttaatatttcgttaaataaaatgaaaaaatgccatttagttaattggccatatgccgaaaaggcattattattttgacgccattcggcattgttcccgcttcatcaacaattacccaaatggcattttcactatcccttcaccgtgcctctcgtacaaactttgcgatttaccgaaggcaaaagtggaatgtaccgtaaccaaaagcaaatattacagaagcaccattatgccaatccaagtatacagggtaattagtggaaataattaatttattattgcgcactttttaaacattcaggttcacgttttgaagagaacgctttttgtgaagagaaaaggcggatgctttgccagaaaattgagattttgacttttatttattgggaactatattttttttacaaaattggaaatcttatgcagaattttaattgaatttgaaaaaaacttcgaattttcgtggaaaaattattgtcaatttttttttgttcatttggcattaaattaaggcaaaaacgagaaaatgttttaacaaaatgccaaaaatatgtcgatcaatttaaaagtcatttgtgctgtagtgacgctagagagtagagtagagcggtactggtactgtacaactgagtacctagtaccggttttggccggtaccggtctagtaccggttttcccagccaaaaactaccagtttttcaacccgaaaattaccggtaccggtttttttacaattactgattaccgctctaccctactagagagagagtcttggtctcgagaaaagtctcggatttttttgctctcgagtcttggtctcggatttttcagtctcgcttttcgagactctatttattgtttttggtaaaattatatttaataaatttttggtaacaactttttgtgtacttgcttttctcacatgcgtggcccagagggttgtgctctttttggtctcgggaaattttcgctctcgagcatcattattgtgcagcaactgttgccttgacaatgacggagtcggagaccaaaattcgattgccagatgtataaatgttcggggcaagacaaaacgtcgctggactgactataacttttttctttcgaaccaaattaaaattcttggtattgttcgtaagcacttgacaaactcattaacttgtgaaacataaaaatgtttgattcgatgctgtaaacgaaatcacgggcagaaaaattttctgaaaacaaatgctttttatttatacggaattcgtaattacgggtgcgtggttaataatttttacatttaaatatttcgggatcttttgtaaatacaaatcctcaccctccatataacatgtaaaaaatttcaaactaagcaccacattggtcaaaaataagtcggcaccgccgggaatttttaaaaaattta

SEQ ID NO: 32545 - DNA, 1431 bp, Heterodera glycines
  unsure (1)..(1431): unsure at all n locations
tggttgtagggaaattngagatgtcaatatggtgaattgaatttaattaatactaattagttaattgattaattaattaattaattgtgtaggggacggtgtggttggcactaattaaccactaattgccatacatttaccaaaggtgtgcctactcaacaatgtccgatgtgtggtcatacggtatcgtactgtgggaattgctgacgcgtgccgcctcgccctacagtgatgtgccaagcactgaaatacggtagttttacacttttactaaacatttaaggttgtctaatagggttaaaaaactttgagaaaacgtaagacattttttaatctgggaattaattagtgtttttgataaatcaaaaattttttggatgaggtttaccggctcaagtccctaaaaatgcataccgtatcgcgcatttaacaatttaaatgcttttcaggcattttttggagaccggcaaacgcctcgcgcagccattgcattgccctgacatactgtaaccaattgacccaaaaaataaataaaaaatttccaattaaatccacagctttgatctgatgctctcatgttggcgctcacggccctcggaaaggcccgactttgtgacaattgagcaccaattgcgcggcattttacaggcaaaatgaaaagcatggaaatgttcccgataatttgtcaggattaaaaatttgttagcaccaaaatttcccaaaaaatttcgcgaaattttcccgaaaatccacacaattaccaattttttggtgaaataaaaaggcattgaaattttaaaaattgttggtaacgaaggtcgagcacgagatcaagaaatttccgagttttaggaccaaaaattttgccgccaacgatgtttgagggcgataaaattcccgaaaaattgggatcattgaaattcaatatttaaaaaaattttcaacttcataattaagcgtgaggaaaatctccggcggcaaaaccggcacagaaggccaagccaatcatttttcgcacctgtgccaccaaacacggcattcccgggctatttgaacgatttcggaggtgccgcgggtggcttcggcaaatgatcgatcacaaaactactacttacttatgaacaactaactatacagtattccccctgcccgtctttctttgtgtgtaaatgtgtgtttttgtaccgtattcattgggcagccaccatcaccgtatatgatatactgtactgtccaacgtaattcaagatggtaaaaaagtgtactggagaatttgtggccccgatgaaaagtgaattgaacaattttcattgaattgtttcttgggtaaaaaaaaaagagctgaccacgaataccgtatatgctctaattatacccatgnngggattatttttcacctctcaaaggaaaggggggggggggggggggggg

SEQ ID NO: 32546 - DNA, 1345 bp, Heterodera glycines
  unsure (1)..(1345): unsure at all n locations
ttattcgtcacactttttcagaatatgtataagcattagagtacaaaaatattccaaaaaatatatataggtattgccgtttctgcaatttgttatctaacggcaaatcttaattggcattaaaacggccacaaaaaaggaaaggaaagaaacaaatttaaaaaggttatcttccgctattgcggaagaagcccttccacacgtaaattactcgcgaaatttgccaataaaatcgaccgagcaccgtttttttggggtgaatttatttaccgtatttcctaaaatacaaccccccccccctaaattaaccccctgaaacaaagccccctcccttgagggaaaaataaagcccctgggggggtactattttaggaaatacggtatttactgtggtggcactcattcattttaaaatggcatcattggggacgacgacaacggaacaaattgcaaaaagacagcccgaaactgtcgcattgcgtgccgcattcgctgaagtgagtttcttttgttctttgacagaaccaacagctcattgtcaaaacagtaggagagtttaatgagaattcggtcggaatttaaaaaaaaagaagaaatactgcgattattaatgccgtgaaaatggcatttttagtctcattggtcccctactgggatatgtgccgacgcactcaaaaaattacgccaatcggagaccaattccgatgggctgaagaaatgttggaaaccgtaatcacgagcccaaaaatgtcggaaaacggcattcagcattcagaaaacggcattttcgacaaaccctggaccctaaactcagctttttttgtcccgtgcttttgggaatagtcaaattttgtaaaaacgtaaactcccgccgcgttacagctccgccaccatgtgcccgcgcatccgtcggaccgaaaaatgagcaaattggaaatactcagaggtcgtccaaaaacggcgggaggggacaattttcaaaaaaaaacatatgcaaaatcaaatttttgtttttttttaaattttcttttgtctcattgtcagccgcgatacggtacattagcattctggagtactgtctgggcatgcgacagacgccaattggtgtcaaattgcacaaagaatagagagagaagaaaaagtgatggaagtgattgcaaaaagataaaaacttggattagagaaattccatgaaccaatcaattgtatcggattgataaagaatgatgctttanattggaataaaaattgcaaaaaattccccgagagaaaggcaaaaatattaagtagaaaaaacgacagcggctgctctggtccaacagaaaacactcccaaaaattgccac

SEQ ID NO: 32547 - DNA, 1598 bp, Heterodera glycines
  unsure (1)..(1598): unsure at all n locations
tttatttgatgtattgaacaacaattattaacaattcgagttttagcattttggtttgccgagacaacttccgaattcattttggcatttagtcgctgtttggaattattactcccccaaattgctgctatcatttttaaaggtttttggaatttattaaaaattatttcagttatattttagaaaaccgtacttggtttctgatggttttgtcctcaatttacgcccttttttcttggcttttcacgcggcctgtcattttcagcacctcaaaattcgcctttttcttcagtccttacgaggactacagcagcacaacggcctcatcaaaagtgcaaaagaaaattttgaatttaaattttaaataataaattattgagagaaaaaatggccaattcagtgaaaaatattccaaatttcgttgttttttaaatgattatcgtttttttcagtactccaacatagtgcacactttcaacaacactttggtctcctgctttctgtgcgccacttatggcattttctgtgtgctttgggtgggccgaatgctcaaaacgattgccatggcaaagccaaagccaacggcggtgccgacgacagtcgcggcggcgaaaggccaaaacggcaaaaatgaccaaaacaatgggaacaaaaacagcgggggcagcagcaacatcgccgcgcgaatggtcaaatggcaaaagcaaaaacactaattgattattggaaaatgacggtgcttaattaatggttgcgcccttttagacttttttgcaagttgtcatcatcagttttttcaatggctgtgccgccgggttgngcgtttacatgggacactttgagattatcccgaaatgtttgtcgcttctcagtttacttacgtcctcactcatggcaaacactttcttacaatttttaaaaattaaaatatttcactcaatatgctaattaactaatcaattaattagtttttttaaacagccgctcctccgttcatttatttggcctacaaccgcacaatccgtgccgacgtttgcgccctgctctaccgtattctgaccggcaagagtaacacaccggttactgtgactgcgcagtgccacgagggcctaaacactgggctaattgcgccaacgcacactcaaagtgtgggcattggccgcgccagtggcgccgttccggcggtatcaattggggcggactatttgagcattctcaacaacggcgtgccgctttttcgtcgtcaaattgccggcagcgacgccgtcagcggacaatggcaaaaggcgaataccctatcatcaacagtctaatgatccaattaagagttagtctttttgcttttttgtacattgtttttatataattccaaaatattttattattttttggaaaattgttagggatgtgcgagagtctcggttctcgattcccgacttagcaaatttctcgagtttttcgcttcccggtaacggttcccggtctcgggtttttagtctcggaaaccgagaaatatttaaactgttaaggatggccatttcggggaatgggtcgccggcaaagggagaaaagaggaaaaaatattgaattttaaacat

SEQ ID NO: 32548 - DNA, 1869 bp, Heterodera glycines
ttcttggaccgtagcaagacggactacagcgaaagcatttggcaagaatgtcttcattaatcaagaacgaaagtcagaggttcgaaggcgatcagataccgccctagttctgaccgtaaacgatgccaactagcgatccgccggcggatttattcgccctggtggggagcttcccggaaacgaaagtcttccggttccgggggaagtatggttgcaaagctgaaacttaaaggaattgacggaagggcaccaccaggagtggagcctgcggcttaatttgactcaacacggggaaactcacccggcccggacaccgtaaggattgacagattgatagctttttcatgattcggtggatggtggtgcatggccgttcttagttcgtggagcgatttgtctggtttattccgataacgagcgagactctagcctactaaatagttggctcattgcttctgtgggcacaacttcttagagggattttcggtgttcagccgcacgaaattgagcaataacaggtctgtgatgcccttagatgtccggggctgcacgcgcgctacactggcaaaatcagcgtgcttgtccttccccgaaaggggttggtaaaccggtgaaaatttgccgtgattgggatcggacattgcaattattgtccgtgaacgaggaattccttgtaggggcgagtcatcaactcgctctgaatacgtccctgccctttgtacacaccgcccgtcgctgcccgggactgagccatttcgagaaattcggggacggttagtgttccggcttcggtcggtatgcagactggaaccgatttaaatcgcagtggcttgaacccgggcaaagtcgtacaaaggtagctgtagtgacctgctgctggatcatacccaagtgattcttatcaccacctacctgctgtcctgtgggctagcgttgcaccaccaaatgcccccgtccgctgatgggcacaggtcgttcgagatgacttgtggacgctgcccaacattacggggcagctgcctcacgagccatgcttttggggtgcttccatacgttggagctgtggtataccgctcagtgctgcacgtgtgaaagcctgtgtatggctgctgcgtggcaatgtgtcggtggcgggccgcctcgcttggctggttcgctgcgccaatgtgggatgcacgctcgtggggcgacctaacggctgtgctggcgtctgtgcgtcgttgagcggttgttgtggcaggcacataacacactgactggggatggtggtttcgttcccggtcttacgtgccgtaactagcggtgtgtttgtgcttgctgctacgtccgtggccgtgatgagacgacgcggtagtgcccgtgcttggcctagcacgtggcttaagactcaatgagtgtcagctcgggcaccgccagctttttctttttttttcattatttttttttacacttctgttgaagaatgaattctagtcttatcggtggatcactcggctcgtggatcgatgaagaacgcagccaactgcgataattagtgcgaactgcagaaaccttgaacacaaaacattcgaatgcacattgcgccattggagttacatccattggcacgcctggttcagggtcgttaccataaaatgcactgcttgtgcgttgcttcgtgggatcatgtacttgtacgtgttcttacgttacttgctcagctcggctgtggggttttggtgtgctggcgcgaacttgtggttctaattcgcgttttacggaccgtaactcaagcgcaccaatgctttgcatgctgtggcggagtgcctggattactggcattcctgcttagagttttcgacctgaactcagacgtgaacacccgctgaa

SEQ ID NO: 32549 - DNA, 1248 bp, Heterodera glycines
agagagagagagagagagagagagagagaagtgatatcctcgggggacgggggaggggggggggggggtcaagggttgggaggatggaagagaaaagtaatgaccggaccaaagaaatgccgccggggaatggcccgtgtcataaatgtcacatttggcatttcaatgcttaaaaagacaggcaaaaatataatgaagaaaaggcggaaaagcacagtaatcagaggcaaataaagcatacggtaccaaatgataaattaattagctgttgttttcacctgcatttccttcttctctttgtcggtggcttccaaaaatgactttgccgcgttggcactcagtgaaggcgaaatgccgcccacagaagtggagcccatttcggtaaccatcttcagaatgcgacctgacaatcagctcatttatttttttaatttgaaattaatatttgtttaatatttatattttgttaaatttctaaagttgtgccattttctcttcgctttttgttcaattttgtgctgatggttttctcgatgaatcgttcagtgtgccgatgtggacaaagtgccactcacaatcattaaagatggtttttgctcagaagaatttccgttcgctgttttttctttcctcgacattttcgattcttatttttaaatttaattaatgggtttgtgctctggtgtaaatgcgacgaatttcgaaatttaaagggggggggggatcacgcaaaactcggccaacccatcgttggtaggttttgaattttcctccttttttggcattctgacctcccgtgcccgtgactccatccaccgccgggggatggctcgtgttgttggacacgagcgacgtgttggaactggcccttttgatctccaccattggcgcctcaattttgttgttgttgcttttcctcaaccgttttttgcttttttggtgttttgtattcgccgctttttccgatggcttttctttttctttttcgctgtcgtgaagcaccaaagaagcgaaaacggcgcagaataaacgcgggtcgaacaaagaatggaaactttcaaaattcaaacaattctccgtttgttttgaaaaggcgtggcaatgaaaaaacaatgagaaatggaaatggcattttatggtgagggagggaattggcaccgcaaaacgacgcaaagtgcaaattaagcgcaaaatgaatttgggggaggggagggaggacgacggctgcttaaactagtggccctaaat

SEQ ID NO: 32550 - DNA, 2435 bp, Heterodera glycines
taagtcgaaagtgtctcattgaggcactggcgatggtcataggctcccacgttatgtcaatgccaccgccgatcacttcaaatgcattgtcgtcatcctgctgttcctcctcctcttcatcttcgtcgtcgttgtcgtcatccaagcatccatgccgctccagcgggtcactgatcgtcaagaactccgtgcgaaaagcgaccaacgcctcaattagtatgcgcgtgtcgttggtgcagtaggctgcgagctgttcacataggtcgaactgttgatggcggtgttccgcgtaccactggtcgaatctgcgctgtcggtcgggcgtcattccaccgtataagtagtcagcttttgacggtagcgacggcagaatgtgcccataattcgcctcaacattcgccaaatgagggaagaactccttatcctgcacattgagtccaaacgctccgggcagagcgcctagtggcaccggcataaggttccagctgtctcttacgatgatttccgggtttttttcgcccctcgaaattttcatttcgtataatttgttaccacgtcggatcatctgtggacaaaacccgttgaggaagaactgtcgaaacagcataatgttgtcaaagcgaccaccgaaatgggcgaagagcattgtgggatagcgcggatcgaattcgctgagcagccattgagcaaaggccgccattggacacggagtgatgaattgggcatcggtttgggtgcgttcatagacgcggtgggagaatgtgacggtgcgctgccgaccgcaaatgccacatggcgcttgtagagaatttcgccataaattttcgtttatgcacttggtgcagacgacatagcatgagatgaagttgacggaatgaactctgcggtcgccctcaattcgcgtgttctgtgttgtttcacagtcaaaggcgatcagcctgtactttttggggcggcgcgccttcaactgctgtatgaagcagccccgctccggcttatggtaacatttgcaggtgtagcagaatttctcaccgcaaacgtgtccgctgcgtccttttcgtcggttttgtttgacattccacacaactccgcactgtttgcatttcttgaattgtcggcacacattgctcgacaaatgatgactgaagcagtcttggctcatgaaatccttgccacatgctgtgcattctctgtaataattgtcgttgttgtcatccgctcggcacggtcgccccgctcctatgcgaccgcagtttatgcactttgctttacactgcagtgaatgatcattggcattatcgtaggggcattcgcacgaaaagcagtagtagtcacgcccaaacaccgctttgcccaccccgcaccgaattccgtcgaaatggccgttgtgatggtagagcgggatttcgacgttgtaattgtccggcccgtattgaaattttggccgataggtgcctgtagcgccaaaaatgaacactttaaatcgctggtttgctgtggcgtatttccgattccaatagtccacgacaatcggcacatagacaaccgcgtcatattctctcagatcggtgcgaatgtttgcgctgctcatcagtccaaacacgtcttccagtcgtcgcccgttctgatggttaatataataacagaaatttcttcggctcatctctttgatgtggtattttctgcttgcctccaaagcgtaaaaaaggcaataggcatcatcactgttgttgattcgcaggagtgcactctctttgacgatatgttgcactgaatttgttgtccttttcccactgccacgcacctgttgccgctgaggtagctgcgcaacatcaagcgttgtgatggtcacagtgaacggcgagccccacagagagccctcccgtgattttgactgtgccacctcaaggaagcggttcatgattgagtcggcggtgttgtcggaaatgcggcgtataggaatccatatgctgggatttagaagatctgaagagattgtagcgcccaattgatccggtgtgatcccgttctgctgtgactcgtccaaggcggttgacatgcagtgagcgaacaatgcgcgcagcattgactcggggttggcgggcaaattttcaataataaaggacgattttacactctgcactttgaacttttggttgtactgtttgtcggcgcttagagtgcggatgcaatttttttgaaatttctgctccccatcatcatcgtcatttctccttcttctctttgtgggcgtttcgttgccgcccaactcgccgcaataattgtggtcttccacgacattatttattaatatatttaatttatttttgcgaaaaagtgagcctttcccgcgtgagctcgctgtatatatgcgcagcaccacagcgcgcgcaacgtgagccgtggtataataaataatcaatcattccctatgc

SEQ ID NO: 32551 - DNA, 1019 bp, Heterodera glycines
tcaaatgcgctgagaaaaaaatcccagaccaattagtatcggcgtcattatgctgagagtgcggttggaattccccttgactgtagaccagaaaaagagatagccattttccaaaattttcacgatcaaatgcgctgagaaaaaaattccagaacaattagtatcggcgtcattatgctgagagtgcggttggaattcccttgactgtaggccagaaaaagagatagccatttttccaaaattttcacgatcaaatgcgctgagaaaaaaattccagaacaattagtatcggcgtcattatgctgagagtgcggttggaattcccttgactgtagaccagaaaaagagatagccatttttccaaaattttcacgatcaaatgcgctgagaaaaaaattccagaacaattagtatcggcgtcattatgctgagagtgcggttggaattcccttgactgtagaccagaaaaagagatagccatttttccaaaattttcacgatcaaatgcgctgagaaaaaaattccagaacaattagtatcggcgtcattatgctgagagtgcggttggaattcccttgactgtagaccagaaaaagagatagccatttttccaaaattttcacgatcaaatgcgctgagaaaaaaattccagaacaattagtatcggcgtcattatgctgagaatgcggttggaattcccttgactgtagaccagaaaaagagatagccatttttccaaaattttcacgatcaaatgcgctgagaaaaaaattccagaacaattagtatcggcgtcattatgctgagagtgcggttggaattcccttgactgtagaccagaaaaaaagatagccatttttccaaaattttcacgatcaaatgcgctgagaaaaaaattccagaacaattagtatcggcgtcattatgctgagagtgcggttggaattcccttgactgtagaccagaaaaagagatagccatttttccaaaattttcacgatcaaatgcgctgagaaaaa

SEQ ID NO: 32552 - DNA, 1722 bp, Heterodera glycines
  unsure (1)..(1722): unsure at all n locations
tgcgcatgatttccgcgtcgttcactccccgcagtttctcctccngcctcgacaaacagcaaattttcttccgcaaatgtttcgtggagaaaacagcgaaaaaattggcgacctaaaaaaaaagaataattattaaattaaaataaatcaaatcaattaaatttaattgatttattttgttttccttttttctttttgcctcacccaatggatccttcattaaatctgccaatgttgcggaaccccaggaaagggcacgtgcatactgtatttataaatttaaagaatacagcatttagtaattttaaatatgcattatttaaatttgaaatggcatttcacttcaatgcccgccattgttggcatctgaggcgtttgctttctgttcagttcgtcctccttgaacaaattcagatttttattggagaaatttggcgattttggcattttcgtatccttcacaaaatcgttgtccgttcgaagtgccatggatttattaattttacaattttggtgggataaatgaaatgatttagcaaagaaaaaatccaatccttataaattgtggttaattaatgagtgcttaaatgtataaaaagtgctcattaaatgtttaagcgccggaaggaagaaaaaattcacttgaaaatacaaaagaaagaagaatgaatgggggcaatcagtggtggacaaagggcgaagaagaagcattttccgacaaataatggacacaaatggcactaatgatgatcataatgatggtgatgatgataatgaaactgtgatgaatgccgtacttggaaaatgaattttacacgaagtgaaaacccaattaaatttggcatatatttgggatgtgcggaaaatctctacataattggaanaattttttttgtttgcagtttttaaaagctctcaggaagttcattccttaatttaatataataccattcgaaaaaggaaactttgggcactgatttttttactgcctttttaggtgccaattttgcgatttttgtgtctaaaacactcagggatggcacggaattccgaatttcaaaaattttggggcctaggaatgccatccctggtgccactgatgagacgatggaaacgactgccagggcgcacaatcgccgtcgaaagcaaaacgcgtccgtgtcgcagatgaaattttaagtatttaaagcactaaaaccggaaagaacctgtcagcctttatggaaatttcaagcaatattaaatggaccaataattttaatttttatttttattatttcgattgctatttatttattattttaattttcttttgcaattaaaataaaattcgagtcaattaattatgtaactcatcgagctttcgaacattccaaatttgtcagaattcgactgttttaaaaatccctcgtataaatcaagagtgccacgtgctagtgctttcgagaccgaaaccaaaaaccgagactttttgagtcgagactctcgaacagcactaccacacacgcagcttccttgagactgctcggagccagaaaatgtgacatcgagataaactttttaatttcaagaaaagtgcgacactatgaaaatacggcaaaattaatatttttgaatttaaagtctggaaaatgagcattagtaccaaaaaacttgttaagtgttggtaagttgattttgtaagataataaagggaaaatgggcgcaggttcgagtccgttc

SEQ ID NO: 32553 - DNA, 1991 bp, Heterodera glycines
  unsure (1)..(1991): unsure at all n locations
tatgctcttgttcacgggggtcatattttctccactatgatatcagtctttcctgaaaatttaatgtcatataaattcagtcttggtacttccgtgttttgctacccccccccccccgataaactaaaaaattcatatcttggagttggttttcaaggtccctggccacgagacgcaaaatggtgtttgttttgatagctgattacatctggtcatggatttaacaaaatatctatgtatttttttaaaatttttcgactgaaccgtcagcttgcccgacagctttttactttggcatccaaatcaaacattgttgtgatcaatcgaaagcccttcacatgctctctattagctttacagaaagcgaaaacattttcaagcatataaaaaaaattttcgatggataagggggggggggtatcaaaacaaggaagtaccttaactttatcattagaagttaaaacttgcccatgtcataattggacccgcgtgcgttggtgaacacaaaaacaatgttctaaaaaggtgtgttataatccgtgttatccattctagaagatgagtacagtactttggctgcatttttgtgcaagtacgtgagcagtcccttaatgcaatatgtgattgcgggcgttgcgcgagtggtgttgggacgcaacagaatgcaaacggcgtgaagttcaggcaatgtgctgatgaagttgagcgtcttgtcaaagttgattttgtcttcgttgacgccttttgtgtcaccaattcccggcgcgtcgattattcggactttgtgtccatctgaaatgcgaatgacgaccgacacatttcagaattcataaccattttgggacccaccttttgacgggatcacatatgcgtttggccatttggtctgcgattcgccagcttcaagacgctcctctttgctctcctcgcccagttggacttcaattctatgacggatctttttgctgtcataacgacccgtacaaaatcgggccgggatcacccagtcaatttcttttgcctgttttggatttaaataatgccaattataaatacagtactcaataaactcggtcacctcaagcgctttttgcaaagtaccatgtttcaggtaagcgatgagtgcattgatcagcatcgatttgcctatgcccgtctcacccagcagcaaaatgtttagcattcctttgttgttcaaccgatccaattccttgtccagcgatgctttagagccaaactgcttgaaatcggttccatgttttgccacatcggaacagcgaaaagaaaatgcgtccaccggcgtttttccacaagcgcaaaagaaatgtgtaatttgtgtatgtgggtaattagcttttatgcccccgatattagccaatcagcaaattactttttcgattttcacaaaagtcaatgtttggcaacaatcgtcgcacacccaaaaatgaagagtattcgggcattctccaccatagccttcgcagaagggacaggacaaaatacaggcatggatgtctttcggatcagcttcaggcactgctccaacttctgtccgtcgaatgttctcaatctgtaaaaatgtatttgtttttgccaatttgtttggtcgcgaatcgtttttgactcgatcaatttttattatcttgatccgtggaatcaaagacaaactgatggaaaattatagattttttaacttatttcatcgtaataacaatatttttatatcatttaagcatttagaaaattaaaaaaataaatttataaagtaattttttggttttttcgatccacacataatgatcatcccttaaaactttttatcagggttttcaaagttgatgatcaaattaaaccacccgttttttaattactaacactaataaaacccaaaaataaaaaacatttttttttaaatttaaaagtcgaaatttttgtgggggggaggtgaaacggcgggggaaagcggcagaggaaacggngggggggggggg

SEQ ID NO: 32554 - DNA, 1105 bp, Heterodera glycines
attttccttcgggcctcagaaaatggctatctctttttttgacaattttgtaccgatcaaagggaaaatggcttaattcaggccccaatgtgcgcctgaatcgctaattagcttggcactttcgaatattacatataaattatccctctcaaattttccttcgggcctcagaaaatggctatctctttttcggccaattttgtaccgatcaaagggaaaatggcttaattcaggcccaaatgtgcgcctgaatcgctaattagcttggcactttcgaatattacatataaattagccctctcaaattttccttcgggcctcagaaaatggctatctctttttcggccaattttgtaccgatcaaagggaaaatgatttaattccgggtccgaccccccccccccccaatgtgcgcctgaatcgctaattagcttggcactttcgaatattacatataaattagccctctcaaattttccttcgggcctcagaaaatggctatctctttttcggccaattttgtaccgatcaaagggaaaatggcttaattcaggccccaatgtgcgcctgaatcgctaattagcttggcactttcgaatattacatataaactagcgggtgcgtgaaccgtcggctatttagctgggataaagcgcttcgcgcttcttgagcttcgctacctagactgtgaataagcattgagtttttttagagatttggaatttattttaaaatcttaaggggttttaaggacgcttcacggtctcagaagggaattataaaaacggctgtttctctaacaaacttattttctatcaaattaaagttggaaatgtttgagcatattcaaaattttgtttctccgctgcttttagtgcttttgtcggtcggtggaatttcagcttcttctaattctccaagttcaagcgacattagcaatttttacactgatggtccgaagttgagcaggtcaaccatggccatgaaatgatctgtaaacaatttactgtaaaaaaataactttattagaagttgtttgggataatttataaaatttcttcaacctttcccaaagaattttaaattttgtttggccctttttcac

SEQ ID NO: 32555 - DNA, 1011 bp, Heterodera glycines
  unsure (1)..(1011): unsure at all n locations
cttcggcatcgcaatcattgggactcattctccgacattncaatcactgggactcaatctcaccagcattccaatcactggaacttaattctattcaattctccatcattccaattcccgggactcaatctcaccagcattccaatcactgggacttaattctattcaattctccatcattccaattcccgggactcaatctcaccagcattccaatcactgggactcaatccttcacttttcacggattcttcggcatcgcaatcaccgagactcagttctccgacattccaatcactgggactcaattctccggcattccaatcaccgggactcaatccttcactattccaaacaatggactcaattttacggattcatcggcatttcaatcacgggacttaattcagacctgttaagcataattttggaattttaaaaacgtatttcaattatgaaatacaatttgcgtagaaaatccttttcattataaatacttgttctctttcattttaataatttcttttacataaacatctacatacaaaaaaagaacaaataaattgaccttatatcgttaaaagtaacttctttttgtcaaaacaaacaataagtgcgataatccatccaattaaaccgtatccagtaaaagaggcataattgacatccgctttaattacaaaaacaaaaaaactccatttcaaagtcaaaacaatttctcaaaccaaaactttttcaatacaataccaaaactaattgtaagatcatttccattgactttgcatatacaaaaacaattctttttctttcttttttacaaaaattaagagcattcatttccatatgcactttgctaatataacaaaatacttttctcttaacaaatgcaatagaaagcaatcatttctattacattattattaatataaaaactattttgtcattaaaaaagaaaaacaaaaaagtagacatttatttaaaattgtgctttttgcaaaaactgacaaaaca

SEQ ID NO: 32556 - DNA, 1088 bp, Heterodera glycines
aaaattttgaaatccattgtttccccctcccttctccccaggggttttattttgaaaagttttttttccccccaaaaaacttttcaaacacccttttttcccacgggaattttatttttttgaatttcgaaccgtttgaatagattaaatagaaaaaatgaaaatttgaaatcagtttccccctcccttctcccaggggtattatttgtaaagtcttttttccccaataacttttcaaaccacatttttggcgccgtgaatgttattttatcggatttctgacccgttttgagtagattagactagaaaaaattgaaaattttgaaatcatgtttcccactcccttctcccaggggtattattttgtaaagtcttttttcccccaataaacttttcaaaccccatttttcgcaccgtgaatgttatttttattgaattctgaaccgttttgagtagattagactagaaaaaattgaaaattttgaaatcatgtttcccactcccttctcccaggggtattattttgtaaagtctttttttccccaataaacttgtcataccccatttttcgcaccgtgaatgttatttttattgaattctgaaccgttttgagtagattagactagaaaaaattgaaaattttgaaatcatgtttcccactcccttctcccaggggtattattttgtaaagtctttttttccccaataaacttttcaaaccccatttttcgcaccgtgaatgttatttttattgaattctgaaccggtttgagtagattagactagaaaaaattgaaaattttgaaatcatgtttcccactcccttctcccaggggtattattttgtaaagtctttttttccccaataaacttttcaaaccccatttttcgcaccgtgaatgttatttttattgaattctgaaccgttttgagtagattagactagaaaaaattgaaaattttgaaatcatgtttcccactcccttctcccaggggtattattttgtaaagtcttttttcccccaataaacttgtcaaaccccatttatcgcaccgtgaatgttatttttattgaattctgaaccgtt

SEQ ID NO: 32557 - DNA, 972 bp, Heterodera glycines
  unsure (1)..(972): unsure at all n locations
aaaaaatatttcatacccaaaagttttttacacccacatattgccaaatataatttctgcaggatggaaagccatccattgcctgccggttctcggcacagcaaagcaataatagggtgtttgactcacttcaaaaaataattccttacacaaaagttttttacaaccacttattgccaatttaatttcttgcagatttaaagccatccattgcctgccggttctcggcacagcaaagcactaatagggtgtttgactcacttcaaaaaataattcattacccaaaagttttttacaaccacttattgccaatataatttcttgcagatttaaagctatccattgcctgccggttctcggcacagcaaagcactaatagggtgtttgactcacttcaaaaaataattccatacccaaaagttttttacaaccacatattgccaatctaatttcttgcagattgaaagccatccattgcctgccggttctcggcacagcaaagcactaatagggtgtttgactcacttcaaaaaataattcattacacaaaagttttttacaaccacttattgccaatctaatttcttgcagattgaaagccatccattgcctgccggttctcggcacagcaaagcactaatagggtgtttgactcacttcaaaaaataattcattacccaaaagttttttacaaccacttattgccaatctaatttcttgcagattgaaagccatccattgcctgccggttctcggcacagcaaagcactaatagggtgtttgactaacttcaaaaaataattcattacccaaaagttttttacaaccacttattgccaatctaatttcttgcagatttaaagctatccattgcctgccggttctcggcacagcaaagcactaatagggtgtttgactcacttcaaaaaataattccatacccanaaagttttttacaaccaccatattgcc

SEQ ID NO: 32558 - DNA, 1622 bp, Heterodera glycines
atttcatattaaaatttgttttgttttttttggtagatgaaatgttcgttatgcgttagttaaatttcatcatccccaaccaatacctgtatatatgtattataatttaatttctcaaaaattaacctgttgaaaaaacagtttgactgctttgacgcgcagacttctctcattgagaggaaccgaacttttcttttgtccagcagaacaatgattttttgcagattgttttgatgcggataaagaaaataactaagtaagggttttagcttttacattgctaacaaaaaaatatataaaatgattttatttgtaatgcataatgctaattaaaaaactattaacaacaacaaaaccaaataatccatttcatcacttccaaccatcgaagaaagaatccaaggcgttgcttacaaattaatggattgtaaccaacatgacaatgaaaatggaaaaatttattcgcaaggaataaatacatatgaagaaaataaacagccccagacagcgacgaggaaggaggaaagaagagagagtgataaaatcagttttactattaatataagcgtagcgaaaaacaagggtttcacataaaggtgcaaaagctaattttaatttaagcatttcaaattatcctttttttaagaaaaaaatgaaaaaattaagccccctacgggtctcgatcccgtgactttcagattaaaagtctgacgctctaccaactgagctaaggaggcacgctaagtggtttttttagtaacttaaataatttatttttttggtataatttgaacttaaaatttaaaaaatgagttttaaatgtaaaattaatgtatttatgtataacaaacaggaaataaatttattggggattaaacgaaaatcaatcacatctttaaattaccaaaataaatattttcaaaattaacaaatacagtaacattatggaattaattctttttttttgttataaaagtatcaataagtgtcctctattgtggtgagtgagcaaatgcattgaatgcacttcttaagtggatggaacttctcaaatgagcggcttggccattcatcagaacattctttcggttgttcgcatggcaacgtttaatgaagccaaagcgatgccgagcaaagtgatgccaaaaagggcattcattggcactttctgcgccgaattacacaactgatcaggacagcagcaaacatagccctaaaagttgcgaaacaaaataaactgatcagtattggtaattgctagtgctgctcgagaccaaaatttccgagactctcgagcagcaccgtaaattgcgctgaatgcttagaatggctcaccagactcggcacagtttggcaagaatcgattatccgataggtggagcaaattgaggaaaagcccgtcccatcacaatagcgcacctaaaccaatggaattgtgttgttgttttttgtcaaaatgctttttattaccgtatccagcccaagtgtctgcttgatacagtaaaggctgggacattcgacgatggaaaattggttgcccgaataacactggatggcgtcggtggaggggaagaatccgatcagcaaaatgagcaccaaaagcccaagtgcaattcgaagcg

SEQ ID NO: 32559 - DNA, 1582 bp, Heterodera glycines
  unsure (1)..(1582): unsure at all n locations
gagccaattttaaaaatttaaattcattttttttatccttttttcccttggttnttatccaaaattttctattgtcgatttntaaattttatntaaattatctaaatatatgtatagatatgcttatcgtgccctgcctntagttattcatacaaaaatattttaagcaaaantacattgannggacgaaganaaatgaagcgagctttgaggaaaatgtgagccatttcgncattcaaatgncatgnatgagcaaaaaggagggatttactgaaataagncacgnnncaggaatntgggaattcaacaaattttntaaaaatagatttgtantagaaaatgtgatttgaacacttttaaaataggtttagacgggtccgggtatttggacaaaaacagggtccgggtattgccggatccagaaaagccgagtccgagtccatgtttttaaactgggtccggttgaaaaaatttcttattaaaaaaacataattaagtttttatatttcggaagatggtctcagggatggtccaaagattttgtcttggagagggtaccgcggcgaccttttttttattgctttttaaaccctttttcgcggctcgcttttttcaaatgaacttcgtggaaatggggggtgggggttcggtccgctgttaattaaattaacaaattttcaaaatttcagctgggtgtgcaacgacatttggatgtacattttccccctttttgaccgtcctcaactcggcctcaaattggcacggatttcgccccgtttcaatcacatccacttttcaggtacgttgatcacttgctgatcacttttctccgttccaataaacatatttgggacagcaggggcatcaaatttgccttgcgcacgtccgccgcggtcgggccaatttgggacattgtggcgcagcaaatttggcccatttgtgcggcaaatattcgtcatttggatttttcaagtgatcatttgaacaaattgcgtcgcatcatttcgccaacaattctgactgatctcgatcagttgaattcaatcaattccggtcgtttggtgcccgacgtaatcgctgatgatgggccatatgcaactgctgagcaagcgttgtccaaatggttgcacacgccgaccatcagcgggcaaccgaagcgattgtgttgccgattcactagtggttttgattcagaagcaaaagaatggatcaacgatttcaaggaggtcagtgcagatcgccccacatttcggttggagtcaaatgggcgccaaactgtttgggggctataactccgttcataatttatcgaattgaataattttaatatcattagatagccctaagtgttctatatttgcatacaaaaatttcgaaaaattagttaagcttcaaaaaaattacggtatagaaaaccagttttttgaactttttggtcctcaaaaattttcggactttcgtagacaaatggagaacattatttactggctatcggtgatattaaaattattcaatttcggcaactatgaaaggagttattccgcaaaaaccggactgacgcccatctggtcgactcccattc

SEQ ID NO: 32560 - DNA, 1519 bp, Heterodera glycines
  unsure (1)..(1519): unsure at all n locations
gcggtaatggaaaaaattttgaagaggctatgcggaacggagtagcatcggggttacgagatagaaaattgtcctaaaaagagatagccatttttctgagaattaattctcaatttccgcagctcttgcggtaatggaaaaactttgaagagtctctgtggatcggattagcatcggggttaggagatagaaaattgtcctaaaaagagatagccatttttgtgagaattaattcacaatttccgcaactcttgcggtaatggaaaaaattctggcgaaggctccaccacgaggccgcgaagcggccgagtgagtaccttcggtgcaggaaaattattaaggaagagagttcattatttatttgttttttgcataattaattcataaatatttttttcagaaactgctctgaaacgcaccaaattttatttgcaagttattttaggcactcagatgctttcactatcaaaaagggagatgaataaaaaatctaaaaatttttaattgctttttaaatatgcgaaaaattttaggcttaactttttttttataaactggtcagaagcgaaccagattttgcgagagcatcaaaaagacaaggaaaagcactgctatgatgctaactccagtaattctgaatttaaaattttttattaatttttaaagcttcactattttatttttttagcaaaatcaattcataaatattttttcagaaactgctctgaaacgcaccaaattttatntacaagttattttaggcactcagatgctttcaatatcaaaaagggagatgaataaaaaatctaaaaatttttaatactttaattctgcgttggatttttgctccccataattgtttgagtaccccaaacggacacttgaaaaaatcgatttttttgttttcggggcagtccccccgaaccgatgcgcccagatttatggggagaccgaatccttcgggaatagcttccctatttaggcttatattttaaaaagtttcatcgaacctagcgcactaaaatcgataaaatctctccaaatgttgcaggccttctccattgtaaaggactaacttaacttgaaaaaatgccaacgcttgttgtttttaaaatttttcgaaattctgactttttcattaattatttattttttgcaaaattaattcttaaatattttttcagaagggttctgaaacgcaccaaattttatttacatgttagtttaggcactctgatgctttttctatcaaaaagggagatgaataaaatttttaaaaatttttaattcctttttaaacaggccaaaaagtttaggcttaactttttattctggaattgatcagaaccgcaatcaagctttgcagggatactgaaaggtagagaaataacctattttaaatattatctagtcagttcatttaaataataatagccaaaaaattttctttgggttttaggggcagtgaattaagagaaaatgcgccctagatttatggggagacaagaatccttacggg

SEQ ID NO: 32561 - DNA, 1065 bp, Heterodera glycines
actagtaaggtttgggtccacatttttggtcaaaatttttttaaatttttttttctcttttattgtcagaattgcttttagattaatggaaaagcttaaaaatttcactcttaacgatttattcaaagtattggctcttcaagacaaagaatttggcactcacagatcacttttttccacatacatttctgattttttgtggcgtaagcaatttgaaggaccggatattttttataaatcgagggctcaaatcactgaattgtacccaataaacatgtgggacaagggggataaatgggggacaaccaatggggaatggcacgggagcagaggagggttaaatgggggacaaccaatggggaatggcacgggagcagaggagggttaaatgggggacaaccaatggggaatggcacgggagcagaggagggttaaatgggggacaaccaatggggaatggcacgggaacagaggagggttaaatgggggacaaggggaatggcacgggagcagaggagggttaaatgggggacaaccaatggggaatggcacgggagcagaggagggttaaatgggggacaaccaatggggaatggcacgggagcagaggagggttaaatgggggacaaccaatggggaatggcacgggaacagaggagggttaaatgggggacaaggggaatggcacgggagcagagggggttaaatgggggacaagggggttaaatgggggacaaccaatggggaatggcacgggagcagaggagggttaaatgggggacaagggggttaaatgggggacaaccaatggggaatggcacgggagcagaggagggttaaatgggggacaaccaatggggaatggcacgggagcagaggagggttaaatgggggacaaccaatggggaatggcacgggaacagaggagggttaaatgggggacaaccaatggggaatggcacgggaacagaggagggttaaatgtgggacaaggggaatggcacgggagcagaggagggttaatgggggacaacaatggggaatggcacgggagcagaggagggt

SEQ ID NO: 32562 - DNA, 1287 bp, Heterodera glycines
tttttgataaatggaacaatcaaaatcgcaagttatttcattttttctcaaaaaacaaaacaaaatttgttaaagaattgtccactgacggattgccccggaccccaaccacgggtcgggactttaggctcggggttttgcaagcatcgggatcggggataaccccgaaaatggctaaaaactcaagatccaaacccaaacaaacaaaaaattcaagagtctcggtattgagcaaccctcaaacattcatacatattaatacaaactaaattcagtgctaatataaaacggtagcacttagtacgaactaaaatcgccctgctggcttgataaaatcgaaatttggaacgagtcaaattcttccgctgataattcattaattagtgattgaattcctgctattggagatttatctgttttatcccacatagcatccgcccgcccaatcgattgaaacgtgtgccgctggcctacttcttccacacactaatcgtcattcatcgtcaccacaaactttttggatcccagccccccccccccctccacttgcagcatgtggctaatatgtgtacggaaaacaactgtctctcctcattttcttcgcttaatgtctccatcaatttcagtcagaccaccccccccccccgcgcaacgggagccggaaaattcgacactggaaaatccgacaccggtggaaaatccgacacaagcagtaaatccgacattggaaaatccgacacaagcagaaaatccgacattggaaaatccgacacaagcagaaaatccgacattggaaaatccgacacaagcagaaaatccgacattggaaaatccgacacaagcagaaaatccgacattggaaaaaccgaccccaactttaaattttaaaaataatttttgattgtttgagttagtaaatatttaaaatacatataattaaaataaatatttttattgctataaatagatttaaggtaggcatataataatcatattatttcaatgcccttttttgatcatctcaaaaaatttgtaaacaatccggcaaatggaatcagaggaaagggcatgaagcataagaaagtgtcgtggtgcaagacatgaatctcatcacagagatttatgcgactcgcaacaatcgacaacccttttattatttgccatcaatatcccatcgaagggcagaatcaattaatttttttaaatccaattcgaaaacttgataaacatagccagatattaactcaataatcaaaaaatattttttaaatttaaagttggtgtcgt

SEQ ID NO: 32563 - DNA, 1614 bp, Heterodera glycines
ttttcactggggactcagtagtccaattgggctctggtgcccccccgctcgacttcattccctgattttttgacctagctcgtcccgagctttcgaatgataccaaatttgtcaggattcgatcgttaaaaaaagttataatgccaaatctctcaattttcgagttttgaaccggttcaaaaaccggtttatacttgtcggatcaacttcacccacccctagatcgatctgtctcatcgagagctatcgatttgtaccatattcgtcgagattggtcctcgagaaaaaaacatcgtataagtcaagagaaccaattgcaaaaaagaaagaaagctacctgtacaatgctcattaacagtgaagaatatttctccgcttcagataataacaatttctgtgcctggtcactaagccctggcgaaactaaaaatttaattgaatttgtcattaattatataaattttcttgtagaaattttttataaaaaacttctaacccatatgggagtaaatgattgctcgaataagtacaaattcttcggtgctcagttttaaacggcggaatggttctatggctttgcacaacaatgtgtcacccattcccatggcactgcaattaaatgttatttcatttatttataattttatatttgggtttttcaaatagtttgacttataatgcaccaaaatattttaaataaagtcctaagatgggaggattagcctcacccacctgccgataggcgctgttgaaaaaatattgaaaataaattaatttaaaaaatgttcataaattgataaatttggtaattttgtttcaattttataaaatgaagttttagtggttttttcttcactcataataaaacggatggagataaaaagtaattttggccaaaaagaacagggatttcagtcaagcgattttataattttatccgggaagaatggttttaaaaaatgttttaagaaccaaattttttagaaaatacaaaaaattaaattgattgctttattaaagcaaaatgcttccgcctatccgataccatttatacttacactggatcttcattgtaatatgtatttgcaaagatatttatggtaagcaccccagaaggattacaaacgatgtcacaattttgttggactgagtagaaatttttgaacagtgaatacaatggcatcgcaatattactgcacagggcgatctttgaatggaaattaaaattgaataaatttttaatttttataaatatttcttaccttatcattggcgtcaagcagcccaaagaaaggaaaagttttgccaatttcgaatacaaataacaaatctctgatcatgggcgctggctttgtaaaaaaaggcccaaattgacgcactttttcaaaaaatattgctttaggcgcgtgcggcaattttgtctttaatttataaaatagtacacattttttgataattttaactcaccgaaaatttatctgccaattcgagcaaatttaatttccgtgcaaaaattgcctcaaatgaatcgcattgtttataaaaaaattccggaatcggtgtctctgagaagcgtattcggcgcactttttgctcaatatccagcaaatgttt

SEQ ID NO: 32564 - DNA, 1257 bp, Heterodera glycines
ttttgtttttatcactcttttcttcttcctccaaatgtctctttggtagctttcgttttctgctaatgaaattgtaatgttttcggcgcggagggtccgcacagttcggcacggggcaaaattcgcagaacggctcgtttgacgctcagcgaaattttgcaatcgaaataaatactaaaaattaaaaataattttaaatttttttggtttcaataaatttgaattcaaatggaaaatctcatttttataatatatataattcatttcttattttgaaatgtcaaatattttttaaaataataaaaagttaattaaaatgctttgaaaaaaatatttttaatttctgttacagagattttcggcttcaaccagatccataattattatttaataccaaatgatcaaaaatttggcatttttaccagtgtaaaagaataactcactcaattttcaaatttattgaaaaatatttttcaaaatatggtggcatttttgccagcaaaaatcctagtcccaacaaattattctccatacttttgtctgtctgcatatttgtagacgtgcgcttctttgccgaccatcaaatccgagacgtactccaaattttgtaacaaatatttgtcacgggcgcagctaacatatattttttaatttaaaataaatttaatttaaaataaacatttaaatttatttattccattgaaaaataatcaaaattgtttattaaacttaaaataatttattttatttttttaattccccccccccactttcccccaccctttttcgtcgattaattgcactttgtctccatttccatcatcggcaaagcatgaatgctgtgagagcaactcatttttggataattaaatgaatgatttgtttaattatttttaccacagtcatgcaaaattggttgggcccattcgcttcgcaagtccatttgtgataaatcgaaaatgacaatttaaataggatttaccaaaacatatttttttaaattgttttaccatttggccaaccgttgcgtaataaacgggcggaccgtgagggccttcgcttaacacctgcaaaatttgacaatgagtattcaagatgagatttttatgtaagaataacttaaaaaacaaatttctttttttgacagtcataagtagggagtgtaattatatggatataaaatcgcgaaatatggccataaaatatggaccaaaaatacgcgaaatatggacataaaatggcaaaaatctcaaaata

SEQ ID NO: 32565 - DNA, 1803 bp, Heterodera glycines
tttcatgaccattactaatcctattaaaaataaatagtttacaattttaaatggaaattctcttttgagcagtaagttttttaatgaaattaaaaaaattcgatcatttcctttttaaaaatagttgaaaatttttaaatagaaaatgcttaaaataatttttgaaagaaattcaggaaaataatttttatcttttaattgtatctaaatgatgtattcataaacatagaccatgactgattgtgaacaaataattattttcattttctgttccatatggagacacttcaattggttctggctatgcttttagcatttattttgcgcacctttgcgaattgaatgtgtgcaattattgaacataattataaaaatcaaatagataaatatgcataacaaaataataacattttgtgaatttcaggtttattttttttcaaaataatgtctaaatttttatttttgttcctttccaaatctaacaaatttggtaatttgtttacatgaactaataaaaaatgagtgaaaatttctctgtcatttagaacccattcattagaactcgaaaaattatatattaaatattctttaattattagtatctaatttcgtaatcaaaatgagggattaaaaataaaaatttgctttcggcggagacgaaaatgccaactgaggaggagtaggataattgtcacctagcaatttttgagagcatgaaattaaattacaaaaccaaaaatgagagaatttgctatttagtttttgcaaatttgttcgttttaatgcttttacaaagtaaatatttttaaatgaggccttactcttaatgccgattttctaacagtcttttgggtgaaaaaattggaattttgaatgagagagtgttacaaaatagaaaatttctttcctccctcgcggacggtttttgatgagatatttaaaaatgaataaaatagaaaatagattttaagaaaaaaaaattgatgaatttgcaaggataatcccagcttttctttagtttttccctgattgcacttggccaaagtttttcaatttaattcacacaaattaattgaaaaaactttgccgggtgaactaattataaaataaatataaaatttgatttcattaattttcgctttttaatttggctgaaccatttaatataataattcgtttttataaaattttatttttggtgtaacgaacagagaaaaaataattttatatttttattttataattgtaaatgggataaaattaaatactactgaaaagtgtgtccctagattaaaggttaaaatattttttgaatttttgactttttttttcctttttgtaacagagcgggcggaattcacatggaaattggaacaataaatgacaataaaaaaaatttagaaaaatgaaaatttattgtccatcttaatttaaatggtccttccgattttcaagaattcagcattttttttgtcacttaaagaaagattttctttcttcattttataataaatattcattttggctgttttttcttcatttaaataagcatttcctttaaaaaatagaaaaatttacattaataaattacttctttttttcgtttcaatgtaataatttttaaatttctttttgaaaataaaaatgcaaaaaaggtatattttgaaaaatgcatcgccaataaacatatagctttttttaaatgatttctcagaatatcgtcctccttctggtgtcggtccttcccattcgcatactgtacatatttgttttcggtagcgacatcgacgacggcccaattgc

SEQ ID NO: 32566 - DNA, 1408 bp, Heterodera glycines
cgattaaaatggtcagtaattaattaccccccccctccccgccggtgataattgctaattgtgccggctcttttccaaggtgattatccccgattcgatcatttacgattcgcagcttctctgcgactttctgcgccaaaatcgggtcacccaaatgcttttcaccccatctctactcgaaatggtcggccgcccgtttcagtccctccgtttgagtcccatccgttcactcctttttaggtgttggacacccaaaatgagcaaatcctagccaatgctttccagcacatgcggttggcattagttcgttccgcttttgcattttctgccattttcgtcagattggtccatctctgtggcgaggtggtcacttgcgcattgctcgaccgtttcttccgccattttccccgcgttcactgtgccaatctctactcaatttccgagacccatggcaaattaattccaaaatgtccctccaattctctctctctctctcagacgtggccgtctccaatctcaacgaattccatcgccgacatgaaaagcgtcaatttgcgccggtcggaaaggtttggcgccgcttgcaaacggaccaatgtcccattttgaaggtgatcgacggagtaaaagtgctcattttggatggacagacaatgaaacgggtgccaatcggagtcccaggcgaagtaaacggaggaaattgcaaggaaagcaaagaattgacagatttacgtcgcgggtccgactttggcaaggggttatatcaaccgccccgagctgaacagagaccgttttgtggaagtgccggccgaactgcgcaaagaagtgggcgaagagcgaatgtaccggacgggcgactggggctatttgatgccgaactcagtgctggaaatatgcggacgctgtgacacaatggtggggacgcaacaaacactcgatcaacagcagattgtccaatgcgcatttgttgttgacaggtgcgcattcgggggtacagtgtcgaactgcaggtactgtaacagggcaagcggacagcagaatcgggggcaaagtgaggccaatgggccggggtggcatttgccatttgccgtgtctttgtgttatggccacggtgtctctctccccctgccccttcggccgtttgtactttttgccttcgaaatggccaactcccccaggcaatcgagtccactttgctcgatatgtccgctgtccgttcgtgcgccgtcatttccattggagccgaaggcgaagacaaacaggtggccggggaggggcagaagaaaagggcatttgccttcttccagttggccgcttacattgtgttgcgcgagcgaagtgtgaacagaaaacagttgcgggcgcagcagaggcgcattttgcccttttatatgatgccgccaattct

SEQ ID NO: 32567 - DNA, 2133 bp, Heterodera glycines
tgtaagcgagaataacagccgcgggagccatgagttattatgacccctccgggctctcttatttactcaatctataattgaactaaatatttttggcatacagcaaatattcgttaaataattttaaaaagaaaatattcaattaatgcaaattagttcaaatgtcgaaaaaatttaaatatataatattttatttcaataataaaattagagaatatgttttatcaataatataccatttttactgttgattgattaaaaataaaatgacaaaaaacaaaaaaaaactacaaaaaatttttaaaaaatgacgaatgcacaatgataaataatttgtcgctttttaatttagtttttttgtttgaaatttaatgcttaatcaagtttttattcagtcaaataataccatatttttttaattttgacacttatgatatttaaatgcatttacattcaatataattaatttaaatgaaaaacaaatactgactcataaataaaaaaaataatttatttaaattaaatttgttcattaataaaagaacaattgtttaaaaattttaattaattatagtaaaaaattacgaaaacttcaatgaaatcaaagtaaaaatttaaaaacctataatttttacctgattaataaaattctaaataaagttgttagaaaatagacaactttacacacatgaaaaattacctagaaatttaaataaatttagatatattagcctataaaataatattcattcaatctaaactgaaataaaatatttttctcttcatctaatttggacttccccatctagccgtgagattaaagagcaaaaagagataattaatattcaataaactaatttgactattaattaaataaaagaaaataatgaaataaataattattcaattaatcatatatttattaataatcattaaagcaaaccattaattcttttgatattttgtatttaaattaaaactattattactaaaaaaatattaaaataattgctataaagtaaaaataaatgatttaataaaataaaatagagacacttgaagagaataaattttgcagaaaattttcaatttttgtaaattacttttacgaaaaaaaatctgatcggaatttgtatttcatttgagaccggaaacaaattaatttatttttattgaaagtcgatataaaagaaagcaaaataattaaacataaatgtaaaaaggcaaaagaattttgaatttatgacattctaacaactacgaaatgaacagcaaatgagcatctacaaacatccgaatcttatgtacataaaattcccatccgtaaatatcagtttttaggtaactttttgaatagtttatctccgctgatcaattaatcataaatgttgtaaaaagcatgcaaattgtcggcattcaaatgcaaaaaaaataataatactgaatttgggaaaggcatttcaaaaaactttggaggcatttatgcttttaaaattaaaattttcgtaaaaaataatccaatcaaaaatctctttcaaattgtcaattcggaattgatcaagatgaaaacgtcgatcagcggaatttccacgcaattgaccaaatacttctcacagcgcttcttcagccattccacctggaaaaagttgacaaaaagttgaccaatttgaacagcaacagttgagaaaattaattcacttgttaaaactctatctttatagtatataaaaataatatatgtatatatatatatatatataattttaattattagggtggaaacaaaaatttaaaaatataataatgtaatttaaagaataaaatcctaaattttttattattgcttagaaatgctttagcgcttcttggccttttatgaaaatagtttaattgtctattatttttaaaattttatgttttgataattttctagaattggctaaatattctctttttggaaaaccgaaaatcaaactgaataaaactttattttcaagattaaaaaaaactaaatgaaataaataaaataaaaaattaatataatatatttcatttatatccattatatttgtttttacaattaaaaattacgaataaaaaacaatcaaaaattatatattttactgaaaaagt

SEQ ID NO: 32568 - DNA, 1053 bp, Heterodera glycines
ccgtcctgaggccgcgatgaattgctaaattacatcactttctagagacgcggcgaagccgcgtccctgagcgcgaagcgctttccccacagcaacagaactcaattgaaatacaacaaagccaactggtcaccctagtttagatataactaaagaaacagatgaactcattgctaaaacaaaaatctcgggaaccgctggcgggagggactcgggatttcgaccttgggggcaacttttgacggcgcatccaggaaaactataggcattccggtccgagggccaactgagcgccagcggcgctgaaacggcttttttaaatttttttttgctgtttttgggattcaaaaattttttaaagtcctaaatgaaaaatcggcctcgataggaaatcaagttgggaggtttggcacatctttttgctcttcaccgacctcgtagggcctaccagtttttccgaaaaactgcgcaaaaattgcatacttttttggccatttcagcgccggccgaataactcgccggggtttgaccggaggaggtcggtgtaagcggcttttttgtagagctcgacgagctctatccaaccatgtttttagatttcagaaattttcagaaattttcgagctaggccccctcgaaaattttccgtttttgaattttattattttttacagatttttccggggaaaacggagaccactttcaagcaaccgtttttcatgctctatcgattggtgtcattttcagaaaaatttttcaaaaattttttggaaatagaaaatttttggttactaggcctcaatttcagttctggcgcaataactcgtcaggagttgattttatcaaaaaatcgtctaagagcttttttgtagagaattttaagcccaatctaatgtgctttatctcatgtttttatcttgaatttaaaaaaagttataaaataaaaatgaattttgaaattaaaaaccacaggggggacccctttggttctgcatttcatgaaaaatttttttgctcctaaattagccaaaatgaatttttatggcctaattt

SEQ ID NO: 32569 - DNA, 1555 bp, Heterodera glycines
ttcatcagtttttggtttaaaaatatatttgaacacttttttatactttgaatgactttttttattaatacagaattttttgaaatttccaaaaatccgcaatcctgcgcaggatcctgcaaattttaaatgcgggatttgcaggattaatcctgccggatcctgtcctgtaaaaaaatttgaattccaatcctgcaacaggatccgcaaatttgaaatttccggtctctatttttaatgaacaaattaatatttaaattttgccccgttaaaaggataaaataaatgtaataaaattggttttcgcacgaaatcagtgaccctctaaacagaagaagatttaaaattgaataaattttctaacaaaattattaaaaatccaaaaaaaaaaaattcatattgatggttaacgcccttatcaaaaaaaaaaatctttttttattgtatacctatttaaattctgcattcctttttcttttcattcttttttcaaattgacagattgcctttttcttttttctcctcctcttttttccatggcttctaacaataattctctgctgctgttcattcttctcatcgtcgcatcgcttctcaacgatggcttctgtcagcaacaaaacaacgacagcagcagcgggtgctgtgattttgcttattttcagcagcaatttttgaaatccaacaattaaatttaatggccctcccatttaaaaaacgattttacataaattccgcggcatggataaggtgggaactttttgttcgaattccggtccggggtgaaaccctcggaaaactgatttctaagagagagggggtcagtcactgctgaacaaaattggtcacatttctaatatcccctacatttttgtccttttttgggtatcaaaataaaaaatgttgtcgtattggaaatacgaccccgaattttcattaaaattccttaatttcccccctcattttcagtcaaattgagccggtgcaggaccatgtcatgaaatcttctatgttcgttttgcgctgttttgtttcttcccattttcatgatgaattccttaattttccccctcattttcagtcaaagtgagccggaggaggacagtgtcaactattttatgttcgttttctgctattttttcttcccgttcattcaacgcacacttagcttttctcatattattcgataaccacgttagttgaaaatttcaaaaaattgaattcaattttaaaaaaagttataaaataggaaattgcaaaaaaaaaaatcgtttttcggcaataattttttgataaatttatgaattttttggaattttgcaggctaataaagaaaactcaagtggctaccgaatgacagcaagactgtttgaaaacgttgtcgcttctgagaaaagtcataaagttgcggtcctgttacctacaatagggccgcatacagtaacccccaccaccacaaacacacacatacagtaattccccattcatttcccaggctgcttttctggtcactaatggtgccattttgcatattttcttgtgtgcctgctgctgc

SEQ ID NO: 32570 - DNA, 1344 bp, Heterodera glycines
  unsure (1)..(1344): unsure at all n locations
gtattttttcacttttattgcatttttcttatgaaaatttgccaatgaccgaaatatgctttaaaaacgcaaaaaatgctttatagccctaatcataaggtacagcggggaaaattttttttattggaaattattttctaacgaatctcttcaaaaataaaatgagtattgggggttttcgagggcgctaatcacgaatccgaactgggatttgcccaattccgaatcccggacccgaataaaaatgaaatatttttccagggatgaatttttctgaggtaaaagctttgaatttatttaacaactatttattttggtgtaaaaccagtgttcccaactctgcttatttgtaagcattttgctgatttctaggggtcaaagatgatttttttgttagattctgatttgctgctttttgagaaaatttgctgatttttggaaaaaaatcagcaaaaatatccgtttttatgtaaaattgctaccaaaaagtaccaaattttcaaatttagggcgatatgttgatttttttgtgtgtgactttttattccctagaaattttatggcttcattgtttattaactaattattttctcgattttaagtacatttatgactgtaatgcgcaaaattttcaaaatttgctgatttatgctgatttttggaacaaatctcaaaatggctatttttaggctatcggtccaccggtccctaaaattccactgaaattttcaaaatttgactaataaattcccaattttcagtgaaaatctgtttaaaaaggttcaacatttccaattttttccacggcggcgtctatcggcaccgccggaaccacgccccatgtttccaaaaggttttttttggataaatcgcgccgcaaaaacctttttattatgttttatggaataaaatttaccaaaatgctgatttcaaagcatcaaaatttatgccttttttgtggtgaagcaattaaatcggtaaaattgctaattaaaaataattaagaaaaaaataataattaggtggaatttgttagatccatcgtcaacacaaaaagcagcacaaacacgagtcaatgagttgacaaggattaacgaaattcgacagccacaattattccaaaaaaataataaataaatgaaataaaaaatgattgcagaattattaaaaattanattcgcttgttttttacaaaatatttctaattcgtgcaatatgccttanacaaatttcatttttcatggaaaagtcttgttaatgaaattattaatcacttccccataattaaataaacataaaatcttttttgtttttnatattanagcaaaaaaaaaagaataaaaa

SEQ ID NO: 32571 - DNA, 1193 bp, Heterodera glycines
tgtgtacttttggccataactttgttcttaattgatcctttttttggaattatgcaaaataatagagcatcagaagggctctcgaatgataccaacaatgttagatttggtggaaaaagaaaaaagttatagtccaaaaactgggctggcgccgaaacgagcggcgccgaaacgaggtggacccagtcacacccctggtacataagttatatataaaaaacccgaaaatatgtaaataaagtcccaacttttggaatccagggaaaaatacgtattacataaaatagatagccataattaatatatttcatccgaaaatggttgttaacagttacgatggcaaatctacgaaaactatattaccataaaatggttactttgtcgtcttcccccccccaacctcaactcgttacggtatctttggcttaccgtacctcgaacactcgctgttgctccgcctcactttcgcacttttccgctctccaattcgcaattgcctccgttttgatcatttgcgccccattcgcgtgcaattccaccgccatttccatgtaattgacgaatctttgtacaatgcaaaatgttttggcctgcgttttgggcgttctaagtccaacaaaagcgttcaaacggatttttcctatcgctttttcgagtgccaaaagaatcggctgattgtgcccaatgcgtgggatattgtcagcaacaattgtcctcagtttttgcaaaaggaagggcaaagcgagtcgaactccggcaaaaaatgccgaaacggagccactcttttgttgcagaaaatgattgtagcggatcacctcagtggtactcaccggatcatctgaattttggtaaaataaataaaagccttcgagttttatgtgtattttttgcatttatggctcaatacaatcaatatttaacaattaatccactaaacaaatagagttttaaatattttatgaaaccgagtctttttggcaaagtgattaatccaactgacggatcgattaataattaattagcccaccaaatttcaacacttccgggtggcgttcctccaaaagtagcaacaaagcttccccaacgaagtgtcttcaaaactatcttcacatcttgcatttccgttggcacgcttaaagcgcaaaaaaagcttaaaagtatgccaaatcgccgaatgatgcgccaacacacac

SEQ ID NO: 32572 - DNA, 1032 bp, Heterodera glycines
tgctattctatttctaatctgttctatgcgttgttgtctctctaacacattctcttcagatctttgactgctcattctatttctatttcgttctaaacgcaaagccctttgactttgtgcttcattttctcttctcaatctttcgcgttctctttttcttttcaaatactcatctcttctcatttcttcaaattgactatcactcacacgtgacggtcctgcaacgccaatatctgaattcagagatgcctggctggcaacattcaaaactcttgctcgtttagcataattatgttcagacaaaacatgacaatcaatttcttgttctaaaatctcattttcatcttcaataacaaaaacattttcatttcctaataactcatcattttcaactccattactaaaatcgctctgaaaaacacggtccaaattcatcgctcaaacaataaaggcgcctttaatctgtataatagttaattactaatatcaatttataaaagcaaaggtaaaatattgcattaaacaaatagtgacaaaaaagttaaagtttatcaatttaaaattaactgatgaataatggaaatgatgtgacaaataaataatcaaaccgacctgttcagcgtaatttgaaacctcattattaaacttgcctcaattatgaaatacaatttgaagaaaataatttcattacaactacatattctcttacaatgtcacaaatctattacaatacaaaacaaaaaaaagcttttcacatccttttgtcagtcaatacaaacaactaagttgccttcaattttttataatgaataaaaatcgcaataacaaaatcagatataattcaaaaactcaacaaaccaaaaaattatcttttttctttctttttcagtttgtcaaaaactcaattttaaagcaatatacatacatattttctaaaaaaaaatgaacgtgagcgagtaaacgaaaaatttactctttttttactgttttaaaagaatacaattattggatattgactctttataataaaaa

SEQ ID NO: 32573 - DNA, 1258 bp, Heterodera glycines
aaaaaaggctacaaaaaatattatgacaatttggtccatacttttcttggtaaataattattaaggaaaatgtaagtaagcagcaagtcgccataaacattaaaaaaattaatttaatcctattaaaattgtaggtcattaaatttagaatttgagattgaataataataaaattaattaatgatcaccaataaaaatgaaaaatgaaatcaaaaagagaaaaaataaaggaaaagggcaggatactgtagcttatttaacttaatcggagatcatttaacataaaattgggtttaataagaatataattaattattatgtaacttgtttcgagtgaaagagctgctacacttattcgttagaaaaaaatttgtttgctcccttatgtacccatactaagtaatttatgccgttatcgatggtgaaatttgggtgacgaaaaggtactaaaatggcccttaagaaatgggccgtaaatgtccgggacgcaaaagtcgggccgtaaatgtcgggcgccgcaaatgtccgattttggcttgggacgaaaaattcaataaaaaattgggccgaaaatgtccgaaaatggcccttaagaaatgtgccgcaaaagtcacgccgcttatgtccgattttgtcttggaacgcaaaattcaataaaaaattgggccgaaaatgtccgaaattggcccttaagaaatgtgccgcaaatgtctgggacgcaaatgtggggtaaccaattgggaaataaaggaaagagagaggatacggtagatcaaccaattagtcattatcttattaaaataagaaatattacataaaagaaatgatgaaggatacggtaaattaacgcgatttgatctttgctttatgataaaagtaaaactatttagaagtacaaacaaaaaataataattaaaaatcgaattttggttttttaaaaaagtatttctttttgaaaaatggaataaaagggaaaaattactcatcgacttttcgtagggttcaaaattgactataatcctcgaaattgttttttataacaaaatcggcgctaattgtgctcatttttcagcacaaaaatcatcgattaagcaacgtcatattctaggcgttttcaagctcaatgcttcattaatttttctaataaaaatattttaaattttccaaaagcaaataatttattcaatatttttcggtaaatttacatcaattccaaaaatgcattttgcagttaaaaggtcaattttcgaaaaaaaat

SEQ ID NO: 32574 - DNA, 1374 bp, Heterodera glycines
tgctttcaacacacgacaagtgagcaataatgatctcaattaaaaaatttttttgtaatgctcaataaaatgccaatgatttcaagaaaaggatatgggataattaatcacttagttttttttaattaaaagcccgttttcagcgcgattgtctgaccgccttcgtccgtctggccatgatcatgccgttcaactgccagcccaccgctttgcgtgtgctcgtccaccgtttgctgtccccgctgctcaccccgccggcgtccaccaaagaggacacggccgccgctgctgctgctgctgcagcagtttccttgaccattggcgttgcaaaaagtaaaccaacggcactaccttcatcaccacgaccagcgcatcagcagccgccaaagtcaccgcttctcatccaattggaacacgcgctgagcaccgaagttggcatcatgcaaagcggcgcgtatttaatgttgtttttatgcttatgccaatgcacgtgtcagcaaagtgcccatccatttaaggaccctttaaaatgacggcacatttattttgccgattttcttaataacttttctccattttagatatgctcacattggcggttcgtttgtttgtctattttgttttttgactattttacccatctcattgttaggtggagttggtgctgtgcatcggttggacttgggtgttcggcaaccgcgtgctgcatggcattagcgaagcggagaccgtgtggaaagtggcggatggaagtgttgatgagctgtgagtaacacagcataattggagcaatttgtaaatttcttttagttatgtcatccgtttgactctgttggcacatatttttcaagttcgttgttttataatcggaattcaaattggtcgcagtacccttaacgaaaatatttccttccaaaaattcattttatattggcatttccttcagattgtcgaattacatgagcccgagtgcgaagtgttgaaaaaaactaccgccctccgtcgtccatcgtctgccactacttctcggtcttccgtcggcacaaagacagccacagcatcctaatgcctctcgattttgtttacactattgacgcgttcaaccgtctttttgcctctctatctcttctgtaaagtgaatcctccagtcgagtcggtgtaatatctctttttatatcagtatcaaaagataacatagctatgaattatttcacgggaaaaaaatgagctttaaggtggtttttcaactttgagtcaagtcttttttccgaccttttttgagcaaggttgggtggggagacttattcacgagaatgataaagcggatccggcggggtgttgtggtatatgaaaggcccatatatcggggtaaat

SEQ ID NO: 32575 - DNA, 994 bp, Heterodera glycines
aaaaaagagatagtgatttttctggattaggccggacaaataaaattaccagctattgaaatgcagtggcaagcacagcgagtcgcttatatgcacaccctttgacacgtaaaatattccaaaaaaagagatagtgattttttctggattaggccggagaaatataaattaccacctatatgaaatgcagtgggcaagcacagcgagtcgcttaaatgcacaccctttgacacgtaaaatattccaaaaaaagagatagtgattttttctggattaggccggagaaatataaattaccagctctatttgaaatgcagtgggcaagcacagcgagtcgcttaaatgcacaccctttgagacgtaaaatattccaaaaaaaaagagatagtgattttttctggattaggccggagaaataaaaattaccagctatttgaaatgcagtgggcaagcacagcgagtcgcttaaatgcacaccctttgacacgtaaaatattccaaaaaaagagatagtgattttttctggattaggccggagaaataaaaattaccagctatttgaaatgcagtgggcaagcacagcgagtcgcttaaatgcacaccctttgacacgtaaaatattccaaaaaaagagatagtgattttttctggattaggccggagaaataaaaattaccagctatttgaaatgcagtgggcaagcacagcgagtcgcttaaatgcacaccctttgacacgtaaaatattccaaaaaaagagatagtgattttttctggattaggccggagaaataaaaattaccagctatttgaaatgcagtgggcaagcacagcgagtcgcttaaatgcacaccctttgagacgtaaaatattccaaaaaaagagatagtgattttttctggattaggccggagaaataaaaattaccagctatttgaaatgcagtgggcaagcacagcgagtcgcttaaatgcacaccctttgacacgtaaaat

SEQ ID NO: 32576 - DNA, 1357 bp, Heterodera glycines
aagctaaaataaactaaaccaattaaaaagctttttaatttttaaattgaatttgcataaaaagcaatgaaaaggccaaaaaaaatagaaaatttacgtaatgaaagctaattaatttaattaattaatttgaacaatttatcaattgttatttacaacatatacataccaggaaagaaaataattctgaataatttatatatggaagagaaaggacgccgaggcggaagtgccggaacaagagatttaataaaaataaaaatagagacattctaaattataaaataaataaaaatatttaaatatgaagatttaatagaataagaataattttaaaagaaaaaagatttaaaataataagcgatataaaattataaaatgaaagtagaaaggaaaaataaaattaaaaaaagaattaagtggactaaaacatcaattatatttagaaaaatagaaaagaacatcaaaatttattaagcatatcctctgatttgttattattttaatttttatccaaaatttttttccaaaaaaataaccattaaaaattttttaatatatattttagtacatatttcgcggtttctcttacataaaaatggaatccctgtaaataaatatttaacaaaaaataacttcagacatcaattggaaaatataaaaataggaccaaatacaatagttaaaatcaaaaaaaaaattctaattaataagttaacacggaataaaataaataatggatagcaaaaatttatacaaaataaacaaataaagaattttattttaccactttaatacacataatttaaatattctttttcatttaaaatcaaataatagaaaaataattattaattaattaaggaaagaataataaaagaaaggaattcttaattttgaatgcaaaatatttaattaaataaacgaaacataaatgaaaagagtaacaataaaaaatgaaaatattaaattgaataatgaaaacttttattttaaaaatctttttttcatcttgttcaatttttgtaagaaataataatttattaatgaactaattaattttttcgtctttttgaaattttgtaacatataagaaataattgtgaaaaaaaaattgaggaaagatatttcttccgaaattattaccattaaattatagaggttcacaaaataaattatttaatattggaagaaaagcgaaatgttaaaaatggatatcttattttaattggtttcaatttattttttaatatttaataaacataatttataacggtacttgagctcaattaaagtgaagagttgttttataaaaataatagttttatattcaaaatgaaaaatgtcaataaggaag

SEQ ID NO: 32577 - DNA, 1638 bp, Heterodera glycines
ttttgaaaatttttgaaaattttttagaaatttcttgtgaaaaaataaaaaaactttttctttaaatgtaccccaaaaaaatagcaaaaataattttttaaatgttaaaaggtgattctaaacctatttaggtcattttctgccattttgtgccaatttaacactttacgaagatttatttccaaaaaataaccattaaaaaaaatttatttacatattttcgtacatattttggatttttatacatatttcgggattttttttacatatttatgtacatatttttaccaatttctgtacatatttttgacatccctaatgataattttctgtgtaaaccccaaggatttttggcgaagcttttcactaatatcttttaaacaaatttaaaatttttaaatcttggtaactatttttcgaaatttgttcgtctttagaaataattaattttttacttatataaaagatagtgttgctgattttctaatgatttccatcattttggactttaaaaatcagctcattctttctatgttgccgcggaaacgctgaattttccgcgttttgacttcttaacaattttcataaaaattccaaaaatttcataaaaatgccagccctcccccccggcggcgcaacaataattgccccatttttcgcccgcgtttttttggattttggcatatataaacaaacacacaatgttcatgccaatgagaattgtggagtactacaaaatctgggtaattaattgcggtcatccattcccaattaatgtcaattaacgaggacccaattttccatttttaggagtgcttgtgctttaatttgtaccattttaagcaccaattttaccacctgcaatcacttcaaatccttccacaaatgcgattgctgggctctgcttgtagtgccgtgccgtccaaccacctttttggatgctttccggtgcaggatttatgtaatctttatcctctggcgtttgttccaccaattttaaagttgcttctgacagatgacaaatttacacatgcacattcgaattgaactgctccaaagcgggcaaattgtttggcttgctcaatgggaccagaaaatgctgaaatcattcattaaatgagatgaatttgatactaaatttttttttttttgttgatatttttaatggaaaatatttatttttttttgggggaaaataattgttttatttgggcatattttgcaaaattcaattttaagagtcgtaattatcccatcaaaaaaaactgtctttttagccatggttttaggttggggcggcccgaaattttctgatcatgattcgagattagggacgagaaaaaggctgggattcgaatgacaaccctgttagttaaaaagtatttgaaaataattgaatgaaattattaggaatcaattcaaattcgctaacttacaacatgatgaccgttctcgcccaaaagattggcaaaacgcacactcagctcaaaattggtgtccaaaaagtttggcgcgatttgcaaaactttcaatgagctgacaacagcagttagaagtgaaagaacacaaatcaaaacaggaggacagaaaaaatttgtcatttttctcagctaaaagaaattcatttatttttaaata

SEQ ID NO: 32578 - DNA, 1730 bp, Heterodera glycines
  unsure (1)..(1730): unsure at all n locations
tgattgattgatcaaaaaccttttttgccattgttcagattttactctttttttgtttggtgctattaaattacacgtcaaaatggtgttttaacttttgtaatttgtccaaatctttaagtctttcagagtcgaaatctcggaaaattgtttgcggttctgtgatgtaactggctcatatttgcacttaaatcgcaaatttccaattttaaaattttgaaaaaattttatttttttggggcgacgtttcggccggcgacgttttgtggtgtatcctaccgagtcaggccgtagcaagaaaacacaaaatttcgtatgggaaatccgaagaccttgtttatcatttgcaaagatttgccatttttctttaaaagttttccattcgccccctgaaaatggacctgaaccaaacatttgcaataatttcaaaaaaatgccaacccaaactttatttctgtgcacttcgttttttctttactttcccttttacgtaattgtttattcaatagaaaatgttaaagatatgggcaatcatcaacaattggtgtcccgactaaaaaaaatgttaaaaatttgaggcatttattctaggcttaaaaaatgtgttgacaacgaatataaactctcagattttgaaaaatcctatcgaaaaatcattaattttttcatcaattatcatgaaaaataaactgcagccaaccgggcttttcttaaaattttggaaaaaatcaagcagttgatgaaaaatagataaaccaatgattttcaatcggcacattttttaagcctaaaaaagtgctgccaaatttttaacattttttcgtcgcgacacctgaaatatgcaaagtaaatatttttaaaaaccatcaatttgggcggtccgcgcaaacctcttcaattgagaacaccgcttccctcatcttatttgtttttgttcgtaaacctcgtcttgcgccaaccaaacgcttgttttttcgcgagcaattggtagttgggctcaattggttgcggctaaaaattttcaataattgttaaatgattgtttaggacagttggccctttttccataaattttagaattcaagaatttagactcatgagcagctgaaattgtataaaagcctttcgttggtttttttaattttagttttttctcttaatgaatacaaaccagggaatagttttgtggccggaactgttggaccccgtggtcacccatcgaactgcgccaacgccaattcggctccatcatttcgtcctcgaggtcgttgtcaatgtccgctgaagtcgacggcctttccgcaatatgccgttttgctgccgccctttnttctcgnnnntccctncnntntgcgtttntnngcntnnnnnncctccnccnnntcnnnnnnntttnncgtnggnnttcccttttttnttgcntnnnttgtnnntgtgtgntgntcnnntggnnnngtnnnccggnnnngtgcttcttttntntnntggnggntngngnngnngnnnntcntnctcctttttttgctnnnttttttgtttcttttttggtcgtcntcnttntnnnnggnatgcntgttctcngtttcgncccttcccttcctcnttcnncnncnncngntnntgttnttcttnttccctttgccccttaaagggcttttgctcgtggcccttgttttggtcagccacttaaacggcggttgtgtgaaaaaggtgtgttcagaaaagaactt

SEQ ID NO: 32579 - DNA, 1321 bp, Heterodera glycines
  unsure (1)..(1321): unsure at all n locations
aggctattgctgaaatggtaatttcacctaaattttcaaaaattgtaggacagaaaggaaaacatattaaatcacaaacgcaaaaagatgaacaaaatgatgaaaacggtaaaaaatatttttaggaccaataactcttagattaatttaaaatttacaaattaaaatttattattacgaggaaccaataattttagaaaaaatgaaacaacatattgcttcatcttcaaacagcgtagataaatgtgatgaagaaaatattaaaaattatatcaaggtaaatgaggaccccgaaaaaattaaaagatttttttttaatttagaaaattcatggtattatttcatcaaaagtgttgaatatttttaaacgggatttcatggaatgcccaatttgctatgaatttgtaatgtatgatcagctctgtttttgtgatcatttaatgggcgacacaatttttggtagcagttcaaacaatgcgcaaaaaggcaaagcaattaaaattaaaaattgtattttaattaataaattattaatttttaagaattgcacatattttgccatgaatgccttaagagctacacaaaagcggcactcgaaacgaaatcattcgcgcgcggttggctgggactgaaatgcatggcggagaaatgtgaaaatccaattccatggcgtaaattataactaattattttattaataaattcaactgaataatntaagaagaatntaaaaaagatgcatcatcggatgagcttgagacaattaaaatgctggaaaattactgcgctgaactgagtgtgtcagcagcgtgtctttgcatggaacggtcggtcatatttacaagcaaacaaaatcattcaatgcatgcattcattcatttaattaatcatttaataattaattaattagcaactaattaagatgccctaaatgcaattatgccgttgaaatggatggtcctcttcccgtcgccgaccattacaccatgaatgcattacaaagattgtttaaattgaaacaaaaaactaatgactcaaaagttgaactgaaatttcattgccccgagtgccatttacgaaatgtgtcgcaaatgcaatgcaaaatgggcagaagagcacaacaatttgacatgcgaacagttcgccaaacagcaaaataagcaaatccaacgaaatctcaagtaatgtaaaaaataaataaaaatagcatttttaggttccggttgtgccgataggcgccgccgggaaaatttttggtatttttaatgaattttattacaacgtatcgccctttttagacttttctcggagacctctaaat

SEQ ID NO: 32580 - DNA, 2196 bp, Heterodera glycines
  unsure (1)..(2196): unsure at all n locations
tttatatgcagtaatanagctttgtaaagtgtctttgattattctgtctaagtcaccaaatttttgttnacgggaaaattgaagaaagccacatgcggaataatttttattcattttcaaaaaatagaataggcaagaagagaattagttaaattaatataaaattgtaaatataaataaatatatttctttttaatttttaagaattttaagctatttatccttttaacatcttttgaaggaattccaaattatcagatgaatttaaagaacattgcgaaaacatcataatttattttgttaatgtgaactgtttatattaattattattttttcatagaataattgaaactaccccaaatattttttgaattccgaaaatagtacaataaaatttaaatttgactattaaaaaatattattttcattaatataaataaatctgttttataaaacaaaaagtacaaattaagattatttaaatagttaaatgcaaaaataattttaaatgatattttaaaatgttagcatcttatgtaagatcgataaatataatctcttctggattctgttaatgttattcagtatcattccacaccggaataactaaaaaggtagataaacatttttagtagatagcccttattatacatatataagaataataaatgaaaaaatgtaaaaaaaaaattatattgcattttttcgttttaagattttaaaaaagtcttcgaaattgacttaaaaatcaaacttttatttttatttttacaaaatctagccaaaaaaccttcctgaaactcaaacttgcaaattttgggtatatattttttgaaaataaaaaagtttgaaacaaatcaatttttgtgcatatttttatgacgaggattaaaatctgtaaaaatttgcactttaagaagcacccataattgcaaattttacgaagaaacgaaaccaacaccaataaatcccctcagatgtcgatggtatcttgaaacgaagatttgcgtgcgagtttggtcttacaaatgcacatgttttcattggacgcaaaaccaaattctgtttttttatccgcgcagaattggggaaaaattgttatatttgaagtacagccccattccttgatgaacttttttggctgtgtacctgttagacaaattaggagaagtttccaagattttaatatggtaaattgcaatttaatataaatcaattcaatattaatatgtattaattaattgcgcagttttattatttggagccggaattataatgaagaaactgaagaaacttaaaaatagctaactaaataatggtaaaaattttttaattctaaatttcgcgtttaaaaacaaaacataaattaaaaaatatttcaattaaggaaaaatcttgaaatttttagagtccgtttcctagggatataactttaatgtttttattcacttttattaaaaatttttaataatttttagttaaaaccaaaaaatagtaataatttcgaatgatggatcgttaacaaatcacatccaaaactcagcaaattgttttcagtagacctaggttttcaacaaaaaatactctaacaatttttaaaaaattttctcttgaaaatgtaaaaaaataaaaataaatttacggctttttttaaaattaacatgtgtattttttttttactaaaccgaaaccgcttcagttcccggcaattttaaaacccggtttgaccaattttgagagaaggaccaggaatatgtcgtttccaaaatgtcagtccgaccgacagattcggaaaatccggtctctatttttcataaagcttcagaaaaaatcattaaatcactgaaattgccgatcctaattattatgattaattaattgattcattactgtcattgcactcgatcaaataacataaatccgtgtcaggtggacaatctccagttgaagttttgttgtcaagagtttctcgactaattttgcatttgttttcaatgccttgataaaaaaattaaaaattanaattaaaaaatgaccgacttggagttggaagcacaaggccattgttcgagccgcttacaacagcggaaacgcataaggaattttgcgggattgggccaatgtaagcctgggccaatgctcgtccctttgcatggatgaagtcatcagtgtcataattggcatcagtgcagcccc

SEQ ID NO: 32581 - DNA, 1871 bp, Heterodera glycines
  unsure (1)..(1871): unsure at all n locations
cttttgccaccttcgcacatttgaacggatgtttcggcgctttttcttgcaaacaactgaaaccccaacaattaaaactgttcgtacaaaaaagcgacgaacgcgcagaagtgggcgtatgtaatattattttgacgacaaatgtaacaatgagtggcgccacaaggacaagtgacctgtgcagaagggcaaagggtgtttaaggggaagttgatgaccaaatcgaacgcactttgttacaaccgtcatgcttcacgaaggacattttgcacttggcacaacagtgcaccacagcttcagacagacgcttttccctgaaaggaaaaaacaaaaattgctgaaagaccaaatataattttgttcgctcacaacaatcgttcgcggttctgtttcttggcgaactgctcgcagctgacgcccttgtgttcgtcttgccatggctcgtcacacaaacgacaaaacttaagacgacaatcgggacaactgaacaccatcagaacatcgggggaggcacccaattcaacggcacagttacagctacgacaactgacaaaggaaaacaaaataagtgaaaattaaacgaattagagaatgtcatataacaaaactaatttcacatattggtctaatgaaaagattaccattatcgaattaaacggaatacccctaaaaaccaatcgtttaaaattaatttttaaacaatagatttaattttgggtaaccaaaaactaataaaaatatacttttttgtatatattttcacgctcaccgttccatgaatttgaggttggcctgtaccacactgagctcagcgcaacgttcttccaattttgtaactgtcgaagatggcacaaaggcttgaagttcctctacaatattgaaaattcaaaacggcataaattttatttatttgcgtggaggaaaatactaataaaaaatttaaaaaactgtttgactcacgaagagtgatcggattgttgcaatcggcggccatgcatcggaggccgagtccgccctttgccaatggcatttcctcaacagcggcgcgcgcgtggcgttccaaacattgacgacaaaaagcgtgagtttcggtggtcagtttagctatcaattattaatttgaacgaatggttaatttttgggtaatactatcgatggtgcccccttttttggaagaaaattttttgttctaaaacgttgtggaaacatgtttacgggggttttcagggtcgctgatcaggaatctgacattaattttcacttatttcgaatcctggacccaaattcgaacaaaagtcgaaaattcaaaattttaaaaattcatttttatgttcgtacctgtataaaataacaatttcatcgatagtattaccaatttttgctagcagttgctccattgttgaatttatttttgctattatttcattaattaaaccaccacctgagctgctgcttgtcgctgtcattgtcgtcccgtcacaaaagcacagttcgtccacggtggtcgtctcccagcagacggagcattccatgcactctttcaccgactgtcgccgcgggtggtcaccgctttctgtttctaattgatcgagcagcgaatcggtcggaataccggtgacccgtgcaccgaaggaagagagcaacttgcggacaacacggccgcccagccaacgaggccaccacaccgaaagaccgacgaagaaggaacacgcctttaacatgagacgatggcactgcaaaagctgactccgtggaatgtttgagggnggacggaagtaatggcatcatttggacggatggagtcacaacactgaaacacccatccccccaccaccaacgtcctcacttttttgtttctgcatttcaatttt

SEQ ID NO: 32582 - DNA, 1222 bp, Heterodera glycines
acgcgtaaaatgtcacgggacgcgtaaaatgtcacgggacgcgtaaaatgtcacgggacgcgtaaaatgtcacgggacgcgtaaaatgtcatgggacgcgtaaaatgtcatgggacgcgtaaaatgtcacgggacgcgtaaaacgtcatgggacgcgtaaaatgtcacgggacgcataaaatgtcacgggacgcgtaaaatgtcacgggacgcgtaaaatgtcatgggatgcgtaaaatgtcatgggacgcgtaaaatgtcatgggacgcgtaaaatgtcatgggacgcgtaaaatgtcatgggatgcgtaaaatgtcatgggacgcgtaaaatgtcacgggacgcgtaaaacgtcatgggacgcgtaaaatgtcacgggacgcataaaatgtcacgggacgcgtaaaatgtcacgggacgcgtaaaatgtcatgggacgcgtaaaatgtcacgggacgcgtaaaatgtcacgggacgcgtaaaatgtcacgggacgcgtaaaatgtcatgggacgcgtaaaatgtcatgggacgcgtaaaatgtcacgggacgcgtaaaatgtcatgggacgcgtaaaatgtcacgggacgcataaaatgtcacgggacgcgtaaaatgtcacgggacgcgtaaaatgtcatgggacgcgtaaaatgtcatgggacgcgtaaaatgtcatgggacgcgtaaaatgtcatgggacgcgtaaaatgtcatgggacgcgtaaaatgtcacgggacgcgtaaaatgtcatgggacgcgtaaaatgtcatgggacgcgtaaaatgtcatgggacgcgtaaaatgtcatgggacgcgtaaaatgtcatgggacgcgtaaaatgtcatgggacgcgtaaaatgtcacgggacgcgtaaaatgtcatgggacgcgtaaaatgtcacgggacgcgtaaaatgtgacgggacgcgtaaaatgtcacgggacgcgtaaaatgtcacgggacgcgtaaaatgtcacgggacgcgtaaaattttaatccaaatgcaataaagtgcatgtcactgtgtccgaagggacaaggacttcaatgtgccacgactgacgccacaatcatcaccttactgccagtcgatcaagtcaattcgtatgtgatcagaacgctgcaggacgagctcttggggacggtactacaataacaagacactttttttatcgattgatttccaccccaaaccaattggcttcaaaagtttt

SEQ ID NO: 32583 - DNA, 946 bp, Heterodera glycines
aaaaaacatagcctgttcaatgcttataacttttttcagaagcaataaaattaaattttcttattagaatttcaagtccactatttaatctatttatctttaaaatttcaaaaaatttcattgagtttcaaaaaagttatggccaaaaattctgactcaagattttttgaaattttctgaccataactttttgaaaattttattaaaaaaattttaaaattaatattccgttagagaacatctagagctattgaatgataccaagaattattaatttgattgaatttttgccaagttatgaatttatatgtcttacattttttgttttcctaccccttggcggatttaagaaacgcccaatgtggcggaatttaagaaacgacccagcacgatttgctcttgtgtaaatgttctgcgagttcgtcttttccgttctccgccgcttgtcaaattgccgtttttggtgtttctgcagtccattacgacaaaatttttcgtaaaattattcaatttgtccctttttgatgctttgctttgtttttgaagctttcttttttggccaaatggtgatcaatgtgttcaaaagattactcgacaaactacaaacattaagcacaattttacattattccagtgattttgccgattaatcaattaaattttgtaaattcattttctaaattcactcaaactataaaatattaagggattatgttagttggagcttgtaggttggattttaagaattgatgaagatcttcgcccaaagattttcaaaaaaaatttttttacaaaaatttaaaagttagtttcgaatatttttgtactttttctttgccttacgccttaaaaaagattaatatcagagcaaaaaatacataaattattttaatccaaaataattttatatactattttatttagtaaaaggcaattttcactgcca

SEQ ID NO: 32584 - DNA, 1497 bp, Heterodera glycines
taacggtggttttgccgtacccgagacacatatcgattagacacaagtctcgggtttcaacgaactaatatgccatgcctgattagaggggaagtagcattgaggtgatgtgcatggagtttatggaagccaacctgctggtgcatcatttattttttatatgggctttgctctggcccggatcctcttggcattttttggcctaccggatcacagacttttttggccctgacccggatcccattggcatttttttgacctaattcgttcctaagatgtccatctcgaccgttataaatccttgagaattcctgaatttcttgtgtattctcaccccctagggggcgccaaattttgtattattatgcccctctctccgccgatggcaagcaggacacctcctcctccatgtggcagttcaacggcagcagctcgttcagccctcgctccttggtcaccgtgaacgtgccgccgccggcgtcgcaagccgtaccggacgacgacgtcgacggcatgcttttgcgcgtgcgcacgtccatgggcgctgggacaagttcgtccgcgtcgcatgcgtccacctcgtcgcaaccgccccagcgacagtttttgcggaacggacacgccacgacgatgacgcggacgaccgcgactaacggcagccgacacgcaacaaaggtcggtgccgtagttggttgtccacacatggcacaaaggtcacacatcacatcataccacggcacggcatgccacgtgatatcagtcaccacacagcacacggcagcaacaaaatgttaccttgtttctttgtttgttggttgtacatggcactcacaccacaacaacaacaaacacaccaagatggcacaaatgccatcaataaaataaaaaattgttttttgaattttcgtttttttataaattttttttgctaaacgtaaaaataagtgttgatatgaagataaaaattaagactttttatttgatggtctaattagctaattagtatatatgggttggcacaaaacagggaattaattagttgttcaaattagcgaactgtcgtttttacgcatggggcggcacatcttttcatgagatgcaccacacttcaataatgcaccttcgcatattctcggacacatttgttatgtgataacatattttgcaattttaccgtactctcgctgcagcagaacttactgtattaaagtaccatttttacagtgtgtcgcttcttggcgaaaatccgttgcttaaacccgctttagcataataatgtatatatacctacattatgcaacacatttgccattcaatagagagagagctttattgctttttttcttaaaaaattgtaccctttggctgtccttaattttaagtacgcgctttttaaggacgggccacataatttatgggcaggaaagggacagggacggtcaattttttgaataaaaatgaatttttcgactgaaattaaagcatttttaaattaaa

SEQ ID NO: 32585 - DNA, 1603 bp, Heterodera glycines
aataaaaatataatcaattatgttatctatgcaggggcgcagagtgttataaggtaacatggattattcgctggtgattaaattaaacatttcttcgatcaattttcgagccggaaaataaaatagaaacttttaacattagttaaaaaattttaaataattgcaaataatgaaaataataaggccaatatcaaactaaatgaaaaaataaaataaactaaaaaaagcataaataaaaaatatttttaacgaaaaataaaggaatacatgttatgaactatctttattttaatatttaatgaaaatttatcattttttgaattttaaattaaaattgttaccttgattaaaatataattgtatgataattataaataaaatttaaatattaaaaatagaaattgaaacaattacaatttatattaaaaaataatagttaaactataattataaaacaacttattaaaatcattagatttatccatacctaaatcacatgcagtagaaaatcgtcaactgtttgacaaattaagcgaagaactcctagcacacacgaaaaatctcctaggatgcgagatatataaaataattaaatagctaaaaataaccgtcaaaacattaaaataagaaattaatttatatttaatgaaaaaataaaatatctgctttaaaatcacaaaatctgtatttagaaaaaaacatattttgaattagcaaatttttaatgataattatttctacgaggaactcttaacgcttgaatgaaatcatatgctgaaccgattcgtttcctttgtgagaatgaacaacatgaaaaaaaactctcaagcgcatataaatgaaaaatttattaataaaaaggataaaatgaaaattaaaaattaaaaactttatttctattgggatcaaaaagtaatttcaaaaaaaaaaatcaaattaattcataaacttatttattaagtgagaaatttatgttaagtatcgaaaaatttttgaaaaaatacgcttcgaatcaataaattctcttattaaatttaaatatagtaaaaattaaattttagtttcaaaacgttcataaattttctattattcaaactaaaaataaaaacattaagtaaaaaaaatccaaattaattttaaaaaccatataaaaatgaataatattcaagttattcaaaatatatatttaatgtattaaaataaagttcgttacgttaaaaatattaaaatattggacataaatttatttatttttatagaataaaataataatgtaaaaaagaaaaattaaaaagacaacttatcgcccatatgcagtattttttcggaagcgagatatttgaaaataaataaaataattaaaatgcgtgagataaattagtatcaaaattatgtgccgattaataatgctattaacaagttatgtaaaatttttaattctattatattaatattaataatatatttcaaaaaattatatgaggataatagtcgataaatatttgttttagcatttaattatcaattttttcaaaattaattataatcaattgggaaaataatattcaaaaaccaagcttattaaatatgaaacagctaatat

SEQ ID NO: 32586 - DNA, 1122 bp, Heterodera glycines
tgattcgaatattaattaattatttactgcttttactttcattttaggctcagagaaacaaaaacattttaaatgaaattgttttttaataatgttaatctttttaattgcactttgatgctttgtttttgcccattgcattgactgttgtaagccaacattgggtaatccgtttgaaatataaaacacaaacaccgtttccctcctttttacccccggggaattcaacaaatcaaatgggatgatcagtcacttcattttcttggtgaacaactccattttgctttgctttgcttttttgtcctttgcaccaaagccaaagcatctgctggcaatggaagaaagagaagggtaaaaaagcaaacaaagaaaagaaaaaaggggggcaattgtaagccatttttaatttcattaaaatatgtcgaaaaggtcgaactaatttcaacgggtcgaacccacgggcaaaatttccacacttttttaagagagtgagtgccgaaaccgaactgaactggcaaacgatccaagaaaaaaaaaaacaaaattattattttgtttttttaaaatttaattaaatttttttgctcaaattaaaatttaactttcactgtttctgatcaaactgagcagtgaaattttgtggaaagtgaacaacgaataacaaaacagaagggaaaagcggcgggggggggggcaaagggcaaacaaagggaaaataatgaaaatgaaatgaatgaattagaagcgaagcgaagtgccccccccccaaatcacacaaaagtcgtccccccccaccctttccccccttttttccctccgttttttttgtttattttgttggatgtatttgttctctctctctctctctgctgatccgccgccactgccgttcgttttctcgttttcttctgttcccgcactgtcccaaaagcttcgctttgtcctctccccccaattgtcccaacttttcaaaaattgaggtgctaatgaaaaagttgggcaaacggtgaaagaaaattttggtagagaaatcattaaaaaaacgaaaagtttattttattttaaacactgaatttttgtccgaaacactgaactttttgtccgtctttgaccaaattccga

SEQ ID NO: 32587 - DNA, 1184 bp, Heterodera glycines
  unsure (1)..(1184): unsure at all n locations
ttcagttccaactttgtccagttcagtaccagtcggataactcatttgcgttggaactgagcggggggtgaccagcgaacttattatagagctcaataagctcgattttccaaatttaaaaaattctaaaattttcaaaatttctcgagctaggcccctaagaggttttggggtttttgaattttatgattttttgccgatttttccggggaaaacggagaccactttcaagcaaccgtttttcgagctctatcgattggtgggatttttggaaaaatttcgatttttttccggaaatagaaaaattttttggcctgagcgggacatttcagtcccaggcccataactcgtcaggggtcggttttagcaaaaaattgctttagagcaaaattgtagagctttttaagctctatcgaatggtatattacatgttcgaaaattttcaaaatttttcgagctaggccccctagaaattttcggaaattttttttggggcgagaaagtgggtgaaaaaattttttctggggtattttgaggtgctgagcatgaatatgatgtttgcttctcgtttcagattttttggaatttttaaaaattttttgaaaatcggtcactttttttgccctcgggattttgggttaaagtttgaaaattcataactcagtttagatcaggtctatattagtgtttagaggctcaaaaaatgtagaaaaaatcggagaattttatgcattttatttggtatttctatcaagaatataaaaaaagttattccagaaattctggaaattttcgaattttcagaaaaaaattcactactcggttctgaaaagatattttgtaaaataaaaatagcccaaaaatccgcaattttttgctctatttgataaattttatttcatgtttttatcattttttagtaaaaagttataaaaataaaagtgattttggaattcgggaccaaaggggggtgcacatggttttcgagtggggaaattttttcgcccaaaaacttccagaaatatgtctttagaggttatttagcacgctgatcacgaatctgaaatcagatttcgtttagctcttcgggaaagcctcagaatccctgcgtatagtgatgaatcctatgatggacaccatccccataccgttgcantaaagagggatggccaccatccccatac

SEQ ID NO: 32588 - DNA, 1620 bp, Heterodera glycines
  unsure (1)..(1620): unsure at all n locations
aaagggattcagatctgttcggccataattattttatgagccatgancagatcagaaagcttcngcacgttcaagtgtgnacagtgcagggtattctaatctttgtnggtatggaatgggtggaaggctgcatttaaaaagaactcttttggtgaaatatttttgacatttttcaattttttaaatatttttgaagagatggattccaaacttcaggagcatattccaataacggtctaacataagttttgtacaaaataatccaaatcctagaagactttgacttaataatccgaaataaagaacgcattcgtaaatatgcattctttattatttgtgtgacatgattggaaaattgcagtttattatcaatagttatgcccaaatccctaattgtaatttttagctatcatcactaggaatcactattttggagctttgccagtaaataaaattattttgggagttgaccactaaaatagttttttgccattattttggcgtaacgcccactatttttgcatttttggaaaatttcccaaaaaatgtaataaaaacgaaaaatacaccccaagaatcgacctaaaaatttcaaaaatacacccctaagaattggaaaattttctcaaaaattcttccccaacttatttttcttgctaaatattcgctaagaaaatatttgaataagttaattattttggtattttttgccactaaaaatcccatccctagagatcagtttcttcggataaaaaaaacctgaaaattccaaaaaacccaagaaaaagtaataaaaaatgctaattgctagggattcttttttatgtaaatacatattttttcctggattctccatagcctaattagtagagcccgtaattttgaaatggccgggaccgggaccgggacttggaaaatggacccgtacggggcccccgggaccgggactcccgtttttccgggacccccggtcccggtcccaatttaggcccggggccccgccgggaccaggactttttcaaaatttttgaaattttgataaaaattcgaaaaaaaattttacaattttttatatcaagcctgtaaattgaccttttttgcttttaaacagcacttttttgcggcgtgtttttctaaaaaatttagggtacaaaagggggggggtccggctgtgccgataggcaccgacggggaaattttgaaaatttgtgtcggatttgttaactgagttacaccaaaaaaaatgacaaagttttgcgatttcaactcaatttttaagaaaataaggatttttatgggccggcgtaagaatttttatagatttttacattcatattaagtaattttccccaaaaatgctatgttcgatctaattttgaatattttaggtggattttatgatctttttaacagtttaaatcgtagaaaatcccaaattccatcttcaaaattttaaataaaagacatttcgccaaaaataattattaaatttttcaaatttggggcagtttcactggtgaaatgtagtcccgtttttccgacccaaatggccgggaacgggaccgggacttggaaaatggacccgtacgggaccccagtgaccgggactcccgttttttc

SEQ ID NO: 32589 - DNA, 1159 bp, Heterodera glycines
  unsure (1)..(1159): unsure at all n locations
taatttaattttgggctacggcaaatagacaaaattattcttatttcatgtttctaatatttttcttaataccaagttttgctggcttgataccaagaatgtaggcactgaacaaataaaaaaactgatggccatgcctaagaaactgagaatggcattgattggagcataaaactggaatagagccaaaaaaaaaaattttttttttgaatgggtttggtcattttttgcctactaattttggtacaaaacgaagattggggattttcttagtcagatgtgattatgatttttgagtcaatcagtgatgtatcgggagtctcgatgccagggttttttcaaaactgtcaagatcaggaatatacatatcgaatgaatctctctagtcacaataaaaaaaaaatcgttatttagacaagtccatttccaatttttttttttttaaattcttgattcatttctgacccctttccattctttacatatttaaacaaatgctcagaagaagtgcagttttatgtctgaagagcggcacatatcttgctaaaggaaaacgagttcaaaaaggccaaatcaacaaaataaaggtcttttctgaactttttggaggtgccttgaccgctaaattttcgccagcaattcttttctttacaaaaaaaaaaaatttacaaggcccaatttttaaaattttttttttggccgattttgaaaaataaatatggttctattatacttcactttatgagtttaattgacatttatatcctatattttggtatcatttgaaagcattgacaaatcataaaattcggatggactcataatagaattataaattgcaggatccctacgccagcgctgacgaggagacgtgtgcagaattttttgccggaccaaccattgaagacagaaagagcaaattccaagcatatgtggccaaagttgaatcaaaagaccaggtgctgctgttggctgctcctttttgtgaaaaaaaaattgtattttctacaggtggatttccttttgaccaaaatcaaaggtgtaggaaaaattgcaagagccacacacaacccatacgcttgggcgttttctgatcactccagcatcgaaaaatgagcagcagaaatgccggtgatcagcaacnnaacgggtgatctcg

SEQ ID NO: 32590 - DNA, 1001 bp, Heterodera glycines
ttcaggccccaatgtgcgcctgaatcgctaattagcttggcactttcgaatattacatataaattagccctctcaaattttccttcgggcctcagaaaatggctatctctttttcggcccaattttgtaccgatcaaagggaaaatggcttaattcaggccccaatgtgcgcctgaatcgctaattagcttggcactttcgaatattacatataaattagccctctcaaattttccttcgggcctcagaaaatggctatctctttttcggccaattttgtaccgatcaaagggaaaatggcttaattcaggccccaatgtgcgcctgaatcgctaattagcttggcactttcgaatattacatataaattagccctctcaaattttccttcgggcctcagaaaatggctatctctttttcggccaattttgtaccgatcaaagggaaaatggcttaattcaggccccaatgtgcgcctgaatcgctaattagcttggcactttcgaatattacatataaattagccctctcaaattttccttcgggcctcagaaaatggctatctctttttcggccaatttagtaccgatcaaagggaaaatggcttaattcaggccccaatgtgcgcctgaatcgctaattagcttggcactttcgaatattacatataaattagccctctcaaattttccttcgggcctcagaaaatggctatctctttttcggccaatttagtaccgatcaaagggaaaatggcttaattcaggccccaatgtgcgcctgaatcgctaattagcttggcactttcgaatattacatataaattagccctctcaaattttccttcgggcctcagaaaatggctatctctttttcggccaattttgtaccgatcaaagggaaaatggcttaattcaggccccaatgtgcgcctgaatcgctaattagcttggcactttcgaatattacatataaattagccctctcaaatttccttcggg

SEQ ID NO: 32591 - DNA, 1570 bp, Heterodera glycines
atgtgtgccggacagcactggggcaaaaacctccaaaaatggcattgccggaattggtactcaaacggttgtcaagcttgaggaaaaaggatggaaacaaaattatgccggctagtccaagttcgaaggatggcaaaagtttagtgggaagcgcagaattgccaaaaatagcactgctacgatcattaagcaaacagcgttcaaacagtgttcgaagggagagtgaaaagtcgccatttgatagcccaaaaccccaaaaaacaaaattggcacgatctttgagcaggacaatgttaagccttatacggtagtccgcatacgtatatggtagatttttacctgacacaccgcttttatgttcaattggcaccacattcattcagctttaagagataaagtaaaatttagttctaagaactagatacaaaaatttttgacaatgttacactggctaattttataataggttttcttaagtttacaaaaacattattgaaaattagccgcaaagaaaaagttgttttaaaatttctaaattttcaaaaaaaaaaaaaaaaaatttctctcggctcataagatggtgttaatttgtaaaagaaaattttttttagttttgaatgaggtgcagaaattactggcgacctaaaattttagctttttactgttgctttatatatttgtgtttgaatttaaggtcttaaggcaattttatagtttaatgggaagaattttcttaataaaaaatttagatgtatatatgttagttttggaaaaattattagaaatttttgatttttgttcgagttagattctggagttcggaatttatgcccaatgcttcatcaattaaaaagaatacaattgaaaatattttttcataaaaaacaaattttaaattgtcccacctaaactgtaaaagtgcgattttgctttaaaagtttattttgtttatggatttattattttttttattttaattgagttccgttattactgttaaacttttttatatttgatttttagattttttactgttcatttatatacgtttaagatgtttatgacggattttatgttgttttcacatttatatttggttaaaaaaattacaaaatcttaaaatgtttttgaaatatttaattcttaaaacatttttatttaattttcattttgcttcttttgcccaatcgcttcttcaacttctgccaatgttttgttcttcgtttcaggcatatattttaagccaaaaataatgaacaggcacaggaatattgtgaaaatgaagaaagtatattcgcggaaaatattctaaaaaaaataatttgttaaaataaatttaagaactaccacttgtttaatttaaataaatagttaaatttgagttcattgtataaatttgaaacttttttttaataaccaatttaattaagacgatattaaaaataaaaattttactgaaaaaaacatattcaagaatgaaaattttattgaatttaactaaaatttgaattattttatatataagttataacaatgttcattttaaattgttaaaaaatataaaaataat

SEQ ID NO: 32592 - DNA, 1210 bp, Heterodera glycines
aaagaatcgcacattagtcagatatgcgctggatgcgctccaccgtctcccgtctttaatcgtcatgtccatctccccgagtccctcctgtctgtacccgttcatatcttctgtaaccccgatccagtgctgcctgccgctttccaaaaaggcttggtggagcggatgctcgcacttcccttgggtcacaaagagcggtccgtcgtgtcccctgtaagggtcgtcgggaccgatggcgagttcatgcgcttgagcctttttgaataaggaagacagttcctgaaggtatttaaaggctcggaccaatactgggatgactttgttcacttgtgtgcccagcccttcgccccctctctctcccatcggtcgtaatctttcggatgcccacggatgtaaaccattgcattcagcgaacttgaaccaccccaaactcgtcctctcggccagtaaagcactcgtccgttcatgttctcctgaggcatcgtgaaatacatcctggaatgtggaatcaacaaactccaagctcaaagtgcagcgactcccaaccaattgtatttatcgttgcataaattatacatcagtgccgctggcatatgaatctgagtgtattttgtttatttgtcagtgctaacctctcacaaatcagaattcaccttccaattccaccaattatcttggggaccggcctcgacgagcaaaacgcgattgtccggattctcagtaagacgattggcctaattgttaggtaaactattctttctatttgttggtaccttcccaccaaaacacagcctgctgagcctgcgcccacaacgatgtgcgtcggtttaacgccctcggggagatggcgaacaaactttccatacttgaaaaatccttctctccaacttcggttgtgatacaaattagacgtataatacctcaaagaggaaaccaaaattgaattttgaataaaaggcgaagcaccacaaataagcaaacgcattacttaaatgaatgtttaaaaaaatcttattcaaacaaagggaaataataactgacagtgtcaaacacttaagaggaaaacttcagaacaaaagcattttatcgcgcagaaatatacatatgcatatgtgactcctattaaaaaccgaatctcacgatatatctaatctaatcatttcttcacacgatgaccagtcggataggaagtgggagcaccatgaaccga

SEQ ID NO: 32593 - DNA, 146 bp, Heterodera glycines
ttttttttttttttttttttttttttaaacaaaaaaaaaaaaaaaaaaaaaaaaaaaaaaaaaaaaaaaggggggggggggggggggggggggggggggggggggggggggggttaaagaaaaaaaaaaaaaaaaaaaaaaaaaaa

SEQ ID NO: 32594 - DNA, 1801 bp, Heterodera glycines
  unsure (1)..(1801): unsure at all n locations
cccccccccgcccttcaaaattttgaaaaaaaaataaaataataggagactcagaattttgaaaattttttataaaaactgatgacaagctaatgtgataaaacaggttaattcttttcctttcagtatccctgcaaagtttggggcgcttctgataagtttctgaaaaaaaagttaagcctaaactttttggcctgtttaaaaaggaattaaaaatttttaaaaatttattcagtgtccgtttggggtactcaaacatttatggggagcaaaaatccaacgcagaattaaagtacagactatagggaagctattcccgaaggattcggtctccccataaatctgggcgcatcggttcagggggactgccccgaaaacccaaaaaaaattttttggataaaaattatttaaatgaactgagcatcagagtgcctaaactaacatgtaaataaaatttggtgcgtttcagaaccctttctgaaaaaatatttaagaattaattttgcaaaaaataaataaaaacgaaagactcagattttcgaaaatttttttgagccagctagctcggcgctcatttcagtgtaagttagtcctttaccggggagtatccctgcaaagtttggtacgcttctgctcaattaacaaaaaatatgagtgatcgaattttcactaaaaaagttaagcctacattttttggcatatttaaaaagcaactaaaaaatttttaaaatttaataattttcctgcaccgaaggtactcactcggcctcttctcggtctctggggggggccctccgcccctcccccccccctcctcaagcgctactgattgatgatttataccaacacctcatttgcttattattaacaagcctccctcattagttaatgatcattaattattttctacccgacgtctcccaaagtctctccccgcctcggcagctcacaattcaaatttatatttgccctttcttgtgtctctattccctcaccggcggggtattaatgctaataacaatttggataacactcactcattaggccgtccaaattgcgtttgtttcttctaatcacagacacttaattatgtaatcactagagagagattactttgtgacgcctttttaacattttctcaccatgttgcgctgctgttctattttggcctaataaaagttgaatttttttttccgtcaagactctcgagacccacaaatttcttggcactattgtagcaggccaaacaacagcgcttgcaatgttagctttttgttttccttttcggtcttctgccattgtttttgtttttcataccatcgcctttcccatttgaccaccgccattcatttttagtaatttaataattattattatatttacatattttgcttcacttattctatttttatattatattatttttgccattttcgttcgattttgtccatgcgttaattaatcctttctcggagaaaggaacagagataaataaatgaatttgataaatatgtaaatacaattaatttattttctgtgttcgccccctcccccaaaaattttattgttttatttttccattgccacccaaaagaggcaaaaaaagaattttgttttaaacattccccacagattccgttggatgaaatgggcaaaaaaggcaaaaagaaaagataaaagctgataagggaaaggaattacaattacctaatgaaaataatttaataataatacgataacaattcatcatattttattagtgctgtattattattttattatcgcccatcanaaattatga

SEQ ID NO: 32595 - DNA, 886 bp, Heterodera glycines
  unsure (1)..(886): unsure at all n locations
agtcgggattgccgcggaacgagaccaaagttcgggattcgagtagggagggccaaaaatagatgggtcgggatcagggacgagaaaaaggaaccgggattctggcggtaatgcttttacagtttaggcttgttaaaattgggtcgggaatgagccaaggacgtagggatcaatgcctgaagggctaaagcggggtcgataatcagtagaaacggggacaaaaaaaacgggtaaccaccagcttatcggggaaaatccagacagacgggaatgggctgggtttgtgaaaatgattgtaaaagagggagaagctaggccaagctgcaataaaccagtcacagattattcaaacggtggattagacggggattataaaaaaaacggggacacatgccaagcggggggttggaaaagagcaacgcgacaatgattgattgatatgcaacactgatgttgatcggacaaaggagagagtgagttgggagctgttcctagtgaattctgatcaagagcgcgatcactgatcaatcgatggaatcactgactgattgatggatcaagggacggaaaaccagattcggaaacgaacctggtttaaactgagatgagaaagtccagtttatacaataatcttttgtgtttctaacccgagcctcccgagctaaatttggtcatggatttttcaaaattcatgcaaaatttaaaatttacaaaaatagtaaacaaatgttaaggcattttacaacaacaaaggttggctgctgctggagaaaaattgatgaaaatgatacacacacataaataatttgagcaccagagcaattgacttgtgcgggctgaggttggagggaggaggaggaggaggagacacnccgggggggggggg

SEQ ID NO: 32596 - DNA, 1912 bp, Heterodera glycines
  unsure (1)..(1912): unsure at all n locations
aattttcaaataaaaactaaataattataatttnttttaacaaataattttttctcaaaaaattaactgaatttcgctagaaaattaaagagtttttcgctaaaaaaaattagataatttttttttgttgttaatttttgaaaattttttccatatttttataaaaaaattttcattttttactagtcaaaaactcattaagtttttttgaaaattcgagattttatttgaaactctaaaaagtttttttgtttttgtctacgagttgcctattattagctttgctttttgtatgagttgtcatgacatcgggccaaacgatattttcgtataatgtgttgttcattttccatctcctttcttggcaacgcattgacgtattaatgttaactgtttggggtttgtacctatttgttatccatgccgaagttactaatttgctaatatttattttatttttatgggaatttaaaatttttgagaaaattctttcaaaaaaatattaaaaaattaaagattttttattaattatacagaaaatttaaaacttgttattaaataatacagcttttacctcgttcgatgacattataataaatgtatggtaaattattttaaataatttatatatatttttgattgttntaaatgaagaattcacaaaagaaaagctgactttatgaaatcgccagagaataagccgccattattattaattttttctgtgcattgtgaataacctaattcaccaataattaagttaattgacacctttgcttttatcaaataaaaaaaatacagcatgtaaacaaaaagtgcaagaatattatttagcttccaatcaaatgcaagcccgtagccagaacaaaatttcggaggcggaaatccgaagaccttgttgttttttttgctcgccgggccaaaaaaattttgggactaaaatttcaaaaaataagatataataaggatggggggggggtggggggatctggcggttaaaaatccngattcctgtttttatcagtgatccaccaatcaatcacatattctatatttttgaacaaaaatccgtgtgtttttaaaatttgtaaaatttcacataaacattttcttcgaaagaaatgcaaatttaaaaaaaaatctacgttatcgcgaatttttaacttttacagaatgatagcccttctactaagaaggtatttagttgtctgtgctgagccgaacctaaaaaaatctcaataatttaaaaacttaggaaaaattcataaaacttgtaaccaagaattttttaatgtcgagaatcgactgtaacttttttagaccctacttttttttattaaaaattatggagtataatataaaaatagagaaatcttatgctattgaattagataaaaagttatggagataaattaatgtgtcattttttatggaaatacaaaaatttaatgacgtttaaatacatgaaaattgtgaccggaaaatgcgtcagtggaaaatgtgttagtatagagtagtataaaaattttatcagaacttcgttctggattccgaactccggacctcaattttaagccgtttttaaaccaaaaatgctaaattcgaaaatctggtctttcgactttttgttcgagttcgggccggccggggttcggtattagcctanatggatgccggattcgtgatcagcgaccaaactcgaaaacccaagaaacttgtttttatggcattaaatcattgtcattgacgcattttctactgacggtattttcctggaagcccatgaaaattgttcaaaattcacaatatccgatccgatttccaactgatcaatcaatgatcgatcaccaatcattgttgcccagcataaaacggacacgggaaacaatgtaactgatacaccaatcaatga

SEQ ID NO: 32597 - DNA, 1354 bp, Heterodera glycines
  unsure (1)..(1354): unsure at all n locations
agcttattccagaaaatctggcatgattctcattttaaaatttttatagattttaaatgtttgattttttttgcnttacnaaactttcatcganactgctcttttctattctcattcaaatcgccccaaattttttttacagctaattagnnncctattaagctatttnccagaaaatctcgcatgaattctcatttttaaattttttatagatttttaaatgtttggatatttttttggcttaccaaaacttcatcgaacctggctctttctattctcattcaaatcgccccaaattttttttacagcttaactaggccctattaagcttatttccagaaaatctcgcatgaatctcatttttaaattttttatagatttttaaatgtttggatttttttttggcttaccaaaacttcatcgaacctggctctttctattctcattcaaatcgccccaaattttttttacagcttaactaggccatattaagcttatttccagaaaatctcgcatgaattctcatttttaaattttttataaaaaatgtttggatttttttttggcttaccaaaacttcatcgaacctggctctttctattctcattcaaatcgccccaattttttttacagcttaactaggccctattaagcttatttccagaaaatctcgcatgaattctcatttttaaattttttatagatttttaaatgtttggatttttttttggcttaccaaaacttcatcgaacctggctctttctattctcattcaaatcgccccaaattttttttacagcttaactaggccatattaagcttctttccagaaaatctcgcatgaattctcatttttaaattttttataaaaaatgtttggatttttttttggcttaccaaaacttcatcgaacctggctctttctattctcattcaaatcgccccaaatttttttacagcttaactaggccctattaagcttatttccagaaaatctcgcatgaattctcatttttaaattttttatagatttttaaatgtttggatttttttttggcttaccaaaacttcatcgaacctggctctttctattctcattcaaatcgccccaaattttttttacagcttaactaggccatattaagcttatttccagaaaatctcgcatgaattcacatttttaaattttttataaaaaatgtttggattttttttggcttaccaaaacttcatcgaacctggctctttctattctcattcaaatcgccccaaattttttttacagcttaactaggccatattaagcttatttccagaaaatctcgcatgaattctcatttttaaattttttata

SEQ ID NO: 32598 - DNA, 195 bp, Heterodera glycines
aaatagccttgtattcttaaaccccagaacatatgcgaggtgttttgacaaatctatatgggtgacggcagaggaaagatagacaataaatttttgatcaatactgtcgtagttaaattgaacatcctcattgggtaatctctctcttttttgcgagcctttttcagcttctgaaacttgtgtatattgaatatc

SEQ ID NO: 32599 - DNA, 1158 bp, Heterodera glycines
  unsure (1)..(1158): unsure at all n locations
tttattgcggtatttcaccaattgttaatcaccaattgttaaattactgtcactaattagtcctaattaatatgataatatggccatttactcccacccgtcccccccccccttggaatgccttttttgttctgccgccccgcgcacggcgtttgttcgttcgtttggtttaacgcattttttgacagttgcagctgttgttaaaaattcagcagaaaatgcatcaatgagaaaagcgttcgctgaaagtggagagaagaaaagaaaaagagcaaagtgaaatataataaaggattgccttttgaatagagaaaagaagagagagaagtgagagagaacagaaagagagagagagagtgagacagtgaacgagagatggagaaaaagaagagagacggaagagagagagacagagaagaagaaagaagagcggtacgaaagaacagaaataacacacaagcataacgcagagaaaaagagcgagcgaaaagaaccaaaggaagcaaaattagcaaagagagaaggaaggattgagaaaataacattaaaggaagagaaaaaagggaggggaggtgaaagacgcagtgtgtaattaaaaaaggacagaaaagccgggagaaagagagaaagaataattagagagtgtgttgtaacaaataagtgataaaatagtggtggatagagagcgcagaattgggccaaatgtgaggccaaagtttggagttgggcaatggcagacagacatacagacagaagcaaggctaaaagaagcacaaaaggggctcccggggtcagttgagtccgacacagctaaatttactttgtcacaactccacaaaaaagcaaccaaattgcgcataattacgattatttaaaagcgcaaagtattctctataagcattgcaaaattttcaaaatatttcatcaatttaaaaaaagttatggcctaaagaccagaaaaagccaattatttgagatctttggccataacttttttagtaaaacgaaaattttgacattttagaagccattcgggcttatctaaatttatttcttttggttgccacatntaggtaaagtgagacaggcctttccgatcacaaaatatctccgctcccccagtttttaattaaataaataattcaaaaatattttttt

SEQ ID NO: 32600 - DNA, 857 bp, Heterodera glycines
aagcgcttttgtggaggtataaaatttctcaaaaaaaggagatagccattttttctgggatagagtataaatttaaaaattccctcaaaaataaaaggtaaattgcgcaccgccctccctatcatgctcgagagcatttgtatgtgtataaaatttatcaaaaaaagagatagccatttttctgggataacctctaaatataaaaatcctctgtgaaataaaatggcgattgtgcacagccctccgtctcatacgcaagcgcttttgtgaggtataaaatttctcaaaaaaagagatagacatttttctgggatagagtataaatttaaaaattccctcaaaaataaaaggtctattgcgcaccgccctccctatcatgctcgagagcatttgtatgtgtataaaatttatcaaaaaaagagatagccatttttctgggataacctctaaatataaaaatcctctgtgaaataaaatggcgattgtgcacagccctccgtctcatacgcaagcgcttttgtgaggtataaaatttctcaaaaaaagagatagccatttttctgggatagagtataaatttaaaaattccctcaaaaataaaaggtctattgcgcaccgccctccctatcatgctcgagagcatttgtatgtgtataaaatttatcaaaaaaagagatagccatttttctgggataacctctaaatataaaaatcctctgtgaaataaaatggcgattgtgcacagccctacgtctcatacgcaagcgcttttgtgaggtataaaatttctcaaaaaaagagatagccattttttctgggatagagtataaatttaaaaaattccctcaaaaataaaa

SEQ ID NO: 32601 - DNA, 1015 bp, Heterodera glycines
tttttaaaaaattccaaaaattccgaaacaaaaaacaaaggtcatattcgtgctcagcacctcaaaataccccagaaaaatatttttcacccccattttcgtccgaaaaaaaatttccgaaaatttctagggggcctggctcgaaaatttttgaaattttctcgacctatcctacaccattcgatagagcttcaaaagctctacaattttgctctaaggcaatctttcgctaaaaccaacccccgacgagttatgggcccgggactcaaatgtcccgctcaggccaaaaaatttttctatttccggaaaaaaatcgaaaattttctaaaaatgtcaccaatcgatagagctcgaaaaacggttgcttgaaagtggtctccgtttttctggaaaaattcgttaaaaaatcataaaattcaaaaaccaaaaaatcgttttttaggcctagctcgaaaatttttgaaaattttcgaaatttttaaacatggttcgatagccctttgaaagctctacaaaaagtccgctggcgactacccgctccgagcaaaccctggcgcggcattcagctggtactgaagtgtccaaaatgagtaggcctcgatctgccatttttccaggccaggcctttggtctgatcaaaaaacttttgctggcaaagttgtaggccatagttggggcatttcgcttttggggtccactaagcgctgaaggcaaaagcaaaaaatttcgtaacagtgagactgtcggcaaagtcggtttttgagccgctggtactcagttgggcctcggaccaaaaaacctatagttttcccagatgcgccgtctcgagctacccccctgtgcaaaatttcagccccgcgcgcttagccgttcttctcaaattagtttttgagatgagttgccttatcattctaacgtatatataactagccggtgtgtgcttacatgtttatgggtgcttaaagcgcttcgcgctttgggagcttcgctacctagattagctctggttgtggag

SEQ ID NO: 32602 - DNA, 1371 bp, Heterodera glycines
ggcactacaacaaattcgtcaatttgtcaaaaatacattgcctgaacccaaaaattttcaacaaattgaaggcctggacagtgacaaattcacacaattttatcggcgccgcgacgacatctcaatcgtcaaagactgcctgatgttcggcgaccggacaatcatcccaaaatcggtgcagaagcaaattttaaaaatgcttcatcagggccatccgggagtcaaacggatgaaatctttggcccgaatgcatgtctattggccactgatggacgctgaaatcgaggcgttcgtccaaaaatgcacttcatgcgcagctatcgccaaaaatccgatcaaaacgacactgcagtcatggccaaaatctgatggcccatggaagcgcattcacatcgattacgccggaccatttcatggaaaaatgtatttgattgtcgtcggctcattttcaaaatatccggagatatttgaaatgaattctacaaatgcatcggccacaatctccaaaatgcgctcattgatcactcactacggcatcccggaaacaattgtttccgacaacggcactcaattcaaagtcaccaattccaaaatttcgtcaaatcgaatggaattgaacacatttttactgcgccgtacatgccacaatcaaatggccaagccgagcggatggtcgacaccttctagaggacatttgcgaaaataaaaggggagggagttgacggcaatgtgctcgacacttttctactcacctatcgcaccacgccatcagaactcttgacggaaaatgcccggccgaattatttcttggccgaaagcctcgaattggcctcgaccttctccggcctccgccgtcaattccaatcataaaggacggtaaaatggaggaccaattcaacaggaaacacggcgccaaattccgatcatttgacattggacaattggtcttcacacgccggcacaatacagcggattggcgacccggcaaaatcatcgacaaaaagggtgtaatttacaccgtcgaattgccgaacagttctcgcggtcgatttcatgcaaatcagatccgcacacgtcaaattccggacgaggacatcgaagatccgattgacgtgatcaatggcacttttggccttcctattccattaagggaaaataatttggaagaaatcccgccagccaatgatccaccgccagcccgccgatatccgacacgaaatcgccggcccgttgatcgccttcaaatcgacccaagccgatcgtcctatgtgtgactgatcatggcactgatcagttggacttaaaaggggaggtgttagagaggcaaacattcaaatgtttgtaattttctcttcttgggaactttgacct

SEQ ID NO: 32603 - DNA, 1080 bp, Heterodera glycines
ggctcgaaattgtatggattaacatattttttctgcgcatatgctatgaagaacggggctcaaaaatagcatttttacgttaaattttttttgatttggtgaaggtttttagtccatataaatccatattttgggggttttcgggaataaatccatattttatattttaaaaatgtttgattatcgtttttgcataataaactttgggacaaattgtagaggcgatggggtttttttttgttcattggctttacaatgtgctttttttcttttttggattgcatatttattcaaaattgtgcctaataatccccattttatatattttaaaacattaaatataaaatgtatcattttattactgtgattggcatattactaaatatttttggccttaacttttttgaaaaaaaaacaaatttttgaaattttgcagatgataccaagaatgattaatttcaatgcgtagaaaaaattagtgcattaaagtcgtcaaatattttatgataatttattagacacaattttttaaattaaaaatctatacaaatattgataatataaacagaaaaagattatttaattatatattttttaatataattaattatttttcaatttcaaaataaagttaacattgtttacttaaccacggttaaagacgagtataccggttaaggtcattcgttaaccacggttaagttaaccatggttaacgcgttaaccttgatttactaaaccgccgcgagacgagcataaataaggccccagctttcttcggtcaaattaagagcgtgtctatgctcagcagatttctcttctttcctcggccagattgagataaacatgttggatttctcagcaaaagactgcaaactcagccacgtatttgttttgaccgtgattgcttttccatgtccacgtcattttcattggcgctgcttcacatcattcgaataattaattttggataaaatcatttataatttttaccaaaatgcttctttttcttgcttttccacttctttttagttgggcttgcattgctatgctttcaatggggcgaaattggcaagcgga

SEQ ID NO: 32604 - DNA, 1044 bp, Heterodera glycines
taaaaaattttgggttattgaattattttttgaagggagtcaacccccctttttagtggtttgctgtgccgaggaccggcaggccaaagggttggctttaaatttgcaagaaatttagattgccaataagtggttgtaaaaacttttggggtatggaattattttttgaagtgagttaaacaccctattagtgctttgctgtgccgagaaccggcaggcaatggatggctttcaatctgcaagaaattagattggcaatatgtggttgtaaaaaacttttgggtatggaattattttttgaagtgagtcaagcaccctattagtgctttgctgtgccgagaaccggcaggcaatggatggctttaaatctgcaagaaattaaattggcaataagtggttgtaaaaaacttgtgtaaggaattattttttgaagtgaatcaaacaccctattagtgctttgctgtgccgagaaccggcaggcaatggatggctttcaatctgcaagaaattagattggcaatatgtggttgtaaaaaacttttgggtatggaattattttttgaagtgagtcaaacaccctattagtgctttgctgtgccgagaaccggcaggcaatggatggctttcaatctgcaagaaattagattggcaataagtggttgtaaaaaacttttgggtaatgaattattttttgaagtgagtcaaacaccctattagtgctttgctgtgccgagaaccggcaggcaatggatggctttcaatctgcaagaaattagattggcaatatgtggttgtaaaaaacttttgggtatggaattattttttgaagtgagtcaaacaccctattagtgctttgctgtgccgagaaccggcaggcaatggatggctttaaatctgcaagaaattaaattggcaataagtggttgtaaaaaacttttgggtaaggaattattttttgaagtgagtcaaacaccctattagtgctttgctgtgccgagaaccggcaggcaatggatggctttcaatctgcaagaaattagattg

SEQ ID NO: 32605 - DNA, 1368 bp, Heterodera glycines
  unsure (1)..(1368): unsure at all n locations
tttgaattataccaaaaaatgttgggtttattgattttgaagatggcccctcctaaacaatccccctccatttaatttttgnaggaatttattttgaattttttaacaaaaaaaaatntaaaaaatttcttccaggcaaaggcatccttccctcttttaaaaaagtgttttttttggctgtaaaacaccataagccaacattttggaatcgtccctgtacccccccccgccccactctttggacaacttgaacgctttgcaattagttaaaaaaaacaaaaacgcaccgttgccctcatgtaacggaccacccggttgatttgtgccgggcacacgtccggcagctgaaggaaaaatgagcgccacacggcggcggccaacacgcggtcatctccgaaaaatccctgcaattttagtcatttaacgcaaaccatcactaattgattgggtgcattataccgcccccatccccgttaaaaaatttaaaaaaaaagtaaaaattttcaatatacttttttaatttttcgagagggagagaattcttcaattaattagggtaattacaactgattaggggtgagtaatttaattgatgattgattgagttgttaccaccacacctcgtcatagtcgtgcaacgtgctgatgtaaatggcgtgcaatgccatgccctccttgcgcttgttcaccgacatgcccatttctttctgaaaatgtgggcgaattgtggtggggttaattaaaaaacacaagggaaattttttttcattttttcgcagattcggggaggctttataaaatttggaaaaaatttacatgaaaaaagtggcaccatggcaaaaaaaaaactgaaaaattctgccataaagtctcaatttttgaagtccccgtatcgttccctcctccccccatttagagaacatttagacctatcgaatgatactaaggttgttgaatttagttgcccaagaaaaaagttatggcacttaaaaactgaaggcgccaaatttagctgaaaaaaaattttttttaatttttttaccgctgctttgtccaagcgagtgtaccagtccgtgttgaacacctccaacacttggtgcatgaagtaaatgtaggccattgcctccagcgactgttggacacggcacaatgccatcctaaggcaacaaatttaattaaatttggtaaaagtttttaaaaagtggttgcacatatcagggagctgtgccgagacgcctaaaaaaaatttcggcaatctgaaattggcattccgagggaaccaaaaaattgtggaaatcggtgaccgacgatgccgtcggaaaaatttggagagtgttggctgatttgttaattgattttgcgttaaaa

SEQ ID NO: 32606 - DNA, 461 bp, Heterodera glycines
gccttatttaacttttaattaacatttggtgcgtttcatagcagtttctgaaaaaaatttatgaattaattttgcaaaaataaataaataatgaactctcttccttaataattttcctgcaccgaaggtactcactctgccgcttcgcggcctcgtggtgggccttcccccccccccccgtggtgaacatataatactcttttaattgacccgaaacacgaatcccgaaacccgacctttttctcgtccgcgaaacccgaatcccgacccgatgttttttcggccgacccgacccgaatcccgacccgatatttttctcgtcccggaaccaacctggcatggaataaacgattataactaattaataatataattattttaatctattaattagatttgttgaccatatttaataagtgcgattgatgattttatcttcccataccaattacatttttatg

SEQ ID NO: 32607 - DNA, 1985 bp, Heterodera glycines
  unsure (1)..(1985): unsure at all n locations
cgtactaaaccgaccccganccggggatttcgcttcaaaaaaaaattatgacgaaattaatattttaaattgaaaaaaatcatattntgaaattttcattagtatctgcatgaaaaaagctcgcactagtcagggcttcccttttttggtgnatttgattatgtgacccataatgataaatttctnttatttctttgagccacttcaaaatcatcgtcttattataaataatcgtaattaaaatttcctaaaatagtatcgggattccttcnagcatatcttcaaaaaatgatcacaaattttggttcctgttcctctgttaaacacaaagttggacctacaacgaagcgtaaaaatgtgcaagtggtcgtcagaacacgtcctctcagtgaaatggaacggaacgagcggtgtaaaaatattgtttcatgtgattccgtctccaaagtcgtttcattgaaaacaaacacatgcgacaaatacagcactggtcagcgccaatttggagtgttcgataaggtcttgataaactcgaattgaatatttatcattaacttataaaaaggcagcttttaggtttatggccacgaatcaactcagatccaagtctatggtgatgtggttgctccattgatgaaagaagttttgaatggctacaactgtacagtgtttgcgtgagttatttaaataatgttacttttagagggcactttttaccaaaaaaaaattctcagatatggccagaccggaagtggcaaaacctatacaatggaaggccgccacgacgaaagtggagctttttcttgggattcggacccgacctctggcattattccgagagcactgcatcaaatattcacagagctcagcaacgaagtctgtctaatggagaaaagagtgtaatatttgcgttgcaattatttcttttttttgcaggacatcgatttcaccgtccgtgtctcttatgttgagctttacaacgagcagatttacgacctgttgagtctcagtgaaacttctcagtgtgaatcgctgcgtatttttgatgacaaaaataaagttttttttccaaattttggcggcaatttattttcccttagggggtttctattgttggcgctgaagaagtcattgtgcgcacacgcgacgaggtgtacgacttgctaagacgcggtgcagacaaaaggcgtactgctgccactctgatgaacatttcttcaaggttttgcttattttgttgcccattcacaacgatcattcgtaatgccttttagtcgctctcattcggtttttaccgtttcggtgatggtccgcgaatcggggctggtcaatggcgaagaaatgttgcgtcaaggaaaactcaacttggtcgatttggcgggctcagagaatattggacgctcgggggcaactgataaaagggcacgcgaagcgggtgagtttttgtcttcgaagtatttttatgctaacttcagtcgcttgatttgtgttgcttcaggcaacatcaacacgagtttgttggcacttggcagagtgattaatgcactcaccacaaatgcgccgcatattccttaccgcgaaagcaaattgactcgaattttgcaggattcactcggcggcaaaacgatcaccacaattattgcgacgctttctccggcatcgtcaaactttgaagtggaaataaatcggaggcaagcaattaattggcttaagctcatttcaggagtctgtcaacactcttgaatatgctcaacgtgcgaagaacatcaaaaacaacccggaagtgaatcagaaaatcacgcggcgtggacttctcaaagaatacaatgaggaaatcgaaagacttcgtcgggatttgttggctgctcgagaaaaacacggaatttttttggacaaggaaaattatgagtagtttaactttgtttatttggttgttntgagtcatgtttagccacatggtcggagaaatcgatgagaaatcagcg

SEQ ID NO: 32608 - DNA, 1008 bp, Heterodera glycines
tgttatcaatagcaatgctatggccggccaagtgagattctttcttgaaagaacacgaaatgtctatgaagacaaatcgcctggcggcataaaatatgagcgtttgcagttcccaataaagcctgcattcgctatgaccattcaaaaaggtcagggccaaacaatccgcactgtcggcattgatctggaaagggaagtattttcccacggtcaattgtatacggccttctctcgggcaaccgacggaaacaatgtccgtgttcatgctcccaaccgggaaattgatgcccaaggccgagccaaagtgctgaatattgtagctactaatatgctcaagttacaataaatggcttagtccagagcagttgggcacatggtttttggagagatgccaatcccattcccatctgcactatgttgggtgcgaaaatggtgagaagcttggatccgggacatggaccggtcagccctctttagggcctacaggtgaattgccatttagcgctcaacccaataacgtgccaacgcctggactaagggagggaggagggccatgatgtgcaacgttagggcacttccggtttccattgcattatgcgatgtgtcaactccaattattggaggaaaccaagtgcatgtcggctgacgcaaagaccctaacagactaaaacgcgcctaggtagcgaagctcaagaagcgcgcagcgctttcccaagcgccaccctcgcatgcacacacccgctagtttatataccttagaacaacagtgcaactcattgctaaaacaaaaatctcgggaacggctaatcggggggacctgaaatgttgacattgcttaagcaactttttgaggcgcatccaggaaaactataggcattttggtccgatggccaactgagcgccgacggcgctgaaacggctttttgggggaaaatgccatgcattttttgggcgcttttcgtttcagtctcactgttacgaaatttttttcttttgctttgatcaaaa

SEQ ID NO: 32609 - DNA, 1843 bp, Heterodera glycines
  unsure (1)..(1843): unsure at all n locations
atgctcttgagggctctatgaggagtaaaagaaactcttaattattcatagaattctctatgacatttaaagacaggcgcaaaaggcacctttgaagcgtgcttgtccttctgcttgcacataatttggcacatttcttttgccaacactcacaataatttccctaaaataattagttaaatatattttatttttatttaaaaaatagaatttaggttttcgtttttgatttagaaatccttttttctcacatattccccgccccggcctttgccgcatcgatggtaaaagtgcacgagcgaccgaccttaaattgggtaatttaaatccaaatacgaaacaattaatgactaattgcctttgctggttggtcaagtgtcaatttgacacattcggcatcaaaagctttcactgtaaaaggcgaaccgggcacagattgaccatcaaattgtacagaaatctaaacaaaaaagagaaatttttgtgaaaaagaatttaaggaaaaaacaaacaaattaaaaattaattttataaattgagaatttaacgaaaaaatgaatcaaaaattatttttggcatagcaaacaaagacgaagagactaggttatttcacagaaaaaagttctcccaattattggtgtttgagtgtgtttgatggcaccagcggtgccaaaaattccgtcggaggatttgaattattggcgttttaattatttaaatatattgaaaatcatgtattaaataaagtgtaaacatttcattcattttacctgatgattgcccactgtttgcggtgtataacgcacaacggaacgcgacggctcttcttcataggccgcaacgtcgacgggcaacagatcaccacgagggtcctaaaagtgatncaatttggtgagagcaagtgataaattaccagccaattgtcttgaattaatttaaatatttttacattaccgtaatttgcactttcggtaactgttcaatcactggtgctgaagcagtgtcgtctccctcatcggacggaagaacatcgacgataaattccgtgagttggccgacgggagcttaaaacatttaaattagttttaaaatttatatgaaagctaactccgttccaagcctggccctgaagcgatcactgaaaagctttggggggcatgccgaatttgttgaggctgttgttgttgctgcggcagcagtttttgttgcaacactttttctggcaccaaaagatggcaagtgaacggtgaaccggggacaggctaaaatttataaaattagagaagttgtgagcaatttgaatatctattcttttgtggaaaaatctgtgaaaaaaaatctcacaaaattttcaaaaaaatttttccaggatttcgaccggnctggaacccccccccccccatccctttcaaacacttttttgaaaatatctccgtaacagggttgttccgggtcgagaaaaatatcgggtttcgggtcgataaaaaggccgggtttcgggtatcgggtttcgggtcaattgacaaatttttaatttgtttaaaaatcaaatggcactgcaatatttgcagcgaattgcgccatttataggacgatggaaataaaaccaaatggaatcaggtttttcagccatttgctttgcttaaattcaagaaattcatacaaaatatctttagaaaaaggataataatgnaatagggatgtcaaaaatatgtacaaaaattggtcaaaatatgtacataaatatgtaaaaaaaatccccaaatatgtaagaaatatgtataaaaacccaaaatatgtacgaaaatatgtaaataaaatttttttttaatgggtatttttt

SEQ ID NO: 32610 - DNA, 946 bp, Heterodera glycines
  unsure (1)..(946): unsure at all n locations
gtaagtttgagcncaattttggacatagtcgcaaatgtttgttcatgaccaaaatgcgctgccggcaaaaagaaaaaaaaaattatgaaaaaattggaactttttccgccgacctttgcacttcgtttgccttcgcattggtgaacgccaatccccgctttggcatctctcaaagttcactcactttgtgcaattcgttcgcctaaattgggatgcatttttttcaattttaatttacatccaagcgtggggggaaagagttctattatttttttacaattcaaaaacaactctttttgttagcaaattccaatttgttgcccaatttgaaaatgatccttaagagaaatttggattttttttttgagtaatttaatttaaaaaaaatttccacacaatttagcatgcgttaaacccaaaaaaattccaaaattttttctgccagtgtgtccggggatgtgttgaaattgggcattttgccatggctctcaaaagttactgcttattaaaatatttttcttatttgaaagcgtcttccatgggctagcacaaaatcaacaaattccaccgcaaaaacgacattcaaaactttagtgattttcagaaaatatggcatttacgaaagggggacaattggacgacagacaagtataaaaggaaaaatacccaaaaaatcgcccattgtcgcccatttgtcccacgccaaaaaagtgccatttatgcccgtccgacccgataatttatggaaaaaagcaattttttcaaaattgttacctccgtcagcctcgcagagcgcaaattctccgtcgagaattttgacatttgcggaagtgcgggaaacggaataaaaagaattgaaattgaaataaaatagctgtgaataaaataaaaagtatatacaaaaattaataattttatggcaaaaaattcagaaaacattaaaaaa

SEQ ID NO: 32611 - DNA, 997 bp, Heterodera glycines
  unsure (1)..(997): unsure at all n locations
tgcaagggcatcaaaaagacaaggaaaaagcacagctatgatgctacgccagtaattctgaattaaaattttttattaattttaaagcgtcactatnttatttttttagcaaaattaattcataaatattttttcagaaactgctctgaaacgcaccaaatcttatatacaagttatttaggcactcagatgctttctctatcaaaaagggagatgaataaaaaatctaaaaatttttaattgctttttaaatatgcgaaaaattttaggcttacttttttttaataaactgatcagaagcgcaccacatttcgtgagggcatcaaaaagacaaggaaaagcacagatatgatgctaactccagtaattctgaatttaaaattttttattaatttttaaagcgtcactattttatttttttagcaaaattaattcataaatattttttcagaaagtgctctgaaacgcaccaaactttatttacaagttattttaggcactcagatgctttcactatcaaaaaaggagatgaataaaaatttaaaaaatttttaattgctttttaaatatgcgaaaaattttaggcttaacttttttttataaactgatcagaagcgcaccagattttgcaagggcatcaaaaagacaaggaaaagcacagctatgatgctaacgccagtaattctgaatttaaaattttttattaatttttaaagcgtcactattttatttttttagcaaaattaattcataaatattttttcagaaactgctctgaaacgcaccaaatcttatatacaagttatttaggcactcagatgctttctctatcaaaaagggagatgaataaaaaatctaaaaatttttaattgctttttaaatatgcgaaaaattttaggcttaacttttttttataaactgatcagaagcgcaccagattttgcaagggcatcaaaaagacaaggaaaagcacagctatgatgctaacgccagtaat

SEQ ID NO: 32612 - DNA, 1954 bp, Heterodera glycines
ccagaattttgatgttggatggcatattgtgccaatgtttcttgatgttccaaccttgccttttgccgccgacttttggctaagcttaaagttttgattcaatatgttgctttaaaattttctgttttcactgatcgtcccagtggtggcccagcaacagcctttggttgggcaatgccatctccgtttgtttgtccgttttaatgccaacaaaaagcaaggacaaaatggagaaggccaacaggaaaacagtcattttagaaaagttgaaaaacatttttaatagataaatattttaaattacggattaattttaattaaaaggatgcgtttccttgcccccctttgcctatttatacatttttggcaccaaagaatgcactttcgcatatttttttggccacgaaaatgactgattgaataaatgcgtgtgtggccacagataatgacttcgataaatgatgttgttatgaatggaaaatttattagtctacgcttttcaattttgaaaatcggcgcaattgtaaatattttgctcaataaattatgaattcggaccgaaattatttttaatgaaatttgatcaattagcataattcgcggttaagcgtaatggaatagaaagttggtggtaaagtaaaagaaaaaaagagatggttgaataacggtcggtggttgcttgttgccccagaagaccgtcttctcagttggtgtttcggtgaaataatcagtttttttataaaacccgtcggcggagggtcggcgaggaaccctaatttcttttattattattttaattttatgctaatgggagaatggcgaagaatattttctgtatcaaattattataattttttgttaataagatttagaaatttattttttttattaattaaaaatatatcacttatttggatttttcgataatacgatcgttttggtttgttttacaccacgaagcgctgcttggtaaattttagcatttagtttcttttttatagaagttgaaacaaaataattaatttttaatgttttaaggttgcgtttaaatattatcccctgttttaagacgttttgggggtatcccgcgataaatctaatagaaaatcaacagaacccaatatgattaaaataaatcttttggcattagttttttttctcagtgtaattataaattttttatttcattgtctgctggtgtgtttcctggagatggcttttgggtggcaattttgttcaatgtttctgggccaattatcgtcgtcccgcagagctttcaggttcctccccccccccccccccccgcaaagcatcattaagccgatttatgcaatcgctaatttttgaatgtgcttttattacatgggatcaattgttatttattattagttccatcattgttataattctttgcaattttacaatgattaataaacaaatttttgtttattttggtcaaatgttcccatcataatctgtccacagcaatggcgccaacatttttgggtttgcttacgtcccaacaatttacaaaaaaaaaaaccaaaaattattatttatttacatattatgttaaatagttagattttatattaattttgttgctaatcaaataaagtaatttggatcaatctcaacaaaatgcatttgaaggatttttattagttttattttttttctgccgaattgtttctgaacataatatagaaaatacctacttttgtttttacaccaattaattttttaaattcataaaaaaaaattaaaaatcaaaggactattcaaatttattcccaatcaaatcctaattttcataaatattattattaggggtggcaattttatgtaaatacatattttttcctggattctccatgctctaaatagtaggaaaaacactttcttttttttttgtgtttgcgaacaaaagttgtggcttttatttacatatttt

SEQ ID NO: 32613 - DNA, 1374 bp, Heterodera glycines
ctcctccgccacctcctccgcatccaccgccgccacctcctccgcttggcccaccgcaactgactccaagcgtaatgctgcctccgcctcctccgcatccaccccctccgccaccgcatccgccgcctccaccgcatcctcctccacagccgcattgacggctcacgcggttggcgctgggagcaaggctaaagcgaaacgcgtaagtttacgcctgcaattgcgcaacgcgtgccgcgccaactcactccgaaccgccgctcatcagcagagagtgggccattccgacgcccaaaagggtaagcacgaacacactacacctcgtcattgttgaagtctgaaccgaatggggggggaggtgaagcggctgaacggatggttaagcggtgcttccgctgagtctgtcacctgcgctcttgctgctgttcctttgatgagtgaatgttcactgatcgatgtgtgctttgctccgtttggccctcccttttatagtgcccccctccttggccaatctctgccgttcaattgcgacacaatcggatgcttcttccatgaaaccgatttgatttgtcccgctaataaacgggttttgtcgtcccacgcgccctcataaaaagggccgcgcgtctctggcggtgatttgtgtgaccttttccctcccattttcccgtttttcgcttcacctcccactttcacttgggcaaatttatttccttcaccgattttaacgctttcatatttgcatctattctatattttgtgtaaatgatgagttttgtttttgttcaaattctttctttacttttcaaattattttaatcatttttcgattgaataattttataaattgtaacaaattttagctaaagttgggcgataataggagatttttgccggttagggaacttaaataaaaaaattctaaggaaaagcggaaaaaacctaatcagaattatgtaatggattgtaattttactttataatttcgtcgctctttacttttctttttccattagcttctggccaacggtatcaaatcagcagctgattcgaatctgccttgggccagattcggactcattttgtccgattgatagggccgacgatgccaatgggtgcaaattgggattttgatgatttggttaaaagattgtaatcaaaatgacaactttgtggggttttcagaatatttttaaaaatttagtgaaaatatttttaaataagggtaaatgaagtcctaatttatctttaaacaattaataattagacaaaaaaatgaaaatttttaatagaccaaaatcatatcggtgattatttataaatttctaatgttttactgtgtttttctcacaattcttccattttcaattccac

SEQ ID NO: 32614 - DNA, 1204 bp, Heterodera glycines
gctgtcaaaaatatgcacaaaaaatggccaaagtatgggcataaatatgcaaaaaaaatcgtgaaatatgcacaaaaatcgcaatatgcaccaaatataaacaaaaaaacttgaaaataaggtttaaaataatttaaaaattttattcctcataaattttatcgattgtttttgtaatttcaaatcaaaaatttttcaagtttttcggcagtgaagttcactcttgactcactcgcccattcattcagatttggatttaatttttggcataatcaaaatttttcttaagggatattcaaatcggaaaatatttgacgaaaaatggcaaaatatgcaaaaaatctgaaaatatgaacaaaaaatggcaaaatatgcatgaaaaaatgtacatgacttatgcgaaaattttttgtttggtcgattcttaagggtgtattttttaataccaaaatttccttgatagagatcggacttttcaagttttctgccttcttctccaatcctaatatcaatgtcttctttcactactacccatttgactcttattttattcatatatttatttttttctgttatcatacatttttttacttactctagacacttttatctgaatattcgtcagagaagtggttttcgcccttctgatgacttaggaagcctcaaaccctgctagaaatgcgtttttcatgcttattttcatgcccaaagttagcaaaaaattcagcaaatgctgcagtaaaacccgggctctattgattactcagattgaaaaaatcaatttattttttctaaaaatcgctaacagattcttcatgaatttatcgcataactcacaggagcatgtggacatggaaaatttgtgcattcgctatatctactgggtttattttattattgaagcccttttcggcgcggacagaattgattttggtcggggtgacacctgaaaaaaacatattaaaaataaaaatcaaattattattattattattatttttgcttttcacccaaagtaattgtggcagaggaactccaaaagttccaatttcggatcaaggccaaattatgataatatttaagctcttgtttcagttgcttcgcgagtcccatgagcgggttcaatcttttggtgtcctcgtcccgccatttccttaacagaaaatatttcaagtagaattttgagaaacaaaacaaaattttg

SEQ ID NO: 32615 - DNA, 1021 bp, Heterodera glycines
gagaggcagggggagagagagaggaagggcgagagagagaggaagggcgagagagagagggagagagagcgagagagagagggggggtgggagagagaggcagggcgagagagagagggagagagagcgtgagagagagggggggtgtgaatagagaggcaggtggatagtatagtggtgggtcgattgtgtgaggaatggcttgagtatagatgtagagtctttttttgttcgagggcggctgcgcatgagaaaattgcgacgtcagtattatctagttccatgttccttacggacatttgcggacaatttcgggaaaagaataaaaaattcataaaaaaaaattattttttttctaaaaaaacgaatggaaactgcaagactaaacaaaaatttgtttttgttttttgggctttggaaggcctcaatatctcatttttatatttctaaaattaatttcgcaggtcaaagtgaggttctagtttcttaaatgatgagttttattggtctccaaataactattttttggattttatgaaaatttacttcccaaagagtatttgtcaacaacattttttaaatttctcgagctataccgacaagtcttgtctggggatttgctatcagctcctcaacttttctatcccagagaatcggggaagaaacctagataaatcttgctctagggttcagcgaggatagcattccgaggccccaaaaattttcggaatggaaattcgagaccaaaaatcccgggaatcggatgccaaaatcggaattcgtgaagctggtgttcagcacttaaattatcttgttattttgaaattataaaataaattttgttcgcaattaagcatgtcgcaaactctttccttatatctgaaattagaggagacgtattatggggccaaattttccctctctgttttaaaaaaaaattttaatgtttttttaagaaaatttttattttttcccattttgtatgcaaatgtccgtccgcaatgccccactgcgttccctg

SEQ ID NO: 32616 - DNA, 1628 bp, Heterodera glycines
cgcaagaggttcggcctcaagtggcggcggcgagggcgagacagagcgacggcgacgcgaccgcgagcgaacacgactcagctgcggctcaaccgccgtctgaggtggcgattgcgcaagaggttcggcaccaagtggcggcggcgagggcgagacagagcgacgcgaccgcgagcgggcacgactcagctgcggctcaaccaccgtcgtaagtaccggttgcgcaagaagttcggccccgcgtggcggcggcgatggcgagacacggcgatgcgaccgcgagcggctgcgacgtcgacgcggagagcgggaacggtctcgggacgtgcgacgcggagagcggtcacgtgacgagcgacgagtacgggacggtgtgcggcgacgtctaaaagagcggcgagttgaattatgtcaattacggtaagcaaaaattatacattagggattttaaatggttttatgggattggaatttaactgtgattcagcattttatttttgtaataaaattttgggtaggtgaaaggaggcaatcaaaataaggcgcccagtgaagctgtatgtgcgtcgccagcaatagatgaactttttgatattgttcacctaatttatttttttttaggaggggggggggaaataacaattcgtttttgacccccatttcattttaaacggggattcgttttcactgatactactagtcatacacacctgcccggagaacgtgaccgatccgtggcgcccctcttgcgcggcggcgatctgctcctgccacggtgctcccgtcgatggtgatgatccaccgccatcgactgatgttgctgctcttcacgaccacgaccaccattttctactgctgtcgtcgttgtttttgaatgctgatgatgtttactgtacgattgccgaattatggtgccgttgttatcagcgcttgtggcgccgatgttcatctgcggtgcggacgacggtggcggttgtgcaaaaatgttacggtagccaaacgtctcaatggtttcgttgtgcacttcaccggtggcgtaccgttcctgctgacgcttctgggcacgcttttgcaactcctcctcccgctccaacttgatcttgatgcgctcgtccagttccctggtgaatcacgaattatgagtgggtcaaaattaatacacattaaaacaataaaaacaaaaaactttttttgaattttttttaaatttccggagggaaacgatagaaactgatggtcatggttttttgaaatatgtgcctaaactcaaaaccaacttcaatgtgatcagacggcgttcttcgcgccgccaatgcggcggtgttgcgctgcgcgagcgaccgccccgaaacgagtcatcctcgggccggaagcggatggcaccgcggcccttcacgcgcatggggccgcgctgacgcgtcgtcgacgcggaaccaccgccgccggtggtcagactgcgccgttgcggcacagaatctttgccctcaggcgttttggacctgtgaaaagtgacgcaaaaattaagtggcgaaaaaattggtgaatcattggtcggcggtatatagttataatatcaaattgtatcatcaaaaacgtagtattttttgttgaaaattgaaattgctcat

SEQ ID NO: 32617 - DNA, 1539 bp, Heterodera glycines
gggctctaccaattacatttgtttttatttttggtttaaaactatcaatcacaaatacacaaagtaaatggcacggaattccgactttcgaaaatttttggggcctcggaatgcaatcactggtatgcattcttgggtcattcagattaacgaagtaaatccgatgcagagctgcacgtaattacggattacgggtttttggagtacgggttacagatttttgggatttttccgtaattttgacccgtaactgaaacttttggattattttcgagacgatttcttgtaagattatttttttacaaaaacaaattttctattttcattgaaaggttacccgttttgattttttttgaggattcaaagtcatttttgctagtttttaaggcgcattttagtgcatatttgtgcatttttcgggtttttagggcctatttgggggatttttaatgcatattttatgcgcatatttgacattttttagtgcatacaacttataggggaggggtgggggtcgcaggcgaagggaaaagagggaaatttctaaaaaatttcgctattttttgcaaattcgtttcataaaaaacactcgaggtgcggaaatttcaaaaacagcttttgaaccgatttaattacaagcaaaagtacccataaacgaaaaattttaaagaaaaatttttcgaacaaatttggtatcattcgtaagtcttgacgagctaagtctaaaaatctgtggatgaggtcgaaccgaccccatctaagcactggacactgagtcccagtgaaagtagacacttcagtggcgtactttttatcataaaataattttttacgataaaaaaataatttttaattttttaataaattattaaaaaaataaaataaaataaaaacattataaaaatagggacataaaatatactctaaatgcagtgtttttttggtttgagtttttttattaaaagatatagacttaaggattcaaagtcatttttgctagttttaaggcgcattttagtgcatatttgtgcatttttcgggtttttagggcatatttgggggatttttaatgcatattttatgcgcatatttggcattttttagtgcatacaacttataaccctagtcattagagattgattggagctcgttttaggcggctttttagcgagcccaattctatactacagcctatttacccagttttccctgagaaattaagttccatgaggcataggtagcttctaacattagacctgcagattccaaaattgacatcatgtacagacaccctataagcatttttattgcctttaagccggaccaaacacatgtctatccgaaaaatgactagtttcaggctttttcttcattcttgtaccattaattttcttcaactttctcaatttataagaaaaaaatcctaatttattttgaaaattttattattttttttaatttaattattttcatgagatgaaaaagtcatttaaaatttggtaaaaatttcttcgaataaaagggatttctcaaaaaaaa

SEQ ID NO: 32618 - DNA, 1764 bp, Heterodera glycines
  unsure (1)..(1764): unsure at all n locations
ataggaaaattctaagaaaaaaaattttttntgagaaattttcagcgattttttggaaatttttttgaaaaatcttttgcaattcaccataaaaattttagaaaatttttaatttctcggggggggggggggaacgagctgctcccctccgtatctcccaacgaaaattaaaattttttttttttaatattttaagtttttcaaaaaatgtaataaaggaaaacaaaaaacatttttatgaagaattaattgctgatttgagaaaaatgttcaaacaaatcacaaaattttttatatgtttttttcttgaattttttttttttgaaaaaattatatatttgtgcccttttaattttttggaagggttttaaaacaaaaccagaaatatacaaaaaattgaaaaatccttgaaaattgatcaatgcacaaatcaaataaatgcccattttgcacaccaatgaatgagtttggcaccggaattttaagccatttccgatcccgaatgtcgagccccgagcgcgggtgtgccatccgtcgcaaaatgacgctcgcctccatggcggcatgcaacggcacgggcacggacggtgcggtggcatggcacggagacggcagaggcggcggattgtttttggcattgtggagagacgaagggaggacggtgggctcggcagcagcagcagctaaacattggcaattataaaaaaatttccaaaaaaatttattataaaattttaaatgaaaattttttatttttaaaaattttgaagacattttagggaaattttttttaaaacgcttgactttttctagcgattttttcaaattttatgtttttttcaatttttaaagaatcgcagaaaatcttttcaattttttaaatatttaaatgcaagtttgagtgtgtgtttttttaatttcaggggatggggggaggggggtgaaatgttgtgcagccctagtaataaatttaagaatttctttaaaaatgaatggtcaccatttttgttgccattgttgttgttgttgacttctgtcggcaccatttttgggtcgttcaccatcaataatgccttttgctgctctttcgatcttgcctcaaagtggaatttatatatgggtacaccccaaaacgtcgccgccgaaacgtcgcaacaaaaaaaaaattactagtattttttcaaaattataagaaaattaaaaattattttagtttttttttgaaaatctaagttaataaaaactaaatttgatgaaaaaaaaacttgaaaaaaattttttttccttaaatttcttaataaatttttttgaattcttcaaaattttcccgaagcgggataggcaactactatttttgataattaaaataaaaagattagtgtgacgtgatgtcccagcgctttgactgaccggctccgatacacttctctatgtatgtctccatgtatacgtatatatatacattaggaacacacatatcaaaagcataacatcatttgcgaaacgaacaaaaaggtcaaccttagttagcggacacgatttggcaatcacttaattgtcaacccatccgctaactaatggccaaacattcgaatcagtttaggtctcgaccggcaccatttcgcggtgtacctgcgccgctgtaagttgtagctccttttgcggtgtgagccggagcacgcgagcgcggaattccgagccgcggaatggcgatggagcgacgcgcgcatttgcgacggagaatggcaccgatatggactgata

SEQ ID NO: 32619 - DNA, 1723 bp, Heterodera glycines
  unsure (1)..(1723): unsure at all n locations
aaaaacagagaataattgtataaaaaaaggtttcaacacctaattaaagccaataaaaaattaaattttcgaaaatgagaaatattgtccagaaagaaaattacattattttacttttgtaattgtttattctatcctacaatttttaatttatactaattcctctttttattagttaaataaacaaaatttaatttgaatgatttttttatgagaaatttaaaaaaaattactttttttggctgataaatagggcccggattcttagttttttaactattttttctgcgttttattttgatgagaaatgcacgaaaaacacatttttaattcggaaattcttcgttttaacgccactattcatcactcggaatcactattttggagcttcgccactaaaagaactattttggaagttggccactaaaataattttttgccactattttggcattttgtcattatttttgccactattttggcattttttaaaaaatttcccaaaaaatgcaataaaaacgaaaaatacaccccaagaatcgacctaaaaaattcaaaaaatacacccctaagaatctacctaaaaatttcaaaaatacacccctaagaattggaaaattttcacaaaaattcttccccaaattttttttttcttgttcaatatttgctaagaaaatattttgtaactgcaatcagtgcaaaagttgtttgccttattttaaattattttcaaattaaaaaatagcctatttaaaaaattacacccctaaatttggaactttttcgccactattttttccactattttggcattttttgtaactatttagttaaattatttgnggattttttatcactanaaatccgggcgctactgataaaaaacaataatttttcagaccttaaggacgacatttgtcgatacaaattgatcatttgataggaatttttcggcaattatccctgctcggccaaagatgtaaacgataagcgcaacactatgactgatcagaatgcttttcaggttgacatgtaaaattttggttggataaatcactgccaaattcaaaaaggcaatggccaacacaatgccataggtgaaaagttcaaaaaaggaaaatatataagcaaaaacgtcgactatgacggatgggaatgccatttgaacaaaatctgttaaaaaattttcacaatttattaatttgtttgaattatacctacatatttgaatgaaaaaataaatttaaaacggttaaaaaaaccaattaaaatttttgatggcactattagagagagggatggatgacagggttgttgcgagagcatacataatcaaataccaaattcgataaaagcatttaaaacgctaccaaattaaaatacaagaaccagaatgcgagaacgagaagtccaaaaaaatagcaagtaaggataagcgagacttgcaacatccctggtgggtggcatattttttaatcatctaacatttgcgttggcataaatagagggatgggtggaattattttttattgcaattaaaattttgatggcactaataaaggagtggttgatttactttttttaatgcaataaaaattttctgtggcactattaaaggagtggtggtattttttaattaagtttttcgttggcactaatagatgggtgggtggtacttttatggtgtaatgaaaattttcagtgacattattaaaggggtggg

SEQ ID NO: 32620 - DNA, 1186 bp, Heterodera glycines
  unsure (1)..(1186): unsure at all n locations
aagggggaggacatgattntgagtgggaaaatttcaccannnatcttccanaatttttntagaagttattaagccgctgatcagtgatcacgaaaatataatcagaaggatcttaagattcgttaagacctaagaatccatccgtatcagttgattctgaagggatggcgctggtcaggttcggattctttcgatataattttttgtgcattttgggtcttgtaaactttattgtgaatttttaaccattttcgtctgcttcaaaagttgcagggccttaaaaatcagaaattttttttggcgccgaaacgaccctggcgccgaaacagcggcgccgaaacgaccctggcgccgaaacggcgtcgccgaaacggcggcgccgaaacgacccgttcccggaactgacccctactgttctggacaactcagctcattttaatttttcaaaaatttttaaaataatatttaaatttaaacgacagaaattaatatttttaataaactttaatataaaatatttttaataaattttaaaactaataaaaaaaaagatttatgataaaaatactgataatgaaagataaatgtaagatttttaaaaatagtaatttattcacggctaaaatttaaaaaaatatttttatttttaatttaattttcatttttatgattattttgtaaattgtcgtaagctgagttgtcccccccccagcagctgaatggtcccgacgcggggataaactatatgaacgccccgtgaaaaaatgggtcaaataatataccaatcgattcgtctcgaggagctaagcatggaaaaatatgtctcgagttgcggaaatgccaaaaaaccggtttttgaaccggttcaaaacttgaaaaattgagtgaaaaggggggcggctcctgactctaaaatgatcaaatttggacaaatttggtaccattcgaaagctcttgatgagctaagtctaaaaaacaaggtataaactcgaaccaatgccatctaagcactgggacaactgagccccagagaaaatggacacttcagtaccaagtaccaaaataaataaccatttaaaagcaaaaatttcgcaaaagtgagcatgcgaagacggagcaagtactggggcgagaaggagggcggagtaagaagtctgacgagcgccacaggcggttgactgcgggg

SEQ ID NO: 32621 - DNA, 990 bp, Heterodera glycines
gcacgggcgccacgcatgcccattcgccaagccctcgggttccaactgctcacgggtgccacgcatgcctattcgccaagtcctcgggttccaatgctgcacgggcgccacgcatgcgcattccaactgctcacgggtgccacgcatgcccattcgccaagccctcgggttccaatgctgcacgggtgccacgcatgcccattcaactgagcacgggtgccacgcatgcccattcgccaagccctcgggttccaatgctgcacgggtgccacgcatgcccattcaactgagcacgggtgccacgcgcatgtgccggtagctgctgctgcacgaacatccagacacgcatctttcggtagctgctactgcccagtcaacctggactgtgcacccgttactggctacaactcgaccggctagggtaagcaagtgcacgctccccacgcatgccctcagagcggctagttatctatatataaaaaaatggggggggctctctgcaaatgtggtcgggaaattgcgaattctgcacctatcgacccaattctttttgcgttagccaactgatctcccgctacacatttgtgaccaacacatttaaagtgccatcactttgcgctgagatatgctaacctgttttcgctaagtgttgcgcagcgcccggcggcgcacagatagcggctgggcgccgcttggcgaaatgcgtgccatgccgtggggagcatttaaaaaaaaaatttggcccgatccgaccacttggcgccgagattgctgtctttttgtggaccagctttgcgctatagacagcaatcttttgggccatcaatgctggggagtcagaatttttttccccgcacgtctgctgacctgtaaggcttggaaaaaaaattgccgtctctcgccgggcgcaatgcgccgagatatgctaccctgtttttgctcgctctcctcaaggggcgcctagcgcctcgcgctgcagagtagctgtct

SEQ ID NO: 32622 - DNA, 1177 bp, Heterodera glycines
  unsure (1)..(1177): unsure at all n locations
aacaaattataaatattaagaacacaacataaattctcaaaaattgacaaaggtcgctttaaaagttaaagtcaggaaaagacgaggaataataaaataattattatataaaataacatgttaagatcatttcgtaaagattctttaaagattgaacatttttgaaaagaacagaaattatcattctgaaattgaatagctaaaaagggaagaaatgattaattgaattattgtcttctaaattgttaaaaatacccttaaacttaaaatttatataatcttaaaaaaatttatttcttccaaaagcattagcacttaaacaattaaatataaagaagaaaaaataagatataaatgcaattaattcatttaaaaaaatcaaagggaataattaattttagattttagtatcagtgtatcattaaaagcattttaaagatcggaatataagataaaaataattattaaaaaagtgacagcaacattcaaaattacaaaatttaaataattaaaatattttctagttttgagaaacaaggaaaaaattaccaatgggcagtaaaaataataattatatatccttaatcataacttatttcattaaaaaatattaaaaaaaaatcaaattaacttaaaaaaatttttttttgtattagaaaacagaacaaagcatgacaattgattggcatatgaaagaacatcgctgcaaaaagcatgaatctattaaaaacatttaattaattaatagatagacttttaagaattctccaaatgaaaatatgtaattcctataaaagatttataactaaaagaataaatttattgccttttgatgaaaaaaatatccaaatttacaaaaatataatatagaaaggagtcttggaacatttattgcagtttacacgactataaaaaagactttcgagtaaacgagataatttaaatgataatggttaaactcattaaatttggcttttacaatatataaaatataagaaaataaaaaaatgaataaaaaatattgaaaaaacctcttcagccttaataaaacattctgacaatgaattgtgaaaacattgaaatgaataaaattaatttatacaaaggaagaaatctaanataatttaattttaatcattttataatttaagcattttgacataattttgctttatgg

SEQ ID NO: 32623 - DNA, 1389 bp, Heterodera glycines
ataaagatagagacctaaataataataatttttattgttatatgctcaagttaaaatataagatatatgaaattccttatttatcacgatagaatttaactaattattttaaattattatcaattataactctactaacatgagcctgcgtagtttttcagacttcagttgaagaattataaattcacaaatattttcttaaattcgcgagtgttttaaattatttgcttttaaactaatgaaataacttttttactttggaaaattccattagttgtcctctaatagataaataaatgtttatttaaagaaacccaataattatttgaatttaggttttttattttcaatttttaaataactatcagtatgcaaaaaatattttattgatactttttgaattggagtatttataaatctttttttatataaattatattaggttttcatttttgcctaatttatttaaatctgaatatatagatttttattgatctccacctcattattgttttattatttgcttatatgaattgtatacaaaaaaactttttgccttatctttattgatttgtcttatgctctagacttatttatctagtaatctataatcagttcaattttagaaatgattgtttttcaaattttagttttaaagttttatttgtttatttaatttatcgactatatttttttgcatttttgaataagcaatttgtgccaaacttcgaagaactgaagcgagcggttggccaattgcacggttcagatcgacgtgcgtgtcttgctataaatttagttatacgcaaattttttaaaattcactcttctgtaataacaccctattatattgtattcttttaaattataaaataattttcactgcgtttgtgcattttttaatttttttcattcttgatattactatcgcattgttacgcttttccaactcatttaggtttgacgcttcaaatgttttttgaatatacatttttaaattttttgatgcattgaatccatttacttaaactagaagtatgtttttttaatatcacaaatcaaaattatattaatataaccttttcgatgttttcgtatattgctttggatttagttttatatttttatgcttaaaatttttcttaattttatcgataaatttgtaaataattcattgccacattttctagttaaaagcatatacgaagtttaataaatttattcaagtaatttattagtttaatttaatttcagaaaattctggagtcaatgatttgtcgacaatgtatgtgatatgaattaaccaatattgttgcataattgtgattagccgcatatggatccaaagattatattcagcgcgagttcatctgaagcctaaatatgact

SEQ ID NO: 32624 - DNA, 1235 bp, Heterodera glycines
acgacaaatatttcaacaaaaatttttaaaaattgactagagcaatcgaacgctaacggacgacctaatggaaaaaaatccccgaaggagagaatttaattaaatccattccttcgggggaccgtgccgggtgccgcggggtaagcagtgctggttcgtttcatcacggcaccgaaccttttggctagtcagcaatcgttgcttaacttgccagatcggacgggtgcgcatgattccactgttccaagcaccccaccaaaagcaaaacgatataaccaaaatataaggaaaaattttttaaaaaattttttctccatcttcctttttgatactaaagcatcagagtgctaaattaagttgtaaataaaatctggtgcgcatcgagcactttctgaaaaaaataccccgaaaacaaaaaaatcgattttttcaagtgtccgtttggggtactcaaacaattatggggagcaaaaatccaacgcagaattaaagtacaggctatagggaagctattcccgaaggattcggtctccccataaatctgggcgcatcggttcggggggactgccccgaaaacaaaaaaatcgattttttcaagtgtccgtttggggtactcaaacaattatggggagcaaaaatccaacgcagaattaaagtacaggctatagggaagctattcccgaaggattcggtctccccataaatctgggcgcatcggttcggggggactgccccgaaaacaaaaaaatcgattttttcaagtgtccgtttggggtactcaaacaattatggggagcaaaaatccaacgcagaattaaagtacaggctatagggaagctattcccgaaggattcggtctccccataaatctgggcgcatcggttcggggggactgccccgaaaacaaaaaaatcgattttttcaagtgtccgtttggggtactcaaacaattatggggagcaaaaatccaacggagaattaaagtacaggctatagggaagctattcccgaaggattcggtctccccataaatctgggcgcatcggttcggggggactgccccgaaaacaaaaaaatcgattttttccagtgtccgtttggggtactcaaacaattatggggagcaaaaatccaaccgaaaattaaagtacaggctatagggaagctattcccgaaggattcgggcctccccataaatctgggcgcatcggttcgggggggactgcccccaaaac

SEQ ID NO: 32625 - DNA, 1119 bp, Heterodera glycines
agggggcaccgcatggtcttgcatttcatgaaaaatctttatgttcctaaaatagccaaaatgcattttcatggcataatttcaggtgctgaatacgtatatacacgatattttgcgtctcagcctttttggaaggtggttacagagtgttcgataaatggtcactatttgggcttcgggaaatgcagtgaaatttagaaaattcataactctcttcttttttgatcagatgtagtggaataaggtaagaaaaatatcaaacaattaggagaattttatgagatttaattggaatttatatgttgcagaaataaaaaacgttattccacaaattctggaaattttcagatttttcagaaaaaaactcagatctcggttccgtaaaggtgtttttgaaattttaaatactgaaaaaataagcaattttttgctctagttttataaattttaatttatctttttatcacttttttaaaaaaagttatagaaatagaagtgattttggccttcgggaccacaggggtgtgaccatgatttttgagtggaaaatttttttcaccaaaaatctttcaaaaatatgtctttagaggttatttgcgccgctgatcacgaatatgtgatcagattttacttttgacatcgttaagacctcagaatccctgtgtgattggggattctgaggggtggggcggcatgttcggacccaggccgtgattattattttttaatttattaaaaaacgggcgcgaagcgcccgtcctgaggccgcgaagcggccgaatgtcccccaaaaaattaaaaaacgggcgcgaagcgcccgtcctgaggccgcgaagcggccgaatgtcccccaaaaaattaaaaaacgggcgcgaagcgcccgtcctgaggccgcgaagcggccgaacgttccccacaaaattaaaaacgggcgcgaagcgcccgtcatgaggccgcgaagcggtcaaatgtctctcgcaaaattaaaaaggggcgcgaagcgcccgtcctgaggccgcgaagcgaccgaatgtcacccaaaaaattaaaaaactggcgcgaagagcccgtcctgaggccgcgaagcgaccgaatggtcccccaaaaattaaaaaacgg

SEQ ID NO: 32626 - DNA, 866 bp, Heterodera glycines
atagcatgggaatctttggacgcattaaggaagaaaagtgggaaattgtaaaaattggcacaaaaaatttgggaaatattgaccctagcagggaggaagcagcactttcccccagaaaatgtttttaataagaaatatcgagaaaaaaattctgaaaaatttatctagcattttttcaaaattttatggtaaattgtttaattttttcaaaaattttcgggggggggggacagcgggggttgggggaaagagcacccagccaaggcttcaaattttttttgccagaattagggtggcagattttacgaatttttcgcttctttaggttcaacaacttttccaagacggttccatttcattgcacacgcgaagtctcaagtacggaaagcttggccaaggcgtacttgttaaggtgagccgcagcattagcaaagagaacacttttattattggccggaaatttttcaaaatttgcacagaataagatcatattttattggtcgaaaaatttttgaggtaatattttcaggagggtaaaaattttcaaaaatctacccatttttatccattttttatgttttcgttccttgatccgttgactaataaatttgttttttcaaatccctttttatgtgtgctttaggtactgccccatcttgtccgacatcgcaagtcccatttccacaatttgccatgcggtgcctccgtcattcttggccgaaatgggtcggtccgatttgctgtttttgtattgattttccatttaattgggactttcggtccatgggatttttggtgaaaaaattgggccaaaacttgggcgggacctaagcaaaggcgaaaattctaacccccccccccctctt

SEQ ID NO: 32627 - DNA, 1274 bp, Heterodera glycines
aatcagagtcagtttgataaatgatcgaaactgaaatcatttaatcaaaaatattcgtttgatttcccctgtagcaatcaatcaccattgagaaatttaaaaatttcaatcatatctgatcgcccctaatgcttcatcccattgtcagtttcagcggattcggactcgggaaggccgagaacagaattggaaagtgaaccaattgttggacaagatgaggaggaagaaggggaggaagaaaatcatctttttgttgaggatgacgagaaagaagaggaggattatccggaagaaccggaagaactgcgagcattgagaagagaagcggaagaggaagaagaagaacgagagcaagagagagaagaggaagaagcgagagcggaagagggaggagaaagtagtcaaaagaaggaggaaggaaaagatgaagaggaagagagaaaaagaggaaaaggagaggaggagcaaaacggtgaagcaacggaagaagagaaaggcgaccaaaacgaaatggaaggccgaactgaactcgatgaagctgctgctgatcaggacgggacaaacatggaaattgatgccaaaaaagaagccttagttgaacatgaacaacatggcaaagaaaagaaaactgaacgggtcgcagatgaacatggcaaacttgggcatgaaaaatcggcacaccagcagcaacagcagaaacccttcatgttgggcgtgtattcggacgaattggaacagattctttacggcgaggcagctgtcaaaattcagagtgcatggcgagggtatgccgttttggattttcggcatgactaatgactagggcatccaattatgcatatttttttcctggactgtgggaggcctgaaacgcacgaaaaacatgtttttagcttggtttgaagcttctaggatgactttccatatgcatatttgtgcatatttcgcgatttatgtgcatatttggacagtttttcaacaaaacctctattaaaacggtcccctctattaaagccgccattttggcctctaatgaccgaaaaattttcaaaaatgtcattttttgggtattttctaataaaaaagtaactttttaaaaaattgaaatttatgccaaaaaatagtcaaaaaatagaaaattttccattttttctcaattttcttcaaaataaataaattttatatttattttctatttgtggttctaaattgtttattcatactacatttagctattttcgagattgtatgctgaaatttaacaaattgaagag

SEQ ID NO: 32628 - DNA, 1861 bp, Heterodera glycines
tggccatactgtgaccatgtttgcctgaacactatgggtttggcaaattttttaaattaatatttttattttatttatgtaaatatcatttaagtctgtccaatgacacaaatggttgcaaacattgtgactgtgatcttggcggctctgaagtcagtgcctttaattgaaaattaaaaaaaattattattaattaatcattaaaaatgaaaaagtttattattattattataaaaataaattccgaattttttttttattaataacttaaaaattcaccgcattttttattttatttattaaatattttgtcaatccctttttgaagagtacccattgcactgctgaagaaggcaaatgcaagtgcaaaccgaactttgaaggacgccgctgcaatataaccaccagtggttattattgcccaaccatcgacgaattcactttcgaggcaaaaaaaagcaaaacacaaaaacaaatttccaattttatttaattaaattgatatttaaatatattttagggttgcttcccgaccgaccctccgggagagaaaaaaagtcgggaaacggggagggaaattctcacaaaaatttgtcggggatggctgtaagaacttaaaaaaagatatcggagaacgacagcaacagtgttggggaataatttcataaaaagttgaaaaaaagagaaccagaaataatttatttaataaatttctaatattatgtatgattaaagctttggtaacaacctaccgtgatcttgagtcgagagtttcggtcttgactcgaaaaaagtctcgaattttcagtctcgattcccgagacttttccaaaccacaatatttggctgttttcagccaattaaataatttaaaaaaaacaaattatttttccaattttttatttgttttcatcttcttcaaaaaaaaacatttgcaggcagaatccatcctgtcaataccaaacaatgccgaaagtgtggtgcgcgaatcttcgccggatcggcctcggacatggacgggcgaaggttttgttcgagtgcgcgagaacacccacctaacatttgtggtaaaaaatgaaatttaacaacaaacaaataaaaataactgatttaaaacaaactttgcaaaatatttaagtattttttaaatttaatacaaattagcacaattcccaattaaaaggtggacggtctgacgaaaagtggccactacaatttggttgtgcgctatgagattgcgccagacggtgttttttctaattttttacttatccaaattataattcaaatccgattcatgttttcagacccaatcggatgggaggacctcaaaatcaccattgtccggcccggagaaccgagccctgacagtatttgtgccaatgccttgccatcggacgatttcatatcggctaggtgtatacaaaaaatacacattttaattttaaaaaattctttttttaagactgcctcctcggtcccgcttttacgaaattcaccctgccatttgtctggaatccgacactcgctacgaaatacggctttactttggcgagaaacggcgcaacgcaccggacattcgtgcgcatgtaaattttataacctcgactatttatccaccaacttgtccagggtcaataatttttatccaaaaattcttttggattcgtatattaattacagactgcgaagaattgttcgatatatttttcgaccattcctccacttttagacattggatagtcccaaaaagatttttggccacttcattcctctggatcggataattcggtctaaaatgttttccataaaaatttacaggaggagaggtaaccaaatgatctaatatttatatatttag

SEQ ID NO: 32629 - DNA, 1104 bp, Heterodera glycines
tgaatctgggcctgggtttcctagacaaaaaatcaaggttctggaaaaattcaggttgccgaaaaatggcttggacctgaacttgggatccaggaaaaatccatgtcgagctctagtaaatacaaaataaatggcgtttcccattgttttagatgaaacacaaggaatggaactatgaaatgcggatgggatcagagttcgcatgacgggatgtacattttctttctttctttttttgtcttgcatcattacacccaatgaattttttgcatctatttttgtcagtcaattgtaataaaatatatactggtgaagcacgtcaatttataataattgagaaacaaataaataaagacggagccgacgaaagtctgcttgacctatccccaaatgggtaatccttcggaattggtgtcccgacgggaaaaagagataaaaattttctttaaacttttgctagggtaaaaaaatgcactgatcacgaatccgagcttggattttgcaaaatcattgattttatctatgatttttcatcatgtacttgatttttttgaaaatttttgttttcggcaatttcggtattctgaatgttatagaatgcataaatagttttagaatgagccactaaatgtatatgaaagacaaaatttttgaaaacaaaaaatttctcaaaaaactacaaatcctgataaaaaatcgttgacgaaaatccagtattttgcaaaatccgcaacttcggattttgatcgcccattttttcctagcaaaagcgattttgtaagaaaatatttattttttttttgtcgggaccccaatttccgaaaggattacccagcttaaagagatgccaccttttttgccgtattgagaaacatcttgcttggttaatctttttgtgttccattttctaaagaaaacctaaccaactaaaactgtggaaaaagccatctttatctttctttcatttaaactaatataccgtgagaaaagaaaatgattgctaattgctctaattaattactaaacgcgcgagtgcctatttaaaaacgaacacgaacccttcactgagttttagttttcgacatttctatcgaattgtttcga

SEQ ID NO: 32630 - DNA, 1705 bp, Heterodera glycines
  unsure (1)..(1705): unsure at all n locations
ggatttatatgtgctaaaaaaactttttaaaatctgtatcaaaggaaaaaaaatagatcaagccggttttggctaatgtttacatttatttgatcataaggcagttcatctgcaggaactcaataaaggacacctacctttgggctattaagttgatcatattttgttttagttttttattttctaaaaattaaataaaacgcttttatttaaatacttttttcatttgaaaaatgaattaattacataaaaattttatatttacaaaaatattttattttattacactaataaacataattataaatataagaaattgatgaacaaaacaccttgtcaattcaaatcattctacagctcacgcaacatgagtttaaaagatgaaatataaaaataataaagtatttcttatgaaaaaattaaaaattataaaataaaacaatgtttaattacaaaatttgaaaatataataaaaactttgtataataagcataatattttgttttaaaaaaatatgatctgaataatttattttttactattattaaaaaaacaaaaaattttttattaaaaaaccttacatttttataaaaatatattaaatttaattcatttttataataaataaaaatatttattaaataacaacttttaaatttttttaaaatagtaattaattaaatcaaagatggtcgagaactttatttaaaattataaaaaatataagttaaaaatgattaaacgttgaggacttagcagctatatatttatttatttaaaaatcttataaaaaacgctatttatttaaaaattaatataaatcacaaaattaattgctattgttgaaacaagcacttgatttctacccataattttcaatctattattaggttatttaattcaaaaattaaaagttacctaattaatatgtgtggaaaaaaacatcgaaatgaccggcaatttgcaggagaaattgtacaagagaaaaatgcgattatattaaaattcttttcaaaaatctattattatttattcatattaatgtgaatcccaaaatataatatttattgttaaataaaatttaagataattaaaaaaaatacaacgcattaagaaaaaatttattatttcttattaatattataaaacaattacattgatagaaaatgagatttgaagatgagcaggaaaaataaagtaattaaattaatttttttaattattgaaaaatagaaaaaatcaagtaaaagaaaaaattaaaaaaaaatatttttaattttttaaagtgagaataaatattaaaaaggcctcaaagatattttaattgcaaagattattattcttaatgagtctcatcggtaaatttgaagaaaaacaataacaaaacaaacactctttgtaatgaaataaaaatgtttatttaatttaggtgtaattttttattttttattctaccaatttaaaaacaaaaactgatttaataattctaagtaaattataaatttacagtttcttcatctattagtttcaattttcacgaacagaacttaaaaacacatcaggaatgtgaaatttcttttatataaaatacaaaaatataaattactttaaaattaattaaatcaaaagaatnnctctctgnttnnttgcnncttnaataatcaaaaagggaaacaattaaaccaaaaaaacaataatgttttca

SEQ ID NO: 32631 - DNA, 832 bp, Heterodera glycines
tgggcatttgtttggccacccggaacgtacgaattgtgccatctcctgcaacaaatcgtccgaaatcgtcaattcgctcacttcttttgcatcgaccggcagccgctccaagttgacaagaagagcatattcgacttcttcagtgctgtccacgtcgttgtccgatgtgtgggcaacaatgacttcttagtctgtccggtgctcagaaatcagtcgagacaaaacgtcggcatgtccaaaatttgcagatttaaaattttattgtaaaatcataattggacaaaattagggcccaacgctgcaatcgggaagccgtgtagatcgggatcccatttttattaccgaatatagccaagagaggcttatgatccgttaacagagtaaaattacgaccgtaaatcatcctgtgaatttttgaacagcgaagatcaaagacaacgcttctcgttcaatttgggcgtaatttcgttccgcgggggtgagcgttcggctggcgtgctcgatgacgcactccactccgtttggaaacacatggctgatcgtggctccgattccactttggctgtcatccgcagcgacaggcagaacactggcttcaccttttgcttaaaatgcagcgtggcgttcgtcttcacacaatgtccgaagccaggttgaaacaccttcgggaaggaagccttgaaactggctgttgggtggcacgctcgaaagggatgatccaatccaatcccatgatgctcggcgcttcggtgtctgccactgaaagttcaagccgcattgtgactcctctgaacagaacgtcacacttgaaacttccccaacaacttcaatt

SEQ ID NO: 32632 - DNA, 1154 bp, Heterodera glycines
tgctatttttcaactttattccactaaatttgatcaaaaacgaagagagttatgaattttcgaaatttcactggattttccagggctctaattttgacgatttttcaaaaatttgtaaccaccttccaaaaagtctgaaacgcaaaataaagcatatattcatgttcagcaccttaaattatgccataaaaatgcattttggcaaacatatgagcaaaaaatattttcatgaaatgcaaaaccatggggtcccccctatggttttgagtttcaaaatcacaattaattttataactttttttaaactcatgctataaacatgagataaagcacattagattgggcttaaaattctctacaaaaaagctcttagacgattttttgataaaatcaactcctgacgagttattgagccagaactgaaattgaggcctagcaaccaaaattttctatttccaaaaaaattttaaaaattttttctgaaaatgacaccaatcgatagagcatgaaaaacggttgcttgaaagtggtctccgttttccccggaaaaatctgtaaaaaataataaaattcaaaaacggaaaattttcgagggggcctagctcgaaaatttctgaaaatttctgaaatctaaaaacatggttggatagagctcgtcgagctctacaaaaaagcctcttacaccgacctcctcccatcaaaagcctgggagttattccaccggcgctgaaatggcccaaaaaagtatgcaatttttagtcagtttttcggaaaaactggtaggccctaggagttcggtgaagaagcaaaaaatgtggcaaacattccaacttaaaatcctatcgaggccgatttttcatttaggcctttaaaaaatttttgaatccaaaaaacagcaaaaaaaattttgaaaaagccatttcagcgccgctggcgctcagttggcctccggaacggaatgcctatagttttcctggatgcgccgtcaaaagttgcccccaaggtcaaaatctcgaacccctcccgccagcggttcccgagatttttgttttagcaatgaaactcgatgttgctttagttatatataaactagcgtgtggcgcagtagttactcggtgtaggcagtatgctttgcactagtaattgctcggtgt

SEQ ID NO: 32633 - DNA, 2353 bp, Heterodera glycines
  unsure (1)..(2353): unsure at all n locations
cagggagaaggcacgaagaaaaattttgatgttttgccgcaaaaaatttttgggcatcatttttctatagtttntaattaataaaatggacaattaaacgcagaaaactgtcaaaacaanaatttttcactatttataggtaaactgtgccctcaggcactcactgcttggtgaatnttctattagctttaattagtgtccctcctcgaacttcntgttgcacaccaaataggatgnagagtgcatttaaatgagttcctaagtatttttttgtattagaaaatttcttttgtcctttattcgagtttttatgaaaattttctccccgacactttttaaattttcaccagccatttctaaacaaattttgtgggggaattttctctccaatctccgactccccggggagcaatcctaggatttcaccaaagaagtacagtattatgaaaaattattaaaaatgattaaaaatcaaatttagtggaaattattttactttattggatggccaaatcgtagagagtgaaaataatttatgtgaattttgacgccaaatatttaattaatataatgtttttgatgataagggaaaagtgggcgacagataataaatggtttacgaacaaacacactttatgcacgtatttatgacattttgcaagaatggagcagtgtgtcaattaggtataatgaaaacaaaattaatatttaatttaaatgtcaaaaaataaattaattattgaagcattcttaatgaaaaatgatttgaattagcgttggtcgggaccgggccgggaattcccgcccttttcagatcccattatcggttttggcaaagccaagtcccggtagggtcgtaatgaaccaggaaataagcattggtaagaatggggtcggaaatgaaaaattattggtggaaagctaaaatatcgagaacggtaaaaattacagggatggtaatgagaaaaataaaaaacatcccgcctttgtgccgttcctgtaaaatcccatccgggcaaaaaagacaggaaacggggcgggatacccaggtttttgggctatagtaaaatatttttcatttgttaggtgaaattattattgctaaaatttacaaaaatcacttttttggctgggaacgattgaaggattggggtgggggaggggggcgccaatgggcaattaataaaatccatttactaatttattggatgtaaaaaattaacaaatcctatatatatattagaaatttcttaaaaatgagtttttccaaaattaaatttcttaattcttaaaaaaaagtttttcaaaattaatttaaaatacaaatttggtgttaatcaatacaagtaaaaatattaaaaaatgggaatccggtgtgggccgatttagatgccccaattggaggctcgggccaatttttttttaatgggaccaattatttttttaatatttataaatcgcttctcaaattagaaaaccaatagatattgcataaaatgaatttctgacgatgttaaaatttatacagcattttaaagaaagagtactacctccgttgagaaaaatgtaagcaagtgaatgcgttcgagatttaggattaatagatcccggattcagtttttcagaatatgtaataaaaatattaaaactgcctttttaagaaaagttttattaaaacaaaagattaaaaaatgatatcagcttaaaaagcatacataagacctacattagaatattgaagtctgtaaacactaatttaccttacaatgaacggcttatcatttgaaaattaaataaattaactgaaaggcttaatggtcaaaagcagccaacacattcgtatttatgcaaagaaaacaacataaaaaatttccgataattttggtctaaatttccatttttactccactggtcggtgaccattttcccaattagaatggccttgccctacggtttggtgcatttttcacggcgtaaacgaataattgttacaatccaatcatcaaagtcattgttaaatgttgcgcaaaagttcaccaatcatcatttggtgcttaactggttgcattaaggcagggatgcgatcgaaaatttttcaaaatcaggacatcgggcccaaaaaatcagattttggggtcaaaaatcagaacattttgcaaaattgcttcaaatcttttatttttacaattaatttaatcaaaaatcattaaatattatatttttgcctccaattatcatctttaaaaattttggtgaggaaattaacaaatcgtaaatttcagtgcactcgggatcaaaaaatcagatttttaangaattttttgcggcgcatttttccaaaaacttttgggaa

SEQ ID NO: 32634 - DNA, 1383 bp, Heterodera glycines
  unsure (1)..(1383): unsure at all n locations
ttttatcattggcaccactgctgaattgtgcattaatcagtgcccataattctttgagctatacnagcaatgggtgcattttaaatagatctgaccctttaattaatgcctaatatggtgaaagtttgtaaggataaaggcagattttcggaacatataagcgcccctcatcgtcttatcaagggctttcgagcagtttttcaaactcttttcattgtttgagtgtttttattattgtctagcaattcacgaaagtgagcgcttttggtttacctttagaaattcttcagtacattacaaaatgatttttaaaaaggcatttatatacacgagcattttacgggggctggaatttataaattctgagaatctcgtaaatttgctaaattttcacttttatcattggcaacactgctgaattgtgcattaatcagttgccataattctttgagctataacagcaatgggtgcattttaaatagatctgaaccttttaattaatgccgaatatggtgaaagtttgtaaggattaaaggtagattttcggaacatataagcgccccttatcgtcttatcaagggctttcgagcagtttttcaaactcttttcattgtttgagtgtttttattattgtctagcaattcacgaaagtgagcgcttttcgtttacctttagaaattcttcagtacattacaaaatgatttttaaaaaggcatttatatacacgagcattttacgggggctggaatttataaattctgagaatctcgtaaatttgctaaattttcacttttatcattggcaacactgctgaattgtgcattaatcagttgccataattctttgagctataacagcaatgggtgcattttaaatagatctgaaccttttaattaatgcctaatatggtgaaagtttgtaaggattaaaggcagattttcggaacatataagcgcccctcatcgtcttatcaagggctttcgagcagtttttcaaactcttttcattgtttgagtgtttttattattgtctagcaattcacgaaagtgagcgcttttggtttacctttagaaattcttcagtacattacaaaatgatttttaaaaaggcatttatatacacgagcattttacgggggctggaatttataaattctgagaatctcgtnaatttgctaaattttcacttttatcattggcaacactgctgaattgtgcattaatcagttgccataattctttgagctataacagcaatgggtgcattttaaatagatctgaaccttttaattatgcctatatggtgaaagtttgtaaggattaaagcagattttcggaacatatagcgcccctcatcgtcttatcaagggctttcgagcagttt

SEQ ID NO: 32635 - DNA, 1235 bp, Heterodera glycines
cgaaatctagaattttttgaaaaaaattttttttttttttttaaatattatattaatttttttgtaaaaataacaaacgagtttatgaaatgaaaaaaacagatcatttacaattgaacgcgtctaatgcaatcaattcaatttttaaaaaacccgaaaatacccctctaaatattgaggtttacaaaaacgaaaaaatacccccctaagaaccgactttttgagttggcccccccccccccccgaaacgaaggtcctggctacgcccttgcgtgtaaccctactttggtggcagtggcaaaggtgttttgatgatcactgtgtgttcagtgggcggcggtgccgcggactgctgaagttgtcgcaagcgaatgtttgtcgccgatggttcgcagcagtcgtcgttgttgttgccgttgtcctcccaccgttgcgtctgctgattttggcaccgtttttggccaattacacaattcgggtgcaagaaaaagccgtgctccgtttgcttctgctgctggtggtggctttgagtataattttcggcacttatcgaagaggaggaggagggagaagcggacggaggaaggagcacagactgagagttacccgaagagatgtgatgggacggtgaagatgacggggagaagaagggaggtggggggatgcttttgcttttcgagagatcgttgttgtgttagggaatgctgttggttatggtaaagggtgaccactgtaaagtgagggattttttacagtaacgcttgaattgttcaaaaatgacgaggaaaaaaggaagtgtaaaatttattcgcttgttaataacaataattttaaatcacaataaaccaatctcataaacaattaccgttgggttttcggtctgacaatgagtcaccccgaacttcagacgcatcacaacgctgtctaaagggatgagattgaaaatggcatggggacaccataacacacaccccccaatctataaaaattcttcaaaataaatttttatttttcattttttgcatttcttttttcaaatggacttgcaagaatatggaaaatatgcaaaaacaatgccttacttcttctcgccgtacactgccgtcaaggtccgacgacgtttgtccctcaggcaaaagctctcccgcggagaaggattaattgaagtgctaaagctgaatgacggagaacaaaaatgaacaaccaaatggatattgcacataaaacgcgactaa

SEQ ID NO: 32636 - DNA, 1080 bp, Heterodera glycines
tttcaattaatttttgccactatactgctatagtggcttggccttggcttggatttttttctgtagctcagctccctgacagtcgtttttgatttgaaggtaccattcgaaagagctcttttttctaggcctaatggctaaggtggcgtcattttttacggaagaataaccggaatacaaattaatattttcaattaatttttgtcactatactgctatagtggcttggccttggcttggaatttttttctgtagctcagcttcctgacagtcgttttttgatttgaaggtaccattcgaaagagctcttttttctaggcctaatggctaaggtggcgtcattttttacggaagaataaccggaatacaaatcaatattttcaattaatttttgtcactatactgctatagtggcttggccttggcttggaatttttttctgtagctcagctccctgacagtcgttttttgatttgaaggtaccattcgaaagagctcttttttctaggcctaatggctaaggtggcgtcattttttacggaagaataaccggaatacaaatcaatattttcaattaatttttgtcactatactgctatagtggcttggccttggcttggaatttttttctgtagctcagcttcctgacagtcgttttttgatttgaaggtaccattcgaaagagctcttttttctaggcctaatggctaaggtggcgtcattttttacggaagaataaccggaatacaaatcaatattttcaattaatttttggcactatactgctatagtggcttggccttggcttggaatttttttctgtagctcagctccctgacagtcgttttttgatttgaaggtaccattcgaaagagctcttttttctaggcctaatggctaaggtggcgtcattttttacggaagaataaccggaatacaaatcaatattttcaattaatttttgtcactatactgctatagtggcttggccttggcttggaatttttttctgtagctcagctccctgacagtcgttttttgatttgaaggtaccattcgaaagagctcttttttctaggc

SEQ ID NO: 32637 - DNA, 1321 bp, Heterodera glycines
agagagagaaagagaaaaaaagaggagagagagtcggggaatgagagagaaaaaaaaggagagaggaaaaaggagagagagagagacgggaagagagagaggagagagagagagaaagggtagagagagacgggaagagagagagaagaggagagagagaggagagagagagacgtgacaatatgaaagaagggtaatttagttttcaaatcacctgtttaaacttttgaatccaatcgtcgattcgcattaatggatcattattaaatttgcaacgcaatcgcttcggctgtccatctttggtcggagtgtgcaaccatttggacaacgcttggctagtagaagttgctgttggcccagtaaaaccaattatatagagcgaaaaatcatcagattcgattaaattaatgttttggttggagagaattatcggcgcattgaaaagtaataaattggtgagcaaagacatattagtgcgtgaatcaatcgagaaacaaaaactgatgccttttttgccaaaaatgtgtttatttgagcggagaaattcgatgacggaatgatcaatgtacctgaaaatgggataagcttttaccagtcaacaataatatttttaattagtctttaatcactcaatccgaagatcattaaaacgaattttgctgggcaaaggaaagttgggcaatggaaatggcacagttttgccatcaatccgtacagatagttttggtttcagtccatcgtccttgccaattgttaattctctccaaattgtcaattcgcttttgccatcaaaatgcgtgtccactaaaacatcgaaacgtggtgaaagaagtgccaatttgaggccgagatgaaatttttttcatacatcgctggacgttttccttagcaaaagcatcggttctggtctgttttatatcccacaattggccatcctgtttcttaggccatagcttttttcttatttggtaaatactagagcccggcaaaaaataatttacgggagcgggaatcccgtaaaactcccgctcccgtgaaatcccgtccatttttaacgggagtcccgggcggcagcgggagtaattcgaaaatttaattaaaaactcacaaaaaaatatttttatgcacaaatttgaaggacaatccttttattaaagaaaaaatatacagaaaatttagtaaacagaaaacttgaaataaaaaatcagattttgggtcgaaaatcagaaaattttttcaaattggttcaaataaattatttttataatttattcaaaacaaaaaattttaactttatattttcgacttcctttattaattg

SEQ ID NO: 32638 - DNA, 1824 bp, Heterodera glycines
  unsure (1)..(1824): unsure at all n locations
atacggtaaaaacccaattcgttttttgcggattcgtttttgtaacgattcgtttttgacttagttcgtttttattatcccaattcgtttttattatcccgattcgttttttgtttaaaaacttcattttcaatgaaaatttttatgtattacacgctaccgcttaataaaacaagactcagcgctaatgaattgcagtctacatgattctgacccaattttcatgtattttaataataatgtaaaatttaagcatcttcataaaaaaattcaggctctactgcagtttgcgcgtccaatcaaaagtttacgcgtccaatcaaaaatttatgtgtccaatcatagaaattatttaattgtccgagaacacacatccacaatgatgcgatgcagtgttttcaattgtggcgcagaatgcttgtagatgtcgttcaattgaagtcatttgttggccaaattgttaataaaaaatcacaaaaaattttgatatcagaggttatcgaaaccaaaataagcacgcacaaattagtctctctattattaaattttataacaattgattgaatgcgtatatacctatcgatactttgataataagtgatcaatgacggatttaaattttattaaaaattaattagtaattttttatttctcttggtgttacgtttttaatatttaaattattttttgcaatggttggtaccttatgtcaaaaggatgttcgatttaggaaaattttgattggacgcgtaaaagtcgattggacgcgtaaacttttgattggacgcgtaaaagtcgattggacgcgcaaactgtgattggacgcgtaaaagtcgattggacgcgtaaaatgcagtagagccaaatacatcctaagaattgaaaaaaatattcacaaaaattgatccccaaaattcaattaatttaaaaaatgccttattcgacaaaactaaaacaattgaaatataagcaaaattaagttttttttttattaagtttttgcgtgatttgctacctaaaaagcgttaataaaaaaaattttgtgcctatttaatgcctaattttcgattcttttatgcctttttaggtgcctatttcgcgatttttgtgcctaaaaaaggaagccctaataataataataaataatttccccccnccccccaaaaaaataaacaaaattcagagattttcttcgaataatattttcaatattttactattctccttttattccttcttatttatctcaccaaccattttttcacatttgccattttgaaagggcgtcaaaaagtgttgtgttcccccgtcccgtctctccccccccccttttcgctgttcttctcatttttcgcctctcccccctaatttttccggtgccttttttcactccgctcactgcgggagacgacgacaacggcacatttgtacaacaatcttccgctccctttctcctcctaaaattttgttgtatgaaaattggggaggagataaagaaaagttagggattttttgttttgttttccgacagcgtttgaaaattggcatttttcactgtcgaagaaatgcctaaaagcccgcttaaatccatcatatacactaacgaatagttcactttccagcaccaatttaaaaaaatgccatacacccgaaagaattaaattaaaatttagattttctaaccaaaaaagagatactcaatggccaagaaaattattcacaaaaaaatttaaacaaattttggccaaattttcttttatgatatccgataaattaattgaattcganaatatatgaattttttattatctaattaatattaaa

SEQ ID NO: 32639 - DNA, 1230 bp, Heterodera glycines
agcaacttcttcgactgccgaggcctctcaaagttcaaaagaattaaaacttaataactagaataaatatagtctataatcatattgaaaagaaaaaataattttgctattgtaaaatgcattcggtaaaaatcttataatttttatttttataccaaatatttcatcactttcaaaaagcatagttttatctaacatattaatgacaaagttggtataatccattttaaaatattgatctccatgagggctattgattaaattttaaatatctcgttatttagtcgctgatcggattatcttagtgaccagtgatcaacaaaattcacaccaaaacgacgccttctgttcttcttccactttctcttccattttctgttcctcttccattttcttttcctattccactttctgttcctcttccactttctattccattttctgttcctcttccattttctgttccttttccactttctgttactcttctactttctcttccactttctgttcctcttccattttctgtaatttaattcatgagttttgatttttaattctttttgggttatcattcgagaaaaacttttatctagttttaactatttgtactaactaatcataattaaatgatttctttatttttttaaatttatacatcatgtttgggttttctttatacataattgatattatttattttattttataaaaattttgatcttcttttagtatcaattatttttacaagaaattaaactgatttttgaaattttgaattttcaattatttattttcaatataataaacttttataatgaaataaaaatcatcccaaaaacatacacattctaaatgtatttcatctattaattattataaataaactaaattatcaattttaattttttttaattgtataaattataagatttttaccgaatgcattttacagtagcaaaattattttttcttttcaatatgattatagactatatttaattctagttattgattatagactatatttattctagttattaagttttaattcttttgaactttgagaggcctcggcagtcgaagaagttgctccctgcattctataaattgctcaaaaacaccgtgcttcacttcagccatgtttccttttaataaaatcaagtaataaaagttttaattttttataaatttttaagcttattaacgcaattttatttatttatttgg

SEQ ID NO: 32640 - DNA, 1533 bp, Heterodera glycines
atttatttatttgcgtattttccatttttcttgataatatggcacaatcggtccccttcggggatggcattttcttatctttttgtgtattttactgtcgaattgtcctcactgtcggattgtccagtcacgattgaacattgataactcatagggatgtgcgagaatgatttttaccgaaaaccgagcccgtgaccgagaaatgaatctttttttgcttaaaaaccgcttttttacgtcgcattattttcaaaaaaattggggaacaagggggtccggcggtgccggtaagcgacaccgagaaaattttttgggatttttaaagaattttgttaagacaatctatttaaaagttcaatattttttcctcttttcacccttcgccggcgacccccagcccccgaaatggtcatccttaacacaagactaaaaagccgagcccgagaacagagaccgagaagcgaaaaacccgagaaattttccaagtcgagaatcgagaaccgcgtggcgctacatttggggacagagatttggggacccgacttttgggattttaatgaaaatattataaataatgaaatattttcttacaaaattcgacaaaactacgtctgcttttgtcagagttaactccattttgtgaaaataaaaaattattttaatattgaatgaggataatcagtgtgtatttataatagcgaaccgcttaattagtttttatgtttgtttggtcatttaattgacactcagtttggaagtgaaaaatacctttgccattgagtgaatttgaaacaaaaaaagtccaattaattaattgatttgatatattatgcaataaaaatgctaatttgataacacaatctgaattgttgcatggtaattttcaacttattcaatcatttgaaaattttgcaataaaaaaagtagagtgccacgggaccgagccgggaattcccggtcatccgaggtcccggtcccggttcccggtcccggattttgaaaagctcaggtcccggtcccggtagggcaaccgggaaccgggaaaacaagcactggtaagaatgggggtctgagtgaaaaattctgaattttagttttgtatactcattgttttcctatcaagaaaatatcattcctcatattttttaattgatatatattttatcattttttaaatgaaaatccgtacaaattgagcctaataatcccatagaagccatttttgttgaaaatctgttaacaaatcacacatttccccccccggcggcgcctatcggcaccgccggaccccctttctttcccaaaagttttttgaaaaagcgctccgaaaaaaagtgatgtgaaaatcaaatctgaatttctattaatattcgatgatttagtccaaaaatgattaattgtttgaaataattaaagaaatttgtttgaaaattttcattaatttaatttagctttaacttttggattttattaaataacaaacaaaataaaaatttaattttgtattattttcagtttaaaaaaataaaaatt

SEQ ID NO: 32641 - DNA, 1567 bp, Heterodera glycines
taggaattcaaccgagaaactgaacccgtcttccatggacttgactcggccggcgactgttctcggaactatcgcaacgatgagaatgttcttcaggtagtgtaaattaattgtcgtttgcttctgttctgctccgtccgttcattgccgcttaaggactcttctcgtgtcatctcatggaccagaaaaagtgccactgttgttgctgctgctaataatgatgacaatcaaaacaacatttctacctcctctccgccggtcgactgacctcgtaaaacgaccaaaaaaaaccacaatattttccttaacataggaaaatttttaattttccgtactactcaattgttttaaaaaaggtactttgcctagtttacaggacagatttcatatacatttttagattcatatatgtgttttagaaattaatgaaaataagtttttaaggggttttcgaggtcgctgctgatcacgaatatagcacccatttttgtcaatttcgaacccctgacccaaactcgaacaaaaattaaattaaaaaatttgtatggatgatatcctcattggcatctcacccatgagggtaaccttggtacaggaagcataaaattcgaaaattgtatggatggtatcctcatgggcatcttgcctatgagggtattattgctacaggaagcctatcaattctttgtccctgtacagctcatgtactgatctgagcccggatttctgatcagcgaccccaaaaacctcataaaacttattttcattaatttatataatacatttatagaatcttttcaagtgtacaaatggtccagtggttaatcttcctgcttgttttctacttctttcccttggttcaatccctcttctgtaattaaatatattttattttatctttttatatacttatgggtttcatatagacaaaatatgattcttcatatacttttttaagtgccgataggcgccgccgggaaaattttttgaaattttggctatatgtttaacagattttcaataaaaaatgattgcttttacgaaaaaacacaattcttaccagtgtatttttactcccgtatttggataaaaatttacgggagccgggagcgggactcccgtaaactcccgcgggaccatattaaaaacctagaaaaattctcaaagatttttcggcatcgaatcttttgaaatttaaaaataataggaagtttcaacaaaaatagttaaattttattaaaaaaaatttaaaaaattttgggaatccgaatcagtttttgccggtaccgttgaaaaggtttgtactggcttttaaataaatttttgttatttttgtccattaaattaaaaaaatactcaagcatttaagtttatattataatattttcacttgaaaataaaaaagtaaacattaaaaaaaaatcattttttaataaaaaaaatttttcccgtttctcggcgggattcacgttaaattgatgggattggaggggaacgggaaaagccaggaatcccgttcccgttctaaagtgtctatattcctgtttctcgttaccggaaatttttt

SEQ ID NO: 32642 - DNA, 524 bp, Heterodera glycines
  unsure (1)..(524): unsure at all n locations
gcctctcgccgcgcgttggccgtttcctttttgccgctggcgcggccggttccccgtctggtgagcgggcggtgtgcgccgggcgtttcctgtgcgttcgctctctccttgggctcccctggctcttctctctctgcttccggctcgtgtgttgtgtggcgttgtgtgcggttcgctctttctctctggcgtctgctgtgtccgtgcttgcgttttcgtgctcggtccccggggctcctctcgggtccggtgtcctctctgttcctcgttcggggttcgttccccgggcggccgctcgtgcgggtcctgccgccgctcgcttgntggggntcngnttgtcgtttcccgccttccgtttntnctctcgcgcgcgggcggcgcgggttggcgnnggcncggnccnctncntgnnggnggngnnngggtggggggtgtgtgtaaatggtggtcnttntggngnnnnggtcgncgtntttcccaaaatgggttcaattcaaagantgtagatgtcgcagcgttattat

SEQ ID NO: 32643 - DNA, 1227 bp, Heterodera glycines
  unsure (1)..(1227): unsure at all n locations
tagagacatatgcgctatccatataaaagatgaatcattttttgaaaaatttatatagttcgactaaatttgctaatcgatttatggtgtacaggatgtttgtcgaaacataactcgtcaggcctntaagatagacctgccattgctattcctgcaaatatggagtctagtcagcccaatcgattgctattcgaatggtttggggtcattggcccaaacaaaagttgtgctgcttcttgcaaataagacttagccaactgtaaacagcaagccatccaaatgcttcagtgtaaaaaaaattacatttggatgcaacctttatttttcctcgcctctcttttcgaaaagaaaagctattagcaagcgtgtttggaccaattctaaaacaaatcggggtaattaatttaatctgactttataagataaatgggaatttaagcgaaggattcatgcaaaataataatctatagaaattctcaaaaaagtagttcctcgcagattcggggaccgtttctataaagctagagacatatgcgctaaccataaaaaagatgaatcattttttgaaaaatttatatagttcgactaaatttgctaatcgatttatggtgtacaggatgtttgtcgaaacataactcgtcaggcctttaagatagacctgccattgctattcctgcaaatatggagtctagtcagcccaatcgattgctattcgaatggtttggggtcattggcccaaacaaaagttgtgctgcttcttgcaaataagacttagccaactgtaaacagcaagccatccaaatgcttcaatgtaaaaaaatttacatttggatgcaacctttatttttcctcgcctctcttttcgaaaagaaaagctattagcaagcgtgtttggaccaattctaaaacaaatcggggtaattaatttaatctgactttataagataaatgggaatttaagcgaaggattcatgcaaaataatgatctatagaaattctcaaaaaagtagttcctcgcagattcgggaaccgtttctataaagctagagacatatgcgctaaccataaaaaagttgaatcattttttgaaaaatttatatagttcgactaaatttgctaatcgatttatggtgtacaggatgtttgtcgaaacatactcgtcaggcccttaagatagacctgccattgctattccctgcaatatggnagtctagtcagcccaatcga

SEQ ID NO: 32644 - DNA, 1212 bp, Heterodera glycines
  unsure (1)..(1212): unsure at all n locations
gggaaaactctaaaaatttatgttcatttgctaaataaatttatgaagaatataaaaagatgtaacttattgctgatttaaagattgatttaaaaattaattgacacggcactttatgctcagtcaaaaaggcaaaatcgtcaaattgaattaaaaaattgcattaaaattgtttaaaccgcgggaaaaatttttaaccccccaatttattttttttaaaaaaaaaaaaattttttnttttttttttggtggaaattatcaaaaaatatttttcccccaaaaaaaatatttttttgtaattctctcccccccccccttcttcttctttggttttttttcccgcgaaaaaaaaaaaaaaaaaaaaacaccccgcggggggttttttccaaaaaaaaaaaaaaaaaaaaaaaatttttttttttttttctccccccccaatatttttatttttttttttttttttttaacaccccacgggggggggggggtctttaaaaaaaaagggggggaaaaaatattttttttttttttctttccccacaaaaaaaaaaaaaatnttttttttttttttttttttgggggcgccctattatttaaaaaaaaaaaaaattatttttttttttttggggggggggggtttttttttttttttttttttttttttataaaaaaaaaaaaaaaaaaaaaaaaaaaaaaattttctttttttttccccccccgcgggggggggtttttttttttttttttttttaaaaaaaaaaaaaaaaaaaaaaaaaaaaaaaatttttttttttttttttttttttttttttttttttggccagaaaaaaaaaaaaaaaaaaaaaaaaaaaaaatgtgatttttttttttttttttttttcccccccccccccaaaaaaaaaaaaaaaaaaaaaaaaaaaaaaaaaaaaaaatttttttttttttttttttttttgggtggggaaaaaaaaaaaaaaaaaaaaaaaaaaaaatttttgttttttttttttttttttttttttttttttttttttaaaaaaaaaaaaaaaaaaaaaaaaaaacacaccccccccccccccccccccgcccccgcgggggggggggggaaaaaaaaaaaaaaaaagaaaaaaaaaaaaggaggggggggggggagcggggggggggggggggggtgtttttttttttttttttttttttttttttttttttttt

SEQ ID NO: 32645 - DNA, 1239 bp, Heterodera glycines
ctgaattatttgctttgtatttgttaactaagcattttcctggaaaccctcagcaactaaagatcgttaatcccccgcatgtctgctccacatttcttgaggctgcccgattaagaggtcttattgatgatagtgatgtttggatccgaacgatgacagaggggtccgcctcactcggtccggcacaaatgcgccaattgctggcaaacattttgatttttggagcaacagagaattgtcttatcgacggcgcactgctttgggataaatttctccatcatatgtgtgatttgcgttgtaccgatgccgaacgtcctgcgagaattgaccgtgcattggtccttttagaaaaacttttagtaagactaggaaaacagtgtaaagattatggactcccaacccctactatttcaattatgaataatccccagctcgggcttgatgaatttttctttccacaacacgctaatgatgatgatgcagatgatattgacacaagctcctatgagcgtggaaaattgaatattgagcagcaaaaattttttgatttggtaaagactgcatttattgactcacgatgttcaagattgttttatttgtatggtgacggtggaaccggaaaaacatatttgcttaattatatcctatatcacttgcgaagaattggcgctaaaattattcccaccgcttccactggtatggcggccacccgtttttatgctggtggcaccactgttcattctgcctttaagtttggaataaatgtcgaacctggaaagttaccttccattccatttgatagtttctttggtcgaagaataattgagtgtgatataataattattgacgaaatgacaatgttagagaggaccgttttggaaaatattgatgctctttgtcgtcttatgtgtttgcaaaaacagcacttaccctttggtggaaaatgcgtgattatttccggtgattggaagcagtcactccccgttgtaaccgattcttatggaagccctgcacaagtatccgcatgtatccaatcctctccactttattctctttttacgaaatttaaattgactcagagcatgagagttaacccaaaagagattgaatttctaaagtggcttgatgatgttggaaagaggagtaagtggcgaaacggtcgcaatcccaaaagatattgattgtctactcccgggaagaactgattgattgattatctgaacaaggatttaatatgcc

SEQ ID NO: 32646 - DNA, 841 bp, Heterodera glycines
tccttcccctatacagttttccggatcaggatattccgccttttactagcataaatttcggaacgcgcaattccaccttaaatttccggaatccagaactccttcctctacacagttttccggatcaggatattccgccttttactagcataaatttccggaacgcgcaattccaccttaaatttccggaatccagaactccttcctctacacagttttccggatcaggatattccgccttttactagcataaatttccggaacgcgcaattccaccttaaatttccggaatccagaactccttcctctacacagttttccggatcaggatattccgccttttactagcataaatttcggaacgcgcaattccaccttaaatttccggaacccagaactccctaccctatacagttctccggatccggatattccgccttttactagcataaatttccggaacgcgcaattccaccataaatttacggaacccagaactccttcctctatacatttttccggaatccagaactccttccgctatacagttttccggataggatattccgccttttactagcataaatttccggaacgcgcaattccaccttaaatttccggaatccagaactccttcctctacacagttttccggatcaggatattccgccttttactagcataaatttccggaacgcgcaattccaccttaaatttccggaacccagaactccttccactatacagttttccggatgcggatattcgcgccttttactagcataaatttccggaacgcgcaattccaaccttaagtttccggaacgccagaactccttcc

SEQ ID NO: 32647 - DNA, 1041 bp, Heterodera glycines
ttgaagagtgacaaaatatcattaattcacaaaatccataattaatggacaaagtgcggcagcagcctttcattcccctccctttcatttttcacaatttataatggccactaattggcacggcaattaactaattagtacttgttaataaaattacgacaaaaaatgaaagaaaaattaagtggaaatgggaataaaaatcttcgccaactgtctggctaaaagtggacaaaaattttatattttcttttttaaaatcgcatcgaaatgttttggtaaaaagccaaaagcatcataatctgctgataaaattgttccattttcttttcttttcaacaaatgcaactttgttgtccatacttttcacaacaagctaaacgaccagcacaatttgtagcactgaaataaaatgatcaaaatgcttataatttgaattaccctgctgccaacaagcactcatcaaacccatcggcacgctttgccaccaattttgcaaattctaaacaatttgattcaaaattgtcggtacaaaaagaattattacctagatattattattttaaattttttttatttaacttaatcaccttgttcttgtatcggtgttccgacaactaaaaaaccaattaattatatgtaatgactagggatgcgatttttaggttttaactaaattttttgctcacttgatttgaagaaaggagctcaaaaaacgcatttctgcgttaaaaattttcgattctgatgtcactatcggtcactagaaatcactattttggctacttcgtcactatttcttcaatattttggcatttttactcactattttagttaattattttggaatttttcgtcactaaaagtcgcatccctagtaatgaccctaaatttgactaaccatcagcgaagccaaagaaggcaaaaagaataaaaaatgacaaaataagcatttaaaaatttcttagctgaaaataatagagaaaaaaacaatcacaaaggtttatttttcaatttctaatattaaattggaaaatgaatttc

SEQ ID NO: 32648 - DNA, 1133 bp, Heterodera glycines
tttattcaaaacacgtataaaatgatcaaatgttatatttttgattgtccatgatcaatttgagcaattttaaaagattctgaggattttccccaaagcctcaaaaaccctcaaaatttctcaaaaaaccacaaaaagccgcaaagcctcattttgaaaatttagtctcattgacctatcaaaaaaccacaaaatgaggctaaagcctcagatctggcaaccctgttctaaaaagttatttgttatatcactcgtgaaaagtacccaattacctaaatttgtattgactttggcaaactaaaatcacgaatttctctccctctctctcttatccttatcctctccactcttttgcttacgctctctctctttttttgtacgttatgcctcccccccccatccaacggcctggctttttctccgatgaatcatccccccattcgtttcctttttctttcttttggctttaccccccccccccccgcttttcctccctcttctgtcccgcatatttctcttatttcgctgttggtgatgataaacaacaatcgatacacacacacatcacaaaaataacagcatatgaatgaacacggtctgctgttgtgtgctgtttttccctcacaacgccggggggtcacacaaatacaaatgctatgtttgtgtgaacgaatgaatgaatgaaaagtgaatgtataacattattcatcattttgtatctgacacactgagaagaggaatttctgccattcacttcatcaatttcatcattcaattacatttgtccatttatacataacatttggaattattcactcccgctttgttagtgcgaaattttcatttttagaatttaatttaaccaaatatttattttaataaggagcgagtttttaggggcgaaatagagcaaaattggggcgaaaaatactaagatagggacggacgaaagaccattcttactgccccgactcaaactgtgcaacaaaaaacaccaaaaaaaatattttttaaaattactaaaagatcaataacataggtaaattacatcgtgttgtgaaagtataaatcaacggacaggatccagtgcggaaacaatccgcaaatccagtccggcaaaaatttaagaattc

SEQ ID NO: 32649 - DNA, 1146 bp, Heterodera glycines
ctcgcgttggagaaagcaatgcgcagaataactggggagacttagggttagcgcatcaattatttttttcagaatgtgatcggggtacaaaaaatacgggtcaaaaaatgggtgtaaatccgcttggagatgcgttagaaaagaaagaaaaatatgttcggacagcttttgaagagctgcattgaatgctgcagttgccgctgctgtacgcccacccgttgctgagttagggtcgagagcggcatgaaaaaagacaaaaaggaggaaaatgaaacaaattcgcggctttgccctcgcgttggagaaagcaatgcgcagaataactggggagacttagggttagcgcatcaattatttttttcagaatgtgatcggggtacaaaaaatacgggtccaaaaatgggtgtaaatccgcttggagatgcgttagaaaagaaagaaaaatatgttcggacagcttttgaagagctgcattgaatgctgcagtcgccgctgctgtacgcccacccgttgctgagttagggtcgagatcggcatgaaaaaagacaaaaaggaggaaaatgaaacaaattcgcggctttgccctcgcgttggagaaagcaatgcgcagaataactggggagacttagggttagcgcatcaattatttttttcagaatgtgatcggggtacaaaaaatacgggtccaaaaatgggtgtaaatccgcttggagatgcgttagaaaagaaagaaaaatatgttcggacagcttttgaagagctgcattgaatgctgcagttgccgctgctgtacgcccacccgttgctgagttagggtcgagagcggcatgaaaaaagacaaaaaggaggaaaatgaaacaaattcgcggctttgccctcgcgttggagaaagcaatgcgcagaataactggggagacttagggttagcgcatcaattatttttttcagaatgtgatcggggtacaaaaaatacgggtccaaaaatgggtgtaaatccgcttggagatgcgttagaaaagaaagaaaaatatgttcggacagcttttgaagagctgcattgaatgctgcagttgccgctgctgtacgcccacccgttgctgagttagggtcgagagcggcatgaaaaaagacaaaaaggaggaaaat

SEQ ID NO: 32650 - DNA, 1232 bp, Heterodera glycines
  unsure (1)..(1232): unsure at all n locations
agaaaatttataagcatttgaagggttctcagcagtttccctgcaaattttggtgagcttctgatcagtctagaacgttgggtgataaaatgaaaaaaataattaaaaaaaaataatgctggtgtggtaagtgtgaagaactgtgttcctccaggcaaaaaattctggnaaaannncggggcatttgtagggttctcagcagtttccctgcaaaatttggtgagcttctgatcagtctagaacgttgggtgataaaatgaaaaaaataattaaaaaaaaataatgctggtgtggtaagtgtgaagaactgtgttcctccaggcaaaaaattctaagaaaatttataagcatttgaagggttctcagcagtttccctgcaaaatttggtgagcttctgatcagtctagaacgttgggtgataaaatgaaaaaaataattaaaaaaaaataatgctggtgtggtaagtgtgaagaactgtgttcctccaggcaaaaaattctaagaaaatttataagcatttgaagggttctcagcagtttccctgcaaaatttggtgagcttctgatcagtctagaacgttgggtgataaatgaaaaaaataattaaaaaaaaataatacttgtgtggtattaattcataaatattttttttcagaaaatgctctgaaacgcaccaaattttatttacatgttagtttaggcactctgatgctttttctatcaaaaagggagatgaataaattttaaaaaatttttaattcctttttaaacaggccaaaaagtttaggcttaacttttttttcagaaactgatcagaagcgcaccaaacttagcagggatactgaaaggaagagaaataacctattttaaatattatctagtcagttcatttaaataatttttatccaaaaaaaatttttttttggatttcggggcagtaccatgaaccgatgcgcccagatttatggggagaccgaatccttcgggaatagcttccctatagcctgtactttaattctgcgttggatttttgctccccataattgtttgagtaccccaaacggacacttgaaaaaatcgatttttttgttttcggggcagtccccccgaaccgatgcgcccagatttatggggagaccgaatccttcgggaatagcttcgatatacctctactttatttttaccttggatttttgctccccataattgtttgagtaccccaaacggacactg

SEQ ID NO: 32651 - DNA, 715 bp, Heterodera glycines
attttttgacttaatttttgaaaaacttaataaaattttttgaaatttagtaaactaataacgcaattcaagggctatcgtatgataccaagattgtgcaaattggttgagtctgagaaaggttatgagttgattagtcaaaaatttagcaaattttgcacttttcgtcggtcgaccaaccatgggaaaatagtactcgtcaaaccctacgtttatttcgcgagcggaagtttgggcaccaaattaaggatttaaaaaataaaaatgttttaaaaaacatagttttaattaagttaggctgaaaatttcgggccaaactaagccggttattcaggcttaagtcagggctcggatcgaaaaattttcaaaatcagaacatcgggcctaaaagatagattttggggccgaaaacttagcgaggaaataagcaaatctaaattttagtgcattcgtgatcaaaaaaccaaagtttagcagatttttgtcaaaaaaaatgacaaaattttactcaaaccttatattttcttgataaaatagtgacattctaccattcgaaattatgagtatatttaagaaatcagaacaaagagaaagacaataaagcaataaatacaaaaataattagtcaaaattaacagcaagaaagaaattataaggcgcccccacaaaatgtccaggccacgaaatgtgcacaagagtaaaaacccacgaaatg

SEQ ID NO: 32652 - DNA, 454 bp, Heterodera glycines
tttgtctgcgtatccagatcattttgggggtgctcatgattttttaaacaaaagaacttttcggacagacacagctttgtaacctaacgcataaccagctttcggagcaggagttcaggccgtggcacctctgggtggagggggcacagaaaccagccacgcctgcagtttcttcctgttgtggccacggccccttctccccgagatgggcatgcaaatgaaccctgcaaaggacgcaggagcaactccacagaaagggggggccagggctattcgtggggcagaggcctttgaccagcctcaaccccagtggcagggggtagggtcagacccagaaccctgaggcagagcctccctgagccaggactgtctgagaggatgagggtttggggagaggtcggccacgtgggcgcataggaagcaggcagggacagacaccattccacgtccttac

SEQ ID NO: 32653 - DNA, 104 bp, Heterodera glycines
tcctgtgacgcggttgggttgcagcttcagttcttcgttattgagcaggatgcgcccgctgtgcggctgttccagcaggttgatgcagcgcaggaaggtgctct

SEQ ID NO: 32654 - DNA, 329 bp, Heterodera glycines
tacagaaaatataaggaaagactaaaaatcactgatttacacaaattggaagaaagaagaaaaatcaatgatttaacaacagcttttaaaattataaaagggttcaccagcctcgatgctgaaaaaagtttctttttctcggaaaggcccaggaggcctttacttttgcgagtaaagcgccacacggccaaaactcaaaataattttttcaatagaatagtaaaaagctggaataaccttccagtggtagcggtgcaaattaataaggcaaaggaattcaggggtttactaaaagcaatgagttctgagtaggattttccatgttgcca

SEQ ID NO: 32655 - DNA, 955 bp, Heterodera glycines
ttgctcacatctgatcgtgtcaatgaagcgccaaattgttggataagtgcagctaaattgccgctgaagtttgcgatggaatgcctcggcgaagttgttggtacgatcatctaaggtgcgctgatgaacattccattcgtgcgggtggaacagaggcgccgtcattggaacattgaaacgcattcggcccatgcagttgtccaaaaacctagaaaaataaaaataattataaaattcgccttcggacttaaccaattgaaaacgccgttaagttgtggtggaatttgtccttgaagaacattaaggccattttgaaggtggtgcacaggcagaaaggccaatgaagtgatcatcttagacttctcggcgaaagcaggatcagtgttgtaagcctaaactactaagaaaaaaatttatcatctgaaaaattcaattgacatgtgtgaggccaagggttctgatctgcctcttcatgttgcggacaagatgaaaaaaacagtagcggacactgcatgccggaagcctgtgcggaccgcaccgaccattgccaactcgaagtccatcgaaattgtctgcggcgcgaaattcggccatcgttccaaaagaagctgtaacatgcgcgtataaattgcggcacacttcgatgttaaaagacagtagtaaattggaaatacccaaccagcgctcaattggtcgaaatatagagtgcgccgtcatgttctaacttaactttgtttcgttttgttttaattttttgctgctggtccatattatataattgaaacagccttaaataagtttataaactcacttaattataaaataaatattcgttagaaaaaagagtgaaacaaattttcgtttaattaatgtgagttatgaattctcttttatatgcacccacgcgaaacggtcctcacgcgaaaacgtcctcacgcgaaaacggcacgcgaaa

SEQ ID NO: 32656 - DNA, 952 bp, Heterodera glycines
  unsure (1)..(952): unsure at all n locations
aaaacggaaaagcaaacatcttctccctccccccctccctttgagctcgtcggctgcgcaactgtttgtacgccaccgcttttgtgcccgcctcgttgcttttccttctgttcgtcctcgtctggttaagcgaagttggactgatctgatggggaattaatgcgatcggcttatcaaatcaattcaaattacacataatcaattaattagtaattaaaacggtggtggaatctaatggacagacagggcgaggatatttagttatttaattattttttcttgcagctttgttttggtgaaaacgcacgaaaatgattttttttaacccgaaaattcgttattttaatgtgaatatgtcgtcaccaaaaatataatttggacttttcgcaactaaaataattacgtcattatttttgcgctttgtcaaagcgatttttgaatgcaatataattgttttggaattaatttgtttttatctctttttttattaatataatcttttaaatttgctaaatttgcaatttcttaactatttagggtttttctaattaaaagtcccccattcgactgttatattttccgaaactaatcgcatgttttaataaaatgcattaaaaaaagaaggaaataataatacacgctattttaattaaatcttcattttgttgattaattctgaattttttttgaattgctaattaatttttggaccgttctttacgtaactaataaatattaaaattaaatatataaatgaacaattatttgcgaataaaatgcaatttcaccactaattgatgagtttgtgacgattacagtcaatctttgntcattatttatttatctttcctcgtctcttttctgcacatgtngtcgcatttgtccgcccatcatttcattattatcggcagtcgtcagccgatattgcccactatgccgccattaattgcat

SEQ ID NO: 32657 - DNA, 925 bp, Heterodera glycines
atggttctttagttaattaccaaaacaaatcttaaagcaattaaagtgcacttgaaatgcattcaatattaattttaatattaaccttttgtttgattttcaatttctttttgtttaggccgcagtgaaaaatttgcttgaaccgattgtccaaaataaatttctcctctacgtaaacaaacttgtggaaaaaagaggttgtttattgtttttggttggacaatcatctgttttgaaacttttctgtaaatgccaaaaacacctttttatgagtgttttggggtgccgagtaagaagcaggcctcctttttggctaattcgggccttgaacccgaactcccacatttttcaatttttttaaatgaaaaaaacattttttgaagggtttccgggatcactgaacatgaacatagcatacatttcgaccaattccaaaccctttacccgaattcaaacaaaatcaaaaactcaaactaagccaaaatataaaatacgaaaattgagttttgacttcttattcaaattcgggctttggctttggaatttgcgaaacctttgtttgaatggacagccgctgtaaagttttctgtaacttctttactaacaaatttatgtccttttattgaatagggccgtttggcgccattgaccccaatttagaaaagcggattttgaattctggccgaaaatcgaatttttattttgactttccacttaaaattttatgatcttaaatttttgcttttagcgaacattgtctacgttactgttactatgacggtcactgttgttggcactatgcttacttttggtggtttcttactgagagccaaccaagatctctgttcggatgtccgcaatcttgaaaaggacatccgttcggatctccatgaattgaaggcagaaattcgtggcatgaaggcag

SEQ ID NO: 32658 - DNA, 477 bp, Heterodera glycines
cgtttccactgacaatgcctacgccctgctgatcgccaccattgtttctgtcgatggtctcttggatttctttgaaaaagcacaacatctgaacaaatattcctccccttttcagtcttcgaatgttccgtaacattgcgctccgaaaaggattttcccgccgaatttggtcagcagcagtcggttctttaccacttggacaaaaatgacggcttcagctcctttgcctaccgtcttggctccgttgctgcgctgcttgaaaacgacgaacgggcgtaatttgattaatcaattttcaattatgttcattctcatcaaaacattttttatttaggcaaaggttacgctcggttttgacccttggccactcttcggcgccaaaatcggcacattcccttgctgaatcttcttcgtcatccgcaacactgacaacaacagaaatcgacagggaaacaccggcacaacagaaacaacaaa

SEQ ID NO: 32659 - DNA, 660 bp, Heterodera glycines
caaaatcaaccattttttaaatatttgtatcatttgatagccctaagtgttctctatcagtctgcaaaatttcaaaaaatttcgttaactttctaaaaagttatgcctagagaaattcaaaaaacattgttttttttgaacaatttttagccataagttttttgaagtttagcagattaatagagaacatttagggctaagcaaaaattattatcttcatagtttttaaataacgaaatagtaccattttggctgagtaagctaatcaccttgtaggccaattgtcgtagcgtttccgacaggtcccggcgtaaaaatcaaactcgcagatccgttgcgggattggtactcaaaggcttttgccgaaccggggattcagccgcaaaaaaacccaaaaaatgcgagattttgcgcaccggcgcggaaccgggtctatcctaaccaaagatgataaaccagggcttcgatctcaaaattttgaaaatcctgattttagccataaaaaaatcctcatttgcctctaaaatacctcaaaaaatcctcatttggcatgaaaaatcctcatttttctaaaacatcataaaattcgaacaaaatcagttaactgtcatagtttcgtttgaaaaacatcacgcgcctatcagcgcccgcggaccccaa

SEQ ID NO: 32660 - DNA, 301 bp, Heterodera glycines
tcgtcaatagtacgaccaaaactgtcttgccgacggttgctgctgatcatcatttcactgaaattgattgatgtctgtcggctgataaaaacgcgacgatttttcatttgggaaaatcgccaaatgagagacataacgccaaaaaatcggaataaaatttaaaaaaaacaaaataataaaataacaattaaatcgtccgtcccttcccttcccccatttttatttttaattattgttcaatagagccccccccaggggcaagacggacgatgcgatgaatggtgggccgatcgccggaggg

SEQ ID NO: 32661 - DNA, 100 bp, Heterodera glycines
ctgttgtctaaccctgtttcgtatgacttgggacgggacttgatcgtgcgagctctcgattcgcgcgagcggttttccgagcacaccacaattttgaaaa

SEQ ID NO: 32662 - DNA, 849 bp, Heterodera glycines
aaaaaaaacgaaatcttcggcgatcaattttccgagaaaatttttcaattctcacgggcgtattttctcgaaattttttcagatcatttcttaagggtgtattttcgcgattttatcgcatttttaaggaatttttcggaaaaacgccaaaaaggcaccaaaacgccaaaaaaggcaccaaaatcggcaaaatcgccaaaaaggcaccaaaatggcaaaatgccaaaaaaggcaccaaaatggcaaaatgccaaaaaggcaccaaaatggcaaagtgccaaaaaggcaccaacatggcaaaatgccaaaaaggcaccaacatggcaaaatgccaaaaaaggcaccaaaatggcaaaatgccaaaaaaggcatttaaggcacgaaaatcccgaaaaggcaaaaaatggcataataaagttaatagtagaagcctaaaacaaagtggaaacaatgttttttatgatcagaaaaaaggcatatgccttaaaagttgttctctgccaatgaattatctagtgtatatctattttagtgccacgctttttatttaatttcataaaaaattttttcttttcataaagcgattttctccggaaaataatcaaaaaaattaactaaaaagtgggttccaccttcataaaatttccggcaaaatctctgtgcaaataattaactcttttaataggtttgccgtccgccgattcgatcaatcgtcgcacttttcgcgcacttttttgaattaccactgttaatatcggcggctttttctttacattaatttgttacattctgttaattcccaaaatttcatctccaatcactgcttggtttttacatgcaattaccgca

SEQ ID NO: 32663 - DNA, 745 bp, Heterodera glycines
  unsure (1)..(745): unsure at all n locations
gcttaatattttctttctaattgatttgctttttaattaatacaatcatttcatttccaaaatttcttgctttctattaaaattaatttaaacataagcagagtaattttgactttgttgataataattttatattttttgccattttatagctgcaaatttgctttaattaaaaaattgtaactttattaaaatattttttaatcaatggaatttaatttctgcttatgctttttgccaaaaatttaattattttcaaatttttataaacattttaacaacccattacattcaaatagctcttcttgaaatattgataaaatttttaaaatatattcggacactaaaaataccaaaagatggtttatgagtactttatatttaaatgattatttcgctaagtatttagctgttttttttttgcatactagctattaattcattatttgtgactgagcgaattttattggttgtaattaaatattagatttatataaaacattaattctaatgcattcttacattaacatcaaaaatctaacaatcagattggtaacgtaaaagtgaaaaagtttgtaaaagttcttaatccgatttaaaagatctgaaaaaagaagaagacgaaatctccaattcaatgcaagaanagtttggattattanaacaaaaaagaatttatctttacaaaaaatggaaanacttttttgatcgatagacaaatttcattatgcattgtcttgctttc

SEQ ID NO: 32664 - DNA, 741 bp, Heterodera glycines
aaatagctttattatgaatatttgatgccaattttcaacaaaatcttaccagttttgcaaaattataaaaataaatacctttatattataaagaagaattgaataaatataacgtaatgaaatcataagtaaaaaaaccatccatagaattaaaaaattttcatttttaaatttgaaaaaagttaatattcattatgcggattgtcatttcaataaattaaatgaaataaatgataaaatacgtacctaagatatttataacaaaacatataaaaatgaatgcatcacaattgattaaaactcaagaaaatcacttaatcgagaaaataaatgttcgcagccttataatcaaaaataattaataatctaataaacaagaatacttggtacgcctttataccaccacattttccgtttttcggtgtatattaaaatccatccctaaaaagtgtaaaaaacaaacaaaaatttgtccttttaataaaatagcaattccatcaaatccaatttatacgttccgtctctttatgaaatattttaatttgaaatccgtctctacaaaaaaatattaaacaaatagaaaagtgtcaaaaatatttcaccaaaagggtattttttaaatgcagctttccaccaattccataccaaaatcgattagaatacctgcaactgccaacacttgagaataggcgaaaattgtttgatctgttcatggcgcataaaattgtttatggccgaaca

SEQ ID NO: 32665 - DNA, 888 bp, Heterodera glycines
cctaattagcataacatttcaaaccattaatgatctgctttgctttgttaattgccatttacttaatagactcatatgaattcattggccaagaacatcttagttttttaataaaaaatattaatgatttttccaaagcaaattctttaaaaatatttttcttattctttaatttcaaaaaatgaaaaaatccactttaaaaaaaattcgttagattttttattctaactaagaatttaagaaactgatatgtttttttaaaaagggaaacgtcgtttattacactcactttggccatcactgtgcttgggtccatacaactttgactgtgatgattcagtgccaccagagtcctttaatatttggtcaattattttatttatttttaacgggatttttcacaaaacatttttttaattaatttcaaaattatgtgtaaatattatttattaatttataatattgtgaagaatttaatcttttataaactctcaaaaatcctgtgcaaaatacataaaaaaatcaaaaaattttatttattttctattgtatttccatataaatagtgctccataatcaaattagtgtgatcataaaacaaaaaatataaataaatataaattttaatttttaaaatttttatatttaattaattaaattgtttgtcaaccaattggtgaccacgccgacaacgtgttgctgttgttgtacgcttttgccagggccttcgcctgtttctgattgttgttgccgttttataatcaaatcttccaccgccgttgcattgaacagttttacatttggctttaattataattgattgcattgttaacatacatagaacaatttttttaacaaaaaaagaaaaaaccaaacagtgcatgttct

SEQ ID NO: 32666 - DNA, 591 bp, Heterodera glycines
tttaccccagaaaactatttttcaccccccttttcaacccaaaaaaaatttttgaaaatttctagggggcctagctcgaaaatttttgaaaattttcgaacatgtagtacaccattcgatagcatttaaaaagctctacaaaaatgtcctaagtcaatttttcgctaaaatcaacccctgacgagttatgggcccaggactcaaatgtcccgctgaggccaaaaattttttctatttcttgaaaaaaatcgaaaattttccaaaaaaattaccaatcgatagagctcgaaaaactatgttttggaagtggtcttcgtttttctgggaaaattcgttaaaaaatcctaaaattcaaaaacccgaaaaccgttttttaggcctagctcgaaaaattttgaaaattttcgaaattttaaaatttggaaaaatcgggcttttaaactctacaataagtctgctggccaccctgcgctcaggtcaaaccctaatgagttattcggctggtactgaagtgggaaaaaaaaattaactgagtctccgtgtctgtacaggtccgggatttggtctgatcaaaaaataaaaaatactgga

SEQ ID NO: 32667 - DNA, 411 bp, Heterodera glycines
  unsure (1)..(411): unsure at all n locations
tataaatataatgactaaattatataaattttattattcttcctagattgcctccaactttgtttctgggttttttgtctattactttttcattaaaattttaatttttcttttttttaatagtttttataatacccttaaatatttaattacaatttaggaaaaaaaagttcgatttgaggttaatgaaacatccaaactcaaatcggaaaataatggcaattcttttgctttaggacgtttaaggcttttgaaagaaataaacgatgctacgaagaacaagtgatgagtgttgatcatcttattttatgatttgatttatggacaggctcgtaactagagaccggcgcggnacgggatcccgcgcgggattttgcgtgatcccagtccgcaatcccgcattttttggaa

SEQ ID NO: 32668 - DNA, 588 bp, Heterodera glycines
cggatgggggtggggtgatcagatgggggtggggtgtctggcatgggggggggggtgatcagtgcagatggtgatttatcagaaaaagtatgatagccgaccgattcatgggaatgatagcgggtggagggggatgatcagaaaacggttatgagaggacaggttttattcaaccaatcgagagctattgccttcgtgtgtgaatattcgtatccgtccgggttcagcaccgggacgatgtaccaatcgatggattcgaccaaatagcgaatgttcgggtcccatgaattgtatccgtcgatcagttgcgccaggaaaagcattgcagtggctaaacaaaaacttggccatttagtccaatgctcaatgggtgtcattgcctggggcaatccattcccgcgcgtggatgccggcatcgacccaaacggcggggcccctgtaggggcggaaacgctcgtccggaaaatgttctcgggcggagacttttgccaccacaatggacctgggcattggaatgtgattatcctattctcgagttcttcctttggctttggccttctctcaattttgcccactgttctcgtgagt

SEQ ID NO: 32669 - DNA, 405 bp, Heterodera glycines
tctcattcttctccatccctccccattttccatcctctatcattcactgctttcctctccgctttcccaactcggtcactctttccctcccttacccccgttttttttatttaggtatataaaaaatattttaaattattttatattttaaattaattaatatttatttctttattttcaaagtgtaaatgccaaaaatggattcatttgatcataaaacggcactcccaacgaatggaccttctgctgctgatcagcagcaccagcctccggcagaggaggtgaagccatcggcagaagaagcagcagcgaatgcttctcccccgtcgccctcttcctccgcggacagtgccaaaggcgtcagtctgtggcggattgcccctttctgtgccaagtgtcctcccc

SEQ ID NO: 32670 - DNA, 985 bp, Heterodera glycines
  unsure (1)..(985): unsure at all n locations
cgcctatcggcaccgccggaccccttctttcccaaaagttttttgaaaaagcgctccgaaaaaaagtgatgtgaaaatcaaatctgaatttctattaatattcgatgatttagtccaaaaatgattaattgttttaaataattaaagaaatttgtttgaaaattttcattaatttaatttagctttaacttttggattttattaaataaaaaacaaaatgaaaaatttcccggtcccggcttctcaggtcccggcaagtcccggtcccgtttttgcccaaaattcccggtcccgcttcactctactcgaaaccccccaaaatatgcttttatatgcactaaaaaccttcaccaaatcaaaaaattttaacgtagaaatgctattttcattagcaatttcttgttcaattttattttcttgaaatttctctttaaaattgaaaaagctcatcaaactcattttcagatgattcttcgctcaatagttccaattcaatttttggcatttttgttttagtttttatattattattttgttcctccaatgttttttcttttttaatttttatggaatttaaactcagatagcattcgtcatcactcaaatcgattgcttaaaatttaattatctcgtcaataccattttgcttaattgcctcattaaaattccgtagtcacagcctggcatttatttctaagctcaaaagtcattttcttcataaattttagttgtaatttagcaattttattttattgtttcattttaaataatattatgatttttgatgaatattctgaatagagcagggttttaagtttaatctatttttaaatgagctccttcacttttcaaatttcagaaatggaccctcccctaaatattggaactgttcattanatattataaaaatttgacaataagatgggatttaaacttggtgaattttattacttaaattctcagctctattatcactatgccccca

SEQ ID NO: 32671 - DNA, 538 bp, Heterodera glycines
ccgtcaaaatgctctattgtcaaagttcaggaagcgcaccaagacggatttttcatcttcaccaacttcgagcagtatgcctgccaacgatggtgttctggcggagagcaatgtaacaaaaacggatgatgattgtggagggagcgacgaggacattcaaattgtggagacggatgaacagcggaaaactcacgacgaattaagacaaaaggctgccgaagcactgatccgtgaggcgaaaaggtcggcgaaaggagaaaaatcgaatattagaaaaaattcggcgctagttaaaagaaggtacattttgaaatttttttgcacttttggtctaattttttttacacataatgatgaatgcccgggggttttcgaggtcgggatcccggccccgaacttgaacaaaaagtcgaatttagaatttcgttttttgttcgaatttgggttcgggattcggaataaccccaaataattgtcatattcgtgatcaacgacctcgtaaaccatcgggtacttggattcaagacttttgtaccga

SEQ ID NO: 32672 - DNA, 983 bp, Heterodera glycines
  unsure (1)..(983): unsure at all n locations
agaagaattcaaaaaaccagattttccaaattttttggctcgaacttttttttaaactgaacaaaattttttggaattttgcaggctaatagagcatcttaagggctctcgaatgataccaagatcgttgtatttggttggaaaataaaaaagttatagtcaaaaaatgtgctcgtacgaaaacggcctggtccgctcgttttttgactgtatgggaaaagcagacgtagtttttcgtattttgggctgagtacttcattattatagttttttcattaaaatccccaaatgtcgttttgtccccaagttgcaaatccccaaagtcgggtagccgaaattccacggtaattagttgtttgggaaattaatttaaatattattatcatgtgatttgtatgaaagtgcgaatttcagtgccaatttatcagccaaaaaatatgaatgcatagcataaaacaataattggttggcacttttcaacattaattggtcctttttccgacagaaatttatgcactttattttcatcagagttcacagattaaatttaaaaatatcatttgaagcattaaaaattttttccttcttaaaaaagcgaacaaaaaccatcaaattacttaaacctaagcgatcacataataaatgaattaattgcatattttgaggcatgctttaagcgctcactttaatccccccctcaaaattttctttgatagctattaagttaaccagatgtgctatatttattaccaactaatttgactagcgtctgacacatttttcggtttaatagtcggataacaaaggttcagaagatgcaacaaaataatcataaagtctcanattaaacagcgcctcccgtttttgttttgctatattaaaatctcctnttatatataagttcaatttatattcnaatacaattcgtatttccaccgatcacntttttgtggcaataaaattccgattggtttttgcgtttt

SEQ ID NO: 32673 - DNA, 225 bp, Heterodera glycines
atctatgttactagatcggggatcgatcccctcttaaagggtcgagcaggacccgcagaagctagctcgacggcctttagaagggcggagcccgccaacagaacaaaccatcaagagagggaggggagcggcgcgcagcgggggaggcgggcggcggaagaagaaaagggcggggggagaacgaggacgacgggcaagagggagaaaaagaaagagaaacgacca

SEQ ID NO: 32674 - DNA, 116 bp, Heterodera glycines
atgaggaaaatggcaagggaaaggcaaaggcattttataacgcaaatttgacaaaaaaaactgaggggtgaaaagagaaataaaatcggagcgaaagaacgaaaaacaaatgaaaa

SEQ ID NO: 32675 - DNA, 752 bp, Heterodera glycines
ttaaatataaataatattaataaaataaactaaataattctattattaattaattttgattattattgttacaatatgtacaagatttgtgcgtacaaattattaatgtgtatgtttatttgttctctctccattcttgaagagtcgtcgattttctaatgttgacctttttttttaaattttgcaggctaatagagaaaaagcttagctatcgaatgatactaagaatggaaatttgtttgcctttaagcaaagttatgcctcgttttgtcgaaaaaatcgctaagatggcggattttacgcaacgcctagcaaggttttttgagtctggattttttacagaaaaaataggaactttgtccaggcttttttttttttaaacgaggtctaataagtattgcaaaaagtgacaaaatcatttttttggcatttcgatgtaaatttatttaaaaaatttttccattcatctcttttctccaattttcatcagaaatttaaaaatatgattaatttttttaaaattgttttgttttttttcattaatttgttatttttgcgagtttttacctgatcttctgggctaacctttcttaggtccgacaaatttggccgatatgtattgaccaactcctgatttgatgtggcttgtgtcgctcagatccaattcagtttcgggttgcagattgtccaagttcacacggatattgcgaatctatggcaagagatataaaattattgaaagagtgccaaaa

SEQ ID NO: 32676 - DNA, 761 bp, Heterodera glycines
tcctttctgatcagtttcgtccgggtcgtccgctctcaatcggataagagcagcgccgggcttgacagcggaacggataatcggcgcgaagaaatgacgtcgaataaagcgaggagcattgtcattcacatcggcaacggacagaaacaatcgcagggatgagggaggagaagcaggaggaaaagcatcagcagagagtgaaagtgccgacgaatggcgcgaggggtcggcacaccgttggccaaccccggggcaatcgtccgcttcaatttgcaattcgtatgaagcggccctctctttatcaagtgcttaaaattgtacattcaatagctttgttttgcttatggccaacccttcgacagaaataattcggccttttctggcttagggatgacaaatgtctgcccaaatgaattggcgagtcggtaacaaacggaacgccactgatcagtgccgtcggcatcggttgctcgggcaaagtgcgcaattgggagggttaaacttggcggaaagtcctcactgatgttcacattctatgaaagaaagtgccaatttcaaaggcattgtttggatgccaactttgtccatttttgggccttcaaatttagggcagttgtcatttgagtccaaaacatcgaagcccaaaacgaactgttggcagccgcttcttctgctcccagccgaaacacaaacggacactccgacagaataaaaactctgagtttcgaagtcgaaagtgcgcgaagaattggcgaaggaca

SEQ ID NO: 32677 - DNA, 418 bp, Heterodera glycines
ttttcagcacaaaaaatcaccgattaagcactgtaaacagtaccaaatttatccgaaataagcatgaaaaagcacaaaaaggcaaaatcagcactaaaaattggaaaaaagcataaaaattaagagattaaaggcaccaaaaattgaaaaaagtcgtaaaaaacgtttatttgcaccttgataataaaaaacctccaaaatatgtgctaaaatggtaatgagatatgtacataatttaaaaaaatcaaaatcttgtcaaaaaaataaattaaataaattttggagatgaattatttttaagaaaatttccaattcttagtggtgtgtttttaaaaattttcggccgattcttaggggtgtatttttcgtttttattacatttttgttaataaattttttgaaaattgctgaaaatatt

SEQ ID NO: 32678 - DNA, 527 bp, Heterodera glycines
gtttctgatcaaaaattccccgtgaatttcctttactagttaatcatggttcgatttttttttgaatttttttttatgcttatccccaggacccttcctcatttgttggcacttttatgaatagaaaggccaagaattcctttcacttgttcatactttgttgttgttgttgatgttcctcctcctgttcaggttcgctcagttggtctgcgtctgccacttctccatggccgtctcgtgccccatttgctgcatctcttgcggtgttcgctgtctccctttgctcctcagccgactcttctgaccgcgtcgcatttcttcgtcttctcagctcggaagcggcggcgttctcaccgctttgctcagcgctgttattggcgttgttattggcattttcatcattaatcatttgattttgtgggtagttttatttgtgccgctactaagatataattatgtttattattaaaaagtttgttgtgtatgaatatatgaatccaaatccaccatgacccattccgttgaac

SEQ ID NO: 32679 - DNA, 651 bp, Heterodera glycines
  unsure (1)..(651): unsure at all n locations
ttgaacaatattgatgcaaacccgagaatattttcgacattttgtgtctaacatcgatcgactgaatgattggactcaaaatgagaatgctccaagacggtgatatttatttggataatactgcccttggcaccccaactttaaaaaacaattttttttttttaattcattaaaacatgttgcacagggtgttctgggtctcgaatttgacgtccattccgaccaattcctactcttggaaatttcccatccgttacgtgaaaagcgaaggacaccatttttaaatattcttttcttgataattttgtttattttatttgcaaaagttaattaattgccattaatgtataaaatcaacacacaaaatttccgtgctgccgtgccgcatttgaagaagcttgtcccatcctacagtttatttttatcattttttaacttttgaccaattaaaaaatatgaaaatacaatgaggcatttgcaaaagacattgtcacagttttttctgcgtttcactgaagatgccatagcagctaaattgaataaaaactaatgaaaaaacccagaaaaacgatttaaaaataataatcaaatcaataattatttacaccanatattaccgtacaactcactcgttatacacatagtcaatta

SEQ ID NO: 32680 - DNA, 829 bp, Heterodera glycines
caaaaagcgaaccccgttcaacgactgccgaagtggaggacaatgatgaattgctgttggcaccaactgccgtgccaactgcgcgcgattgccttccatcgcgcccacttgcgctatctttttggggcgattgggcggtcgggtggcgacgatcagtcggcgatggccgattcagcgcctgatcactaccatttggttgctgattattgtcatcctcatcctcatcattgttatcttcctcctcctcctcctcaaccaatttgtgctgttcatcatcaattggtggtgccgaattttcatgctcagcccccaccattttgccactaccacctgctgctcccaccgttgccattaatagtgtggttgtttttattgattattatcaaagtgattggccagtgatcagtcagcaattgatcggtggctgggcaaaaaagtgattggcaattgaagacagggccaaaacttgatcggtcggaggatcagctactggcggcagagccaactaattgatcggccagtgatttctccaagtttgatcaaattttcaatttttgttgtctttcgtgctgctgtttcattcacaaatttacggcaggtggacaaagccaaaatttggccaaaaaagaaaagggctgggatttgtatggccaaatggatgtaataataaagtattattgtggaattgagaatctgtggaggaaaattatataaggatatattttattataaaaatttaataaaaaaggaaaaattttttcaaaaatgaggaaaaattatagccaataaaaaattaaaggtaaattccgggaacgattgaatttttttt

SEQ ID NO: 32681 - DNA, 825 bp, Heterodera glycines
attttcatttgctcctttttcaggtcccatttattttgccacccaaaataacttcaaagtgccgtttttcttttgcttttccatttgccatttcccttctctctcctcagattcaactcacttcgctttgcatggcaatcgcattgagcggaacggtggcattggcctgttttttctgtccaaaagtttacatttgtctgttccaaccatacaaaaatgtgcgaacgcggagttcagcagtgggaaaattggtcaatcagcaaatgcgatttataaggtacagagggagcagagaatggcattggcaaaacggaccatggcacggcattaaggggggggggtaattggggtaattacgattgactccgtacctttgcctttttaataagtttttattctccccatttatccgtctttacctttgaatttgttacttttgtccacccaatccctttgttttcccctttcaaatatctttttaatatgtattatttccctttttctccttttaattttccagtcaaatcacaagtcccgtgaacgacgggcgaacggccacttctttggttgtcaacagcgaatacgcaggtgaattcagagttgtgatctataaattttgaaaatttcgaatggtcattaaagctaaaaacgggtccaaatataaataaatactcaaaataaatactcaaatgtccgttttgttttgctggtaaaaatcagaaataaaaaattgtgttatcattgtcaactcatttaatcatctctccccccttttggtgtgggcttaatgaaataaatattctgtgaaaatttcccaattttttt

SEQ ID NO: 32682 - DNA, 484 bp, Heterodera glycines
tttctttttttcttcttccgctttctttttctttttcggttcctccttctttttctcttcctcctttttccttttctcctctttctcttccgctttctttttctcatcttctgttttctttttctcttcctccttttccttttctcctctttctcttccgttttctttttcccctcttccattttctttttatcttcaaccttctttttttcttcttccgttttctttttttcttcttccgctttctttttctttttcggttcctccttctttttctcttcctcctttttccttttctcctctttctcttccgctttctttttctcatcttctgttttctttttctcttcctcctttttccttttctcctctttctcttccgttatctttttcacctcattccattttctttttatactacaaccttcaatttttttttcttccattttattattttcatcatcagctaaatttttctcttcaa

SEQ ID NO: 32683 - DNA, 787 bp, Heterodera glycines
ccggtttgtttgtctgggaccagagttacattaaagtaatataatttagactcatttttttttcacaattcttacagtataaagagaggtgagaagaaaagaaagacaagtatgtctttcttggtctctaattataagattttttcaattaattcatgtatattaaaaaaataattaatttaattaatcacattaaatatattaattacttatattattattttaaatccatttcttatctttatatccatttaattacttttcattaatatttgaagaaaaaataattaaataaaaatatataagaaaaaataattaatgtatttaaaaattaaaaaaacaacttataaaaagagacaaccaacttttaaaaaaaatgtcttataactaagcatggagagatttcaaattaaaatcttaaacacctttttgtgagtctcaagatcttataaattttttactcaaacataaatttcactttaagatcttaaatcattttttgtcccataagaaactcacagtctaataattttaaaataataattatatatttttttaattatatgcatcccctctttcaacttttttcccttccttcattgcccccaccctttctcctccttcattttttttttcctttccttctccaaccctctcctccctctcttggtagtttaaactgaaggcgggaaacgacaatctgatccccatcaagctagctcctgcaggccctgctcgagcggccgcccggggatcgatccccgatctagtaacatagatgacaccg

SEQ ID NO: 32684 - DNA, 859 bp, Heterodera glycines
  unsure (1)..(859): unsure at all n locations
aacactttgccacggtcttttgggcggagattgccaattgaaaatgcaaattgcctttgctggtgttttgttgttgtgccaaaaaagccaacgagcaatggcactagcaaattgtgaaggtggcagcagaccctcccctttcacgatggtgtcccctgctgctgatgtgcccaaatttgggcgtggggatgcggtatacggtaataggaaaagcggaaacggaagggaaaaaaaacaaaaacaaatattcaaaaattgataaaaacggccaaatgtgtaatcagcagcagcagcaataacccgataattagtgcatccaatgtgatgaattggattcataatgaaaagtgtggggggcgggaggattttcgtcatcactgtgtaatgagcaaaaaatgtggaaaagattatggaagcaaagcaagaaaaggaaacggtgaatcgagaaaaaaaggaacagaaaaggggaggaaaaggaaaaagggagggaagagaggaggggaagagagaggagggaggaaaaggaaaaagggaaggaagagaggaggggaagagagaggagggaggaaaaggaaaaagggagggaagagaggaggggaagagagaggagggaggaaaaggaaaaagggagggaagagaggaggggaagagagaggagggaggaaaaggaaaaagggagggaagagaggaggggaagagagaggagggaggaaaggaaaaagggaagtaagagaggaggggaaggggagggtgtgaagggaatggaggtagacattaattgctcatttttcctcgcnggggtagccaatgcttcttcttccttcccccatttcttcttattctcttccctccatttgct

SEQ ID NO: 32685 - DNA, 865 bp, Heterodera glycines
gagaatgcaagagatagtggatagagtgagggggagatagagagaaaggaggagagagagagagatggggaaagagagggggagaggggagagaaagaggagaagagagagagaggggagagaaaagtgggaagagagatggggggatagagagtgagggggagagagagagaagggagtagagacagaggggagagagagagggatagagaggggagagaaagaggtgagagaggaggagagagagagggggagagagaaggatgggaagagagagagaaggatggaagagagagagggagagagaagcatgggaagagagaggggggatagagagagatggatagagtgagggagagagaagggatgagagtgagagagaggggagagagagagagagaaggatcgtaagagagagaaggagagaaaaggacggaagagagagaagggagagaggggaggagacatagagagagagaggggaggagagagaagtgagagagagaagaaaaagagagatatagaagggaaatagagagagagagacagaagggagagagacaagagagaaaggagatagagagaagaaagagagagaagggagatagagagaagagagacagagagaagagagagaggagggagagagagaagagaaagagcagggagagagagaggagatagagagagagaagggagagagagagaagggagagagagaaggggggagagagaagagagaggtggagagaaagaggaactgaaagaaaagaggaaatagaaagagaaaagactggaaaaaatccccgaaaaaaatcattttttaaaaaactttctcgtgaatgttgatttattaaatttttat

SEQ ID NO: 32686 - DNA, 652 bp, Heterodera glycines
gagagagagacagggagagagagaaagagagagagagatagagagagggagagagagaaagctagagagagggagagagagaaagatagagagagaaatagagagagacggagagagagaaagatagagagagaaagagagagtgagagaaagagagagagagagagaaagatagagagagaaagagagagaggagaaaggaggggagagttgagacagagaaaggagagagagagagaagaggggtgggatagggagagagacaggggaaggtgcccaatgagtcaaatcctttaataggagaagcacctggggaaagtgccgattctttttttgcgcgagtggagaagaacacaggagcgaaggtattctaaaaaatgacgacaaaccaaaatgaaatacagatttgttggccttcaaaattgaaaattcgagcgaaaactaaaaaaggtgagggcagggaaattaataagtggacggactaataggcaaagttcagacccttttgtgaaagtgatcggcacgtcccaaagcgttcaaagggcgacgcaagcgattgaagaaaaacttagagcgaaggtcgtttttgccgcttttgaatatcaatggctgtcccgtccgctttccaaaagagcgccgtctttctgaagat

SEQ ID NO: 32687 - DNA, 1018 bp, Heterodera glycines
  unsure (1)..(1018): unsure at all n locations
cgcagctgggaagcggaacaaacgcgcgggtattttattttccaaaattcccaattttcggtatcatataaaatgatttaattaattttaattttttttgtaaaattagagacatttaggcagtgttgaccgctatgggacttcaaccgttggcaatcatggcattattggcaccaaaattgatggcgactgtgccaatggaagcccaaaaatgttgcatcggcgctcatcagactcgcggcttaacgcctttctgcgaggggaattagcgtaagtttggtatttccaacagtaactatttgatactgtaaaaataatatccctttatttttaatccaggcccagcattgtgcccgacttttgtgacacttcagtgtttaagacaattgttgagcgggcgagaaaggtgtgcgaaatttacctgtcataaggctattagcaaaataataaaaataataagccgactaataaatataatgttgatatttcttaataaaaattaaaaaaagtttctgatttttaacaaaaaaaaaagctccaaagaagcttaaattaagagttttattttttgtttgaggctatttttattttcttcaatttgtaagaaattatttttaattttattttccgtttttagaaaatttaagtgtcaaaatgatttataaagcatgtgctatgtttaaggcgccaaagaagccgcacaatgacaggttcagcaatttgagaacactacaacaactcaagggaatcatgtccaaaaagaagcagctttctaataagccaagttcggtaagaataatcgcaaaaaaacattattaattanaattattgaaaaaattataattaataattaaattaataattaanacacataataaaaaacatatttanaatgcccaaaaaggaaaaaatcagtaaatattttccgaaaggaatggttcataatgtcttccgcttttatattcttnannatcattttcatccgctaaaactttcccggatatgttactttttgcta

SEQ ID NO: 32688 - DNA, 814 bp, Heterodera glycines
tatcgccagtcactcatcaagcattaaaaatgagagaattgtaaaaaaaacaactttaatgaaaatgagatttttgaaacattttactgactttatgacctcccgccgctgctcattttggggttggagccgcgccggcttttggcgcggcgaccggcgcatggacagcggcggcagcgccagcggcctctgctggcgcgccgttgtcgccgtagcggtcgctgcgccgggcgttggcgactggcgatagaagccgccggcggcggacggcaagcgctgagcggtgctgcagccgctgccgctgacgccgcgaccgatggcgcggcgccgccaccgcagccgccgcccatcgtcgaccaattttccatcgaccgacttttttgagtaggcggcgcccgcgtcgcccaggcggcaggcgcgccggaattccttggtcttacttgataaactcattataacaaagttttttaatacagttcaaaaaaaattaacaattttctgatcgacaaggaaatttgtaaaaaacattttatgaaaatgccaaaatcaatttgatcaaatcgcagccattcctcggatagacaaaacgcacaaaaattctttgctgataacaggcagaaactgttcatggttgccattgaaaaaggcacgcaatttgtcaacattcaaaaagtaattctaaaaattaatttaaaattgaaaataatttaaaatatttgaaaattaaatcactttcaaattgtcgagtccgaagcgttcaatcagaaggaaacggtcgatcagtggaatttccacgcaattgatcagatgcgtt

SEQ ID NO: 32689 - DNA, 257 bp, Heterodera glycines
agagagagagagaagagagggagaagagagagagagaggggaaagagaaagggggagagaggaagagagagagaaaggggaaagagagaggggagaaagagaaagggggagagagggagagagagagagagaaggagagagagggagagagaaaagggaaagagagagagagaggaagagagagagaagagagagagagagaaaggaagagagagaagagagggagaagagagagagagagggagaagagagagaga

SEQ ID NO: 32690 - DNA, 137 bp, Heterodera glycines
cagcttgatgcctgaggtcccctggggccagaaacacccggccatcgccataagctggcggcgacactgggaccaggtgatcccgttcttcgcctttcccgagggcgtccgccggatcatctacactacgaacgcca

SEQ ID NO: 32691 - DNA, 405 bp, Heterodera glycines
ttaatttaatttttttcattttttgtgtcattaaaaaataaaacatgttttagcggtgtgttttcacctcgacaaagtccgaaaaagcaattggtcagccttttattctgggcattgtccgctgctcgtggtcagttttaatcttaatttgcgttttgccaccacaaatagcgtcatcctttcccatttgttgtatttttctttattgccaataaaaatgccactaattgggtcagttaaaatattaattgcctttcctttgtgccaattgtttcttacatgcattcggttcctttatttgtttaaactttgctatttactttactttatttgtgtatttaatgctttgttgggattaatttttctcagattttaattaaaattttcaacgggtcttcccctccc

SEQ ID NO: 32692 - DNA, 825 bp, Heterodera glycines
  unsure (1)..(825): unsure at all n locations
gaacttttagtacatactctctgaatgagctgagaaataatatatattttttcaaggtcatgaaaatttcaagaatttttatatgggcccgacagtatgatatggtactttgggtataatttcctctaagcagcactagcttaacttcggaacttttaggacatactctctgaatgagctgagaaataatatatattttttcaaggtcatgaaaatttcaagaatttttatatgtgcacgacagtatgatatggtactttgggtataatttcctctaagcagcacaagcttaacttcggaacttttagtacatactctctgaatgagctgagaaataatatatattttttcaaggtcatgaaaaattcaagaatttttatatgtgcacgacagtatgatatggtactttgggtataatttcctctaagcagcacaagcttaacttcggaacttttagtacatactctctgaatgagctgagaaataatatatattttttcaaggtcatgaaaatttcaagaatttttatatgggcacgacagtatgatatggtactttgggtataatttcctctaagcagcactagcttaacttcggaacttttagtacatactctctgaatgagctgagaaataatatatattttttcaaggtcatgaaaattccangaatttttatatgggcacgagagtatgatatggtactttgggtataatttcctcttagcagcacaagcttaacttcggaacttttagtacatactctgtgaaccagctgaaaaataatatatatttttttcaaggtcctgaaaattttcaagaattt

SEQ ID NO: 32693 - DNA, 907 bp, Heterodera glycines
  unsure (1)..(907): unsure at all n locations
ggctaactagcgcactagcgctacaccacttgtcgatgcgatgaactgaaataattatttcttttatttaatttaaaaactttggcattttttatctcggcacaggggtccatttggcagaaatagaagacatttttcttaagaatacaggaatgctctatctacccaagaaatctcaatcacggacactttgccaactccctttgtgagttatacgtcggcgctgattttgcaattattattttcctgattaaattgtaattttaaattaatttatcgtttatattaaaacgtataattgtgaaaattttaataataatttctaataattataatattttaataatattttattatattttataattttaaaatttgttgaaagaatataatatcaccttaataaacttatatttgaccagtgatttcttctgagtctgaaggccaatgtcgagtttaaattgtatttttattagttattttaaggtagattatttaattcattaattcggtataaattcgtcatgatattttattttttaagtgctaactttgttattcgaatttaaattttaagtttaataattttattgttattttttcttgaatactttcattttaatttccttaatatatttttaattaaataatctttacagccttttcttagtctcgtttgccagttaatatttttaaaaaagaaaaatttttatgatgactttaaatgtataaaatagctaaatattttaattataaattatttgaaattaactttaaattgacattgctcctcataatgccaccgaagttacaccaactcatgtattttttaattatagaatttcataatgtttgaatataatcatatgaaatattatacttaaatattanaccttaaaaattaatt

SEQ ID NO: 32694 - DNA, 826 bp, Heterodera glycines
gcgaattgtgcgggcgaccagcgcctcaagcacagggtcacggtcgtcgtgcagcaaatggacctcgtcgaagataatcaaactgaccaattgggtgtaggaacgttcgccacctaaaggagaaaaccaaattgaaaacgaaaaaaaggaagaaattcgtaccttttctcgtgatgatgtcgtatttttcgggtgtacagaccaccaattgggtgagcatgaactgctctttgctcatttgaacatcccccgtcatttccccaaccttaaccaaaatgtcaatataaataagacaagtctttacttattccaactcacagttattccgtacgcctcttccagccgttgcttgaaactgccaaccatttcttgaaccaatgaacgcattggtgcgacataaatgcatttaaactcgtcctttcggacagttccgtcctcattcatatgcttagacatctcccgaagaatgcacatcagtgcaacattggttttcccagcgccagtgggtgcacaaataagcaaatttccatcggtgtgaagcgccttttgactgatcactgattgaattcggttgagggttcggtagccctgaaaggccggacgagcccatttcggaaggtcttcaatttcgatgagtttctgaaaaagaaatatgctttatcataaacatcgataattcaattgaacctcattttcgccaaaaggttttggttttaatggcggaacataaatgctctcgtagcttttcttctgcgttctttgggaaccgtcgggcagcacacactttttgttgctcatcgtatgcgacccctgcgcaaatgccatg

SEQ ID NO: 32695 - DNA, 188 bp, Heterodera glycines
cagagttgatcaaagggattgaaatgaaacataatgctgctgatttgctttttcttttctttcaaattgcccacactccctcatctctttttctcacgcttccctttttttctctctccccccctctctctatctctcccccctctctctctctcttctctccctctctctccccctctctctctctc

SEQ ID NO: 32696 - DNA, 737 bp, Heterodera glycines
  unsure (1)..(737): unsure at all n locations
ctgtccgaaatgcgctaccgaatgatgaccgacaaatccctggaaccgatctcttcagagtttcctgacgccgcactttggaacaacgaaattgaccaattgaacaaagtgagagaggagggggaaaattgcatttttatgattaaaaagggacggaaagaaacgcaaagcaaagccaacgaaagcgacggaagtgccaattggtacggatcgccgtggatgttcgtcgagtgttacatgtacaggcgaattcggcagttctttcagcagagtcagtttctccgcgagttcgacccgttcaacgaagacaaagagaaaagttacaaagacaggtgaaaagcaattttacttaatcgtccagtcaaagaccataacacttggtcaatgcttacaattattttcgtatcaatcgaaagcttaaagtctataggctttttgtaaaactaaatctgcttaggctaatggttctagtcggttttatgcgtcccaatgaccatnacccagtttcttaggccataacttttttcttacttggtcaatacccatattcttggtaccaagcgaaagacaaaagtctcgagattttttaaatgcaagaaaagagcaaatactggcattaaaaaagaaattacaatgaaaaaaacgaaattcaacttttccgagcataatttttttgtctattgcatttagatataaataaagatatacaaaagcctctaatagacccttaagctttt

SEQ ID NO: 32697 - DNA, 641 bp, Heterodera glycines
ctctaattacccccccctcctctttaattgcttttaatgacccttcccccatttaccgctgggttctctcccccgtgttccattgtccttctctccgttttccctgtccggttttggcccctccccatggtccaatagtgggaatttgcccagccccgcgttttgtgccgggcccccgtcgtccccgcggggtcctttcgttccgtcgtctttcgtcggctctcttttccgtcccccgtcgttgtccaaccccggccatttcggtccttctcctaaagtgtggtgttgtgttccttcagccgcgtccctttccgtcgtcccttggcccaccgcgtccccctgggccgagtccgtcgttttgccaattcgtcggcggtggcattttcccggccccttccgttcctccgtctccgctccctttgcatttgtttgtttgtctttgacttttctccgcctcaattacccccttcgtgccaaatgctttccgtcacgcgtagtcccggcttgccctggtcgtgttccacgtgccgctgatagtactcgtagcgactgcggcgaaaggtcgggcggcgtacgcttcatctcaatgccgtcggcagcaaccttattagccattgttggttcactatttgttggcaccc

SEQ ID NO: 32698 - DNA, 1010 bp, Heterodera glycines
tgtagtcagtccttttcaatgccaattgttccccagtcaattcgttggtctgttcaaatggcacaacggagtaagcagaagaccaacgaaaccaaatgacgacaatgaaattagcaggggaagaagcattggcaaatgcctaaaatatggaaaaataaaagttttttgttaatgataagcaccgttttaaatgctgcacttttaaacgaccaattcccatcatcattgtccaacgcgcatttgaacatctttggcacatcgttttgaagtggcgtgaaaagccatttggccaacatttgtccattcgatgccgcggcactgtcatcgcatgggaattcggtgaagaaaccataggaataggcattgacaaagcgaagagatgggcaatcgttgagaattgacgggacgaattgtcgcaaacggcggaaacttctggaggacaattccaacacataaatgtttttcccgagcattggccaaatgttgtgcaaaatgcagtccaaaatgcggtcactggacgtaccgatattcgacgtatggatggccaaattaattggacaatttgaggtgaaaattgggccaaaacgtcggagaaaagcgatcacattgttgtcgatgtaactaaaatgaatgggaagtatgtctaatgtaatttagcatggattttactcgatctcaatgcattcaaatcggataactttgcgtggcatttcaatttgcggaattggtaatggtttccaatatttattgaaaaattctattttcttcgtgccattctctccaactttgcaaagaatttgaataaatttcagtgcccatttgcgggttttgaagtgttcgtcgacgtaaaagtcaaaacggtggctgatcattgcaatgccaaggccaagttgtgaaggcggaagcaaatcgaacacacaaagccaacagtcggcggagatgaaactgaaaaattaaattaatcaaattaatggtaagttttatttgtatttttacattttcttttttcg

SEQ ID NO: 32699 - DNA, 1096 bp, Heterodera glycines
cagtttcactttcgccctctctttctttctcacctttttctctctttctctcactctttttccctcactcactcctctctctttctccccctttatttcacttttctttctccgggcctcactatctctatctctcttctcctcgaaacaaaacttgcgaaaactttttcggcccttttgaaaataattaattaattttaataaataaataaatacatacataatttattcgattttcctacagaatctcagtttggaatgggcccataacagcttgcaattgtcaatatctttaaatgcactcggcattttgtattggtttagaacgggtggagctgactatttcaatgatttttgtacaattttatcaaagacaattggacaaaatgtaaaaattaatttttattattttattttaaagttcttaaaattttatgggaatttttgtcattaaattaatcattttaattagacatcgatctttttgaaaaagcctggacctggacctggattccatattggacctggatttcctggacaaaaatccaaggtccaagaaaaacccagtttgccgaaaaatggctctggacccaggaaaaaacccaggcctggatccaggtctaggtcgatctctaattttaatgttattgtttgtatttataaaccaaaacaaaaagaattaattatgggtagaaaaacgaattttccttacttcttattaattaattaaaaccacaaataattaaacaataattttttttccaattttagggagtgccaacaatttcgacgtgttcaaaaatttgtgcctatattttggctttcatttgcatgttcacctgttccatttgggcatttcgccaagtgttgcaaattgaaatggacaaaatgtccatgccaattccattggatcgtatgttgagaagcatttgtcagaaatgtgggcatattataatacctattatgattgatataaaaaatgtgacattgccatttttagggattttaaatgaaaaaatgaaaaattttaggtaatattttaaagattttttttatagtgatgaaagaaattttttaaaataatttcgatataaaa

SEQ ID NO: 32700 - DNA, 121 bp, Heterodera glycines
ccttcaagatggctgttggctttaaccacagcgcctttgcgcagggtagtgttcttgattacgcagttcgggccaatcaccacgtcgtcttcgatgaccacacggccttcgagaataacgt

SEQ ID NO: 32701 - DNA, 124 bp, Heterodera glycines
aatttggatgccggacagcttttttcaggcaataaaaaatatggtggtaaatttttcaaaattcccaaaattttagaatgaaaaaatggcaagaaaacatgaaattgacaagccaaatgtgctt

SEQ ID NO: 32702 - DNA, 848 bp, Heterodera glycines
acttgtaaaccatttttaacaaattcaaaattgaccactttgcatatagtgggcactttttcgcctatcttttccttttaaaatttatggcattctttttttgcaaaataaaattttcaaaatttcttcagccgtcgctcagcgtcccacgacccgaagggaaaaagcgcaatatctcagaaccgtgccaccggcagcaacaacaaattgttgctgttgcggagttgtgaacagttggacgaaagcaaccgaatacgcacttgtccagtgcccagaaaaaggatgcacagtacgggggattttgcaaattttagacgaaatttttcaattaaatccggcaaaaatcacccatttttgggtatattttttaaattttggacaggatttgtcactcaataaatcctctaagaaagttggcaagttggcgccgattttgattttttataacttcacagaagcaacccaaattaattgtgtcattcgtttccaatttttcaaaaatttaatttgtccaaaaagttaagctaacaaaaactggagttcaaatgaactttaaataatgtctaatccgagattatcgctgactttttaaatttttgcttcaaaggctttttacttccgcagtttaaggagagatttcttaatggatattatcattgaagtttcaaaatacaataaaaattagcttttttcaaatagtgaaaatcgcttttcatcattttctttgctggcccggagaaacgcttaatttaaattgcttgcaaaattgcaaaaattaccacccttttaacagtgaatctcaccggactgccaagggcccaggttggagctggacgccgtctcttcaa

SEQ ID NO: 32703 - DNA, 772 bp, Heterodera glycines
cccgctcaggtgatgatgtcgaacccccagttgctccaagcgtcgcccaaacccgtcgcgctcagtggcaggcgaaagtgatcatgatcaatgtgtcgaccgactgaactttctctgccccactcgcgatgacgtcattcgcccgtgcatatcttttgcatttcatttgccatctccgctcatttccctccttctcaacaaatggaatttctgtcttgtttcctctctctgtccccgcaaatttgttcaaatttacttacttaaatgcctaaactctattgctgctcgtaatgacagccaaccaactcattcattcattgccactaacttttgtctctgtgtgtgcacactcttttgtttttgtttcgctgtttgcctaaacactttaaactcgcgcgctgaaaacggtccgtccccccccgggggggggggggcgaagggtcggcgccgagaaaaaaagcaacggcttttcgcaacacaatttccggcccattcaaagccattgaaacacatgtatattaaaagcaagtactgttttcaaaaagattaatatttcaatgcaatttgaattttctaagtccccccccccattcatttcatgttttgtcgttcgttttcccccatttctctctgttcaattgtgaaatgtttttccgtctcttctgctctgcttttgcaggttttttctgtgatgcgcttatgagttctttcttgccactctgatcggacaccctgttcgttcgcatataaataaaaaatatctctccatttt

SEQ ID NO: 32704 - DNA, 732 bp, Heterodera glycines
  unsure (1)..(732): unsure at all n locations
aaaaatggtttagatgattttttattagtgaagtatcgacttttagtttgtttccctatatgtaagacattttaggaccaaaaatgagaaattggaaaatttaaattttcgactttttgctcgaattcgagtccgaggttcgacataggtcgaaattaatgcaagattcggattcaccggcccttatattgtataaaaacccgggattgtcaattgattggactcataaagtgcattagagccggggaaaattcttgaaaaatttcaaaatttttgttgaattttttaagcatttgtcagcgcataaactcattttggcatcatcttccgaagtttttgaggcaatgttccgttttgatgaacaaaatgaaacccgtccaccggctaaaaaggtcgcaaaaattgcaaattctgatactgatgcgactccaagaggtccgattttaattgaattcttcaaaattttcacaaattacttagaattcccaaaatgtataaaatttttacatattttcatgcctaaagtaccattcagaattatttacatacaaaaaaaaaattttatagtgaataataaattatntanggttactttccggtgtttggctaccccccataaaaatgtcatgatcccgataaaggaaaactctttcttgggtagttttaggcgctgatcaagaatctggcatcagaacttcaaaaatctttgattttgttcatgattttcatcat

SEQ ID NO: 32705 - DNA, 938 bp, Heterodera glycines
tcatgtttgatggtacctgaaagacgagaaagggcattgtaaagatgcgcttctcgcggaacactgcatacgtcagactaccgtatacgccaacagcaaaagaggccaaaatcctgtttgaaattcaagaaacatttctgtataaaaaccggtattgcttagtattacggtattgtttagaaaacgacagttccgttttctttattctgcgctttaccatgaataaatgatcactgttgaagtgcgcccgaacgagtagagaaggttgatcacaataccaacgatcagcgcaatggaaacgacacgggcggcggtctaaaaggcacaaattggaaaacctgaaaaatttataacgcaatttttttttgaaaatcggacccgtatgtgcaatttcttaaagcagcaataatattttgggctgctttcatcgaacggaggcgaagtggtggacatttgttgcgcgaccattttcatcagtcaacaaaaaatatatgcccaaaaatggcacttttcactttagaagggaaaatatataaattaaattgaaaaaattaattatttttttttttgaataaaaaattcaaaaattttcaaaaacaaacaaaattggaagattaataatttgaaaaaataatttaacgctctaagctaaagaacgacccggagacttttccaaaatattttccgcaaacatttgaatatatattttttgtttgttttatgctcataatacaaatagtcaacacatttcaaggccgcaacttttgaatgggaatttgaaaaacattggcaaaatttttacattttttaaataattaatttcatttaatatatttcaaatttttggagagagagaaagctggtgaaatggtggggttgatgagcttctgctgccccctgacatgaatatggggcggtacgtgggggggggggggggg

SEQ ID NO: 32706 - DNA, 481 bp, Heterodera glycines
tgttttgtaatcttttttcgttcgtttgatttgtcgtgtgtgcacaaaaagtgactcactttcgggtaacatgccaatctccaggcaccgcttcatctgaacaatggacgcattacgcggcattccccgcacaaaaccatggccaactcacccgacaatttcggcacattttgcgatatccttgcgctgaaagcgaattgcttctttcagatggaactgtctgccctttctttatcatcccaaaaattactattccatcgctcaggatgacacatcgtctgggatcgtttgcaaatgtatcgcttttggacactaatcgaacgacggaaaaaagccgcgcaagcggcgcacgtacgattaccgaaatggagtccatttgaaggaaccaaataacagaccaaaaatgatgtcaattggtcaaatggaaggataaacaatttataatatttaaaaggcggcaaaaaaggcaacgaccgacaac

SEQ ID NO: 32707 - DNA, 424 bp, Heterodera glycines
ggggggggtgggatttcttccccaatccccgacttttctctcaccgatcatcgggaagcaatccggtttttaaattgaaattgaaatgccaaaattaaataattatttaaccattgcgtaccgttaaggcgctgagaagacggacaagcagtgcgcaaagcctaagagaaagcagtggcggcggaatgcttttcgagaatcggacagaaacattttcatcaaacattggccggacgaagaaaaacacgaaaagtcgaaatcgacaacttttcaacagtgaagaacggagaaaattgagatcatcaacggatgaagcgagaaaagatgatgaaaaatgatgaagagatgaagatgaaactattgtaattgtaaatatcatattaattatattactgtcacattgggatagtacattgatcctcgg

SEQ ID NO: 32708 - DNA, 943 bp, Heterodera glycines
attgtcgagattaaagacatagacaagttttgaagaggtggaaagtgaatgggaaattgagagagaggcatgagagagagagagttgatgggatggcgcaggccttgttaaattaattaattcaaattcactccagctgcagatgccaccaacaatggcattttctccgtaggaaaaatgccatggcgcagacattccgttctattaaaatctggcaaaatcatgcgcaaacaaacacatacagcgcgacaaggaagcactttttaattttaatttaaatttctgtgccaatgattcttaaacaaccctaagggcatttgtaccgtatattttttgaatgataatacagtagacgtggctaattaaatgctttaaaaacaattaaggaaatgtgagaaggatgaacagcagaataatgacgaacagaaaaatcacgatgatttataacaactgttattaaaatccttcttctatgatgataatgtccaacaacaaatttgtgccattactaccgtatgcaccaaacgacagtagtgccacggaccacaacaacaacaattacagtatccatttcacggcggcgccttcttcaccaattgttgccctcccggaacagttgcctttcccaattgtgctcatcctctccgtgccggccatgctgatcattttgctcaccatttttggcaatttgctcgtcctgtttttcaaggcgcgcgtcgggcgcacaaacaccacactgttggtgtggaatttggggctcaccgacttcatggtgggcatcctggtgttgccgatgggcgcctattatttgctcaaccgacgctggatttttgggccaatgctgtgccggatttgggtgagagcagcaggtcccccaaaaacggaaaatgtggaatatacatgaaaaaagggggggggggccgaccaaagggggggggggggg

SEQ ID NO: 32709 - DNA, 931 bp, Heterodera glycines
  unsure (1)..(931): unsure at all n locations
tgaggtagtgggaattgggggccaggaacttcttcacgcgctctggctcccaccacggcagcggcgagtgctgctgccactgatgtttctgttgttgcttctgctgctgtggtggcggttgctgttgcccgttgctgctgctccccgctcctttggcctcctccgacggcgccgtcgtcgttgctcctcctcctccgtcttctcctcccccatcattttgttgctgttgcggtggctcattttgaacactgtcgtcgccgccactgccgtcgacgatgacggcacttttttcctcagcctccttttcatttatttgctgttgctggtgttcccggggcagcatttttccttaatttagacaaattttcaaatgccagcgatttcgcgttattgggctcggcaagcgacacgacacgtgagaacgacacgaaactccgaactccacaaagaattgaacaaatgatttttggaacaaattttgaaaacatacaaatattccacagaaaagttttgaaaaactttagaaaaccgttttgatttttttttatttcggggggggggggggacgagctgttgtccagacacaaagccaaactaattaaagttgcttgtcatgatctctaaaatttgaacatactttgttgttgtcctacagttccatggtaaggcgatgggctgctgctgttactgtcgcccactgctgctgctggcgtcagatcggtgtgtgtgcggagcacgcgcaacagtgtgtccagccgggcgtagtcgtcgtagagacggtagcgcgggaagccgtcctgccacagggcaatcaccggcgttgacgaaatgccgtagtgngagatcagactgaaatgggggacgcggatggcatgacttttgccaatttaaaacgaaattaaaaatataattccccaatttttttccattt

SEQ ID NO: 32710 - DNA, 854 bp, Heterodera glycines
gggactgccccgaaaacaaaaaaatcgattttttcaagtgtccgtttggggtactcaaacaattatgggggagcaaaaatccaacgcagaattaaagtacaggctatagggaagctattcccgaaggattcggtctccccataaatctgggcgcatcggttcggggggactgccccgaaaacaaaaaaatcgattttttcaagtgtccgtttggggtactcaaacatttatggggagcaaaaatccaacgcagaattaaagtacaggctatagggaagctactcccgaaggattcggtctccccataaatctgggcgcatcggttcggggggactgccccgaaaacaaaaaaatcgattttttcaagtgtccgtttggggtactcaaacaattatggggagcaaaaatccaacgcagaattaaagtacaggctatgggaagctattcccgaaggattcggtctccccataaatctgggcgcatcggttcggggggactgccccgaaaacaaaaaaatctattttttctagtgtgcgcttgggggactctcacaattatggggagcgaaaatccaacgcagaattaaagtacaggctatagggaagctattcccgaaggattcggtctccccataaatctgggcgcatctggtcggggggactgccccgaaaacaaaaaaatatattttttttagtgtgcgtgtggggtactctaacaattatggggagcgaaaatccaccgcagaattacagtacaggctatatggaagatattcccgaaggattctgtctccccaagatctgggcgcatctggtcgggggggctgccccgaaaacaaaaaaatcaattttttt

SEQ ID NO: 32711 - DNA, 107 bp, Heterodera glycines
ctttgcctccgtctccgtccctttccgtttggtgcgctcgttttccttcgcgtttgcccttcgccgacgatcactttcttccgacaacagcagcaaactcccaaatt

SEQ ID NO: 32712 - DNA, 955 bp, Heterodera glycines
aaatttattctctatgccagaaaaatggttatctcttttttgtgagaaattttgtaccatacaaatgttcccagcatgggcagaggggcgcggagagcaatggccattctattctacagggaatttttaaatttattctctatgccagaaaaatggttatctcttttttgtgagaaattttgtaccatacaaatgttcccagcatgggcagaggggcgcggagagcaatggccattctattctacagggaatttttaaatttattctctatgccagaaaaatggttatctcttttttgcgagaaattttgtaccatacaaatgttcccagcatgggcagaggggcgcggagagcaatggccattctattctacagggaatttttaaatttattctctatgccagaaaaatggttatctcttttttgcgagaaattttgtaccatacaaatgttcccagcatgggcagaggggcgcggagagcaatggccattctattctacagggaatttttaaatttattctctatgccagaaaaatggttatctcttttttgcgagaaattttgtaccatacaaatgttcccagcatgggcagaggggcgcggagagcaatggccattctattctacagggaatttttaaatttattctctatgccagaaaaatggttatctcttttttgcgagaaattttgtaccatacaaatgttcccagcatgggcagaggggcgcggagagcaatggccattctattctacagggaatttttaaatttattctctatgccagaaaaatggttatctcttttttgcgagaaattttgtaccatacaaatgttcccagcatgggcagaggggcgcggagagcaatggccattctattctacagggaaatttttaatttattctctatgccagaaaatggttatctcttttttgcgagaaatttgtaccata

SEQ ID NO: 32713 - DNA, 652 bp, Heterodera glycines
atttgtcgcgttccaaaatttcgcacaacattttttggtcaatttgcaaaaatcccttcgattcgatcaaagtgtcggcattctcgtcaatgtacaataaacaatggtaggcaaaattctaaatttgaaagaaaataaagtattaaaaaaaattggctcttgattgagaataaaaataagtgaaaaaaggaacattatggaaaaaaatcgatgcgataatttccacttttaaacacaatttggaaatatcaagttaaattgagagaagtttttctctcaaatttccttactatttttctcttctctgcccgccgctaaaaatggtagcagcgacgagtcagagaagagaaaatagtaaggaaattgaagagaaaattttatttttttattcaaaacaatttagtgattaaaaaaagattcggacttatttaaaaataaatttgtaacatttttaaattaaaaaaaatttactgcattccacattgaatttcttcagggatttgcaattcgtcgcgttccaaaatttcgcacaacattttttggtcaatttgcaaaaatccatccgatttgatcaaagtgtcggcattttcgtcaatgtaaaataaacaatggcaggcaaaattctaaatttgaatgaaaataaagtattaaa

SEQ ID NO: 32714 - DNA, 985 bp, Heterodera glycines
  unsure (1)..(985): unsure at all n locations
ttatattaataaaattaaaaaagagaattgccaactgcccttgtttcttccactcaggtatacatgagaatccgatcaatgtcggacggactaaccaattgaaaatcctaccgtttctaaacagttcaacattgattatttgggcacggcaggatgggcaattattgtgctttttaatcctgtgaaaacaggcaaaatattaaagaaaatattttaccaagtttcgttaccattcatcaacgcattccgagtggaattggtgctaaataaattaaggtttatgcattccatgtgatatttttggctaaacaaagatatttaaaactattactagaagaaaatattgtatctcaatgcggatttggcttaattttctttataaatgattgattgatttttttgaatagatttgatcattttacacccctaaatcaaagttttttgcaactatttttccacttttaacatctatttgagattttagaacctaaataatttacagtttcttatttattcagctaaaaaattccaaatcgcatacctcacacggcaatgtgcgaaccttatccccgatttcataagctcctaggcatattgcgcaaccgccatcatcatcattttcaactgtatgctctgtaattctgctgattgcttttgtaactgaaaaaataaataaaaacttattgggtaaataaataatcaattttgaaacattcaatgaattcaattttaaataataattaaatcgattttattccattttgatacccttgtactgtttgaatttggaccaggcatttttggccaacgaagtcgggtccaatcttctgttgaccagccatgtgtggattttatccattatatagccaagtagacaagcaatatcaaaataatgcatanaactaaggctagaattccanntagagcacgtccaggtaataacgcttcttgcgcctcttcctttttatttttgnntgtcagctga

SEQ ID NO: 32715 - DNA, 1025 bp, Heterodera glycines
aattaaaactcaaataatttttttttgctgtaatttttcgagaatttactagtaaaataattgaaaataattgccgcgcaaatttcgcatttttataaaaatatttttaaatttgaatcaccaattagtcatttacgtatttcttcatcatctttgcaggcctactgtattgaccgtaactatggtggttggtcagcaaaatttattattattttgcatatattatgccgtttttctgatcaccaaaaaaaggtgtgttgatcatttgggatcggatgtttggcacatttgaggccgagcgcaaggatgatccgccggtgtacgggctgatccggccggaacggagcttcaaccagttgtggcttcaggtcgtccaactaatgggttttcaaatcgagaaattaggcatttaggtacttaaattccagtacaacagagtgggcattattttgtcagagtacttatattcaagtacaaaagggttcagtgcaaaggctagccatttgttcttagattccagtagctaatgatggccatttgccaatgtatacacttaggttccaatacaaaaggatggccaatttttcaagttacaagaacagaatgatgaacattttgctgccaatgcacttagttttttcagtacaacagagtggatattttgccaaattttgattcaaactgaaacctatttttgcctattttggcgttttgtccaaaatttgttaacaaaaatgcaataaaaacgaaaaatacattcctaagaatcgattttttggggattttaagaatacacccctaagaatcgacccaaaaatttctaaaaataaaccccctaagaaatgaaaaattttccaaaaattcatctacaaaatgtatttatttattttcttgaccagaatttatgctttaaaaactatttatctcaatactgacttggcctatttttttactttttgaatatttttttgtcatttttcccccctaaaaaagagtttttttttaaaggctattttccatttttt

SEQ ID NO: 32716 - DNA, 895 bp, Heterodera glycines
aaaactaaaaatgtaatataccaggtcaaaagctatttgatttaggcgacaaatcgggtacattacgtattctccacccccccccccccccacatcctgtcaaattttatcggaaaagtaaaaaaaaaattatgaaaaattctcaactgtgacaacagcaattggtttagactgaaccgagcacagcgcaagtttaagcagaagcaattggtgggacaacggcagagcattgtcaatgatggagatggcagtgaaaacgaaaaccacgacgaggacgacggacatggcattttggacgacattggcacgacaaaaaaggcaaaatcaataccgccaacacagcacaccgattccgacgacgaggaaggcaccgatgacaatgccaaaacggaagctgcagccaaacccaaagtgccgtggtccaatcggtgagtttgtttgttttcagtgcatcttccataatttttttgaatcctgaaatataacgatacatttttacaatccggccgcgtcagtaatttaaaacgggccaaaaaattcaggctcggtgcacaggcatgatacgggtttgctgtactgtttcaacttcatgcaccaatttggagcagtacaatgagcagaggagggtccctcaaattctttcatattttccctaaattctttcaatttttaataaatccttgcaaatcccttttttagtcaattgtccgcttctactgacgaccatcggctgggtgggcggtgatggccagcgaaaacaacgcgccgccgccagtggcaccggcgccgcccgcggggacgcctatttgagcgcgtacaaacgcgcgcagctcacctacgagcgcctgcaagcggagaaacgggcgcaacgccaacgcgcgcgcgaggaacgcga

SEQ ID NO: 32717 - DNA, 346 bp, Heterodera glycines
cggtaatagtaaagtttatcccccccccccctttttcaaaaatttttatttgttttcaaaagtcatgaaaacatgtttccatgggtttttggggtcgctgatcacgaatctggcacccatttcgaccaattccgaatcccggacccgaattgcaacaaaaagtcgaaaattcaaaatttcaattttaatttttagtctaaaaatggtttaaatgatctttaattgaagtactaatgactttaacttcgttttgatgtatttaaacaaattttgaaccaaaaattcgaaagttgaaaattgtgaattttcgactctttgttcgaattcggatccggggttcggaatt

SEQ ID NO: 32718 - DNA, 703 bp, Heterodera glycines
tgcgagaacagcttgaagtgcactatcgacgcatcgacgatctgatgaacgggagagagatgcctatggccggaaatacaattgaaaattcaatgggcttttgaagcctcggtactctgatatattctcgatgcttttatgaggtctccaaaaatttcctggaatttgtgatgaatccttgggattttttccacccccccccccttgtctactcttctttgtaatgcattattaacaaaaggggtacgaacatttgaccgatggcacaatgccatattttaaggctcctactcgatacctattctatttctcattgacaaagtctagacgatatgaatttgcaggagcacatgaacgaaaccgtgcgtgaactaaatgctcgcattgcggaattggaaactgccaacactgctttagcattgaaattcaggtggattaggattttctgaaaattgaaaaaacagaaattcttacatttttttttctcttttaccccacagggtttgatcaatcgccttcaacaactccaatcatcattgcttgaggcgaaacattttgcttggttcttggcgcacccgacttgttagaacttgagggatcaacagcaacagtttgttacggtacattaattgatacgaaaaaatggttatacgccacaaggatgaaggcgaactcgcaacaatttaattcccgaaattttttt

SEQ ID NO: 32719 - DNA, 339 bp, Heterodera glycines
acaaaatgtgttggttgttggacgttcatttgttcacttcaaattcacctcaccacacattcacacaatttatttaaccccaaccattttctcactcaaatttttttttttgtgtgaatttagacattttttccgccgtaaatttgcctcatttttttatttgtgtgtgtcgagtgagcaaagatcattctcgtcgtcgtatatcctttctttgcctcccccccaaccctcccaacttttgtccccttcccttaatttctcttcggaagaaagtgggaaggtgggggggggggggggggggaagggaggggtattgggggggggggatggtctttgtta

SEQ ID NO: 32720 - DNA, 698 bp, Heterodera glycines
aaaaagtcaaaaattcaaaaaatttcagaattcacttttatgtttgaatctgtgcagaatgataatttctaatgttgtaatggtttctatttaattttgctgttttaatctattttagaacataaaagtgaattctgaaattttttgaattttcgactttttgttcgatttcgagtccgggttcgatataggtcgaaatggatgccggattcgtaatcagcgaccctggaaagccctggaaatttggcatttttaaaaaaatttatttcagtgacgaaacgtcttgccaccagttttttcgtcttcgattaattctttcaatcttgttttacgtacaaaatcactatttcagaacacgcccttaaattataaaggtttcatttattcaagaagtcattcattttctcagcaaaaacttgaccagaaatttaatttgtccctaaattttccttctcctatggaccaacaaaataaaaaaatattaatgcagctgtgaagctatttttcgactttttaatgccacttttcggcttttatttttatatcagaaaaacatatttggtatttgcccttaattctttacctaaaaaagattttaaaagaaaaaaaattttttcggaaataaaaattaaattcttcattttattattttttttgttaatttatttgcatttaaacggcttaaatctcattaatga

SEQ ID NO: 32721 - DNA, 889 bp, Heterodera glycines
ttggccttattatcctttgacgccgaaaaaacaaaagaaaaaagagagagtttaaatcatcatttcctctctgtgggaggccaacggacatttctcccttctccctctttctcgtttccttctttttccctttctttcatttctccctctttctcatcccatttattcttttctcattgtttttcctttcccttctttttctcccccccccccccttttgccatcatcattcgtctttctcttctgttcttgaccaattcggctcgaaattcaattacgatcccttcggaaaacattcagtcaacaaaaggaggaagaagagagtgaaagggcaaagtccctttcccttcatttctctcccccccccccctccttttccccctcatttccctctcttttctctcttccttccctccttttttccctctttccctccccctcttgtccttttcttcccttctcccatctgtctcctctccttctccattcattcgcccacttcttcgtccttggcccattcaaatccctgtcccttgtcacttttctttcttaaggactcccccttcccattttctccccttcctctcctctcccccgtgtcaccccttccggcccccttttatccctcctttttctcctccccgtccatccgtcggcacctctctctccctctgtccctccgtccgtccgccccttcgctccgtcgcgcttcggcattttaaataagtttcgacaattgtgttgtcacacccgcccatcaacacaaacttgacttttcgccatgcccactaaaactaaacaaaaaacattttcccccgggggcagtgatttcaaaaatgagttttgggttttgttttgcatgctttctaatccatcccttcttttccct

SEQ ID NO: 32722 - DNA, 297 bp, Heterodera glycines
taagagccatcgacaataaaaaggattagttaaagtaagttggccgccacagtaaccacgattagccaaaattacgaagatgccgtaacaaagacttcatcaaattttcggcaatcggaattccgaaggcccaaaaatttcggcaatcggaattccgaaggcccaaaaatttcggcaatcggaattccgaaggcccaaaaatttcggcaatcggaattccgacacatccctgatacagacagaccgctattgtcaaacaatctctccagacatagacatagacacctttagttccgg

SEQ ID NO: 32723 - DNA, 1018 bp, Heterodera glycines
ctttgcatcgttttcttttgtttctcctttttatttgcttcttaatttaacaaaataaaagttcaaatgtctttggaaatttttgttgggctctgacggacgcttcggctaattaattatactgcaaaattttgtgtttaataaataaaagggaataatatttacttttaaattaattattaatgcatcatccatttttaatcttattttgcttaaaaaaatacaataattcacacaaaagcttttaaaattataaaatcattgaaaaaaacccaaaaatacatagaataatttgcacacagtccgggttcgaacctgacccatcccccctccgtgttaagacatttgcggcccggacatttgcggtccagacatttgcggcctgctgaaaatcggacattagcggaccgacctatgagttccgacatatgcgcctcgacatatgtggctacatctcgtaaaagacaactcatattccgacatataaagcttgatgctaatcctacgtttgcgaacgcctaagcctaaactaaagcttatgtctaatcctaaagcttcatcctaggcttaaccttatgacaccctgagcggaagaacaaaacctattctatactgaattttccactaccagacaaccacctatgccgtgtttcaagcagttgaattcgggcggaaaggatttggccctgatgccagattgagctggatctatttgccggaacctaaaaaagcgaaagaaatttcgccagattggatcgccaaacttatcaacattttaaaatacatttatcaatcgatcaaagattcgatgatcaatggcactaaatggacggaactgtggacagccaaagaaaaagaaatgaaaaagtgagcacgaacacaaatcagtcccccaccaaaaatatagagcccaaaaaaaacaattgaccaacagactaattaacagctttaaaaaaaatggccaaaaattttgaacaagaaaaaacaacccctaaaagggcacttattgatatatggg

SEQ ID NO: 32724 - DNA, 979 bp, Heterodera glycines
  unsure (1)..(979): unsure at all n locations
taactaactatccttagcattatgaataccagcaagacaccctttcccatattatttatcccattttctcccacactccgcttccttttgctggcatcacaaaacgacaaagttaaagtggctttttaatgagccttctcattcagagaagcattcattttgtatttattaaagggaaatcgcaaaagtcaaattgaaaggggggggggggaaagataatattttatgagaatgatgagtctaatgacaatgcaatgacattaaaaatatgctttgcttgcttctgtctatttgagatctttgctaaaatgggttggatggagaaattttttaaaattttctgtaatatttattttcttttttatttcaagcctcgcaatgctttaaattcgaccctggacaacttgaaacggtcccggattctccaatccctcatggtgtactttttaaatcacaaattcatttttacttcctctcatcgatctctttacgctaattggcaaaaagtgaggcaatttggtcaattttcagtaatctgtgacaaaagtgaattatgggcaggtaatttgttcattttctaacaaagtccttcgtctcgtctttgtgctctctttttttttaaatttcccattaaacacgcaccatttagcatatttcattggagattgatcacttccactaatgtgcaaatttgtgtccagtttctcacaaaacaatttttaatgggcgaatgttacaacgcttttgcaaattaagggggggagatttgaatttaaatgaaactaattaaaatcaaaggtcgcataagtttccttttttaaatatgcaatttgatttaactcaattcaattcaattcgacaccaaatgcttcttctctcatcgctctctttcatttgtcactgtccccttggnngcgtcccgcgaagtgccgtcccccgcgggccctttctgcccattctccagcaaagctgtttgccc

SEQ ID NO: 32725 - DNA, 110 bp, Heterodera glycines
aaattggtcagccaaggacaaaagcgaagggcgcacctcagccaaccgccgtacacgcgaatggtcgccttttcggggtcgtcccggtggcgaaggaatatctgaaagtg

SEQ ID NO: 32726 - DNA, 222 bp, Heterodera glycines
ggagcagagggatatgaagatgctgaccctcagggttacagtgatgtggccacaagccaaagaatgcccatagccagcggaagctgggagcaccaaagaccagatatcttttgagagcctctggaggaatcacagccttcctgataccctgatttcagcctagtgagagtcatttttggacgtctcacctccagaatcatcaaagaatcaatttctcttgtt

SEQ ID NO: 32727 - DNA, 926 bp, Heterodera glycines
atttaaaaggaaagatttttaacgagttttcacaattttatgtttttataaaacatttttccaaacaattttgatgtggttattttactttttttagaggaaactccagaacttcccaacattgaagagcccaatgcaattggtgcggcaaattcgatcgtggcacctccctccgacctgagtgatgtcgttgtggagcatgcggcaaattcgaacgtggcaccgccctcctcccagctgaatgctgtcgttgttttgccgcagtctcggaatcccggtagagtgaatagaagaaatgctaaattcttgaaacaaattaacatcagcagcgagcgacaaagtcgacgcaaaaccagtcacctcaagtggcctcgacttcggcgcaaatgccacgcaaaactgtgcagcctacgtctcgggtcccgtagagtgaattgaaaaatgcacaatttttaaagcaaataaacaacgaaagatgaatattttcgcggtaatagtttagatggtgccatcgtgatcagcgacctccgaaaccccataagacttgtttttattaatttaaaaaatttttgaattgtcaaaaatgtgtggtaccatctaaactattaccaaaatatagtttaattttatttatttgccaccaatttgttgcaattaatatatgcttcggtaaaaatttgtaggtctcccaaggacgactgcccaaaaaaaacaacgttcactctttctattttaacggtgacaacacttttctttgaaatcgatgaaaaaaattaaccgtttcatggtcaaattgaaatatagccgacatggaagttgtctgcagtacgtgcaaaacacccggacacactgctgtgaattgcgaccagctgaacccggacgtgtgaatggaaatgggaagaaataccgatcaaatgatgagagaa

SEQ ID NO: 32728 - DNA, 942 bp, Heterodera glycines
  unsure (1)..(942): unsure at all n locations
ctcaacgagttaaaaggtagaaaaatttattaaaatactaattttatttttaaaattttgatgagaataataagcagtaaaacgatgagttttcaaacttgtttttacatgtaatattttataaaaagccttttggtaaaaatgccgaaatcctatgattttgtactcaccgtgccattaaaccgcttgagaaattatgggatttttacttaacacttccgaagaattcgtgtttttaatctactcttagcaataaaatattacttttaaattattttatgcatttataataaataataaaaaataaaactaaattttacagaaacaatcagtcgtggaggaaagacgggagaagaaattgaaaaagcacttgttgaaatgtggaagcgattggaatcagatattccacgtgcggacaggcaatgttctaattctgtgattgattgagatttttgcatgaatattctcggttctttgtttgaagaaaactcattttccaacaagcatttgctttcatctttttttatggtttgatttttgtgcattttttgaccaaattcggcttctaaatattcttattcttaaattggcctctctttagttaactttgacccaaaccccgaaaacatcgggaatttttttatttgacccatctttcaaaaaatatcaattggttgttttttactggcacagatgcatcttaaatgctgttgtggacggcgaggaatggaaacgcgatgaagtctttggcactgtggaatttttcaagaatcaacttttgataatggtaaataaagagtgagattttggcaagcttttcataaaacaaaaaacagaaatttattttgacttattttatgacatttcatgactttttcactttccgtacnccacctctgctgggcacctcctctgtgagcttgtcttaactctaaatccttc

SEQ ID NO: 32729 - DNA, 79 bp, Heterodera glycines
aggaagtggtttccactgacttcgttggctcgcgtcacgccggtgtggtcgatgccgaagctaccatctgcaacgataa

SEQ ID NO: 32730 - DNA, 893 bp, Heterodera glycines
cttaaatttaaacttttaatttttattttttaaatttatttatttttcaaaatgaccagtgattgccctcacaaatggacgaaggaaattgcttatgtttggggcaattctcagaaggattttgggttgcttgtttatatgtagaaaaagggaaatttatttaaaattttgtaaatatttaaaatttaatttaaatttttaaaaaaaagaagtgccaatggccataaaatgtttcttcgctcaatgcatatgtatcttcaaattttggcgggaatttacgagcaaaataatggacgaaaaagaaaagggaagggaaatggaggagaaaagggggagggcaacggctgtcgctaatttggccttttggccatcggactttggcggaatggccaatggacaaatggcggggggggggagaaacgggaggaaaagaaaaagggaaattaaattaaacaaataaaaaatggaaagtaaaattatatttaaataaaataaataaatttgtctttgtttttcatgtcaaaacaatgcacggattgctctgagacaacactcgtcacaattgctcattgtcagcagcagcagtcaatcgacagaacaaagtatgtcccaagggcataagaaaaattggaccgaaattaaatttctatggaatttgatggaaatatttaaaaaaaattgataaaagaaaagaaaaaggcttaaatgggagtgaattagccgaaggacaaaaagaaagcaaaaatcaaattaagaaaattacgttgtaaaagtctcaattaattaaaatcatcaagtaatctctcactgaataagcttcaaaagtggcataaattatgctttatgcttattgtttgttgtcggtttcgttttggttggctttgttttatttc

SEQ ID NO: 32731 - DNA, 713 bp, Heterodera glycines
aaaatgataacgaagttatcttttgaaaaatacattcctttatattgggaaattcattctgtgccaattgtaatttcatactatcggcgagagcaaaaactcatttacgcggataaagcaaatttataagacacatttatttaataaatttttaaaatatattctgaaaaccaacgaaatgaatggaaatcaatcgaatacggtaccataatctacagtagtatcttttcaaaattgtcctttatttccccttttctgcttctgtagttttactcgtccttcaatgactgtttcccctgttggcctctgattggctgtgcttttggcttcggattcatcgcaattttcggaatggcgatgaacacatccgtaatttacatcaccgtcaaaacaaagtgtctgctgtatttcaataataaattataaatttcctaattgccctttaatttgcttaatttccccctcattttttatttttaaattgttttttatgtctttgcgcgccaccgctaattatttgttggcactgacctccgcctttgaactccttcaccagcacggccactttctgttcgtcttcacggctttctcaggcataaatttcattgactaccgttcggccgttcgaattggcaccgtttcgctgttcggactgtttgcaacgaatacgacgattttttttacccgggattgaccgctttatttgcatcatt

SEQ ID NO: 32732 - DNA, 113 bp, Heterodera glycines
agaggtcggggaagctcagaccgcaggcgatgccgagggcaaggccaagtacgacttgcaggaaaatcgaacgcgagcaccatttgagcatgggaggagtctctgatcggtgt

SEQ ID NO: 32733 - DNA, 984 bp, Heterodera glycines
attttccatattattatatatttttaaattccgttaataattcgaaatgctttttttgctgctccttttttcctccgccccttttgcccttttgtttttgccgttggatatttttttcacccaaattgtgcccgcaaaagggggaaacggcggtgggaaggggggctgttatgtgagttaaaaaattaatttcattatttaaatgtgattattataagaaacgttgcccttttttgttgaataaatttaaggaatttgatttatttattttttataaattgattaatctctctaatttataagggatattgtgaaaagtttaatgcgttggaagatgacttggagaaaatgaagcaaataaaggcaaacgctgaatgttttgttgacgacatgggaaaagtcatcaaagggtttgagaagaaactgaacaaattgaggaccagcgtaacgaaattggaggaagaaaatgagagtttaaccggggattagcagggattaattaactaattgaagcgtttaactgggattaattaagcataaccttggctaattaaattaatcaaagggtatccttctgaaaagagacgcacaaacgatttatcatttcggaaaatattttttgattttcaatttaattttgtaagaattttttaaccaaaacttgtttttggtgttcctttaagggttcttttacggttgactttgctcttttaaaatacttcaaaaataaatttaaaaaattttagagaaaattgcgaaaaagattagagagttctaaacgacacaattcaaagaatgaaacgaattatgaggacgagagtatgttgttacataaaataataattatattaataataataattgtaatttaatattataaaatacataattaaagccttactctaatttagatgaaattcacgtcctttttctcctcatttttaaaaataaaacgtcacttttaagtgcacattgaacatttga

SEQ ID NO: 32734 - DNA, 1011 bp, Heterodera glycines
  unsure (1)..(1011): unsure at all n locations
gaagggcggtcggcggtgtccttttgggttaatttggctcattaactgtccaccgacggatgaaagtgcgtccattggcggaaggcaccgcattaataaagaaggaaagtaagcgaatgaagcgaattgccctttttaaccatttaccaatgccattttcgttctctgtgcccccgcccccttctaaaaaaaacgccgcttaatcccaacggaagtcacaaatgggaaaagtctgctaaatgctggacatcctttacgcagcttcaaatttaaggaaattaggagacaattaaaaaattggagcatcgcaaataatcataaagaaaatgatgaatttgccaattcaatcggaaggacttttttattaatggcataagcaaagacattaataattaaggagggggagagaagggaagggaactgaatgttcttgcggggatcacctgcttcggggaaaacgttaattagtgtgccaaaagcacaacatttgccattgtgtgaagaaaatgccaatggaatgtgaaaaacaattcgaatgtattgggaaaggtcagatgcttcacagtccgctcttcgtcagaccaacttcacgaacttcgccgggaaccaaccacttctgtatggagggtgggagtgagtgagtgccttttgcggtgcgttcgcggaagctcacctcactccgtccgtgctccgtcccaacacccatcccctcgttccgctcttcaccagcaacactctctccccgatcgccaaactcagttggttgtccccttgggcactgaatggcgtcgtgcattcgatcagtcggccgtagtccgtcggggcgaacattggcgaaactgcgcaaaagatggcacaattccattgacatgaacaaacgcactgcagcggtgcatggtgggccgtgctgttgctgcccaactgtctgactntcgccccgggcatggcactgcaccaatggggccgcactttgcccaccgccattgaaaaactgagttcgtcccacgctaa

SEQ ID NO: 32735 - DNA, 953 bp, Heterodera glycines
aatcagcttttttgaaaatagcacataaattttgctagcaaatgtacacaaatttgttcagagaatcggcaccaaatatacgcctttttgcaaaacaaattcttttcacgtatatacagcaaaaaaaattttatggtgaaattaaaaaatttccgataaggggcaaccaaaatcgattctgcgatatttacgaggactacagcacataccgagaatacgaaaattttgttacagcgaaatacaaacccgtcaaaaggggtttttcaaaaaaaccatcaaaataaaaaaaaattttgaagtgactttactcaaaagcaaccaaatttaattcttaatatcattcagtagccctaaatgttttctattatcctgcaaaatttctaaaagttccgtcaagtttcaagaaagttatgaccaaaaatgttcatgaaaatttgcttttttgattttctcaggttataacttttttgaaacttaatgaatttttttttgaaattttgtaagataaaagaaaacacttagagcttccgaattaccaaaattctaaaagttgttgccttttggcgaaagttttgaataattttctgtcaaaaattttccatttaatggtttttgacaaacgtcccagcaccttccaatatatggcaaattttacttttgatcgtataaattgtttttttctgacccggcctgaaaaccgaatcccgaaaccaaaaaaccagtactaggatttgcagagccccgagaagccgggaccggacctcgattggtgccgacaggtgccgctgggaaaatatttaactcacatgaagcgaatcgaactaagagaaagaagttgaaaagcaggaagactagccacttggccatttattatgaaaaattttcgtcaacatttttttgatgtttttttttttgagtacgccattttgatgatttttgagtaacgacccgca

SEQ ID NO: 32736 - DNA, 843 bp, Heterodera glycines
  unsure (1)..(843): unsure at all n locations
tttttccattgattgaaattttgaaaagaagaaattctgacggacggcacaatggcttcatgtgcatatgtaatttgattgatgatttttgactactcactgcttcttctgctccttttttggctgtttgagatgacaaatgagtccatgagagagggcagatgttttttgggggacggcttttgcccaaaataaagcttcatagttccaaatttttttttgtttttttttgtccatgagagagagcagatgttttttagggggggggggcggcttttcctcaaaataaagctttataattccaattttttttttgtattttttatccataaaagggcagatatttttttggagaatggcttttccccaaaataaattttctttatagttccaaatttttttgtatttttatccatgagagagggcagatgtttttgggggggacggcttttcctcaaataaagatttaaaatttacaattttttcaacaagtttttaaccactggggaagaatgtgtcccgagaaagcagtaatggttacgcaggccgctctcaaaatttccgaaattccaccctctcaaaaatggccagtcccggataaacagaattaaaaattgtggccggaagcatcaaaaacctacgaatatcattttaaatttcaaattaattcttttcttaatttataattaaattgtttaattaatttgagattgaataagcttacaaattntggaggaaaggacttaatttccattanaaaaacaatttgttactattagcgaaaagccaatctgtcagtaaatttgtaaaaaagggatgccatgactcatgacacttaaaaag

SEQ ID NO: 32737 - DNA, 83 bp, Heterodera glycines
cccttgcgggaactccagcggcaaaatccccatgccaatcaggttggagcggtggatacgctcgaaggactcggcaatcacca

SEQ ID NO: 32738 - DNA, 76 bp, Heterodera glycines
ctgccgctgctggcgggccgctacagccatctgcgcgcgcggagtggccgcgcccgtgccccgcccgccttcctct

SEQ ID NO: 32739 - DNA, 647 bp, Heterodera glycines
tgggatttttatgtgctaaaaatcctgaaatatgtaataaaatatgtgctaaaaaccccaaaatatgtgctaaaaaccaaaaaaaggcctaaatatgtgttaaaaaatgcaaaaatatgtgctaaaaattggaaaacccaagtgtatttacgcaaaaaaatcatatttaatatcagtctttatcaattttcgcccgacctccaatcaaaattttggcgatatcaatcaatttgtaaagtcctggattaatttttccatcagttgaataagttccttccgggaactttgaaatccagtgacgatttaacacagcgtttgatttggctgctttaggcatttaaatatataaagaaattttctaaatgcttaagaaacgtaaagtagtcaatttttagggtgcattttcagattttcttgtatttttcttacgatttttctcaaaaatgccaaaatatgtgccaaaactcccaaatgtgtgccatatgtttttatgtgccaaaacgccaaaatatgtgtttttatgtttttataagtcgctccaaatcaaaaattgtccggagagaatgctattgttgggcttctctcgccataactaagccgcaaaaaaaatatgttaaaacataaaaatcccagcccgagttatgacc

SEQ ID NO: 32740 - DNA, 544 bp, Heterodera glycines
actttcattaccaattttcccaattttcaattcccctcaaatcgctgctcaagtggtcggtcgttctgttgtcctttttgttcgcctccttctgaaaaggttttgccaattccttttcaaaattcgcttttcaattcgaatttattttgtataaaatgcgaatgaatcagccaaaaagtccgtccgtccattcattcattttcatatatttctcccacatttaaattttcttcctaattcctttttttgtaagcaaaaatatcgtggccctttgaaaaataattccgtgggaacagaaactcaacaaaataagcaagttcagaattgagaatgttttcaaagttggcaattgccttatttttcctttcttttgcaacgaattgccaaattatttggcctttgtttcatttgggaagaactcagtccgtcggggtacgcttttgccgtcgaagatgcttttctttttatgctttgttttaaattcacttttgggtcactggcaaattgctctgtaacagcgccccggccgcggaaaatctcgtca

SEQ ID NO: 32741 - DNA, 1067 bp, Heterodera glycines
  unsure (1)..(1067): unsure at all n locations
tttttttttttttttttttagaaaaagaatttttgttggacatttttttttttttttttttttttttttttttttttttttataacaccaccccgcgggcggggagagggggggagggggcgcgcccccccttttttttttttttttttttttttttttttttttctttcccccctttttttttttttttttttgtgtggggggggggtgtgtgttgcttttttttttttttttttttttttttttttttggggggggggggggggggggggggagggggggggaggggccttttctttctttctttagtgggggggggggggggtgttttttttttttttttttttttttttttatttttcacctcgcgggggaggggggtgtttgtttttttttttgtttttttatcttttttttttttttttttcactattatattaaaaaaaaaaaaaaaaaataaaaaaaaggaggggggggggggggtgggggcggtggggggttttgtttttttttttttttttttttttttttttttttattttattgtgtgggtggggggggggttttgttttttattctttccccntttttttctttttttttataaaaaaaaaaaaaataaaaaaataaaaaataaataaattttttttttttttttttttttttttttttttttttttttttttttttttatttttatataaaaaaaataagaataaaaaatgtgggttggggtgggggggggtgtgggtggtgtggttttgttttttttttttttgtttttttattatttatttaagtaatatataaatgaatgttgttttttttttattttttttttttttatttttttttttttttattttttttttttttttttttttttttttgtttttgngtnagattatataataataatattatattatgaaatatagagtgatgagattatagttattatattattatttttatttttttttttttttttttttttttttttgttttttttttttttttttttttttttttttttttttttttttttttttttttttttttttttt

SEQ ID NO: 32742 - DNA, 952 bp, Heterodera glycines
tcatcaattttttttagccaacaaaattctcaaggtaaatttaattaacaaaatgtgcgcaggtgaaaggccaactaataatacgcaagtgattaatgtgctcaaaccgttcaagttattgggttaagaatcgactaattgcttgctttaatttaatatcgaaataagatttgtgcctaagggcgaatttttctggtgcacacaaatacgtcgccgggtttcaaccataacttttttttgttgttaactaaattaagcattattggtgtacaatagctatcattgatggaacaaattcactaaagcattaaaaacatttcccttccttcgcttttcggtaccaccagtcccaaatattttcatttcttaaaaaatttgtcaaaaataaattacttctttggcttcgaatggttaaggaatatactgggtcatcactagggctacgatttttagttgctaaaaacagccaaaatagttagtttttaggctctaaaaaccccaaaaataggtgctaaaaatggaattgctaaaaactttcaaatttagggggtgtaaaatggtaaaattttattcaaaaagcaaccaaatcagtattgagataaataattttaaaatcacaaattcttgtcaataaataagtaaataaattttggagatgaatttttgagaaaattttttatttattaggatgtattttcagaaatttttgggtcggttattagtagggactccatttttaggcaaatgcctaacatttttgcgcacttaatacgcacagataagcacgaaaaacgcattttccgcttggtttggggcgtctacgatgacttttataatgcctatttcggggtttttgtgcctaatgtgcctattttagggtttttgaaaaaatccttaacaaaaatgcaataaaaacaaaaaatacacccctaagaaatggcccgaaaaaatt

SEQ ID NO: 32743 - DNA, 797 bp, Heterodera glycines
cgggagctaccggtcgggattgtctcggaatcccgatctcggctttttttttgaaagtgtgtctggatcgggatcccgacaagtcgggacttgaatcccgaatctcggctctattatttccctgcctgatgccaatcccgaatcccgattttttccaaaatttcgggctctagaatttataataataaatattttttgactaattttcccgcacttcgcgctttgcccattcgtcgtagccccattgtgacttcaaataccttaaaaatggatggattagaaaatataataaacaattattaataaatttcttattttgcccctcacaattggcgcatgttccgcttgaacaggtcaaaggcccacgcggtgtccgcctcgtccagccgagtggcccaacgccattccaactgaagcggctcactaaaaggcggggggggggggtgtaaaagaggtcggggcgggggtcgacggcgaagaaagaaatgagggaaatttttgaaaattcgattttttcaaagaaatttcaagaatttgaaaaacctagcgatttttatttaaaaaaatttctgaaattttattaagaaaaatttactaatatgttttttttttgaaaaatttcagtttaagctcagaggggggaggtagaaaattttattttattaaaaaattgtcagaatcgctgatttatctcatttttatgaagtcactgttaacaaatttcatcccaaatttttgtgaattttccgacacctcggacctataaaaactaactaaaagtaaattccgtaattgtt

SEQ ID NO: 32744 - DNA, 99 bp, Heterodera glycines
ccggggacctctagagtctcatcgcggccgtgtacatgtccgacttcccttcaaacggctggttgcggttgtagtcatagcggacgctcgggcggaaga

SEQ ID NO: 32745 - DNA, 719 bp, Heterodera glycines
ctcaaatcgtgtgagggtgccactctttcagattaaaccgtgcaatttgacatttgccaacacattctaatacggcggccagtgggcggggtcgccgctcgctcgcaaatctgagcttgttctcgcgcccaactactgctccatttattttttgggagggggtcggcacaattaattatccggatcataaatggcatatcaatttgacccatggcatcaaagttgaggaaaagggtgctgtgcctatagtctccagttatgactgatgcgatggcaaccggacgttagtgagagtgactcgagagatcccccacacagtaacaacataatttccactatatggatcgtctgaatgttcaggatccagcagagggagtggggaataggcaaagtggaacgatcagtgacggggaggagaatcggcacagaacggagacggcggagacaaagcggcgcaaaaaatgtgcgttaattgggggggggcaaagattagtccacgctcctccaactttttggggcgagctttttttacactgaaatttcaaaagattgacgccgacctttccctccttttccccttttccatttcaattgactgtattcttttttgaatgccgaatcgctttttctctttttctctttttttattacaatttctcctttttttgccttcttcgtttttctttttgcctccgtcttcccctttcttttcattcaca

SEQ ID NO: 32746 - DNA, 973 bp, Heterodera glycines
cccaaataattgtcatattcgtaatcaatgacctttaaaacccccgggtatttggtttcaggactttttaaacaaaaaaaaattttgaccaaaaaaaagttgaaaaaattttcaaaatagtgctcctttaaactagtgcccagaatttcgtgttttctcaatgtaaatctcttttttcatagtgcagtatttgctcttttctttgtatttacaaatttcctaaactttaatcttttggtttatgccaagaacgtatgttcgacttaatatggaaaattatggtaaactgaggatgatcgttaattggaagcgtctttgattggggaaagtccctgcatcatggacggtaaaaaagaaaaaaaagctgtaaagagcaacatttacttcgtgactttaacttttttcctgcacgttaaatccacaccaaatttaacataccgatcagggatggcacggaattccgagttccgacttccgacatttttggggtaagacacattagtgcctcacactaaagacacataacaaaccactaatgttttatcaaagacataagacacattattgtgtcacactaaattcatagaacaaacactattgttttatcaaaaacataagacacattattgtgtcacactaaattcatagaacaaacacaaatgttttatcagatatttggctatttggcaaatttaccacaactcttcccaacccacttacaaaaggggccgccaaagttgaagtatgaatttctcgaaagtgagcaaaaagttgagtggccgaccgacaggttcaacacttcagagatgaaatcacaaccaattgtaaagcaacagcatttctttcatatgatgggtctcatttctaaattttacataataattaacataaaaaagcaaaatataattcaaaacaattaatccccataaactttgatgaggcccttaaaatccatctgggcaagctgttgaat

SEQ ID NO: 32747 - DNA, 963 bp, Heterodera glycines
gcggcgaattccaaaaggctcaaaaatacgaaaaacatacaagctaataaaaaggggaaaagggaaaaattaattgaacttattacgagggtaattaaacgttaattaccgccaaaccaaaagtcaatcgctttggcataagcgacttggggcagtccgaagcgaaggccattgccctttgataaaccaattatgtaatcacacataaattaaaatgacattttgatctttgcttcagccttaccaaagtggaaagggaaagcattgtcgtgaaggaaagggtcactcgcgcgggcacagccctaattaaaagacgacggacgcttaattggcaaatgcgccacaaaccttcggtcaatccaaaaggaaacctggacaataaatgaatcgctaatgagtgctaattggacggatacccatgagatcatcacaattagtcccgtgggcaaatacgtttgcaccacgtggtacccaatttgcctgttcagatggattattgccaccaaacagctgaaattgtctaaatggaaagttcatttcattaatgataataattatgatgatgcctcttctgtacgtgtgttccataattgcgtattggtaatttccgctgcaatatccgctggttatgttggagatgcggaattcgggcaactgaatgtctgaaagtgcctagcctaatttattaagcctaattaatttattgttctcatttataaactcggattgtgccgggtcgggtcgacgtggtcaaaccaacggatgagcaactgtctttccacataggcatctgaaatttcgcagtgctttcaagaggcgtttgccaatgttacagcttagcatttcgattcggcacttctgactgtccattgggtacagagacagctccaaattgcacgcaacgctaagagtgatgctaaaggaaaagccaatttcgcaaaattaattcaatgatttgtaaaa

SEQ ID NO: 32748 - DNA, 977 bp, Heterodera glycines
ttctgatgctgatcaaaaaaatgtgattagcagatcactgctgatcattcctacttgtaaacgcattattttcctaagaaatacagtacttttcaaagacaaccgtatggattgatcggaattccaagtttcgatattttgggaaaaatttcggaactattctaatttttatgtttcaattaaaattttttttaccaatatgaacaataattaattaatccaaaaaccattaatccttaattttagcacatttaaaatttcagcccttgcaaaaaaatactcattttggacaaaatttgaaggattagagaaaatttggatttttaaataaatttaaattatttaattttttgcaccgagaaattttcggaatttcttggatttttgtccagaaatccaggtcaaggtcaatttggaaatccaggtccagcatgaaaaacctggataaattttttcatctttttatggcgaaatgtatttaaaatggtataattttaaaaattttccggttggcccctaaaaattcttattctcttaaaaaactggcttaaaatcgcaaaattttgttatttttgaaaaaatcattaacaaatcgcattaaatccaggtccagattttttccaaaataccgatctctacttttgatctctgaatttttttgttagcttataaaaattaagaaatacttccgctggatctggttattttaaaaattaaaaatgcttaaaattttgttttttcataaattaaccttttaattccttaaaaaatttcatattcattcatttccagtaaattttgtgtttttgttccggcacttgggggtcagtaaaattgttgaaaattaatggggcggcgataaacaaaaaaataattccacctttttgaagcggttttgagttttggggactcagtttaatcttttcccaatccgggaccttggagccctcattgacaacattttgatttttaaatct

SEQ ID NO: 32749 - DNA, 277 bp, Heterodera glycines
cggtgtcatctatgttactagatcggggatcgatccccgggcggccgctcgagcaggacctgcagaagctagcttgatggggatcagattgtcgtttcccgccttcagtttaaactatcaagagagggaggagagcggcgcgtagcgggggaggtgggtggcggaagaagaaaagggtggggggagtatgagtatgatggtcaatatggagaaaaagaaagagtaattaccaattttttttcaattcaaaaatgtagatgtccgcagcgttattata

SEQ ID NO: 32750 - DNA, 800 bp, Heterodera glycines
aaatttttaaattttatggtaaatatgttcatagggcccagattcaaaattaaacaaattatatatcaatcgatagctctcggtctgtaatggaagaatccgaaagaattttttggcggcaaccaatccctgaagagttacagacccgggactgaaatggcattaagtggcttttggactgaactgtccactaaaaacgctgatactggtttgaattcaaattttgcatgcagcaccgaatttagtcttttaccgccatttccagaaattttggcccaaaaattgtccatttttgaagtaacgacgggaatttagaattcaaaaataaaattttgcttttttccgataaaaataaatgcttttttcaccaaaatttttgcgctttgtgaatctgaccaatttgccaacaacatcatctctgaaatgtcaccaaattctgaggcattttttggccctcaaatcgaccacaacaatcgcctcaggcaattcattattaaaccaattacaaaaatggcataggtaattgtttcccatttaaagcatccaaagtgccaccattggatgtgttggaaagcattgacattgagtcgttaaggcggtgccaattggaatttaacaggtgcacagaaaactgagaaattttcgtttaaaaagaaattccgggaccgccaaaagcgattttaattttttttttttcattgccaaacgaaatatgatctttgtggcatcgtttgatagccctaattattctctatttccatgcaaaatttcaaaaaaatctcagagttacccaaaaaaat

SEQ ID NO: 32751 - DNA, 395 bp, Heterodera glycines
tacgtttcttcgaactgtatgacgaaaataacgaactgcgcggtagcttctacctcgatctgtatgcccgtgaaaacaagcgcggcggggcgtggatggatgactgcgtaggccagatgcgtaaagctgatggttctttgcaaaaaccggtcgcgtatttgacttgtaacttcaaccgcccggtaaatggtaaaccggcgctgttcactcacgacgaagtgatcaccctcttccacgagttcggtcacggcctgcaccatatgctgacccgcatcgaaaccgctggtgtttccggtatcagcggtgtgccgtgggatgcggtcgaactgccgagtcagtttatggaaaactggtgctgggagccggaggcgctggcgtttatctctggtcactat

SEQ ID NO: 32752 - DNA, 797 bp, Heterodera glycines
tttctcaccgaacccgcacatttattactgaaaattagtcggggtatagaataagtggcattggttactaatcattaacagcaaactgtcggcccttttgatcatgtttcatttccgacttttaaccagcatttgactcggcttaatggccaaattaagccaattaaattaattaattgatcaaaattttgacactttcgtctgctgaacttttccctgatttaacctgcttttgttgagaaatgcgaataaaattataatacaataatgagagaatgagaaatgtgactgatgtccacaaaaaaagttatgtaacaaataaaaatttcagaattaaatgggctaaaaatgcacgtgatacaatttggtaattggttgttgaccggtaaaaaagcaaattgggggaggggagggggagagacgaagagaggaagggagagagagagagaaagagagagggagagagaaagagagagggagaaagaagagggggatcaaagagtcattctaacaatacggtagtatgaaacaaaagtaattagagaaataggaaatttaattatcaaaagagagagagtgagcgagtgagagagagaaaaggagagagagaaaacgacggtggattaacaaatgatttgtgattgatcgatcggcagtgactagaaatttgcattgttaatgttgttgttcagctccaccagctgatcctgtcggattgttcgcgtccgtcgcagcacattgtcttctgtgggggggggggattgctttcactcacttttcttccgtttgaattttgt

SEQ ID NO: 32753 - DNA, 640 bp, Heterodera glycines
tgccatttttcgaagaacacagtttttgtcacattgtcagagaaagaaaaaaagaggacgaaagagagaaggaggagaagagggagagagcagagcgaagagaaagagagagggcgaagagaaagagagagggcgaagagaaagggggagagcgaagagaaagagagagagcgaagagaaagggggagagcgaagagaaagagagagagcgaagagaaagagagagagcgaagagaaagattcaccggaataatgcatacaaaattcaagaattggagaaaagggcatgaaatcaaacggaaaatatgctttatctacaacaatgcattcattgtcaataaaccatattaaaagcccactagggggtaaaaatgcatttttaaacgggccaaaaaataaattccaaaactatgaataattaaattaattgattgtccgttggtgtcaaatttacctgctcgtcgcacgcatcaagtgcatcgctccgtcagtgttttgttttgtttttgtgtgccccccaaatatgcaatgtgttgctgtaggcaattttttgttatctcaccaccacccatatgcaggtcattcattaccccccccccccaccgggtagcccccccccccaaaaaaaattttttttttt

SEQ ID NO: 32754 - DNA, 483 bp, Heterodera glycines
aagcacgcatgcagaaaaaacaccactttttgttcatttctctgtaaaataataaagataattttaaaaaataaaaaagaaaatacctttcaaagagacaaacaaatgattctatgattatttgagcaaatgaagacaatctacctttaaccaaataagtcgtaataatctcgtcaaagtctatttcagtcctcataacccacccctgataagaagaaggggctcgatattttacttcctcttcctgatagaaatagatgaaaatacgcgttttttcttatccgtagatacaatttgtaccagtccgttaatgtagcggtaaaatttggtaacttgacagtgaattcgtcttgaggcatgtttaaaaaaatcccacgaaagacgataatctccatcacggatcagaaaagagaaaagattttacgaaaatcgtccgctcttaggaatgttcgaaaaagggtggttgttggccttatgaacggc

SEQ ID NO: 32755 - DNA, 389 bp, Heterodera glycines
taggtcggaattttatttcttttttcaaaaaatacatcttttgctatttatttataaatttagctgaataaattattaaataagcaacaaataaaatttttttcgaactataatcataaatctaaacataatataatgttttagaatgttaatgattttttttgtaaatatttttaattaatgaacagacattttaactgaaatataaatgagtattgtttcaatggtagaatatagaattaattattattttacattataggctggacagatattcgctgcgccctccaattatatttataatcgatccatttgggaaaaattaaatagataaaaaataaaaataaaacatacgcatcgtatataaaaatacatcaaataataaacga

SEQ ID NO: 32756 - DNA, 888 bp, Heterodera glycines
tggattacgaacaaaaaatgtttcaagattctaatgaccaacaaagtccaaaaaattgctattccttgctttaagttttattttaattttttgaaatttatgccggccaattgagaaaaaaaatgggtcacaagtggtacatatatacatataaaaaaaaatttccaatgaatttaatattaatgagcaaatttataaagcaattaactaaaaaaaacttttcaattgatttttaaagtgaattttttccggaaatcatgttatatttaattgggtaaatcaattttcatattactgtaaaaaaatcaaatttcaacaaaaaaaaaggttgaagaaaattaatgcaaaattttgagacatgcttattcattttgttgcaattcaccattttcaaaaattttctttaaataaaatgaatacaaatttgtgcaattgatatgtgttcgtagtaaatcactcaaaatttgaatccaattccaccactgccggcgttctcaataacctcttgatcattgcttttaacttaaaaattctatatagatatttaaaatttacaacacaaatcttttgatttaaaattaaatggtaattaattaattaattaccaaattatagcgtggaactaatgggtaaaatcgggtgtgttgatatgcacgagcaagttcacgaacagcagaacgaagtgcctggtatttatggaccagacggtacagatctgtgctgagctgggcacattgttcttcgagatttccaatgggttttgctgaaattaaatatttttaattattaattagttttctaatttaattcaaatcgtcaaaatgggagagagattaatttacttcaaaaattaattaaagttataaacatcaaattttaaaaaaaatt

SEQ ID NO: 32757 - DNA, 873 bp, Heterodera glycines
atatccatatttttccgaaccctatttattaatctaatatatttataattttatggtctttttgtacttttgaaacaatttgattttagtatctttgtagatgtacattcgagaattaaaatcaccagatataaaaccccatgaagagctccttcaggttttttctaatccatcccgccgttccattcgtttggccgatgaagttcgggtttatttgcatctaacttaaaattgtttttttttaaattttacctgataaataggtattttatcaaaattttaatatggttgcgttttgttataccaaattgagcatacttttctttaataatccagaactaatttttgaggcacggcaatgcgcgtaccaaaacgagcacgctcgtttagcgcgaattattgaagctcaggtggcgattatttcctcgcaacaacggacaatcgaagggttggtctcccggctgcctcgtcagttttttttaaataaaaattccgtttaactaaaaaataattttattgttttgaagggaatgatggtgcggctccgcccaatggcggcgaacgacggggttcgcttaacttgtaataaaagcgtaatttgttgtatttagacattggaggagcgcccaaccaacaaagagttgtgtggaggcagcatggccaaccgcacattcgtcaaattggtgatttatctttatcatcaaatatatacatatattaatttgacgttatttgcctctgttttcagacaatcgtccgcacattgcgcccgagcccaatggtcgaggagacaaagtcagtttgcttaatctttgaattagtgttttttcgttgtattagatggaggcggacatgggccacgcccaaatggaa

SEQ ID NO: 32758 - DNA, 880 bp, Heterodera glycines
atttggacggatttagcactgtcgagtaagctgaaaagagaaaagaacagcagcaaatcggcacttaatgttgccggtgctaattgctaattttgtgtgtcgtaaatcccgcgtcaaaatcccgaaaattaattgtcacaagtttcaaggagaaattcatacatcgatagataccaaaccatttttatacatccgatttatttatcgaaattgagttttttcttcataaaatgcatttgatcacggatgaatatgatcggtcgatcaatcattcttaattaattcatttcttcttctgcggttgatcgctgtttttgttgttttgtccgtcactcatttcgccctttttcgctgctttgtaccgtttcttctgccggtggaggagacaatggcctaaattaggcgcaatttgaattatttaaacaaaattaaatgcctttttttaattgctcacccaatgcaattagtgtcactatcaagccaaaagaacacacagttacaattgtcccaatttccgtctttccaatgaaccgccgctgtctccccaataattttgcttcgtttcattatccaaccgatgccccattcattttccttggccaatgtcagcttttcctttgtccattcgttcaccaattcaaatggcacaatttgcattaacggcacgcgaacagaaaaatgaatttcgtaactgacggaagaaatggcattggcacgaagaaaatgctaaacaatttgagtggggtcggaattccaatttccgaaattttgggcctcattttttcgaattttatagaatatttttttcaagggctagagttgggttcaaggggtaaaccaaaaatacgtttaatggttcttaaatggcgtataattaaaa

SEQ ID NO: 32759 - DNA, 888 bp, Heterodera glycines
tattttgaacttgctcgtcttcgggtggaatatctcttgtattttgtattttcttgccatcggatggaatacttgttttttgtaggtgctgcattgctacaaagagacaattataaattaaaacataatataaatatctacagggaaatttggacaaggagtgtcgtactgaagaatttattctctttatatagccttgttttagtacttgtgtagcatcgttacattaggttattaagttagtttagtatgggtgttaaaagctacactatacgataagaatgactttcgcacaaaaaatttctccctttatataggctaattgctgatcctagtgtagaaacgctacattaggttattagctagtgtagcatggagggttaaaagctacactatacgataagaatgactttcgcacagaaaactttctggacatgtttttgaaagatttttggtgaaaaaattttcagctcaaaaaacatgtgcacccacccctctttggtcccgaatcccaaaatcacttttatttttataacaattcgtaaaaaagtgataaaaatgtgaaataaaatttatattatagagcaaaaaattgtgggtttaagtagtatttcacttttcaaaaatttcttttagaagggagttatgaatttttttctgaaaattcgaaaatttccagaatttctggaataactttttttgtttgcgatatataaatttcaaataaataccataaaatcttcctattttttgctatttttattgctttaattcagttaaattaaccaaaccttcactgagtaatgaattttcaaaatttaacccaaaatcctgagggccaaaaattttcctcaaaaaaataaagaatctcttacatttttgctgtaa

SEQ ID NO: 32760 - DNA, 946 bp, Heterodera glycines
tgcaggtccgcacacaaaaacggtatatttcacacaaaaattgatttccgagcggttcctcggcatttttcgtgtccgacttctgatattacgcccaatgtgccggttttgctaaatttaaatgatttaaaagtgccatcgcatcaacaaaactgtaccaagccatgacaagctgcttgactataattatggctgctgctgttatgtcgtctgtttgccatctgtaaatttacattgtgaaccacattaatttcaacgaattgtacatatttgaccgacgaattatccgacacttcacattttttaggaaattatttttttttatttctttttttttcatgagctcctaaggatttgcaaaacacaaatttaattttacatgctacgtacgctactgtcaagcgaattctagcctaaaattaatttttgaaaaatacattttttgtcaaattttggtcgtcggaattccgacttccgatttccgaaatttttgataaaaagtcggaaattttcggaaatttttttttgagttttttttgacaaattagtaatttttgtaaaatttctgttcataaattgcccccggtccccaggtttccgtggcgtttccgaatgaaacttagtgtgggaaagagctctgagtccgtttaggatgttcggtggtgctgaggttatactcctgcaagggcgtagccaggaccttcgtttcggggggggggggggccaactcaaaaagtcggttcttaggggggaattttttcgtttttggaaacctcaatatttagggcgtgtatttttccgctttttttaaattgaattgattgcattaaacgcggtcaatgtaaatgatcctggttttttttcatttcataaactcgttttgttttttttcaaaaaaaaaatttaataatttaaaaaaaaaaaaaatttttttttcaaaaaattc

SEQ ID NO: 32761 - DNA, 58 bp, Heterodera glycines
ccgtcacccgccccagcgccaccatgcgccaggcgatggctcaggcagaggtcggcga

SEQ ID NO: 32762 - DNA, 1308 bp, Heterodera glycines
ttaatttttaatgagttattatcatatttttattattttgaattttctttttatttcattcttttttattttttttaagttaaaaatcctactatcagagttatatctaatttaatttttgaaatttgaaaaaaaataaaataaatttcttttttaaaacttgtaaattcatataattccacttgacaagacttaaaattttccaatgaaaaattgcattcaaaaaattaaaaataactttttgttttttctcgaccgccaattcccgacccattttaaagcatttcattcaagctttaattgcccccccctcccaaagaatttgtggtctttccaaacaaacccatcaaaacgtcctcccccccccccacattctccgcatcgaacagcagacaaagcgcacgctctctcaaaacggcggtctttgacccctttcacaaagcaaaatttgaaattttcaaaaaaaaaaaatttttgtaggctaagccgtcgtcgaacgactgccctaagccccccccccccccctcaccaacaaaaaaaaacaatggaaaattccattccaaatgtcggcgaacgacggagtgggtgtagttgtcggagtggtgcggatgcggaacctgttccaacaccaccacattccgtggaatgtttgcctggctggtgacgaatgcttccccccccccccccggccctgtaatttcccggtaatgtgatgagtttttgggggactgggggggcgcctgtggaacaattcctgaaaaaacaacaacaataacagtaaaatcgtcgatctatgtaatgtgatgggtgtgtatcatcgacattttgaacctttttcaattatattgcctttttaaatgaaatatccctaattcctttattaggagtaaagaaaaatttatcggaattaatctcgagttctaatacttttttttgttgcttatttcttagccaaaatggtggaacaattaaagggttactattaatgaaaaaaattttttaaaaatttttatgggaaaaatggagggaaaatttctcgtaatttttaaaaaaaattttgttccggatttttgttggattggggggggttttccttttatgaaaaacatcccctttaaaaaaaataaaacaaattttggaaatttttaaaaccccctttaataaacctaacccttttttttcattaaaaattttttctttttttataataaataaaaataataccccccccaaaaattaatattcttttaaaaattaaaatgagagaaaaaaaaaaaaaaaaaaaaataaaaaaaatttttttttttt

SEQ ID NO: 32763 - DNA, 122 bp, Heterodera glycines
tatcgccggcaaaggtctggcgctgtccaaagccatcaacatcatcgacaacggcctgaaaggcggcctcgaccctcaacagggcggcgagatcgccgaaaacctggcggcgttgtacgact

SEQ ID NO: 32764 - DNA, 754 bp, Heterodera glycines
  unsure (1)..(754): unsure at all n locations
ttgatatgctttttcaagtaagatcccagcaccaaccaggctagaagaaaataaggaaggcttaaaacgccaaaaaattccaaaaaaagcattaaaaagccaaaaattgccaacaattaaatgcttaatatgataatatgcttaaaacctaattgaatgggctcgcactttttgtcacccgcctcatttgcacaatttggtcaatgtcgaggcccaaatgtgcggccacaaactcccaattgcgcatggagccgcagccgggcgggttcagccgctgctccaacagttgggccatttcggcacgcaaatgccgaacacggacactgccgccgccggaggcggtggggacagcagagatgccatatttgttgcttccattgttgtttttgtcttcgcaaatgccattgtcattttggcgcaactgtcgtcgccaagggcgcaacaaatcggaggaggacgggggcgaacaaatgaccaaaaaggcagagtcggcatcatcatcgaccacaggctgcggaggaaggattttttaagattttttttatgcatgtgggctaaagagtcaaatgcaatttgtttatattttaaaattaattttttaagaaaactttagttaaaatggtgtggtgtgtgtgtccggataatgccataagcncaatattttgaaactatatataatttttgataagattttgttttcaatatggacatttctcacttttgaagcacaatttttgaaaaagcaaaatatccg

SEQ ID NO: 32765 - DNA, 667 bp, Heterodera glycines
tgacgtattatgtgtatcgacttgccaataaataaatctttaagcgaattgtctgtctgttggccaatttttattagctttaggaaatgatgggagtgaacagtgagttggagagatgccacggcataaattctaattataaaaatgacaatttccacatttaaaaataatgcttttccacctcataatttgattgatttgttataatattttcatctgctcgcataagcattctttttgaaaaggcaaaaaaaaattaataaaaaaaattatttacaataagcaattcctttttcgtcagcttacaatgttggctttctccttatttcctaactttttgcttctccttttggcaatttgccatgtccacggaatgttcggaagggaaagagaacgaaaatcggaggaaaagcgcacaaacagcagaagcagtagcagagaaaatcggtgggtgagcagagagcatggggaggggagagaagtgccgaaaaacctttccagtgagccagacaatggcatcctttccatcgaagttgtgccgagtttggctggaaaccctttacacggctatcgcttcgtcgatcggtgcgtgactctcaaatttcgcgagtattcgcgagcggagtctgaagaattgcgatggatttacccaacgaaagagccggaa

SEQ ID NO: 32766 - DNA, 652 bp, Heterodera glycines
aaatgaaaattgtcaattccaataggaaaaactttgccaaccccgcaaaatccgttgccgaataaagtgatggcattcagaagcatttcgatctagtaagaatgatgtgaaattgaatgtgccttcgcgaaagtgtgctcatcaaaaatattgaaaaagtgatggcttgcttaattgaatttgcaaaacaattaattttctgaattattcatttgatatttgataaaatgttactcctattttattatttaaaatgcattgaattctttctcttttttgtttggctttgcttatccatccaattttatttattaaaaaaatgaatttttactgttttacataaatttgcgcattttcattttttagctttgttttgcattttcaaatgtttcgttcgccatctgagccaagcccgttctcgtcaactcggtgcccctacgatactcaggcgctctgtagaagtccgtactgtccatttgcacaccaagccgacgacactgtcgacgtcgttgaaggtgaaggaatgccgaagttcggcgggagggagtcggtgtaaccttcggaattggtgtcatgacaaaaaaatctaaaaattttcttacaaaatcactttccatggtaaaaagctgcgctgttttctcgggttctttat

SEQ ID NO: 32767 - DNA, 916 bp, Heterodera glycines
tgttccaagcaccccaccaaaagcaaaacgatataaccccttataaggaaaaattttttaaaaatttttttctccatcttcctttttgatactaaagcatcagagtgctaaaattaagttgtaaataaaatttggtgcgctttagagcactttctgaaaaaaatatttatgaaacaaaaaaatcgattttttcaagtgtccgtttggggtactcaaacatttatggaggagcaaaaatccaacgcagaattaaagtacaggctatagggaagctattcccgaaggattcggtctccccataaatctgggcgcatcggttcggggggactgccccgaaaacaaaaaaatcgattttttcaagtgtccgtttggggtactcaaacaattatggggagcaaaaatccaacgcagaattaaagtacaggctatagggaagctactcccgaaggattcggtctccccataaatatgggcgcatcggttcggggggactgccccgaaaacaaaaaaatcgattttttcaagtgtccgtttggggtactcaaacaattatggggagcaaaaatccaacgcagaattaaagtacaggctatagggaagctattccggaaggattcggtctccccataaatctgggcgcatcggctcggggggactgccccgaaaacaaaaaaatcgattttttcaagtgtccgtttggggtactccaacaattatggggagcaaaaatccaacgcaaaattaaagtacaggctatagggaagctaattccggaaggattcggtctccccataaatctgggcgcatcggctcggggggaacggcccgaaaacaaaaaaaatcaattttttcaagtgtcccgttgggggactccaaacaattatgggggaacaaaaattcccaacgcaaaattaaa

SEQ ID NO: 32768 - DNA, 784 bp, Heterodera glycines
cagatttatgggggagaccgaatccttccggatagccttaaatagcctgtactttaattctgcgttggatttttgctccccataattgtttgagtaccccaaacggacacttgaaaaaatcgatttttttgttttcggggcagtccccccgaaccgatgcgcccagatttatggggagaccgaatccttccggaatagcttccctatagcctgtactttaattctgcgttggatttttgctccccataattgtttgagtaccccaaacggacacttgaaaaaatcgatttttttgttttcggggcagtccccccgaaccgatgcgcccagatttatggggagaccgaatccttcgggaatagcttccctatagcctgtactttaattctgcgttggatttttgctccccataaatgtttgagtaccccaaacggacacttgaaaaaatcgatttttttgttttcggggaagtccccccgaaccgatgcgcccagatttatggggagaccgaatccttccggaatagcttccctatagcctgtactttaattctgcgttggatttttgctccccataattggttgagtaccccaaacggacacttgaaaaaatcgatttttttgttttcggtgcagtccccccgaacagatgcgcccagatttatggggagaccgaatccttccggaatagcttccctatagcctgtactttaattctgcgttggatttttgctccccataaatgtttgagtaccccaaacggacacttgaaaaaatcgattttt

SEQ ID NO: 32769 - DNA, 902 bp, Heterodera glycines
aaaactcgagaaatcggaaaaacggacgttggggacatcgcattgtatttgagtgaaaaggagaaagtcgtatatgattcatatgcaaatggaggacttactgcattatttaggtgaacggtgagaagaaacggatagtcgtgataacacagggccctttgccggttttggtggcccatgactgcgaactcactcagtttccagtggagccaatttcggaggacaaaattgtggacaccaatggggcgggcgatgcattttgtggaggtattgtaaaagtgaatgcattaagttgtggataaacttgactacatttgatcccctatttttccttgaggctttttggctgcattttccaccggccgctctttggatctttgcgtccgtgctggtaattttgctgctcgtacaattattcaacaaattggctgcacttttccaaatgaatgtgcttatttagaatgagttaaaaatgtacgaacaatccttctcaaattgttaaatttacagttctatgttttattaaatttattcgtaattttttaataaatattcttagtgtttctgatcatcttatggcttatttactaataaatatagatgattatcaaacagctacagtttgttagatttgttcaacataggaaaatttaaaatttacattactgaactgagatgatttcgttgagcaaaaaagaagcctattaatagagaccggtaaaaaaaattttccgggacgggagtcccgaacgggaatccctcccgttaaaatcccgtccatttttaacgggagtcccgggcgggagtaattcgaaaatttaattaaatactaaatattttaatgcacaaatttgaaggacaatccttttattaaacgcagaaaaattataatatgcgctttt

SEQ ID NO: 32770 - DNA, 984 bp, Heterodera glycines
  unsure (1)..(984): unsure at all n locations
cccatcttaagtaatttatgaaaatatttttattcatcctttgtgtttgtgtttatgtttatgtaaacagcagatgtgcagacgaaagataacgatctcaaaaagttgacaaaattttggccaattcaattttaattagtatttatctcacattgtttatgtaataatgaaaagaaaatacatgctaataatgtagccatttactttttaattaatttattttttcatttagtataatttattttttattttatataaacataataattaacaatgataatatttaaattaagaaaaatattttcgatttattaaaaaattgcttcctggtgcccaaacttcacggtgcccaaacttcttggtgcccaaacttcccggcgcctaaacttccccccccccgtttcataactttaaaattattcaattttattttgaattttaaataaatattttttcactgtattaatttaatttgaataattcatttattgtttcatcaatgtataaatctcacggcttctccatggtgttgagtcgttaacacaataaagggcgttagaatttaaaatttcgttatgtttcaataaagttatggcaaaaaatgttcgaaaaacaaagttttttgagttctttcgatcctaactttttttttgaaatttgctgactgacagagaaaatcgaatttaaaaggggaggagatccaagccttctctaagaaataatatttataattcttccatcatccgctgcaccagcagaaaataaatttaattatttggaatggaaaagaccgaccgacacaaattagtgccaaaaaacattttgaaaatttttgagaatgcttgaatttattaactntgatgaattgcatgttagggcattaaaatcagagtccgaccccaaattttaaaattttggggattttaaccattttttaataatttgttatcacaaattgataaaatataaaatattaatttaaaa

SEQ ID NO: 32771 - DNA, 885 bp, Heterodera glycines
gatctttttaataaataatttaatgaattctaatactattaatatttgatgaaatctttttaaattaaatttctattttacaaagaaaaaagcaatgcattaaaaataaattcattttttttttgttatttcccagaatttttcgaatgttaatgaaaacttgtcttaattaaatgaagaaagtggtttcaaagattttgttaaactgttaatgaatgtgctgagaattttcggttattttggccactcagacaattgaattaaatgaaatttaaccaaaattaattaatcatttgatcaaattctcgtggcataattaaatgccctgcgtttataaaccagttataataaccaacaaatcatcttcgtctgcccaaaaacattttggactttaaactattgtttttttgaatacaaatatcttgaacagacattataaataaacaatgaaaataaaatttaaatcattatcaaaattaaattgtcctagaggatgagattttttttaagaaatttgggacaaagaaacaaaaaccatcgaaaaatttaagtattagcgattataccaattatcatttaattagaaaaatattttttttaatttgaaatgtaaaaaatcgccgttttttcaatgaaaaactgaaaaagtacaattataaatttttgatattttcggaactcataatcctaatgtgaacgtcgataaagaatttgatgcgtatgaatgacatagtctgcagtaaaaaatcctgtttttgttcattgtaaaaaatcttttttgttgctttcccatttatttcaaaaaatgttgtttttattcgcagaaattattgagtaattaataattaaatttaaaatattttatgattttaactccaattagct

SEQ ID NO: 32772 - DNA, 579 bp, Heterodera glycines
tttttgatacctaaaagtgttaatttaaaaaaaaatttatttgcctatttttgtgcttaaaaatatttattatttacaaccagtaaagagtaaatattcagtagaacgaaataccataaacaaaatattattttgttatttttgaattacattttcatttttattgtaaataatggcattttcattgtccattgttttcgctaacattttgcattgaatggaaattatgggcattttcagtgtccaaagtttcgatgacatttggtattgaatcgacattaatggcattttcaatgtccgaagtttcggtgccatttgacattgaatggtcattaatggccttttccgttccggtgttgtttcgacaatatttggaactgtttcttcaatggtctgactgccttgcacatagtttggtacaacttaaaaataaatttattaaaaaaacaaaaataggttttcgttaattttgaaaaaagcctgtgaataaatttgacctcgcccttcaaccaaaatgaattgaatggcactacaaattgggcaagttacatgagctttaaacctaaatctaatttattt

SEQ ID NO: 32773 - DNA, 463 bp, Heterodera glycines
aaaggcaccgtgtcggattggaagagattattcagcaaggcaaaaaatccatttgatgcggcatttggtatgaggcaaatcaacggtcatattaatgacaatttttgttttgactgcggcaatggacgaaaaggctggtcgaggataaggaaaataagggaggggagggaataagggggggggggaagaggggctggacaaacaatggacgggggggggggggcacgaggggattggggtgggtggaacggaactttgctttgagagagaggaaaatgagaacggcggatgggaggaggaagagcaccagcagggtgggcagtgggaatgacgcggaagatgacgggaaggaagtgaggagggggggggggagaaggacggacgaaaggggagaagcgacagcggggacagagggagggagggggggggggaagagagggatgaccgcccgtccaccttgggc

SEQ ID NO: 32774 - DNA, 717 bp, Heterodera glycines
tgccacagctgttcgtgcggatgctggtggtggccctttccataatgcgtcgtttgggtccgcgttttcgtccgccaccgcctccgccccttccgtccgttttccgccgtcggcggtgttcgccgtgaggtgcgacaggcgcattgtttgcttcttctgctgctgctgggcgccgcgttcgatgttctgcaggaaagtgccgtgaccagcggacggcgcagcgcaagtgggaggaggcggaggctaaaaatgccaagtgcccgcgtaatgccaaaggcaaattaaaccgaaccttttgctgctgttcgatgccgctaatgccgaaggaggcgaagttctgctcgatgttcactttgcactgcatcaaaacagagatggtccgaccctaaaaaagaatttggtggtgttcaattaagtggcataaaatcgttgcaattatgccgtttgtcaactccattgcctactttttcccgtggtaaatccgtgcttttaacccggtgttttttttacctggtgtttgacaccgatgagtcccttcgggccgcccactttgcctagctgttcaaaccgtataaggtgccgttgtaaatccggattaatcggcccttttgatgcgaaaccagaaacctgaaattttttgtcattttttttcaattttccaattttaccaaaaacccatttaaaatggtttgaaatgaaccctgagcgttcccctcc

SEQ ID NO: 32775 - DNA, 960 bp, Heterodera glycines
tgacttataaggaatacatcggaaaagcgcattcgctattaatcattcttttgccgggctgccgacattttgttatttttaatttgatttgttttaaaatgctgacaattgccattcatctaaacgcatttggttataattagtcattaaggcttaattggaactgtagaacaagcactaaaattttggtcataaaagcacagcgagaaatgcttggatttaacttacctcatcaaaaaataaaaataattttaagtttttttaatataaggtgaaaggatgcattggtttattgttttggttttgattttgaattcaatttacaattctaatgcgttttttcattcgctggattcagcaactccgggaggtaaattcaaatgaattaaaattattttaagcattgattgtttttaaaatttttaaaataaaatccaaaaatttagaaatttttgcttttcagcttgtcctctcctcgtcccagccccttgggtgtgcgtgtgcggttgccagaaatcagatataaaaaaaatttcgtcgagttacggtggcgctgatcacagtagcagtgatggtgatggaggctacggtggaaatgagagcggtggtggaggggaagaaaatctgaagctaaagattggcaaagtgaaggagtattgcggctgccaaacagtgaatgtcacctgcaaatcatgcgaatcggagcaggaaaacccaatacatattgaggtgcgtttaaaaatagaaattttatttacacaaagtctaacagtaacaaaaaaaaggtaaaattaaaactttgacatagaattttaattttcaaacaaaaaaggagttatcgaaagacgctgcaatgaaattttaaaattaaatcctaaattaataaaacatcaaatatttggtgatctatccacttaaaaaaaaaagtaagaacatagttggagagcttctgaaaatctt

SEQ ID NO: 32776 - DNA, 622 bp, Heterodera glycines
ttttttttaatttcagccaatggggtaccaaataatcgcattcggttgttgtatgattatgaactaaacagcaaaatattgtgcactgaaaatgacccaacggtggtggaagcattcggacgggcaaaacaatttcggtaaaaaaaacaattgaaaaacccgtactggtacctcgactctattaattgttagttgcccaactcgtactgcgatctgtgataaatttctgttgctgtacagtaagagttgggtaatttagtattgatgaaatttattaacagatgtttactaaaaatataattttttaaatcacaaaaaccaactgtaaaaaaaaagaatttacgaaataggaaaagataaaataaaattcgtaaaaaagttacaaaattgaaaaaaaacagaaatttatttcttaaaatttcaacaaaatgcgatttcaaaccgtaaaatgactgtgatttcgcatacattttttcccgttgtaaaaaacatttgctttaaggaaaagtatcgttcaatgctgacattgtgaagttggtcatcagaactttttacattatttcacacttttttttattgatttcattcattttttacctattttattttaaacaactagcgg

SEQ ID NO: 32777 - DNA, 816 bp, Heterodera glycines
  unsure (1)..(816): unsure at all n locations
attttaatgggaattgcccttaaaatatattcagaactttcctgcggcactcatccgccaaattggcaagttgatcattgccctgggcagtgccgttctgtccgccgtcctccgccaattgcgccgctggcagtgcccttgcggcgactgttcgcttctcttccttctccacttcctcttcttcttcctcctcctcttcgtcaatctcttcgtatgaatattcctcctcgtcttccatcacttcctcctcctcctcataataatggccaatgttcggcacagattgagcaatcatttggcttttctcgaaaattgcaatttaagaaagaccccataaatcaacttgagaatccctccctaataattagtcccattaggtggacactttcattgatcacttcccaaagattccttccaaaaaccatcccacgggcaatttagtagggtttcggccgtgtgatgatgggatggattatcagcggttgtttaggtcagtgggcggtaggctggtggaagagtgatgatgacaaataccgccggagggggggggggnggggaaattgggagggggctgagggggaggggtcaattattacgacaattaacggaaaaaatcccacattttaaagagcaataaaggaagttcaaaaaacgagagcaatatttcctattttctttgtctggtgagtccatcccaaaaaaaaaattgtcctttttctgaccccggcagtaaataatgtttttgcagatgttgacttttgaaagacaacctcggcgaatttggtggaaaatgacgagaattgggggggggggggg

SEQ ID NO: 32778 - DNA, 928 bp, Heterodera glycines
accccattcagagactagtcaaaaaaaataataataggcttggactactatactaattagaaattttagaatgtgtctgttaaatgcaaaactgttgtgaaaaattgttataactcctttcagagaagagatagaaaaaaataaaaatagggttagagagcccgtgaacagctgcatcggatgcaagtgccgccgttgctgtacgcctaacagttggtgagcaatgacggaaaattgcttaaaaaagaaaccaaacaaactcatcaattgttagctcccgttgacaaaccgaagggtacattggggcaatggatgttgggctaccgtatcagttattaaaatttttgtttttcaaaaaggatactaaaactgggataaccccattcagagactagtcaaaaaaaataataataggcttggactaccatactaattagaaattttagaatgtgtctgttaaatgcaaaactgttgtgaaaaattgttataactcctttcagagaagagataaaaaaaaaataaaaataggtttagagagcccgtgaacagctgcatcggatgcaagtgccgccgttgctgtacgcctaacagttggtgagcaatgacggaaaattgcttaaaaaagaaaccaaacaaactcatcaattgttagctcccgttggcaaaccgaagggtacattggggcaatggatgttgggctaccgtatcagttattaaaatttttgtttttcaaaaaggatactaaaactgggataaccccattcagagacaagtcaaaaaaaataataataggcttggactactatactaattagaaattttagaatgtgtctgttaaatgcaaaactgttgtgaaaaattgttataactcctttcagagaagagatagaaaaaaataaaaatagggttagagagcccgtgaacagct

SEQ ID NO: 32779 - DNA, 839 bp, Heterodera glycines
  unsure (1)..(839): unsure at all n locations
aaaaaaacattattaatttttcatcttcatcatttttntggtttcaaaatatattgaatacttttttatactttgaaagacttttttattaatacagaattttttgaaatttcctaaaatccgcaatcctgcgcaggatcctgcagattttacatgcaggatttgcaggattgcaggatttgcaggattaatcctgccggatcctgtcctgtaaaaaattttgaattccaatcctgcaacaggatccgcaaatttgaaatttccggtctctaattctaagcctattttggtcatttttatggcattttgtgcctatttcactttttacgaagaatttttttcaaaaaataaccattaaaaaattttatttacatattttagtacatatttgggggtttttgtacatatttcatacatattttagcattttttatacatattttatttacatatttcgcaattttgttacataaaattagcatccctacttatgatgatgatgaatttaccttttgaaagaaaggcgatgataatttatattaagtttacttatatttaaaatatatctattaaattcggatccggggttaggaattagacaaaatatgtacgaattcagattcgtcatcagtaccctctaaaactgatttgcgcctaaaatataaaaaaattagagaccccaattctttaccatcgcctgaaattcgacctgtgttttcaaaaatttgtcccacgtttcctatcggaatgccgggggcctcttaattctttttttaacatttttaaaatcaattacagtttcaggaaatcgcttaatttattttanaggcaatatatac

SEQ ID NO: 32780 - DNA, 441 bp, Heterodera glycines
ccccccccccccccctcgctctccagccgtgggggtcagttccgtcggtggaaaattgttgggctataaatatttccaaaattggccaattttgttcggcttttactatcattttttggcttttccataattatcatgtattaacacttgcttacaattcattgttcctcaacgtgttctgctgttctgctgacgaaaactgtgctggtacggttgtcccttcggtttggcgcgccgccgccagcgaagacggaggcgccgcagacggagtggcagcactcgccgttgtcgccgttgttgtggtcgttggtattgttgttgtgcttgtactgcttgaacttgttgtggccgtcgttggtgttgttgtggttgtggcgctggtactgcttctcgttgttgatgctggtgatggtgtaacgttcatctcctcatgatcttgac

SEQ ID NO: 32781 - DNA, 913 bp, Heterodera glycines
ggggctccaatgccagtggttgcagccgaactgtaattgtaaaattggtgtgcgatttgttcgttcgactctctctcatctgtatgctttctcttcggaagctgagggggaggcggtggcgggggcatatggtacaccggagttggagtctgggtgcacgcattggaccgaaagccgtggtcaacattgaaaactcgccccttgtttcggatcttcagaatttaagaaatgtatttttaatgtaaatccccaaaaattaccttgaaaaatgtgtagcctggcaaatcataaattacatcaaaaggcacaaatcgaggactgattttgaagcgggtgcaccaaattgtcactccttctttggtaacacaccactccgcctcacattcagtgcccttacattctcggcactttcccaggatgtcaaactgaatcgtccttggcatagctatgcgttcactgctaactgttataccgttagcagtctgactaatctcaacggcagccaaaatattctccatcaaagattttttgtcactaatattaatggccattttttggagctttgatcatgaatgttaccaaatttaaaatcgaatcgttttatataccctttttcattctcttccgttccatagtttatttaaaaaatgttccctcatcctttccgtttatcgaccaaaatattgctacgggtcaaaggattgggtaaacaaatgcaatcgccgatgttcgagactctcgttccttatttttcattcatttttatcccttttccccaaatggcacgccatccatctctccttccgatttacaaacgaaatattcgtcgccaaaaccacgtacacattaagcatgtacgcgtaaatttttcatgttgacataataaattataattattcaggtgtttgttact

SEQ ID NO: 32782 - DNA, 721 bp, Heterodera glycines
aaagtcgaaatttttattgttttctcttcagcttacaattagtgcccaagtggcttacaattagtttgttaaattcgaatttttgaagaatagtgtaccctctccaatttacctccgtcttcaatacgctcccttttggctgttgtccgtgtcggcgcggccgtttctgtccctttgctcctcttcgtgttctcttgtcgaactgtttgcttcggctgctgcttttcgccctttccttcctccgtttttgctgttattgaattgccaatcggcggcttcaactctttgatggaaattgctgacaattgttggttctgttgttggcttgtgccgattgaggacaaaagtgaggaagaagttgaggaaggtatcggactgagcacattggtatggtggcgaagtgcggcggccattgaggaaggcaacggcggggggccgtgcatgtcgcgccgaagggtttccacgttgtacacaaactgcgtgggaatggggataaaatttaaaaaataagatgcattttccaacctccttcagttggtggatgtacgcgtccattcggcccgggtcggacagaatttcgaggctgaaacgtggcggttgggaggttgtcgtcctcgtcctcctcgtccctttccttctgctcttccttttcatggttaggttcggcctgttcctttcgattttttctctttctccttttcaccatcccttcttcttcctc

SEQ ID NO: 32783 - DNA, 914 bp, Heterodera glycines
cggccgtcactttagcagtgagagggacgcggtcggcgtctgcagtgagcagcggacagcagaaaaaagtgccgaatttggcgggggaataatttaaaattcaaaaaataaaattaaaataagtgtgtaaacaataataaataaagtcctcaccttttcagtgcgttcgttcctcttcacttttcccaaaaacgcaattgcagcgcaggcgaagcgcgtgctctgcgctttccgccggcgttggaattgcggaagaaacggaagagaacgacggacggacggcgggggaaagggcaaattattacggaagggaagtgatcagactgatggaggaggaggaggaggcgcaggagacgcacaacaaagtgactgatcgttttttcttagaaattgcaaccaattccgaaatgggccggcactttttcccactatggcacccctaaaaagccaaacccatggggggcgttcacatcagtctttccgatcaccctcccccaatgccatgtttccatctctgttttttgtgccgttcccattgccaatatttcccttcccccttttgcccaggccaccgatatctttctctgtcgtccctccgtttccgatcggcttgccccgtgctctctcgccaatccctcctcctcctcttcctcttctccgtcacttcttcccgcccctcctccactttttccgccacccgatgaaatttttacggaagtgactgaattcgtcggcagggaatggctcttccgcgacttgtgccatcagctgatcactgagcatgcacagctgatccttgtccatggggctagcggaagcggcaaaagcgcattgattcggcacattgcggcgcactcggccaattttggggacgcgtacgctcaagtgaaagatgatggcatttcgtactcaat

SEQ ID NO: 32784 - DNA, 639 bp, Heterodera glycines
tttggtcaaagaattcatttatcaacacattaaattccagtaaataattatagctttacatttatttatttttttgctaacattgcccttttccgtcgtcctcgtcttcgtcctcctcattttgcattccgattggcacaaatgccaaattcgtcggcacttccaaatgcgcaatctcttttccctccgtttccaacagaaattcaaaattgaactcgccctaattttgtattaaaatttaaattattataaatagaaatttaaaaaattaataattaaatttcttacagcgaaaaggtccacaaaagggatgccgaatatccgtggtgattcggggatcacaacagtggcattccaccccgctttttgctccatctcgcgcaccgtgtgattgcctggcctttgcaacaattcgcacaaattgcggccgataaaattgcataaatcgaaattgctataacataatgaaaattttaaaatttttttgattatttttaattcattaattagggctggtccccagaaggtattcatccctggcattttccaccaatggatgaatttaatcggtgttttggccccgaacactgacatttcctcgtggagcacccagttgaataataataataatattattgt

SEQ ID NO: 32785 - DNA, 603 bp, Heterodera glycines
tttattttatttcggatttggacgagaaaaaatggctaacactttttttggctttgacaaaaaattagactcgtgattccgaaattgccattctaacactttttttggcttgtgcaaaatattagactcgtgattccgaaattgcgccatatcgggaaggcccgcctagcgcacgcgtgctattttattttatttcggatttggacgaaaaaaaatggctaacacttttttttggcttgtgcaaaaaattagactcgtgattccgaaattgggcagtatcggtaacactttttttggcttgtgcaaaatattagactcgtgattccgaaattgggccgtatcgggaaggcccgcctagcgcacgcgtgccattttattttatttcggattaggacgagaaaaaatggctaacactttttttggcttgtgcaaaaaattagactcgtgattccgaaattgggccgtatcgggaaggcccgcctagcgcacgcgtgctattttattttatttcggattttgacgagaaaaaatggctaacactttttttggattgggcgaaaaattattactatgtgattccgaaattgggcagcatgggtaagg

SEQ ID NO: 32786 - DNA, 64 bp, Heterodera glycines
cattttgaaaatcagaatttttgtgtccttttgaaattgccaaagttgatcagtttatctacgg

SEQ ID NO: 32787 - DNA, 955 bp, Heterodera glycines
ttaaaagatataaatgaaatgtggctggatattctttcatttagtaaaataaaaagcatactattaagaattaataaaaaaattatttttaattaaatttaaagtaacctgtcaaccgttgaaaccatatacatatgttattggtttgactgtcttcaaaaaattgcatgctaatagcaaaagatagcagcgcatgaaatggctcatgcgataatcagcaagagttaattaaaaatgtaaatctaatttatcgtcactaaagattaaagtaacatttaaaatgaatatttatgaatatgaaatatggacaaaaacgttgaaatatggattattccagaaatcctcataatatggatatttatatggacataaaatcacccaatcaaaaaagtttacgtagaaatgctattttgaacccctttcttcatagcatattagaagaaaaaatatgtaaatccataaaatttttttgcattgttgctttgatttgaatattaaacataaacggacaaaaaaaaacgaaaaataaaaatagtgacctaaaattttttggtctttgattttctttaatgtacgttaacttttacaagttaaaacaaatgtttaaatattttgtataaattatttttcaataaaactaatggagcatccttcaaaaaacaaataacaaaagtatgcaaaatgcaaatgaaacttttgcagctcttctagcccagaaaaaaatatatcaacccgtcggtgttagcatgaaaagaggattaaacgcaaatttaagaacaaattatagagacgaaattttgtaaaaattataataaagtaattaccatgttaattaaaacatgataataagtaaaaagtgcttaaattatttgttaaaaattaaattataattaatttattgaacaaaattatagcaaaaatgaaatcacgaatatttaaaaattatgaaagtatt

SEQ ID NO: 32788 - DNA, 1038 bp, Heterodera glycines
aaggccaacaaaatttgaaaaacggccgcgaagcggccgtcaaggaccaacaaattttaaaaacgggcgcgaagcgcccgtccaaggccaacaaaatttgaaaaacgggcgcgaagcgcccgtccaaggccaacaaaatttgaaaaacgggcgcgaagcgcccgtccaaggccaacgtaaattgaaaaacgggcgcgaagcgcctaacaagctaaaaaacgggcgctaagcgcccgtataagttaaacagatttaaaaaaacgggcgcgaagcgcccgtccaaggccaacaaaaattgaaaaacgggcgcgaagcgcctaacaagctaaataacgggcgcgaagcacccgtccaaggccaacaaatttaaaaacgggcgcgaagcgtccgtcttgatcctcgatgtggactaaaaacccataataattttttaaaaattcaaaaaaaaatctccaacaaattcgatcaatttgaatcgcttcacagtctaggtagcgaagctcccaaagcgcgaagcgctttatcccagctaaaatgccaacggttcacgcacccgctagttatatatacgttagaatgataaggagtttcgtttcaaaaactaatttgagaagaacgggaatagctggggggctgaaattttgcacacaggggtaactcgagacggcgcatccgggaaaaatacggattttttggtccggtggccaactgagtcccagcggctcgaaaactgactttgccgccagtctcagtgttacgaaattttttgcttttgctttcagagcttagcggaccccaaaagcgaaatgccccaactatggcctacaactttgccagcaaaaaatttttgatcagatcaaaggcctgacctgtaggttaggcaacgtaagaatcactttttttggacacttcagtaccaagcgaatagctcgtaagggtttgctcgaagcagggggtcgccagcggacttattgtagagctcaatgagctcgatttttacaaattttaaaatttcaaaaatttttcaaaatttttcga

SEQ ID NO: 32789 - DNA, 620 bp, Heterodera glycines
gaagaatttttgaattcttacaaaaattgaataataagacaatagaagacaggaggccggcagtgccaataagcgtcgccgagaacatttttaagaaaattttagtgtttttgtttaaaattcaaaaacttatttttacttaaaaatttgagggtgcgagacttggcggggatacaccaagacggaaaaccaatggtggggggcgaggtacatactagaagagaacgaaaactaagaaatatttcgactttaccataaaacatattagcggggttgacctcacaaggggtcattcccaactgtaagtcggaaaatgaatataaacggtatgccattggatagagcatggtcaatttcttttaaggatttttttattttacgtgatcatatcaagaaatgaattattgcctgaggtcccattttcagctttgtccactttcattaattaattcagtcggagcggagctaaacctaaaataaacattaaaaagaatggataggctggcttgttcatcatttccaacttcggtttcaagttgatttatttttgccagagcaaaatttaaaaaaatccattaagtttattcctttttttccgaattccttcaagtccctttgct

SEQ ID NO: 32790 - DNA, 897 bp, Heterodera glycines
cattgccaatcgtcgactaatttttttctgaaaaagatatttcggtcttttgattacaatcaaaacaatttaactgaaaaaatgtttatctctctctatccattatttatatcgcatttaaaccatttaattatcctctctttcttcagaaaacttaaaaatacttccgatttaattttctgaaactttttaaaattacatttaatatttcaattgacccataaaacacctttactctcaaatttaagaatgccgaaatgcgtcgtctgttggaagccgaccagcttgcgctgggttgtctggacacatggcttatgatgaagctcagcggctgtgatgatcaaagctttgtcaccgaaccttccagtgcttcttccaccggaatgttcgacccgttcacggtgattgctcattcattttcccagcgtagttaatcattggtccatgcatttaactctaattatacattaattgattttgttctacattaattaggccgagtggggccgtcccattttgcgtctgctcggcttccccgacccgggcgcggtgctcccgtcgctggtcgacacgacgcggctcggcgtgcacacggcgcccgagctgttcggccgcgcaattccaatttttgcatcggtaaaaaacgacggatattttttaaattaattttattagtcctatcccacagtcaaaaacaataaaattgaattaattagtgtacaatatttttttttagctcggcgattcccaagcggccgcgttcggtgccggatgcattcgccgcggggacctgaaaatctcactgggcaccggcactctgttcgactacgtgagcgggcccgaaattcacagtcaatgcatggtcgggcgggaatggtattgagaatggtgttgttt

SEQ ID NO: 32791 - DNA, 87 bp, Heterodera glycines
ggaggtaaaataaaattttcagttagaggaaaaaggtactgatgtaaaatatctgactgttaaagaacatgttcatgtattcttaaa

SEQ ID NO: 32792 - DNA, 192 bp, Heterodera glycines
ttttcaaaatcgtttttttttcggcgcgctttttccaaaaaacttttcgggaacaggggggccggcggtgccgataggcgccgccggggaaaattttttggactttttaatgaatttgttagaaaattttcaaaatttgcgacccccctcgctgcgaaccctctccccccacctcttttacaccggcccccc

SEQ ID NO: 32793 - DNA, 551 bp, Heterodera glycines
tgctgggtcgtttcttaaaaaccgccactatgggcgtttcttaaatccgccaaggagttggaaaacaaaaaatgcaagattacaaattcataacttggcttaaattcaatcaaattaattattcttggtatcattcaatagctctaggtgttctctatcagaatattaatttagaaatttttttttataaaatttcaataagttatggtcacaaaatttaaaaaaatcttgtgtttgaattttttggccattacttttttgaaactcaatgaaattttttaaaattttaaagataaatgagaattcttaggtctattcaatatataaattaattttggctcaattccattttaaggactagaattttaaatgtttataaataaatatgcatgcccatggcaaaaaacatagcatgttcaatcctttataactttttttcagaagcaactagattaaattttatttttagaatttcaagttccctatttaatctatttatcaaatttaaaaagattccattgagtttcaaaaaagttatggacaaaaaattc

SEQ ID NO: 32794 - DNA, 993 bp, Heterodera glycines
atagaatttttatatttctattttctcttctttaaattgttgaattataaaaaaattattgattttttaataatacttttatttcttcataatgttttctagattgaaaagtttctattaggtatttattttttaatactgagagtatttttttattaatttctattatggagacaaaaagttcattaaaatctcaacgggacattaaattaattttttttttctgtaacattttcttcggaattaattttttaataatattaattaggatatttgttatttaaaattttttttcgagttttctaattttagtttatataatttaccaataagtgtttaaaatataaataattacctgcgagccaatctcggtccccctaatggctaagtaatcactcatttttttgactcatatattttaaaacgaagccattttttatttaaacatatttgaatttaatcactttttattcatttaaaatactattgctgtattctttttttcaatatgtaaaagtcaaagttaaaatgttatgttaacattttttcatttacaaaaaaagatttaataacattttaagttaaaattatttatttaaaacacatttataaataaaaattaattctttactcttttcatccatttgtctttgagtttaaaaatcaaccaattctacatctttaattgctgctcttaaaaattttcacctttttatatttattgtgtgatttttcgcaaattaatttttatttatatgggatatcttttacatatgcaaatactctttcgctagtgaaattatttcaattttaaattacaggattccttacgaagaagatacaatttttttagcaaaaaacgttaaggtttatctgaaacttttgatccacaagtaataatttaaaaaaaagatttttaggaaatattatatttttatagctaaagaaaaattattaataattgcctaaaaataataatttatgtgtactttc

SEQ ID NO: 32795 - DNA, 403 bp, Heterodera glycines
tgtaacccgaaaccccaggcgggggggggggactgatgatgatgggaaatagcaaatgccatccattggcaatgacgcggcaacgaatttatttttgtgccctcttttatttaatggcaacaaaacattgcctttttttcactgcggaaatttctctcgcggttttcctcggaatttccgtctttttgggctttgcgagcgtgaattgtttacatttattggtttatttatattagcgacaaaatgtcgagcggaacgaatgaaaatgactcataattgaggaggagaaaaattaaggggccaagggaaatgggaaaaaggggaaaagggaggggaaagaaaaagggggggggggggagaaacccaatccatccgccgatctgtcgttgcctcccccaccccg

SEQ ID NO: 32796 - DNA, 912 bp, Heterodera glycines
tacattttcagttatcatttatgccatattaaggacagctcacccagggcaggagcggcgataaaaatttacagggctaaatcttttaaaggaaaaacacctagctatggtccctgagggagggtttgaaaaacataacacccaaagcatgaatgcaatccaatactcctaaatactatatgcatagagaatgtgataaaggaactaaaccaccataaaaacctcgatcaaacttaaattatttttttatcattaaatataccgaatctattttagttgatctcttcagaaaccgttgaaagaaatgtaattaaattatttgccaattgaaaaacgcactcacgacgttgtgctccacctgaagacgtgcattaacttccatgaagaaatgattccccttatagtccagcaaaaactcgacaggtactaaaattattatgattttacagaatcatttcttgataagattcattcgatacactgaccaacgttctagttacccaacatggcgtgtcaatttcaaaggatcgtccaacattcactgacgtattgccggatccaaaacaggagccggtgccagatcaacgatcttctgatgccgtcgctgcacagaacaggccctctcgtacaaatgcaccaaatttccgtaatgttccccaattatttgcacttcgatatgccaaggtctttccacgaatctgaaacatcaaacatgcttatttgttattgccatagccgaatatcggaagttgtacttctcgactaacagcgaaccatcaccgaacgcggtcaaagcttcggaaaaggcgcggctgaacgcatcttcaatctgtgaaaacgaatgatcttcgaaagacagtcacagtaaataatttaaaatgcccaataattacagagacccgctccccattc

SEQ ID NO: 32797 - DNA, 799 bp, Heterodera glycines
tttttttgggttttcggggcagtccccctgaaccgatgcgcccagatttatggggagaccgaatccttcgggaatagcttccctatagcctgtactttaattctgcgttggatttttgctccccataattgtttgagtaccccaaacggacacttgaaaaaatcgatttttttgttttcggggcagtccccccgaaccgatgcgcccaaaattatggggagaccgaatccttccggaatagcttccctataggctggactttaattctgccgtggatttttggtccccctaattggttgaagacccccaaaggacccttggaaaaaaccaattttttggtttccggggagtcccccccaacccgtgccccccaaattatggggagaaccaaaccctccggaaaaacttccccaaaagccggaatttaaattcggggtggaattttggttccccataatggttggagaaccccaaacggacacttgaaaaaatcaattttttggtttttggggaagtccccccaagccgaggcgcccaaatttatggggagaccaaatccttcgggaaaaccttccctatagcctgaactttaattctgcgtggaatttttgttccccataattgtttgagtaccccaaacggaaacttgaaaaaaatcaattttttggttttctgggcaggccccccgaaccgaggcgcccagattaatgggaagaccgaatctttccgaaaagcttcccttaagccggaatttaaatcggggtgggatttttgccccccaaaatggtttgaggacccc

SEQ ID NO: 32798 - DNA, 893 bp, Heterodera glycines
  unsure (1)..(893): unsure at all n locations
acaaataaaaatttaattcaattatatttatttcgagcttgaatttcacaatttcacaatgccaaaaataataacagaattcgtagcaaaaaaggacaatttaatttaaactatttcgtaaaatgatgtcaaattagaaaatttgaagcaatattttcaaacaaatccaaaagtgagtgccgaaataattggcacggaattgagaattgaaagtgcaactctacatagatggaaaaaggaaagttcatccatttgatcagtgatttcgaaaatggaaaatgcattaaatctattcaagtgatttgatatataacacctgcactggcctttcttggaggagttaagagtttcaaatcttctacaaagaataagtgctaaagaaagcaataaatgttcttctaaccattctttttaaacaaaacatttaattgttgctgatccaaacagcttgaagctgtgagtgacgactctctgttggaaggttgacttttgttcggaaatgaacggctggaaatgtgcaagtcggagccagaaagcgtgcttttgttgccgccaacaaaactctgttggagacattggtcggtcaacgaatgagaagccgaacaaactaaaagcagaaaactaaagagccattattattcaattgtgaatgagcttaaaaataagtgcgcacatttgatttacatttgaataagatttaaattaaagttcggtaaaaaaattaaaaggaaatgtgtaagcacttggcagattttgcatatttttcgaatttttatgactaatatttattacaaaataattggttttatgtttgtttttaatttttgcattttcagcgaatgtttttttcttctaatanaactataattaatcaaacacatggtaaaaataaa

SEQ ID NO: 32799 - DNA, 907 bp, Heterodera glycines
  unsure (1)..(907): unsure at all n locations
ttgcaattttcagttccatttagagcccaaaatcccccacctaaattgactagtgatagtccaattaaggtactattacatccacgtttatgtggcacccaaattttggaactgtctcgccctcgggtgggacttaaaagaaggtagaggaaaatgtttgaaattttcaagtcaaaattttcgttcttaaatttaatgcaatagttttctcgctttttttcacggttttcgaatcgcggaatcgtgcgggtttaaaatttaaaagccgaaaagcttctatgatttttaacaaaaaaaaatcatttgttttttttcattttttagaccctgaaatagtgcatgaaaaggggcgggttagacgccgagggaattccttacaaagggacgcaccccatctaatttttgcaattttcagttccattagagcccaaaatcccccacctaaattgactagtgatagtccaattaaggtactattacatccacatttatgtggcacccaaattttggaactgtctcgccctcgggtgggacttaaaagaaggtggaggaaaatgtttcaaattttcaagtcaacattttcgttcttaaatttttatgcaatagttatctcgctttttttcacggttttcgaatcgcggaatcgtgcgggtttaaaatttaaaagccgaaaagtttctatgatttttaacaaaaaaaatcatttgttttttttcattttttagaccctgaaatagtgcatgaaaaggggcgggttagacgccgagggaattccttacaaagggacgcaccccatctaatttttgcaattttcagttccattagagcccaaaatcccccacctaaattgactagtgatagtccattnaaggtactactacatccacatttatgtggcacccaaatt

SEQ ID NO: 32800 - DNA, 936 bp, Heterodera glycines
agcagggatggcattccgaggccccaaaaattttcggaaagcggaaatcggaattccgaggccccaaattttttcggaaatcggaaatcggaattccgaggcccaaaaatttttcggaagtcggaaatcggaattccgaccccaaaaacgtcggaaatcggaattcggaagtcggaaatcggaaatttttcaaaaaacataaaaaataataaaaaattttctaaatattagtagttaattagattcggccacgacagtcccttttaattagagactggtactatcgatttaacggttggaatatatcgaagtgttcgatatatatttacgattttatcgaaaaatagataaagaaatttcacgtttttcattatttttcggtatcgattttttaacgaattttattggaaaatatcgatcgaatcacttgtacgacttctattttttccattagcgttttaaagattgactattggatttcaaccgaaattttaaattatttataaaaaatgtcaaaataggcaatatatttttttgtacttttactcgtcaatcgaaggaacatgtcaaaataatgaaggttaaaaaataccaggaatatgttggttataaaatttattccataaaatatcaatgtataattgctattatttaaattgtaattaattttgcgatgggttgcgaaaaatattgattttaactataattatgttttttaaataacgcccattttgatggttaaaatattattgtgtaattatttattaatttttaaatattcataaattgataaatacggagggtcaaaggtggagatgataaagaacaaaatacaagcaaaaaaaaagtaaaatttttgatgaaaatcatcgaataattttttaaagcaaatatgcttttaatagatcaaaaaatttttgaggcaccttttacttg

SEQ ID NO: 32801 - DNA, 984 bp, Heterodera glycines
  unsure (1)..(984): unsure at all n locations
cttttagcattagccaataaaaatttttaagtttaatttaacatctattaaacattcaagcgacacgaatattaaaaattttttacaataagaaattgaaattaagtttcaatagaaaataacaaaaaaaaataaaaataaacaattgtaaatatcaatgatcacattcacgcataaaagtcaaaatgtctttttttgtgattattcccagtaatcggccgttggaagtgaccatcgttgttcgaagacccaacttcctgaacatgtcgatcactgtctccatgggtgtttggtcggctactgtcattggtgcctaaatgagcagcgatttatttcgaattttcttgacaattttttgagaagacccgaagtgtttttataacgtaaaagttacaacttatgtcgaaatggagtcaaatttccaaaaaataatggtaaaatggggtatggaggagccgttaaagccgcctgaatttttttttgaaattttaatgttttatttcgggcccacactcactcaccacgtccataatgtggccaagttgcaggggcgcagatacgccagcggcatacgtcgacgcagccgtgccaatgtcgtcggggacgaaggatggagacggtgggagaactgtagcgccgccaccgttgaggacagtgccgtcgtcggccaccaaaaattgcggagggagcgattggctggcgaggcccgcttctgtggagaagtgcaccgtggaattggtggtcacatttggctgcattttgcgtgcattcctcaacaccaagctgagatccattctgaacaaacgggaaggagatgtgtgttaatcacttatattaatattnaacaaataaaatganaaaaaagaaacataaaaaggatgggagcaggtccatgcccagtgtattttttcaatttcagcgccaaagcgaaaaaataggaatttgtggcggttaacgccaaatggcaaattttgtcattttagg

SEQ ID NO: 32802 - DNA, 1393 bp, Heterodera glycines
aattgtttaaattttttttttataatttttacttttacttttttattttcatttttcaacttatttcctgttttagttttccctattctctttttttttaggttgtttaattttgttgcagctttctagctagcacaaagccagagcatggattcaacgttttccttttttttgacatattcgacagcccaacatgtggtgtgcgtttttaggcattaacaatgggcatagttggtatatagtcagggctaacacattttgctccctgactgtagaatatatagatttttaaaaaatttttcgcaaagaatctttataatcctttcaaatgaaagataatataaaaaattttataataactatcccatttttacttaatcaagtaacatagcctcccagctaataataatttatatgaaccagctaacctccttcacatcatttgatatttcgcattagtccataatgcaaatagcaaagagtgcgatgtgtctaactagctaacgatggtcttcaagataacggttacatgattcatacgcatcatattaaatattttttattacatatgaactcagggctaaactaattctacactcttaatatcattctaaagactttctgattctttaataacctgcaacattccaaaaaatttagtcaagattacatatagttctagccaaaaagttggaaaatttggttttttgaatttttctggccataacttttttgaaccttaataaaatttttcgaaattttgcaggctaatagaggacacttagggctatcgaatgatatcaagattgttgaatttggttggcaaagaaaaaagttatagccaaaaacttgcgctcgtactaaaacggcccgtactaaaccgaccccgagcccaagaatgtttaatttggttgagaaagaaaaaagttatggtcgaaaaattcgttcgacgacgtttcggctgacgacgttttgtcctactccggcccgtagctcaattggatagagcacggcacggattgttggggtcgtgggttcgagtcccaccgggcgagataccgtttaagttctacttgtggctgtcaaacgcatcccaaaccaagaggtgttcgccaacgaacagctttgcgccgatgattttgtacaagtagtcctccgttgtttcatcattcatccacaccgaaccagcgaaattgatcaccaattttccagcaaattggttgacaatttgaggcaccgatcgctttctgttgaccaacacatacggcttgagtttttgtccgttgttttgagccgtaatgcacaccgtcacccgcattttgtcatgtaatgtggtcgcaactgtcacctaatttgtttgaatagcttcattttatccaaaaaaaacatacat

SEQ ID NO: 32803 - DNA, 715 bp, Heterodera glycines
aaataagtattttttaattgaaaaatacaagaaaataaaatattaatataatcttaacaaataaacacataacaaagaattatacgaactttcgattatttattaattatgaaaatagttaaataaaaatactaatcctatttctttgcacatattaacgcgtggcgtgaagagtatgagaacaagaaaaattaaaaatataaatttttaaaattaaaataaacattaaaatatttgtaaaaatcgaaatctaaaatgaaaaatgcacataatcgaaatcttaatgcaaaaaccataaggaaaatgaatagaaaacacaaaaatgaataaaaaataaacaaatttaagttttttatatcgaaaaacgaacttcaagtaagctctagaaaaggcatccataataaaaaacttaaatttaaatgatctaaacatagaaaactaataagcaacattaataaataaattttgggaaaaaataaagagagtccggcgagttttcaagattcccgctgcaatttttcgtgaatctcgctcacgatttcatacttttagcctagagaatttttacgggagacactatttttacggattcacggtcctgctccctgaaatttctcactcgcaactttgttgatcgaaaaacagtgaatataaaaattaacttctttttaaaattcatgattaaaaaatttaaatggtaaataaatttaaggaa

SEQ ID NO: 32804 - DNA, 660 bp, Heterodera glycines
gagggacgtccttgccgctgagagtgagatgggcggcggatgggattcatctcctccactcaaacgagaactgttgattcaattctgttaggctccatctttttagttttcgctcgcgctgagcaagttctggaattccatggcgggattcgtcatcatcagccagcggggggggggggggggagcggaggattggcattgtcgtgacccgccctcccccctcctccccaactcttcgcggcccctcccctcaactttttcagctgttcgtggattgagttggggaaatgtcccactccccccccctcccttttttttgattctcgcgcaaaaaaaacaacgaaatttcaacaaaatgatgcaaaagggcagcaaagcaaacaaaaaaagacaagcaattaaaagcgagaacggagaaaagaaatgacacaaaatacaaaatatttaatttaaataattttaaaatttctaaatttttattcaatggattaaatgggcaaaaaaaaacgcacggaaaaattaaaatttaatggaacgcataaaaaatcatcggaataccgactaatgagtgaactgaaaatgcaaaactaattcagtaaatgatgaaattccaagaaagggatgggagggaagagaagagatgaaagaaaagaagaaaat

SEQ ID NO: 32805 - DNA, 684 bp, Heterodera glycines
taattattttcgatttatttgcctaattaacttttagctgatctttgaatgtgcgctgcacttttttgttgtgcgtttgcgcttttcattctctgctcgcacttgagaaagtgttcatcgccatttgtttgtgtctgcccgttttggcgacaatttggagcaggtggacaattaattggtttaatttgtggacaattaattagtttaatttatggacaattaattggtttaatttgtggacaattaattggtttaatttatggacaattaattggtttaatttatggacaattaattggtttaatttgtggacaattaattagtttaatttatggacaattaattggtttaatttgtggacaattaattagtttaatttatggacaattaattggtttaatttgtggacaattaattggtttaatttgtggacaattaattagtttaatttatggacaattaattggtttaatttgtggacaattaattggtttaatttatggacaattaattagtttaatttatggacaattaattggtttaatttatggacaattaattggtttaatttatggacaattaattagtttaatttatggacaattaattggtttaatttatggacaattaattggtttaatttatggacaattaattggtttaatttaatggacaattaattgg

SEQ ID NO: 32806 - DNA, 1067 bp, Heterodera glycines
ctttttctatcaattggcagatgaataaaatttttaaaaatttttaattcctttttaaacaggccaaaaagtttaggcttaactttttagtgaaaattcaatcactcatttttcgagtagtgatcagaagcgcaccagattttgcaggggcctaaaaaggtcaaggaaaggcgtctctgcgttgatttagcagtagtacctatgaatttaaattttctatgaatttttaaagttttttgaaatttttttaagtgcaaaagtggtggtgtctgcaaaaaattttcaccgggtttaaaaaatctaggaaaattagtaagcatttgtagtgttccgatacgtatccctgcaaaatttggtgagcccctgatcaattacaaattatttatggacgatcaaatttttagaaatttttatttatttttgcataattaattcataaatatttttttcagaaaatgctctgaaacgcaccaaattttatttacatgctagtttaggcactctgatgctttttctatcaaaaagggagatgaataaaatttttaaaaatttttaattcctttttaaacaggccaaaaagtttaggcttaactttttagtgaaaattcaatcactcatttttcgagtagtgatcagaagcgcaccagattttgcaggggcctaaaaaggtcaaggaaaggcgtctctgcgttgatttagcagtagtacctatgaatttaaattttctatgaatttttaaagttttttgaaatttttttaagtgcaaaagtggtggtgtctgcaaaaaattttcaccgggtttaaaaaatctaggaaaattagtaagcatttgtagtgttccgatacgtatccctgcaaaatttggtgagcccctgatcaattacaaattatttatggacgatcaatttttagaaattttatttatttttgatattaattcataaatattttttcagaaaatgctctgaaacgcaccaaatttatttacatgctagtttaggcacctctgatgctttttctatcaaaaaaggaaatgaataaattttttaaaattttttaatcctttt

SEQ ID NO: 32807 - DNA, 876 bp, Heterodera glycines
ttttgagcaaatttttaagaaaataaagatttttagggtccggcggtgccgataggcgccgccgtggaaaaattaagaattttgaccatatttttaacagattttcattaaaaaattcttaatttagtggatatttggaaaaattgttattttctggtttttatgaaaaatttaacataatcatttgtagaatttaggtgagattttcgttatggcacggaatttcaatttccgaaaatttttggggcctcggaatgccatccctggaggggatgtgaccgaacgtttcagttctgtaccaccgttctgtccaagcacaattccgtagcggataagttttttccccaatcaaggaaagggttgcgcattgattccactggactaagcccgattgggatttgtcgaacgtaagaggtaatggggggggggggggggaactcaaatttcttatcatgtatcgacatattccgattgcattgcgtacgaatccacatcactcttgttcctttgttactttaaatgtcacattaaaattagctgattttcgtttattttgctttacattttttacattgctttgcttccatttatgtgtatatatttagaaatggcttcggttactgatcgttttatgatgaattggaaggggattccgctgtgttttggcctcgtcacttcgacaacatttcatatttttaaacaatcggtggcttctaaatcgtttcaatgccaaagcctttgaaattcaaagaaactaaaattgcaaaacaaatggcgaaatgtacctaattgtaatattttatatttgattgtaaggtcaagattaggccggggaacaaaaacatttcaaacattttatagttggctttttctaaa

SEQ ID NO: 32808 - DNA, 940 bp, Heterodera glycines
tgttcggaatttataatgattagatgtgcatggtgtgactaatttctttgcttcactcatttctaccaaaattatcacatgtgccaaaattaatgtcgaataaaaatgaaaaaaatattatgttcaaatttattaatattaaaaagcttaaaaactaatttggatatgaaaaaaaaacaaaataattatttacagggttggggaattgaactttagaagaagaaaaaagtatggaaggcacaaccaccaggccaccgacgctcacattggctttacattctttgaaaatgatattgaaaaggcaaaaaggaaaagcttcatatctcggccagaagcttcatttagcaaaaataaaaaaaaatttataatacaaagggggggtaatctacctaccctgaaagtttcattcggaagtcccatggtcacttgggtacctctcctttgtaagtcggggatctgacggctaatataaaaataaagagcagctcgctctataaactatctgattacatgacttctccatacccaactcatccatgcatataattgacacgaagcacaccgcacaatcaaaaaaatgccacgacgatgactcgcagagatatggatgagttgagtctatgaatgcgacgcggctgacccgaccattttagttagaaatgatcagaggtcaagaattgtacagagcgttgtgccgaacttgtgtcgttgagtataatcatgtgaaggaacaattgctgaatgggctgaagaagaacggcaacgtcagcctggtcaagaagagaaaggcatccgatgcgaccgctcacccgaccctccgaaatgacactgtataacaaacattctttttgacctaacacggaatctgtcattgtgctgaatgttctgttaaaagccaaagagccacataagagtcaataaatgacttttattttccgat

SEQ ID NO: 32809 - DNA, 467 bp, Heterodera glycines
aatgtttgaacaaactgctcgaaacgccaaatagctaaatcgacgttatttttgcgcgctaattcaaaaattacactgataaaggcctttttgcacaatttattttgatcagccatatctcacttaatttctaactaaaccgaacaaatttagtatctaaaaaaagtttttttaatggagaatctttttctaagcgaatgctaagcaatttgacatctcaggaaaaaattatgagaatttcaaatttttatcaggttataactcaagtcctaaattgccgttttcaaccaaaatttgaaataatggcacgaaggaaatgaaaattaccaatttcaatgaaaaagaaatgccaattcagcaaattcaattgcaacgcaaagtcatcgcattcaaattagggttcggaccccgcccccgtcacccccgcccccgccgggggcgggacaggttttttggcctcacccccg

SEQ ID NO: 32810 - DNA, 862 bp, Heterodera glycines
ctttatcaaatttatttatgaataatgtatgttgcagcattaaaaaattttgcactaatgaattaataacttattcgttttgatagcttctctagaaaattcatcataagttaataaatcagcaaatatttataaatgagttttcttttcaaagttatttttacggtttttaattattttgacatattaattaatttatggtttatttaattattattttttaattcttgtatattattcttactttaatttctttactattcatttcccattataattgtctccttttttgatttaagaaccattttaatttctatcatttgttctattattacttcaataagccttgcatattttattattatttcggtattcttttatttccattcaattggagacgagtctaatggtactaagtacgcctggttacgtttagattcacagtatgttacaatttaagatctgtttacagattttatgctgacaaatgaataaaaatttattgactagattgtattgagtgagtctgggctttctatcttcatttattatgtaagttgaccatatttaatcaattattatctatatcaatttctgatgtatcaatactttttttaaatttatacaattaatattcatgaaaaaaatttgcaatataaattattcataatatttttaatatagtataatatacctatgctaaataaagtaccatgattcttatttattgtttatatgattatgtttttttctttaaacacaaatcaacaaaatttacataaaagttattaataaaatctcaattcaattgtttctatataatattttcgcgaaatgataaaagataataaaaaccttccaa

SEQ ID NO: 32811 - DNA, 1146 bp, Heterodera glycines
aaaaaatggaaaatttttaaattcctttttccccctccctttttcccaggggtattatttggaaaaatttttttttcccccaataacttttcaaaccccatttttcgccccgtgaatgtttttttatgaattctgacccgtttgagtagatagatagaaaaaattgaaaaatttgaatcatgtttccactcccttctcacaggggtatttatttttaaagtcttttttccccaataaacttttcatcccccatttttcgctccgtgaatgttatttttattgaattctgaaccgttttgagtagattagactagaaaaaattgaaaattttgaaatcatgtttcccactcccttctcccaggggtattattttgtaaagtctttttttccccaataaacttttcaaaccccatttttcgcaccgtgaatgttatttttatcgaattctgaaccgttttgagtagattagactagaaaaaattgaaaattttgaaatcatgtttcccactcccttctcccaggggtattattttgtaaagtctttttttccccaataaacttttcaaaccccatttttcgcaccgtgaatgttatttttatcgaattctgaaccgttttgagtagattagactagaaaaaattgaaaattttgaaatcatgtttcccactcccttctcccaggggtattattttgtaaagtcttttttccccaataaacttgtcaaaccccatttttcgcaccgtgaatgttatttttattgaattctgaaccggtttgagtagattagactagaaaaaattgaaaattttgaaatcatgtttcccactcccttctcccgggggtattattttgtaaagtcttttttccccaataaacttgtcaaaccccatttttcgcaccgtgaatgttatttttattgaattctgagccgttttgagtagattagactagaaaaaattgaaaattttgaaatcatgtttcccactcccttctcccaggggtattattttgtaaagtctttttttcccctaataaacttttcataccccatttttcgcaccgtgaatgttatttttattgaattctgaaccggtttgagtagattagactagaaaaaattgaaaattttgaaatcatgtttccca

SEQ ID NO: 32812 - DNA, 592 bp, Heterodera glycines
gactaaaccgaccagactaaaccgtccagactaaaccgaccagactaaaccgaccagactaaaccgaccagactaaaccgaccagactaaaccgaccagactaaaccgaccagactaaaccgaccagactaaaccgaccagactaaaccgaccagactaaaccgaccagactaaaccgaccagactaaaccgaccagactaaaccgaccagactaaaccgaccagactaaaccgaccagactaaaccgaccagactaaaccgaccagactaaaccgaccagactaaaccgaccagactaaaccgaccagactaaaccgaccagactaaaccgaccagactaaaccgaccagactaaaccgaccagactaaaccgaccagactataccgaccagactaaaccgaccagactaaaccgaccagactaaaccgaccagactaaaccgaccagactaaaccgaccagactaaaccgaccagactaaaccgaccagactaaaccgaccagactaaaccgcccagactataccgaccagactaaaccgaccagactataccgaccagactataccgaccagactataccgaccagact

SEQ ID NO: 32813 - DNA, 967 bp, Heterodera glycines
  unsure (1)..(967): unsure at all n locations
ttaatgatgttgtttatgtatgtgttaattgattattttattaattttttccaatttgccacttaattacgtcgtgtgccaatacaatgcttgcgggcgcactttcttcgcgagagcagctgagcaaagacaccaacagattttggaagggtcccttcgtcttcgctttgatgttctcctccagctgattgtgctgatgccttctgtccaactgctcatacgcctgcttcagcgccgtaatttgtcggtttgtgcgcgtcgccaaaatttcgattagcaccgccctacggtagacaccgtaattaaatgtacatacggtaagccatgaggtaaactgtaaccagaatccaccatcaattcgatggcttatatgaacattaaatttagccaaaacaaatagctaagtttctcctgtggtcattatggcgtttataccgtaatctatcacttaaacctgttgagctactggcgttcctttttgaagttctctccatgtgctttatcccaattcaattgtaaatgtactcactcattggagccggacaatgcggcacgcatttggttggcatcgtaaacggcgggcgtttgcatcaaagaaatgctttgtaaatttaaatttaaatggctgtttttgcattttataatttacatcagttcttcaaagtcgcttttgaactcctttttcagcatggcaatcagatcagtgccgaattgttttttgaactccaaagccaatgcttgacgcttaatttatgaattttaaattaaaatgttaaatttgcaatttgaatttagtctgtcacctgttcgttgctaatgggagcaatgacttgcgtaacttcggccttaattatttcngaatgaattntcactncaaattcccccctccccttgcccnantgctcgnctcgtgcttctttcgcatggcatcatgcnaatgatgcgcagttngtacggttttaaaatg

SEQ ID NO: 32814 - DNA, 1005 bp, Heterodera glycines
tcgtcgtggcatcttttggttatgcgagtcgtcgtagggcattttttggttatgcgagtcgtcgtcgtggcattttttggttatgcgagtcgtcgtcgtagcattttttggttatacgagtcgtcgtagggcattttttggttatgcgagtcgtcgtcgtggcattttttggttatacgagtcgtcgtcgtggcattttttggttatgcgagtcgtcgtcgtggcattttttggttatgcgagtcgtcgtcgtagcattttttggttatacgagtcgtcgtagggcattttttggttatgcgagtcgtcgtcgtggcattttttggttatacgagtcgtcgtagggcattttttggttatgcgagtcgtcgtcgtggcattttttgattatgcgagtcgtcgtcgtggcattttttggttatgcgagtcgtcgtcgtagcattttttggttatacgagtcgtcgtagggcattttttggttatgcgagtcgtcgtcgtagcattttttggttatacgagtcgtcgtagggcattttttggttatgcgagtcgtcgtcgtgacattttttggttatgcgagccgtcgtcgtagcattttttggttatgcgagtgaattagcaataacaaaatctttgttcacttcgttatttggcacccccacaaagtgtccaagccacgaaatgtccaaaagagtaaaaacccacgaaatgtccaaaatttttcaaaatttataaaaacaaaatgagtctaatttaggatttttagggttttcggggtcgctaaatacgaatataccctttatattaccccttgcctaaccttaggcccatctgaataataaaaaactcaaattcgagacttggacatttcgtgggctggacattttgtgggtcagcgcgttatttgtatttcaattttaagtaaatgcttggcaattcgttgtatttttgttgggactgggtcgttttggcgccgacgttttggcgccagcctcagttttttta

SEQ ID NO: 32815 - DNA, 173 bp, Heterodera glycines
atgtctgcgtcctgccggctcgttcgcaggaccgaaacaagcgcacgattgatcgtatccatctcctcttggatagcagccagatccgctctatcgagcgggctattcttttgagccttcgacaatttcgcctggtctcgaggggtcgcccctcgttttgtgccacaacggct

SEQ ID NO: 32816 - DNA, 958 bp, Heterodera glycines
tcttcccggtacggcagaggtagttaaacacaaaatgacctaaaaattttaggatttaaaaatttagattaattttttttttcattaccatcaaatcgtccggcgttgtgcgcaaaaatgtacgtatcataactggtaaaagcagttaaaatctactccacaaaatccttcgtcggctcatgtccctcagcctcactccaatccttggtccttacctccccacaaattttgcaattcgtcctatttttgtcgtcacaacattccgtacacgtaactctcaccgaaatataattgatcacatgctctttctggtcccccttataaatcgaatcctgcgatgtttccgaatcctgtaaaacaagacctattttgttgttttgttgtaaaacttacccaaactacaattctgtagacgtccttgtcctctttttcctcaatcggcataatataacaaccccgcttggggtcgtggctcacactacaaagttggcaataagtctcaccacattcatggtccttcttcggattaaataaataagtcttatcacaaatcacacaacgtttccataatttacaagtttgatgtccttgatgatagttataacactcccaattgtaaaagtaacggcgacacttcgggcattcaatcttcactccactctcctttccacacggtactccgcccactctgttgcaataataacaccttgcccgacactccaaagtatgataaatatcacgcgagtaaaagcactcacaatcaacgcaaaatttcctcccgcgattaaaaaagcagacgtaattcttcagaccatcccagtgagtgttctccaaaaatatcggcacgaccatctctcgccccataggccccttccataaaacacggatcgatttccgcggatccgcagacttcttcaactcacaatccggaattttccggggaaatctcatcctaaaa

SEQ ID NO: 32817 - DNA, 983 bp, Heterodera glycines
agaatttacgaatatttaatttaaataattcttataatttttgagaataataaaatgtaaaaagtgggcaatagtaatgcataaatataatgacaaatgccacttcatttaagatatgcgtatgaggtaatatttattgacttaaaaattgattgaaattaaataaattcattttttgcacaaatataatttttaatataataatgcgtaaattattgaaattttgcagaaaatatatataattttaaattcgaaatgttctttaaaaatagggcacgaaattaaacataaaaataacaaataattacatccttatttattagaataacattttattttaaaattacaacacacatagaaaacccgcattttttattttataaaggatgaagaagtttaaatatttttgttttgagcaaagttatgtgaattatttaaaaaaaatgtaattttgaaggcttatcaaaaaaacttattgatccaaaaaattaagaaattttatttataaatagggcgttctaggtcatctcgtaaaactgtcaattttacagatttttcgagaaaaaaccgtcataactttttttgacacaaccaaaataaagaaacaacttcctgaaaacggaataaagcttatttcatttggctgtgtttatgaaaagttataacgggtttttctcgaaaaatctattatatttgcactttttacgaaaggacctattaacacttaagtaggcacggaattaaacaaaataatgacaaataattacattcgtattttagagcatataattatacgtgtcatataatgttatggccattttaattgcattattgtatctgtcttcgatatgacgtcatgtctccatccggcatgacgtcatagccgagacgccgatatattcgcgtttaaattcaacaactattcgaaaacttatataattaaaatacgaaaattatattcaatgagtgaagatctaaattaa

SEQ ID NO: 32818 - DNA, 125 bp, Heterodera glycines
ctaggctgaaatcctggcagggcgaggaggcccaggcgaggtcggcgctgcccggcagatcgccggccctcacctcgaacacgtcgcccagttggaaatgcccagcgccccaattgtcggcatag

SEQ ID NO: 32819 - DNA, 964 bp, Heterodera glycines
  unsure (1)..(964): unsure at all n locations
aaattagcttcaatctcaaaaaatttaatacatttttgagattacgaatgcggatgtaaaaaaatatataaaatgccaaaaatgtagtgtaatttgtgcctgtttgatcatttcgcacaggcacggcactgggtaagtgaacgcggtggccaggcacagttccgcagccaattcaccctcgtccacggtggcaatccgagttctggatggaaaagagctgacaatgaatgctaattgactaaccatcggacggacgaaatcaaatagctgagctgatttcccttcccctccccgataaatttatattttcgaagtttccagtttttttaatattaatttttgattttttttttgaaaatggtaataaaaaaaatgatgaatttgaggacaaactggttgagcatttggccaagccaacagtgcagccaaatgtccattcccagcgacacattgcaacggttcacatgcgcaacagcgttcggactggcccagccctgttggttggcgcacagaaagacctggaattttttaaaaataacctaatatttgaaatttatttttattaaaaccgctattttttttgcatgccaaagaaaatgccgaaatttcccgtacacaattaattcactgtcccccgcccgaaaaattttaaaaaataaagtttttttcatacaaatgtgccaacaaaatgtttattttcatcgctttattgttgttgctgttgtttttattgccgtccattctcacctccttcagccgctgcttctcctccttcagctcgtccttgtccgtcctcaacatgctcagtttgcgcaccggcagcgcaggcaacggacgctgggcaaagcctaggagaaaacaaaaccatacaaaaatataaagatagatatctcaatttaatttanaccttccnagacattaattagtgattgatggaaggatgggtgattaagtcgagaaaaat

SEQ ID NO: 32820 - DNA, 1148 bp, Heterodera glycines
  unsure (1)..(1148): unsure at all n locations
tgcaggtcaaacattgttaaaaatatacattgtaaaaaaatagaagaaatactaaaaaaggaaataaattattcttgacaaaatttaacactatatggtacgatcagagttaagtggtcttctatacatgtgtgagtaaaagctatttgattaaacaatcataattatttaaaaaaatagatcgtaattgttaagatgaatgagcttgcagaagcatgacattaaagacattaaattacaacaaaacagcattaatgagacgttttctccacatttaaaataatacatggaccaacaaattactattgattgacgaacggataagatatgggagaaaaaaattttaattctcgaaatgcttaggaagataaaatatgaaaaatattaattatatttttaagtataaaaatagaaaataattgaattaatataaatcaatgatcaaacgcctttttattgattcatataaaaaactgacctaaaaaccatcctaaaatcataatgtgatccttgaatctcattaaaaaatttatttattacaactttctgttcaattaaactatacgtatgaagccttcctgaggataacttgagaaccaattttatagagatatttattttaagatctagatttattaactaatttaattattgtaaatatgtaaatatccattaaaacatattttataatacaaaatataatagccacatatataatttattaatttttatttaacaaaatacaatatttgattttattaaagaaattttatcaaattcattcaaatatcactacccccataacttttctctggcacatccaattgtttaaaatttgcttatttgttagtaaagctactcctttgaaacaactttcgaatgatactttaatcgttcaatttggttggtaaaaatattccaaaaagttataggagcacattttagggaaggtacggaaaatttatgatttattatgtataattgtcggtacatcagacaatattggataggttgtacatttttgtcttttactttatctanacatacatagatgttagtaataacttcatccncgaaattgagttttcgaattttttaatagatganaatcttttanattatgcacgacaatannatttgatgaacta

SEQ ID NO: 32821 - DNA, 522 bp, Heterodera glycines
aatgctatctgcaatacaaaagatacacaccaccctatgatgtcttgatctgtttggtccacaaagaaattgctttattttatgggccaatctgagtgccaaccgggtgcagcctaatattgctcttcggcacaccaaacaacacaatatccgctggtgctaaatgatcaaacaagcaaaatggcagatggaaaagtttttcgaaacaccacatggggtattcttaaaagaattttgttggggtcgaggttgggataacaaaaattgggatgggcgcagggacggtcccaggattttggtttgggggtaccaaatcaaaaaagtcaattcttaggggtgtatttttgaaaatttttcgcttgaacgcctttttttttttttgctattccccagcaaaaattgtgtacgctaaatttgcaaaaaagaatcgaaacattgattttgcacttggcaaagaacattcagcggaagagatggatgaagacgaaaacatttcgttataataaaaaatattatttggcg

SEQ ID NO: 32822 - DNA, 852 bp, Heterodera glycines
cttggtttctaaggtcacagccccgccgggggagataatccccggtaaaagcggggaacggggaaaaatggtgacattttcaaggaaaaattcaaaatttttatctttggtctctacatttttaacaaatttttctgttttgttaagctttaagttgttcaaaattctgagaataaagcttaggatgcggatgaagtgaaattcccggggattccctttcccccggctgtgacccaacaaaacagcaaaaggacgaacagtgacaaaaatttaaaactaaatgatttgaatctgatcgctttgcgtgccctgagtttgagagagccaatgctttttaagtcaatggaatgcttcgaagtgaacgaagagagagtgaagaatgatcgcaaatggaagttgcttcgctttctttacccatctctccgtccgcggtggcgtcgtttcttccgcagttttagtcgtccattgcaaatgcaactaaaaggcacaaatcggcccatgtttttcgttaatttctgctaattaccccccccccccccctccccgaggggcttttccctccgccagttttaaactcctttccattgcgttttgccaataatttttctcgtcttttctcaccatggcattccggtcgcagtcaacatgcactgcatgcttttgtctccgtactcatcacagtcaatcagttcgacgtgttcacaatttgctgaaagcgttgggttcgcctccaattcccttccccccttctaaattttgcctgtctcaacaattgccgatgagattgagtgccgactcgtccttacgcgtctttttgttttgcgcatccgacgatacgaccgaatccgatga

SEQ ID NO: 32823 - DNA, 326 bp, Heterodera glycines
tcgcttttgatggcacgtgctaccgccagtgcgcctgtcacgggacgcaattcgccgttgagtgccaattcgccgatcaattcataacctgccagctggctgtcgtcgagctgtccactggctgccaaaatcccaatcgcaatcggtaaatccagccgtgcgccatctttgggcagatctgcaggcgcaaggttgatggtcaagcggcgattgggaaagctaaaacctgcattgatgattgccgagcgcacgcggtctttgctctcacgcaccgccgcctcaggcaaaccaacgatggtaactgcaggcaaaccctgtgacaaatg

SEQ ID NO: 32824 - DNA, 611 bp, Heterodera glycines
gagtaaaggttgggcaaaatggtagatctggaagggaatcgaaccctcgacctctggtgcggcgatcggcttcccacccaaaccagtgctctttccgtctgagctaccaggccatcccattagccttcccttttatggatcttttgcccccgctaagcgttttaaccgtccgctggctcattccttacaatagacaccagcaactgattcgttaatatcatttctgggtgcggttggcaagaatggaggaagggggactgtaaaagagtgaaaaagataaggcaaatgaggggaagaaaaataatttagaacattttgtatttaatttctttaaaacatttttttaattttaatacctaattaattttatttaaagtttcattttttgctcagcggtacctgtggcacttcgaacccaaaaactctttgattggttcaaacccgcaaatttagtcaacttggattaactgttgttaacatttaaattttaaaaaaaagttccttaaaaacgaggaaaaaattttttgggtgtacaaaaaggtcatattttttgttttgttttgacttcaaatttcggtccgcgacccccattggacttggttcgataacat

SEQ ID NO: 32825 - DNA, 1416 bp, Heterodera glycines
  unsure (1)..(1416): unsure at all n locations
gcaaagacacagtccaaaaacatttcgccaagcataaatatgacaaaggcacccgaattggtacaaccgtatccaccgggggcgtttgattacggtagaaaatgccaaacgaaggtgaccatcggtttggattcgcttttctccgtcctgttggagctgaaccgacgagagcccgacctatgcgctagaagtctccactcgttgctgcagcttcttcaggtgttcgatgccggcacaatggcaacgcaaccgcgcgcaattttggcacgaatgcatgaacagctgagagagttgcgcagagagggcaacgcacaagtgtctgttgtggctaacgcatgcatgatggtgagagagagcgagagagagaggagagagagagagagaaaagggggagagagagggcgagagaaaaggggagagagagaaaggggtggaggggagatgttttcttttcattttcttgcagagtttggccgttgcctctggacaacccgagtttctgttcgcctccgttttggccctcctctgcgaatccaaacgttgtgtgccgttcaaccaagttggccgccttctttttacctttcgccctgttgctgattccaatgtttttgagctcgccaacagtacaagccctctgccccgaaactttcattctttggcactttccgtccatcggcgaattgtcggcacaaagtcgggccaaatcagtcgatggatcagcgagccgttggagcagcgaccgattgtgtgcgaattcgacgtcatttacacgggaagtgcgcttattgaggaccgatcagctgaagagggcattcgccggggatgtttagcatctgatggttttgtgagggcgaagtgcgacgacaaaaagccgcctttttttgtttgtgtgaaggtgcctatgtgtatctgctgacggtgtacggcttcttcaaacttggcaccggactgtgcgaaacgcgtgccggcgaagtgatggtgtgcaacgagtcggtccgcttcagtgacggctctgcgctgtacgtgtccaacgggtcgctgtacctgcgccaccggcactctgcgcgcctttgggtgttggacacggaaactttgcgcgaaatcggtccattgtttggaaatgtttcccatttttgattgcttttcaggtgagatcctgctcccgtccgcgctgatcagtcagggtcttctcttttctgatgggcgtcagttttgggtcgcctctttggacgaccaatggcatttggcgttcactccgttggacgattcgtttgngcctttgcggggagacaattcgccaaacgaagcggagggcggtgatcgatggacgtcaggcgaaaaagccgcgaggacgacgcaattacgactgatggactgcgaattctgtgcatttggcgaattgggagagacgcacga

SEQ ID NO: 32826 - DNA, 670 bp, Heterodera glycines
agtttcttcagttctctttccgctggatgaacaaccttttaatgcgtgagattcctctgagggcgaccatccgtctttgggacacttatttggtcggtgcaggacaaattagataaaactcggccgggcccctcccccttctcgtattctttagttaatgatttcatttgtctggaacagagtgaacatgacgggttttcccaatttcacacgtacatttgtggtgctttcctgcgattgtggtcgaaacaactgttaaatgaaaaggactttcaggtgtatcagctcttaaataaataattggaatttaactttagggcataatgttacttcttcaaaatctcccaacaaaaggatggaatgaccagcaaatctgtgaactgaccgcggatgcctactcactcatgcagtttttccatcacgcgaagagccatttacaaacataatgcctgattatgttttcttcccggctctagttcagtttatgaatccgattgttttttattggtccaatcatgactgtctttttcaaacttgatcaatacatttggtattaaacacggtactggtttaagtttgtataagacagtcgtgattggaccaataaaaaacaatcggattcataaactgaactagagccgggaagaaaacataatcaggcattatgttt

SEQ ID NO: 32827 - DNA, 669 bp, Heterodera glycines
cgggcgcgaagcgccctgcccctagaggtgcgcgagcgaggagcgaagcggagcgacgagcgagtgtaccgagtcaatacgaacctgatcaattcttttagatgtcacttagcgggcatggggtgaacggctaggctcagctgtcttccggtagctgctgctgcacgaacatccagatacgcatctgcgcctgagctgctactgcactaacaacctgacgcatctaccccgttactggctacaactcgacgggataggctcggctttctataaagcgcagccatctaccgggacgcctagttgcgaaatatgtactaaaaagtccaaaatatttataaaaatatgtacatatgtaatatgtagaaaaatccgaaaatatgtaaataaaaaatatctatgtttagctacaatacaaatgaaatatcccaattaggaaacaagaaaaaagcaaaactttcagtttggcgccgcctttgttcagtcaaatttatattcttcaggcaaagtaaaaccctaattttcacgttttttcccatacactgtgttaatttaatataaggacaccctattttttgttagtttgaccactttccatgaaccgatcgaggtgaaattttaactgtacatagccaattctgaaaatatttaagattctaacaatgacaagac

SEQ ID NO: 32828 - DNA, 921 bp, Heterodera glycines
ttggacacggtgtgctattgattaattcatctttttttgcattcgtcaaatgaaagaaataaataacaaattacttcttagagcttattttcataattctttttgctaagtttagaacagatatacgaatcaaacaaattttcctatttaaaaaaacaagaaaagtattatttttttataagatttattgatcttagttttccatctctcactttttttacaatataaaagcggattttttaaattattattttacatttttaacctcaagccaaaccttatttttctctaaaagtttttaaagtctctacaatttttaatttctttttctcttgggtgcgctaacaaatggcattaaaattgcttctccgtcgaaatcgcccagcattcaactcgtcctcaaattggcactgtttcggcccatttcgaagcgctggtggacaaacattttgatgactggacgaattttttttgtaatttcggcaagttttttttgtttttttctgttcttcttttttgtttttgggttatggtcccaaaagccttaacagccccaaattttcaaaataaaataaaaatttttccaaattcaagaaaatttatttgtaaaagtgaatagttttttatgtgttttttgaaggattttatgcgtaaaatatttaatggcctccaagtaggcaagttttttttgtttttgttttttttgtatgtaaaaatgagaatgtttcaactttttaaattatttttttaggattttttttcaaaaaaacgaacttcaattttcagaatatcaaagtggtggacattctcccctttttgaccgtccatatcataagagaacatttttttcttaaattaaaaaaactttttttggaattttacatttttaatttaattttttggccctttttatttcattaa

SEQ ID NO: 32829 - DNA, 418 bp, Heterodera glycines
  unsure (1)..(418): unsure at all n locations
ttaaattttntggtccgtataaaattcatattaaggattcgtttttttcggcataaaaaatcgtgaaatagacacctaaaaaggcataaataggtgccaagcactaagcacaaaaagtccaaaataggcattataaaattgatcctagatgccagaaactaagctaaaaactttttttttttttttggggtctattgcactttatgagtgagtccaaatgtattttatgagtccaatcaattgacaatcccgggtttttatacaataactttgctcatgttcgaacaaatcctatcggtttggtatcattcaaaaacattaggcctgaataatggaataatacgaaaatacaagagaattctaaattttaaagaaaggttcaaacgaaaataagcaacccataattaaataatcaaat

SEQ ID NO: 32830 - DNA, 1306 bp, Heterodera glycines
gcttgatgcctgaggtcccttggggcaaaacaggaatgtaaataagtgcttttcgtgggagacaatcaaaaaatattttaaaaaaattaaagttggtgtcggattttccaatgtcggattttccaatgtcggattttcctagagcctaaattttcgatggttgttgtttgtttacttggtgttgtggtaactatgaatttgattgatgcttggattatgaatcaatagttaattaattaattaattagtgattaattgggcctacccaaattgtaccacacgtccgtctcgccgcacagagtgcgcatttcgatgattgtctggccaagaaagtcgtccgacgattcacggctcagctttcgcctcagtttgctgctgctcttcagcaacagatcgttgtcctcgtcccacacgcgcactttgatccgatcagtgatgttgtcacattcgctgcagtaatttttgatcagagtggcataaatgcggaaaatggtatttatttatttattattttatttacatattttgggtttttgcacatatttcgtacatatttggctatttttcttacatatttatgacatattttgaccactttttgtacatacctatttttgttgacaaatttttaaataagtttttgtatttacgatttttttattgaaaaattttccatgaaatacaaatttttatttttaaaataataataatatttaattatttcatttttaacgaaattcttaaaacaaataatttattttttaaataataatttaatatttaactcattcatttttaacgacgaaattcttaaaacaaataaaataataaaaataatttttaaaaaggcgcaaaaatttggacaaaatttaagacaattttgaatattaatgctccactcacaatgtgaactgctcgttccacaccggcaggtggttcaactcctgctgctgctggtgaatggtgcgcgtccgcttgagcgctttgcccacctgtgccgtcacgtacggcacaccagtgcccgttttgtctttggcgctcagccctttggcacaaatcactgcaaattaattatgtttctatttaaattattatctaatttattgcgggaccagactccgcgggatcaatcccacaatttcaacaaaaaaaaaaatgcgggaatgcgcgaaatgggaatcccgcaaattccccgcgcgggctcccccgtcccgcgcctgcgtgccacctgtcagctgaattttggcactccattttgaactgccctccaaaattgagttttttacgacacgaagagcctgaaaaa

SEQ ID NO: 32831 - DNA, 906 bp, Heterodera glycines
aaaaatagatgaggcccacactcaattaaccaaatagggatggggaattgtatcccaaatccgaaaccaattcaaacagtttacttttacaattataagtccgaacagtaaataatttaacagcagaaaactaaaccaaagaaaaacataaaacaactaacgactgaactaataggagtgaaaatggtgaagggtcaacagcagaaaacaatcgataatacagaaacaaaaatggcgggaaatacaatttaaaagcaaacgcacaaaaaatgagaaagaaaaacaattaaattaaattaagtcaaatgagaaataaatatttatctatattatcacatcctcgtcctttgaaaagcgatgtccacagagcttggcgaatcgggaaatacattcggctacatgaaaggcgatggtgaggtgtagatcaacggagatcagctccaaaactaggtcgatcggaaatgaccgcacaaacgaacggcgatacggcagttgctggtgaacatgccgagccccacgaaaccccggccgattgaactgtccacggcctctttcagctctgcttatccctccatttttccccacttcaattttcttttcggtcccaactcctcgttttcgtcctccttgggtatccatttgatttatgacatcacccaggccctcaaaccagtaggcccttttccttcattttgccgtcgttgaacacatggtcggtgttgaatccggaatcatagcgccacagttccagcactgatcgtctcgccggcgttgtcgtcacaattttacattgccttgcgctgttcccaaatgttctttcattcgtgtgatcagctcttcatattcgaccattttctctttgatgaaaggaggcggaagccaaaacacaggtacatggctgaagcg

SEQ ID NO: 32832 - DNA, 915 bp, Heterodera glycines
tttggggctgggggcctcgcgctttcttccatctctcctgcgtttgagtttaccacctaaaatccccagcattaaatcaatccaaagataaacgatgcttttctgtttgaaacctgcgtggaaccgaagccaggcccgtggtgtccgatggcacctccggttgtcgtgctgtttacttgctgtccactcctcaacagcccgtccgagttacgcggtttcgggactgatgcacgttttgcgtaatcggtcctcgtctttcgcagttcgcctccttccacgccaacggcggtgtgaatggaaccacttggggttgtctgagataaccacgagaataaaggaggacaacggaaacgaaccgcctgattgagcttatgggtccagtcaaactcataatcataagtgtgaccagtcctttcaagcacagttttgaaaagaccataacaatattcatagtcaggggtttcaaaaaaatcgagtcgtcgagcataacgcaaatattgagcaaattcatctgcagaaacaaatttatcggtttagaatgtgcacacgaaccggggaatccctcgcaaagcacttcgatcggagttgcgcgcttcgtgtcaccgattttctgatacctttctttgagtgtgtccgctttcaagccctgccaaggcaaggagccacgtagaaagtacataaacatgtgtccgagcgcttccaagtcatctcgacgactctgttcctttcccagatgcgtgtttatcgacatgtaccgggctgtcccagtcaacgacttatgttctcggtaggcaatatgtttacctgtgaaatgacttacaaataataacctaataacaccggcaatcctctaaattattggtcccgaaaagttttttctttatattttttcctgttataacacgtctctagggg

SEQ ID NO: 32833 - DNA, 984 bp, Heterodera glycines
  unsure (1)..(984): unsure at all n locations
ctaaaggtaggatttttntgggaaaaaagcgagacctcacaattgctaaaaatcgaaatcagggataaataatgttttttagtttttgatagggggacgaggtttttcaaaaaacaaaaactaggcagtttttataagaaattttttttggatagatttttgaaaagatttattgttaatcatttttccatcctaataaggttttgaaaaaatcgctagaaaatttttgatattttaataaaaaaactaatatttttgaaaacttctgtttggtaacttttcctttctctgcaggtgatgtgcgaacagtcgctctgtttgtctctgtccaacgaaaacgcgtgcgaaacgctcattttggccgacctgcactcggcggaacacctgaaaacgcaggctgttgagttcatcaacttgcacgccaacgaggttttggggaattggggcaaaattcggcgcatttatcgtcgtgggaacatttatagagaataatgacattacggcgatgaaaataggtgccgttgggaagaaattttgaatttattggaacatttcctcgcttttcgtcataattcaattcccccctctcccaggtgatggagtcggacgggtggaagattctggtcaaggagcacccgccgttgctcgagcaggtgttcaaggcgttggccacccagcagacgccgcccatcattctgaaccaaccgccccggaaaaggccgcgacaattctgagacgttgaacgaactgccagcaaaacacgacaccaacacaccccaaataatgtcatcgacggaacggacggattcatggaggcgaacgatttgcacacatttggacagacaaaacaaaaagacactgaatgagttgttgtgatatgtcatacaaacaaatatatatattatacatataatgtattctctccctctctctccgctgtttngtcgcccttttatacanttgtaaaacgcgtggtttcttccc

SEQ ID NO: 32834 - DNA, 957 bp, Heterodera glycines
  unsure (1)..(957): unsure at all n locations
ggatggattcggatccattctcactttgtgcaatacttctgcgtttgtcatgcctggtttgtgttaggaaaactacggtatcataattggaggcgaaaattgcccacccgggtacggtatcctgccaaaagtgaccaattcggtgagcagaatgccaaaggactaaacgtcagatctgacagtgaatttgttgtaattagccgcctcaggtgtcgtccactgaatggttaaagtaaaaagtgagggaaagggcgccgactttaatcggaaaacgggcgcccaactcgcgcttcgtattcgttctcgcggataagccgagcaagtccgaagtccgcaattttgaccatcgaagggtgagagatgagaatgtttcgcacagcgagatcacggtgaatgaaatttttctcctgcgaacaattggaaatttaaacactttcgctttggcacctccaaataacgcatgccagaggcaatttgcacggcgacgtcgaccaactgaaaaagaaaagtgaaaagggcgcccgtcgcttcttcaacctgcgcgacgttacacactcggccatggccttgcagaaagtgcagcagattctctgaatgcgaaagatagctatgtttacgatgtttgtggctttggatttggataccattgggaattggagcggtctatagcccgggtctatccccccccccctcccccctaattgcttaccctgcattaattccgtcgctattaaaaatggctcttcccgagtgcacaccgcgtaaagctgaagcagttttgggtgtcgcagacgtttcatcagttgagcctaaaagcgaccttttgctgatataaaagaatttgctgngcattgcctctgncagaaaatccgcgacacaaagcggtgggagccgggcttcagcttaaaatgggagagggagcgcattgntggcattcgattgcctttggcacctttt

SEQ ID NO: 32835 - DNA, 948 bp, Heterodera glycines
  unsure (1)..(948): unsure at all n locations
agagtcttttataataanagacanaagaataattggggaaaaatntgaaaaaatattcaaaggattttaaaaataaatcattgggccgaaaaaacgaactctttaaacgaactttntggcaatattggagcaaatcaaagcggactatgggcatgctaacagctgcaaattaagcggcagccaaattaatttgacaaatttgggaaaagaaatttccatttttggcaaaattttatacgaaacattgaaaatgcattcgaacaatgtgaaatatgaggaaattaagcaattgatgacatttccattaacagtggccgaacatttcatgaagcggcttagcaaatttgtacaaaggtattttacttatattagccattggcttaactttcccaaaagtcgggaatttaattatgataatttttattcaaaattatataaaataataatttagatttgactcttataaaatttagagtccaccaagtgttagtgtgagttgcaattattttctaagaaattttcatatttggatgccctagattttggagcaaagcattaattaaaaaaggaccaaattttaaatatttttcccagcgacgtctgtcgtaaatgtcagattcttccgatgaattttttattatttaagtctaaggccaagaaattttttaaatttatatcataattttgaaatattcaagaaaattgtaggcggatactaatagactaccaacactagattttttgggtgaaattaattttaaatttaaaatcattttaataatttaaattcgagtaattggccaatcacattcagccggtacaggtaattaccgatcagtaccgggcattagtcaatcttttactanattttttgaaatttctctcncataacaattntgttaatattttaagaaatttaacaaaagacattctaattgatgacgattt

SEQ ID NO: 32836 - DNA, 73 bp, Heterodera glycines
aattggccatcgaggcccgcaccagccgcggcgcaaggcccagggcctcgacggcgctggcttcatcggtggc

SEQ ID NO: 32837 - DNA, 959 bp, Heterodera glycines
  unsure (1)..(959): unsure at all n locations
attctttaaatcatgcacatcatcctttntgggttaaaaatctaaacaagtgaatttgcggttaactcttaaaccattttcgatatgacctaatccaagaaatcttcagatgaatcgtccaaaggatttctagagcccgtaagacgcaatgcgctcgttttatgctggaaattgactgcagaagacgcctttttagtggtttgttcggatgatcagccccgattgcgcgaacgcatccaatgccgcaaggggtaagaaacagcagccaatttggaaaaacgcattggggggggggggcgaggtgcacttcatcccccaccattcccatagatcaatccctcccccgaaatttaaaaaaaagttcaagaaaacattattatttttttcttgtaattttctataaaaatttcagtggaaaataatactgggggtggacaagctgctcctgggacctttgcctctttattgtattacttttcaaaatgttttatgtgctccgagatttccaaataagcgctaaaataaactctaaaaatttccaactgttacagtttttttccaacgacgcacaaagtttctgtcgggaagttttattccattgaattttcacgttactccacgcccaattcgccgcatgtgcgcatttttgtgctcaaagaatcgccctctccgctggaatctcgactggtcaatggcgagttgcaggttctttctttcatttttgaatatgtttttaaaatattttaattaattaattttagcttcgtatttttatttggcgtgccaaagatcactattggagtgaattttgtgaggtcaaccaaatgcccaaaggctctccggacgtttgtttggcgtggtgtaaattgaatgaaaaactccaaaacaagctgaacatcctcgtatttgttcaactaattgacgacttgcttaaggcaagttaacaaaaccatgaaaaa

SEQ ID NO: 32838 - DNA, 989 bp, Heterodera glycines
  unsure (1)..(989): unsure at all n locations
ttagtagganattagtggagcaaatcacaacatagcattggtggcagcgaataatgcttaaatttctaaaatagaataaaaattcaaatccgttctttcttttattttatttttccccggaaatggagcttgctgttaaaacatatttttaatcaaaaacatattaagcatggacttaatgagcacggtgttttaaaaaataaccatatttcaataatgatggcatgttttttaggtagttttattgtaatttctctggaataaaaattgcgatttatcgattattgcataaaccgatagaggcgatttttaaaagattcaaatgaaatgaattatttcgaattaaaagttgacgccaagatttagttttaacgtgtgttggtttatcactatgatgcaatttgctatgccttttaaagactgaaatagcagtgaataaatattgtggatgaaacaattcgtgttgtaaatgcaaaaacaacaaaataataaaattctattgtctgtattagtaggaattagtggagcaaatcacaacatagcattggtggcagcgaataatgcttaaatttctaaaatagaataaaaattcaaatccgttctttcttttattttatttttccccggaaatggagcttgctgttaaaacatatttttaatcaaaaacatattaagcatggacttaatgagcacggtgttttaaaaaataaccatattttaataatgatggcatgttttttaggtagttttattgtaatttctctggaataaaaattgcgatttatcgattattgcataaaccgatagaggcgatttttaaaagattcaaatgaaatgaattatttcgaattaaaatttgacgccaagatttagtttttaacgtgtgttggtttatcactatgatgcaatttgctatgccttttaaagactgaatagcagtgaataaatattgtggatgaaacaattcgtgttgtaaatgcaaaaacaac

SEQ ID NO: 32839 - DNA, 972 bp, Heterodera glycines
  unsure (1)..(972): unsure at all n locations
tgcgacggttttgtcgagtttcactttgtgaaggcgcgccattgcgacgattcgctggcattcgcctgtcgcgtgcgttcgctgtttctgcagtcgcttgagcataaattgcgcagtgacgactacggcgactgtcgcgagttggagcggctgatcatcaaattcgcacgcctccaacatcccttcaggcattgttttggatcattatgaatgatgaagagagagagagagtgagggacaaagagatggagagaatggagaaagagcaaggaacaaagacagagagatggagagagaacgagggacagacagaaagatggagagagagtaggagaatcgagaaaaagagagcgagggaaaaatatataaagcaagagaatggtgagagagcgagggacagagagagagaggagagatagagagagagtaacaaaaatatttctcacccttttaacacagtatccgaagacgaatagacccacccaggagcatggagtacggtgtgttcaccgccgatggaatgccgcacccgctctccgcctccgttgtgccgaccgccgatggccatggcattttggacgctgtggcggaagacgaagaagtaaacaattggaattgcttggacgcaacggagggagaatgctaattataatccaatttaaaaaggacgcggaattggacgaacaattggacaggcgaaaggcggaggaggaggagcagcagcgggcgaagggacgcgagtatttttgcgacatttgcggacggacactttggtttgcggacaatgtgcaggcgatcaaacacaaaaagggacaccagcaaaaggaggaggagaagccgaagcaggacgaagacggagaaagaacagatggatgaccnatagacacaccgtttcaaaaaacgagagatgaaccataaatagggagtgcacagaanaaacattcttattttgcgtactatntctttgtctct

SEQ ID NO: 32840 - DNA, 1712 bp, Heterodera glycines
  unsure (1)..(1712): unsure at all n locations
aattggttgtgcggcgcaaatgtcgtcgcacagttttcaatgtcagccaattcagccgccgctgcattcgcaccgaaaatggcgcacncatctgatgtcacgccacaaatatctgatcgtcattggcactgtcctcttcgtggacatccttttcctcttcccttattccggcatccaaatggtcgctttgcttcacctcaacaatttgcttgccacttcccaaatgacaacactaattcggtggtgtcttcaggtaatgggccttcctttgctcctattagtactaattacttgcccgattagattctgatcggagttcactccgtttgtcagcctctttgttatttccgaatgacagtgagtaaagaaattgcacatgccaattgccttgtctgtaggaatttcgccgtcttgcctgttgtctgggccaaaagcgtcgttttgggggcagcggaagcagcgcgggcggatccgtttttggtggggcgacggccggcacaatcagtcgaacgacaaaagggaacagaaacgtcggcatcgacgagccccagccgaccacgaagagaagcatcgtattgaggacagtgttctcccagggaatggcccggacagaagaaatagcgacgatgggagaacgaacagagcgaagggaagagagcgccgattgggtaagagagagagagagagaaatgccaaaccaaacgatggcaaaggcaaagaagagcttcagacaatcccaaccgtggatgggccgcaaatgttgctgatcacccaaagacggagatggacgcgcaatctgagcttattgtgcaaagaagagggcgaggaattggaaatgtttttggccagagaatatcggaaaagaacgacagaaaaatacggtaggaaagagagtgagggggaagagagcggaagtgaggaaaagcaaacggttgcgggagagggagaacgctgctggatgagaggaggagggtcgttgagagaagggagagtacgacgaaagaaatgggaaagaacggaggaagaggagagaccgggaaaggcgacgagaaagtgaatgagaaaaagacggggatntaaagagcaagggaagtggagagagaggaaaacgggagtttctacaaagagtcggacgccgaccgttgtcaaaatatcaaaaacattttaaaaaagtgatggtttgacgtttgttgtccaaactctagcagataaaatctaagactccacctcgaaacgcttccgaatgtacggaaaaagcactgcaaagaaataatttaattgaaacccatgaaaaaacaagaacatattttctgacaaatgaaatgtattattatttcttgataaataaagactcagtctcttcagtaccaagtttttgttaggctgtaacttttcgtacacaagcaactcgtacatagggttaagctaaaaagttcgaaaatctgatttctgatgtacttttggccataagtttgttcaaaatatgaaattttttcgcaatttttcagactaatagagacacttagggctttcgaatgataccaagaaagttggatttggttacaatgaaaaaagttataattcaaactcggcggttctgttccgctttatgcgtgcgtcccatggccttttatgcgtcccaaagaacttttatgcgtcccatggccttttaagcgtcccatggccttttttttatgcgtccccaaagaact

SEQ ID NO: 32841 - DNA, 177 bp, Heterodera glycines
agtccgtttgcgcaaacacttttgcatttattcctacacggtcgaaattatatatatatatttttttttttgccgtaaaaccggtatagtttaaaagattttctttggcttttacttttggattttatttttgttatgatgtcatatgaatttatgccccggagggcgtccaaaaat

SEQ ID NO: 32842 - DNA, 994 bp, Heterodera glycines
  unsure (1)..(994): unsure at all n locations
atattgccaagcctgacggattgttaggctggctttctcgcaatatggacaactcagaaaatcatgacaattcgtttgaccaatcaaattgtcctagccagaaaaatcaaactaattattccgctgatacgtcaacagatttattaatgttaccaaatacagtaaatcattatattcattcaaatccaatgatgactttaagccaacaaaattactataatcaggaaaacccatcgacgtcaaccaatcaatcaacttatcctgatcacgcaaacacaatggctttgaacaatcaatcgatttatgctgatcaggcaaacacatatgcattgaacaatcactcaactttttctgatcaaacaaactcactggcattgaacaatcaatcaaattatcctgatcaggcaaactcattggcattgaacaatcaatcaaattatcctgatcaggcaaactcattgacattgaacaatcaatcaaattatcctgatcaggcaaactcattggcattgaacaatcaatcaaattatcctgatcaggcaaacccattggcattgggtaatcaatctacttatcctgatcgctcactatttatggcgaaccaaaacaatgaagttaacggtcttattccaacaattgattctgatcaagctgatcaaactattttgcaatcaaataaaggctccacgggacaacaactgcagcaaaatgtgcaagttcagcagggaaatcttccgacaatgctaagcatgacaacgccagtgcctgaacaaccattcgatgggacgcattcaatggtttctcaatatcgaatatttttgtacccattctttttgngggtttttgttttttatttaattattanaaaaacataaaaaccaagaaaataattcagaaccttaacatcaatcaataactgtgnngcaanagcgncnnattgagaacccagcacatcatcatcatcangtgacaatctaaatggntcangaaatga

SEQ ID NO: 32843 - DNA, 918 bp, Heterodera glycines
tctactcttgatgggttctttgaagaaatattcgatggttctcaaccacgccggccttcgccgtgaattggaacagaaaaaaacgcaccctcgggcgcagtcgcgtggcgccgccaacccgaaacagcaacaacaggaggagggacgaatccgagtgcaactcaaaggggacgacggagaaaatcggtcgggggacggggaaggaatccgacgacaaaaatatttttgaaaatcggaggaaatagaaaaatttacgaatggcaaacaaaaagaaaatcgtttttgtaactttgaccccattattcagtgggcgaaggggcggcacagccaaagttcatgacccgacaacaaatgatggaatacgctgcggaaatggtgcccaaactgaagacacggcagcagcaaacccaagtcgaacagaacgacgcgacggggaagcagaagaagcggaagtgaacgaacggacggacattcaaccaatgacatcaaatgtacaattaatacaattgttgtttgttatatagaactctcgttttctttttgatgttgtatagaattttggttagaaattaataacaaattcagacatttttcaccgcgttcgaaatggttcagtttttctctattaacccagacaaagaaatagcactcaaaatgagagatattggcgctaggtggaaagtggccgattttgaatttgcaaaatttttataacagtcataaaaatttattggtaatagtaccaccgtggtaaccccccgatttcgaaaaacaaaatttttgaaatattttttcgagataagattatattaggggttttaagggtcggagaatccgaatctgatattaatttcggcctatgtcgaaccccgaacccggattcgagcaaaaagtctaacaatccaattttccaatttc

SEQ ID NO: 32844 - DNA, 905 bp, Heterodera glycines
tatgtgtataaaatttatcaaaaaaagagatagccatttttcttgggataacctctaaatataaaaatcctctgtgaaataaaatggcgattgtgcacagccctccgtctcatacgcaagcgcttttgtgaggtataaaatttctcaaaaaaagagatagccatttttctgggatagagtataaatttaaaaattccctcaaaaataaaaggtctattgcgcaccgccctccctatcatgctcgagagcatttgtatgtgtataaaatttatcaaaaaaagagatagccatttttctgggatagagtataaatttaaaaattccctcaaaaataaaaggtctattgcgcaccgccctccctatcatgctcgagagcatttgtatgtgtataaaatttatcaaaaaaagagatagccatttttctgggataacctctaaatataaaaatcctctgtgaaataaaatggcgattgtgcacagccctccgtctcatacgcaagcgcttttgtgaggtataaaatttctcaaaaaaagagatagccatttttctgggatagagtataaatttaaaaattccctcaaaaataaaaggtaaattgcgcaccgccctccctatcatgctcgagagcatttgtatgtgtataaaatttatcaaaaaaagagatagccatttttctgggatagagtataaatttaaaaattccctcaaaaataaaaggtctattgcgcaccgccctccctatcatgctcgagagcatttgtatgtgtataaaatttatcaaaaaaagagatagccatttttctgggataacctctaaatataaaaatcctctgtgaaataaaatggcgattgtgcacagccctccgtctcatacgcaagcgcttttgtgaggtataaaatttct

SEQ ID NO: 32845 - DNA, 937 bp, Heterodera glycines
catcaaatcaaaaaaaaaattaatcggaaaaatttgccaattagcaaaaaaaaaatgaagttggcgaaattccaaataaagcttcgtataccgcggtgggaaagtttcggttctagcacaaatgccaatatttccttccatctgtggcataaaattaatatacgatcatcaagtgctgatgctaattgtatgccaaatttggcaaaaatttcgttaaggttcagaaatggaatgccatttttccgctatttatggcctattttatgtccatgaataggccagcgcctattgaaccttaacataattattggaaaaaataattaatgctaattgagcgtcaatcatttaaagcttttaaatggtaatgtgagaatgcttagtttgttggttggatatataaaaattgatgaaattttcgtaaaaaaatttagaaaaattttgtatagagaattaaaagttttggaatggtgccaaaaatgcttttggctacgtttgaaatgaaaaatgtattaatttgaatgacggaaaatggaaaaaaaagaagaattaatgtatgatctttaagctatagttcctcaatgcttgcgagaatattttaatttaactaagtcatcaatttttatttgtgaaaattcttttttctttttttaaaatcattttgccagggggaagagggaataaaatttggacaattaaaattaattaatttgtcgggaccctaaataagtcattttgaaaattttaaaaaattaactttttgaaaccacttttgccaattcaattatcgcccttttcaacacaaaataatggcactaatggggcacctttccgcaaaaccaatttaagtggcaaaaatgatgaagctgtgaggggaaagaaggaacaacggcatggcacaattcacaacacatcaagcgtcatcaagaaaacggagctg

SEQ ID NO: 32846 - DNA, 155 bp, Heterodera glycines
tcatggaatcacgcacctcatggaattccatgcacttcatggattcatgcacgttagcacagctagacacctttatgtggcaattgggtaatacttactttaaaagatagaataaaggaaaaactacctaaaatttcccataacatttttttttt

SEQ ID NO: 32847 - DNA, 754 bp, Heterodera glycines
aatcgattatatatgaaattagtaaatttactcttttatttattttttgttcaatctgtttacacattttcgtattcttaatcattttcaaacttaaaaaatcccaatactattgagaatgtaaaagcagggctttgaatgtgaagtttaagatacatctagcaaaaaattgcgatacatatattatattattataaaaaatagaaaagattagttgaaaatctgttaaaaaataaaaatattaatttcagataatgcaataagtatcttaacaaatgaaaaatgaaatagatgaaatattaaataaaatacataatatttagcaagaaacagggtttcctaaaattagataataaacgaaaaaataataattttttcttaaaaataataaatgtttatttacaatacatataatttgatataaaaaatattgaataaatgcaaaaccacagcagtctcaaaaatcatgaccacaacatacaagtaaattgaaaaatgtcaatattacaaataaaatggttttgtcataacaaaatgatgaaattaacgaattaattaaattcaaaattaataaacgacacaaaattaatttagtcactcgaacgccaaatctgttgaataattaataatttaaaaagtctgaacaaagatgtcatcaattcaaaaatattagtttagctataacaaaatatttaagaaattaatataatataaaattaaacaaaagggtaattcgagatttaattttttaatg

SEQ ID NO: 32848 - DNA, 249 bp, Heterodera glycines
cagtgagccgagatcgcgccactgcactccagcctgggcaaaggagccagactccgtggcaaaaaaaaaaaaaaaaaaaaaaagagattctattcacaatagcaacaaaaccctgagaatatatctagcaaagtatacacaggcctttcatgaagagtattgccatagcctgaatgtgtctcccaaaattcatgtattaaaacttaattcccaagatgatagtactaagaagtggggcctttaagaagt

SEQ ID NO: 32849 - DNA, 288 bp, Heterodera glycines
  unsure (1)..(288): unsure at all n locations
tataataacgcntgcggacatctacatttttgaattgacttttattggtaattactctttctttttctccatattgaccatcatactcatactccccccacccttttcttcttccgccacccacctcccccgctacgcgccgctcccctccccttcgtgctcctctcttgatagtttaaactgaaggcgggaaacgacaatctgatccccatcaagctagctgttgcgggtcctgctcgagcggccgcccggggatcgacccccgatctagtaacatagatgacaccg

SEQ ID NO: 32850 - DNA, 884 bp, Heterodera glycines
taatgaggaaggaagaaagaataattagcagcaaatcttctacggtgaccgaattcgaccaaattggacacaggcgcaataaaaggacgaacaaagggaggaggaggagaagggcacggaggaagaacagaagagacactcggcacgactgatgacagtgctttcctccgaccaattcggcacgttggagatgaaccggcgaaggttggagacggagcagagacagttgcgcgagatgggagtgatttgacggaaatgggggaaagagtgacggacggacggacgaacaaacaaaactttgctctttatttccataagttatatgaattaaaagacgtataatagaacactcaatgcattgcatttcttcattgtccatgaattcctctgctgatcgctgttttcacattccgttggtctgatcagtggtcactttcattggttcctctctgatcactcccaccactccgcatgcgatccgttttcccgcattgcccgtcttcccactctcctcattgccccccttgcccatgtcgtccgccttctcatgtacgaccaatgccctcccgaccacactgttgacgccgttcagtgccaccaaatagtctttaatgtccaccacggccaccccattctcctgaacattatatttattggcatttcatcccctttcccaatgaatggctctttctcacagcggctttcacattgcccaggtcgcccacgtgtctttcctccgattctttgctcccgtggcgttttccgtgcggattgaaatgcgcacccgccgctttgcagctgaaaaagcaaacaaaagcggagaccaatgccaacaaaggagggacaaaacgaacgcctgggaaatgtcgccgaattggtgaaag

SEQ ID NO: 32851 - DNA, 871 bp, Heterodera glycines
aaaaattatactgatctgcttaggttataaattagtgcgacattttcgggtcattacttgcggacgaaactattctaagtaaaaaacaattgaaaatggaatttacgaatttgttttaaaattttcaaaattatattttttcttatatacagagatgtatatatatatatacatattttattttctgagttaaatcaaatcaaattcaaaaataatttgatcaaaactccttgaagcaaaaaaaaacaaaaatgaaatgaaataaaattacgatcctttgaattttcttcaattttaagcaattaattttaaaatatttgttgtttttcatgagagagttgaaagaattttttgttgcacagcacactttttagctttttgtgaagtgtgaaatgccgatgtgctattcgagaccgagttagggtttttagtggtcttaaatgcgcatttttaaaacagatgtaataactagagctcgacctggacctgctggatccaggcctggatttttcctggaaccaggtccagaatgagtttcaaaaaatccaggtctcgaggaacctggatttttcctggacctggatttttatccaggtccagcatggaatccatgtcacagtctttttcaaaatgtcgaactctagtcataactttcgtatttcattagttttctaaataagcgaaattttttattccattaattatgcttttatgaatataaatccacaatttcttttgttttagctgaatcgcaccaatcatcagcagaacagcatcagcttcaaaccgatttcttggaccagcagctccaaaacggcgcatttttggccgattttgccggactttggctgctcgggctggacatggtgcc

SEQ ID NO: 32852 - DNA, 818 bp, Heterodera glycines
ttgaccatttgatttgcaatgccaaatacgaccctttaattatctcccccatttcgctgattggactcggaactctctccccctcccctccccgccggctaaggtgtgcgggtcggacaagcgcacttatcgtaatgcgtgccacttggagcgtcgcaatgcgacgggcactctgagctcgactcatcgtcgatgggcgtccgcaactgcgactgatcccgcgggggaaagcgacgggtgggccccgctgagagtgctttacccgggcgaatgttgccccgtcgtggactgcccggccgaatatgcgcccgtctgcgacagcgaagggcgcactcatttggtaatgaccggcgggagggggcggcggggggggggggtaattattaaactattagccaataaaaatggcagaatctgtgcgagttcggctaccaacgatgtttggcggagcgaatgcgcgcccgaaatatgaccatcgccttttacgggctttgccccgactcccattgcccgaggggcccatgccccggcatttttgagccgatatgtgcgacaaacggtgccaaaaagtgcactaagaaatcatcagaaagaaacactttttgtcgcaggaaaaacgtatcagagtctctgcgaattgaacaaaacgatttgtgtgttgaaaagcggcggagagacagcgcggacaaacggcgtggaaatggtcgattcagtccccagcgggggctcacttggcctggattatatcggagagagagggcatttgatcagcacgggagacaatgacagatgctaatttaacagagacattttttatt

SEQ ID NO: 32853 - DNA, 1010 bp, Heterodera glycines
  unsure (1)..(1010): unsure at all n locations
aaaccactaatgttttttcaaaagcatgacacacattattgtctcacactaaagtcacaaacaaaccactaatgttttttcaaaagcatgacacacattagtgtctcacactaaagtcacagaacaaaccactaatgttttttcaaaagcatgacacacattagtgtctcacactaaagtcacaaacaaaccactaatgttttttcaaaagcatgacacacattagtgtctcacactaaagtcacagaacaaaccactaatgttttttcaaaagcatgacacacattagtgtctcacactaaagtcacagaacaaaccactaatgttttttcaaaagcatgacacacattagtgtctcataaagtcacagaacaaaccactaatgttttttcaaaagcatgacacacattagtgtctcacactaaagtcacagaacaaaccactaatgttttttcaaaagcatgacacacattagtgtctcacactaaagtcacaaacaaaccactaatgttttttcaaaagcatgacacacattagtgtctcacactaaagtcacagaacaaaccactaatgttttttcaaaagcatgacacacattagtgtctcacactaaagtcacagaacaaaccactaatgttttttcaaaagcatgacacacattagtgtctcataaagtcacagaacaaaccactaatgttttttcaaaagcatgacacacattagtgtctcacactaaagtcacagaacaaaccactaatgttttttcaaaagcatgacacacattagtgtctcacactaaagtcacaaacaaaccactaatgttttttcaaaagcatgacacacattagtgtctcacactanagtcacagaacaaaccactaatgttttttcaaagcatgacacacattagtgtctcacactanagtcacagaacaaaccactaaatgtttttcaaaagcatgacacacattagtgtctcataaagtcacagaacaaaccactaatgtttt

SEQ ID NO: 32854 - DNA, 249 bp, Heterodera glycines
tttttaaattttttttatttaaaaaaatgtattcaaaatttcaaatatatataattatttgcaactgtaatcaatgaataattgtttgccttaatttaaaattattttcatataaaaactttgcacttttttgcccttaaaaatcatatccctaattataaatgaaagctgccctaaataattaatgcgtttttgcccaaattgggctcaaaagggggaacgcaattatggaggcgtaaatagggaaat

SEQ ID NO: 32855 - DNA, 542 bp, Heterodera glycines
ctgctgcacggttcggctactccttcattggcggcctcccaggccgctctcggtcacctcccacaacacggccaagctatttagttcgggagcgtcggcaaatggcggactgaaaacgaattgtaaacagagaataaaactaaaagcgccggtcaatgaaccggactaaaccttcgcgcgagcatttcccagagacaaattccaagagagaaaacgtcacaccgaaagtcgtaactaagagaaaaagcggcattcctattaggcacaaaagagtccgctttgttttgcctctgatcagtctccataaatattgtaatacctctcccctctgaacacttcgggtgccatccatgcggccgtgccacaagtgctcgccatgtccgtccgatgcttagcgattgtgccgaagtcgcaaagtttcaggacgacataatcaagagacagcaacatactgaaaataagaggaaaagaaaaaaagagccaatgatttgcaaatgccattcatttctatgaaaatgaacaaaattttgaaatgggtgacc

SEQ ID NO: 32856 - DNA, 1010 bp, Heterodera glycines
  unsure (1)..(1010): unsure at all n locations
ttatggttttatgaaaattgtatgccaattccattttccgttcgccaatccgtcaacatccgccgcaaaattgttggtgtctttggagccgttgaatcgcaaagttccgcctcagtttcggcagcgccattttacgcccaattatgcagaaaatgccagtggggacgactcgtttcgatctaaggtatgggactcgaaaattgaatgcaaatacaaataagaattttattttattaaaaaaatatatttaatcggagggggggggcgggtgcgttccccacaaaaaaattttttttttttttttggtacttttccgttatggtataccccccgaaacttttttgtttacatatttttttcaacacctattttatgtgctgaaaacaaatccggcatttttttttacaagaaaaacgtgaaaaatgtgaacaattttttttcatttttacattttccacgtaaaatttcacgtgtttttttttgttgtaaatgacgtaggaccaaaaaaacaaccgagattttttttaagtgaaactgacactcgagcacctaaatttaagatgtttttacacggtataccccaaaacacagccgtcgaaacacagccgggaacaaatttttaaaaaattttcaaacagaattttttaaagaaaaaaaaatcttagaaaaattttttcttagaaacttcgatgacatttttttttttattttcagcgatttttttgaattttttttttgaaaaacttgtaattcatcagtaaattttaaaaaatcgccagaaaattttcaaaaattgttttcatcgaattttctaagcaaaattttgcttatacttttttcttgaaaaaattggctgtgttatgtcttgactgtgtttctgcggctgggttttgtcctgttccggtttttacagcaattaaagatattactttaattnnttgcagtattacataacgccagaattgggttntnattttncaaaaacttgataagaaaaaaactcatgaaat

SEQ ID NO: 32857 - DNA, 815 bp, Heterodera glycines
gtaagcagatttcctttaaaagaatgaccaaatattgagatttttggctaattttttaaggaaaaatagtgacggatcaaaattacttccttatttcaacatagtcccgtcatctcctaacccttttgccatcacttgttctttgtccaatccctttaattgtcagtgggcggtccgttcccgatcactatttaagcttttagcgcccctcacaattgttcatcccctggttcattttattccacctgtctccaactgtgcagacacgaatcgggaggtgttccacactgtcgactgttgttccccctttccccttccgaataaaggatattattcgaattaccgctacacaatgttttggggaatgcattaacaccaaactatcccaaccatatttttatttaatattcatggaggtcccgccgctgtacatttggagacggttatttgttcatcatttttttcaaccaaatattttttgatttgtttgatttggtaagaactcatttttgaacggatgaaaggctgactgatcagtgctcagagaattggaaaaaagaggaaatctggggaaagattggagaatgcccagtagaatgagcgatgagaagaggctcagatttgagagataaaactgatcagagagtgatcggttatctctaaagtcaaaaatgatccgagagggatcaaaaatgaatattttgaaagggaactcgaacatgagcaaattatgctgaaaaagatcagaaaatcatcgagtgattcggcagaaagtgatcagttatctgtaagcaaacgttctgatcagaaaatta

SEQ ID NO: 32858 - DNA, 984 bp, Heterodera glycines
ccctgcaaagttggtgcgcttctgatcagtttctgcaataaaagttaagcctaaactttttggcctgtttaaaaaggaattaaaaatttttaaaaattttattcatctccctttttgatagaaaaagcatcagagtgcctaaactaacatgtaaataaaatttggtgcgtttcagaaccctttctgaaaaaatatttatgaattaattttgcaaaaaataaataaaaacgaaagactcagattttcgaaaattttttttgagccagctagctcggcgctcatttcagtgtaagttagtcctttaccggggagtatccctgcatagtttggtacgcttctgctcaattagcaaaaaatatgagtgatcgaattttcactaaaaaagttaagcctacattttttggcatatttaaaaagcaattaaaaaattttaaaatttaataattttcctgcaccgaaggtactcactcggcctcttcgcggcctcgtggtgggccttcacccccccctcccacgcccttcagagcacgacaaatatttcaacaaaaattttgaaatcatgtttcccactcccttctcccaggggtattattttgtaaagtctttttttccccaataaacttttcaaaccccatttttcgcaccgtgaatgttatttttattgaattctgaaccgttttgagtagattagactagaaaaaattgaaaattttgaaatcatgtttcccactcccttctcccaggggtattattttgtaaagtctttttttcaaaataaacttttcaaaccccttttttcgcaccgtgaatgttatttttattgaattctgaaccgttttgagtagattagactagaaaaaattgaaaattttgaaatcatgtttcccactcccttctcccaggggtattattttgtaaagtctttttttccccaataaaactttttcaaaccccattttttcgcacccgtgaatgttattttta

SEQ ID NO: 32859 - DNA, 952 bp, Heterodera glycines
  unsure (1)..(952): unsure at all n locations
taatatctttcctaaggctggaaaggcagaatttccattgacagtcgatatttacactgagcacccgttgaagcgggtgatgcgaagccatagcaaactgtatttttaaattctggccgcaactctaccaaaaacgtgtttagaccgcagtaactcggctcagagtgaagattaagggacgcaaaagagacgatttaaaagcgattcgaaaattctatcgactaatataataacgatgcagtcgcggcgttgacaactgagatggaaccaaaagttccataatatctttccataaggctggaaaggcagaatttgaatggccagtcgatatttacactgagcacccgttgaagcgggtgatgcgaagccatagcaaactgtatttttaaattctggccgcaattctaccaaaaaacgtgtttagaccgcagtaactcggctcagagtgaagattaagggacgcaaaagagacgatttaaaagcgattcgaaaattctatcgactgatataataacgatgcagtcgcggcgttgacaactgagatggaaccaaaagttccataatatctttccataaggctggaaaggcagaatttgaatggccagtcgatatttacactgagcacccgttgaagcgggtgatgcgaagccatagcaaactgtatttttaaattctggccgcaattctaccaaaaacgtgtttagaccgcagtaactcggctcagagtgaagattaagggacgcaaaagagacgatttaaaagcgattcgaaaattctatcgactgatataataacgatgcagtcgcggcgttgacaactgagatggaaccaaaagttccataatatctttcccataggctgngaaggcagaatttnngatggcagtcgatatttacactgagcacccgnntgagcgggtgatgcgaaagcatagcaaactgtatttttaaat

SEQ ID NO: 32860 - DNA, 914 bp, Heterodera glycines
ttgaagcgggcgcgaagcaccgaggccacgaagtgttcttttgagccccacaaatttagaaatgggcgcgaagcgcccatcttagggtgtaaagcagcctacaaccccttaataacttttcaaaaattcattgctttcattatgttaatacatgttacatgttacatgctcagagaggaaattcatgaactccctccgttttcatgtaacatgtaacatattttgaagcgggtgcgaagcaccgaggccacgaagtgttcttacgagccccacaaatttagaaatgggtgcgaagcgcccatcttaggccgcaaagctgcctacaaccccttaataacttttcaaaaattcattgctttcattatgttaatacatgttacatgttacatgctcagagaggaaattcatgaactccctccgttttcatgtaacatgtaacatattttgaagcgggcgcgaagcaccgaggccacgaagtgttcttacgggccccacaaatttagaaatgggcgtgaatcgcccatcttagggcgtaaagctgcctacaaccccttaataagttttcaaaaattcattgctttcattatgttaatacatgttacatgttacatgctcagagaggaaattcatgaactccctccgttttcatgtaacatgtaacatattttgaagcgggcgcgaagcaccgaggccacgaagtgttcttacgagccccacaaacttagaaatgggcgcgaagcgcccatcttagggcgtaaagctgcctacaaccccttaataacttttcaaaaattcattgctttcattatgttaatacatgttacatgttacatgctcagagaggaaattcatgaactccctccgttttcatgtaacatgtaacatattttgaatcgggcgcgaagcaccgaggc

SEQ ID NO: 32861 - DNA, 931 bp, Heterodera glycines
  unsure (1)..(931): unsure at all n locations
ttgttttattaactcaattattgtacttgggcccccccaccgggcattcccagcagatttctgtgcctgggccggccttcaaatctttcatccgtcccccacaataccgccctttctctccctccaataaatctcccattttctgtgcccccccccccctctcctccacaaatgaaatggcattctctcctctcttcagtgccccgttctctttctcccctcgtcttttttctgcaatctctccctcacaccaaaatcccttcgtttgcccatcaattccccccccccctcccattttctcccatttgtctagggaaatgacgccaatttgtccgccagtgaattaatttccccgaaggaatgaatacaaagaccaaacaaatgataaacagaaaaaagttggaaaaaccctcaagcttaatggttatgtgaagaaagacaatatcatgagaataaaatcaacaaaaggaaagaaaatcccctcacaattccccgaattaatcgtttgtaccattcaattttctcgagttcattttgtttgtttcttctctttccatggtgtcaaaaaagtgccggaagggaacaatgaataacagcttatgatggatggatggatggttttggtttgcctcagatgttttttatttttgacacttccttttctctctccctctctttttttctttctttgaccctctcttttttctatgtttctctcccgccttttgcgcgccaaatgggtttttgaaaagatgtgttgtcggagaaaaataagtggaagttttcgcagcaacaaaaagcacaaacacaaagacattcattcccctttgccctcgggcaaattcggattctgccgaatggatgcaaattgatgacggctcagatggccttcgtccgactgnngaagggatggatgaattgtcgtcgtttt

SEQ ID NO: 32862 - DNA, 1397 bp, Heterodera glycines
gaaactatcggaattccaatagtttttgaatacttttttagggtgcattaggacctccccctcccgcttttttaattttcaaacctagaaaagctattttttaaattttataataaaatattgtttttcaaaaaaaattttttttgaaatttcgaaagtttaaaatttttaatatttcgggggggggggggggcaaactgcatttttttaacccgaggctttgccatttggtttttttttaatttagccgaaccgtcggggttcgtcttggtcgggcacagccgtgccctgctgtcgttgtacgggtaaattttgctgccccggttccggtgcaaattgtgcggttggacagcgaccgaaaagtcggcggacagacttttggccggaatgccggaaaattcgagttccgaaaattcgggcaaatttttgttggcattctgttgctgctgctgctgttggtggtgatgtgatgaggaatcatccgagccaagcgaagactgaaaaaaaaaacaaattacacaaatcaaaagtgatcatacatcagaggctaacaaattgcataaaaaagtgattagaaaaacaaaaaataattttattaaaagtgattagaaaaaaacgaattgcatcaaaagtgatcagaaaaaactaaagattaaatattaaactaattaacatatcaaaatgatagactaagtttgattccgcggtatcattaatgattgatcagaccgctttttgtcttttgtaaaaaaacaaatttaaaattaaatttatcgattacattaaaatgcacaaaaaatgaactcggctgaatcagtgagtaaatgcactgaatcaaaattggcacaaagaattttagtctttttcaacaatggtcactataagaataaggtcagcttaccaccaaaaaaaatcgaatagcttttttaaatttttgttttgttaatgctttttatcagcactactgcgattgtgccgtgccgatcattattcctccatacacacattattgtgcaacaacagatcaaccgatgataatttatgtgatcagagaatgcctgattattttcatatgtttatgtaaaacagtgctaaatcatattcctattggcttcacttgcctgcacacaaagcggcgccgtcgtgtccgagtgatgtgatgaggtggcatttgatcgggggcttgatctgctgatggtcgttgcttcatcaaccgctgctacagttgctgttgtgccaccgcatgtgccattggtgctgatcagtgccggcggcgaattggacgggcggatcaaaggggaggccgcttcgggcggaattgggtaaataactgcgcgctgttggccattctcatcaatgggttggccctggaatttgaatttgattaaaaaaatgat

SEQ ID NO: 32863 - DNA, 931 bp, Heterodera glycines
ctaatgttttttcaaaagcatgacacacattagtgtctcacactaaagtcacagaacaaaccactaatgttttttcaaaagcatgacacacattagtgtctcacactaaagtcacaaacaaaccactaatgttttttcaaaagcatgacacacattagtgtctcacactaaagtcacagaacaaaccactaatgttttttcaaaagcatgacacacattagtgtctcacactaaagtcacagaacaaaccactaatgttttttcaaaagcatgacacacattagtgtctcacactaaagtcacagaacaaaccaaagatatgcatttctatttcattaaaagttcaaataacattaagcataaacataattatttcacgtaaagaacacaaaaacaaaataaacaaacaaacagcaaccactaaatcaaactcaaacaatatactgataaattttttcgtttacaaaaaacaaatttatataacaaataacttaataaactatgaacatacataaaaaagcaaataaataggtacaattttaagaaagtttattgcaaaacaaattgaaaaatcaaaaccaaacattttcatttttcaaatgcttttttaacgcaaaacaaaacaaaaacattttcaaatcattttttaacgcaaaacaaaacagcacgccacaataacaaaacgccaggttacataaggacactcaactttagtatataggaaataaagtttccaacgcaattaattattctgctcttttttgtgtgacatcattcggacggaactcggcaaattgtgctaattgccacaaaaatggaccgacggtaatgcatttttgaaaagtcacatattcttgtttgcctaattttatttcggctcaagtacagtttatgcgtccaatgaattttttacatcgacttgtatagcatt

SEQ ID NO: 32864 - DNA, 1421 bp, Heterodera glycines
ttcatttcattccgctaaatggactgccgccatgtcaaggaatgtccaatcaaggcatttagactttcaaccgtaaattttggtaccaaattttgggctgtcccgcatcacggtgggacttaacagcattgtgaagcataatttaaaaccgaaagaaatgttcgtcaattttttactttaaattcaaagaccaaaaaaaaaatcggggccaattttgaaagcgaaatagtgcaacaaaaggaacaggtaggcgaaaagaggaaatttttagaaaagggtcgcaccccatctatattcccttctttcatttccatatccggctaaatgtgactgccgccatcgacatgggcatttttgcttcttcttagacagaaggaagagggagaaaatgtaaaagaagtattggcgacgaggacggcatttatttccattggcaattgatgtattgggatttgtcacaaacgaggcaaaagcaggggaaaagcagcgaaaacagggcaaatataattgaaatgagattgaattaaatgttttttctgtcttacttttttgtttctgtttgaaaggcgttaatttaaattcgggggtgaactgtagtgaacgccccgtgaaaaaatgggtcaaattatataccaatcgattcgtctcgaggagctaagcacggaaaaatatgtctcgagttgcggaaatgccaaaaaaccggtttttgaaccggtttaaaactcgaaaatttgagtgaaaaggggggttcctgaccttttaaaacgctcaaattcggacaaatttggtatcattcgaaagcgcttgatgagctaagtctaaaaaacaaggtataaactcgaaccaatgccatctaagcactgggacaactgagtcccagagaaaatggacacttctgtaccaaaaaaaaagttttcttcttatataatgcacgaaaatcgagtaggcttgaataattaatattgaggtaaactttgccgcactctcgactactgaatccagtatgtggggcgattgtatgcttgacagagtaagaactcgtacgactaatgcatagctggtgatttgagccaaaagttcttcgaagaatgtcgagaacaatgtttgtttctcagcaaacatttcctcaaacaactcatccaattgcgctatttcggaacaaattaggtcatctagtagaatcaacttctgcataagtcaaaggatgattttgtaactttgttcatgaaatatttcattggtagtaattggagttggaaccagcgatcaatgtagttgagcacaattttgtaaaaagtaacaaattggttcagaattttccgattgaaaaaattcatgtaaaacacgcggattgttcggcattgcaaaaagctcttttaataggtgccatttctctaacatccggatgaccacttttgata

SEQ ID NO: 32865 - DNA, 943 bp, Heterodera glycines
aataattaattactaattacgtcttcactcccatttctttatcatttttgatcattctttgctattttagatggccatcgaattgaacaacaacaacgcatgtgcatcaaccgaagaggacacaagcagttcaccgaacgcggccaatttgaccggcacgcccagcggagaggcaatgagcggtgaggaaagcgcacgactcaaacgaaggttatttttgcggatgaaacagttcaatcctaaagaaactcattgagttggccgatgcgtcaataagtaaaacttaaaagaagcttttaaatgtttctgtggtttctgggtggcaatggacccgtaatcagagatgggggggggaagcattcctatgaaaaagtgaaaggaaaaaactaatttcctttgattttttcggttgtcataaaaataatacttttgagtcttttatgactttttaatcaaattttcatctctctggactattacattacaccagagtatggaaaacaattgtgctttttcgcatttaatttctatgcattttcccttttcttaattttttacctgaccatagtttattctgcaaaaaaaaattgaaattttttgttcagttatgttctgcaagaattggtggagtccgagcgcacttacgtccaggacctggcctctatctcaggttctaatcccttcgaatgccggacgaattcggaaatcgcaaaatgcgctcctttcagacggttacatcgcctccctgcgggaaatggaactgagcgacgaggacagagagaaagtgaagatcattttcgccaacatcgagcagattctcgactttcacaaaacattctttttgaaagaaattgaaaagagtttgaacgattacgaagcggcgggcattccttcattaatatgtgactcatttgggaatttggacgcattttcgaacatttta

SEQ ID NO: 32866 - DNA, 987 bp, Heterodera glycines
  unsure (1)..(987): unsure at all n locations
aacaaaagaaagtaggtcctgaagctcaacatttccaccctttacagcagccactgaccaatctacagtatacaacagtccatcaaccccaaattgtgcaggatcaatttgccagccaaaatgccttagttcaacaacaattggctcagtcagtgcaacagcaaacccaaagaattcaccaggagaatcaatttatgggtcaacagaatctagctggcataaagaatcagtaatatttttctaactggaaatattatagtaaaactgaatgggtatctaatgtcaaaagaatatgggaattgatgaaatgggataaagcgtgaccggaaaatgcgtcagtgatacttttaaaataaagttctgtagtattaaatgttgtatttataaaagtagaattttttataagaacatcgttatcattcaatatgagatgattacactattttgaaccaaaaatgcttaattcgaaaatttggactttcaactttttgttcgagttcgggccagggattcgaaattggccgaaatggataccggattcgtgaacaatgaccatcaaaaagccaagaaacttctttttatgacattaaaatattcactgacgcattttccactgtcgcatttttcgggggcgaggatagagcacataagagaatcttcaagagggggaaatccgtagtttagttggttacaacattctattgttcggtagtaccgtagattcgagttcttaagtgtaaaaagttgtttctgtagtaaagcaattgagtcgaggcatttataattacaggcaattcctaataaattatcatggacagaatctgcaaccgcaatcagtgcagaatccatcacaaatgccgtcaacaggaaaatcaaaaatttcatggcaacaaacaanagaaagacacacgggcaatatgcacntcactagctcttcaactttatcatgccatcctctactagctcttcaaactttatcatgccatc

SEQ ID NO: 32867 - DNA, 436 bp, Heterodera glycines
ccccccaccccctctgtccatgtacctatcccccacttcccagcgatttttcaaaaaaaattttttttcccattttacttccatccacaaattattcattcaccttgacccattcgtccgccttaacgccgtccagtatgaatttgtcctccactttgaccagcaaaaacttggccttcgcctgcgttgggtccgccgcggtggcgacactgaacggcacctgccaaattgggctgttgttcgcctcgtcccggccgccgtccgccaaaaagcgcgtctgactgaggcgcaactcgcgccggtcgccctccaacacgcgctgctcaacgctgaccagcggaaagcccatctgctgggtccaggagcacatcaacgctttcacatcctgcaaattgggggtgaaaattttattttggcaaaatgaaaaaaattgcag

SEQ ID NO: 32868 - DNA, 523 bp, Heterodera glycines
acaaaaaatcgcgaaataggcacctaaaaagcattaaaaatcgcaaagtaggcattaaataggcacaaaaaccctaaaataggcacaaaaacaggcaaaaattttttttttattaacgcttttttggtattaaaacaagtaaaattttaaatatttcaattgtaaatgaaattattaaataaggacaaaattttaaaccaaaaatttttattaagaaaaaaatatattaaatgttgggatcatttttttggagaattttttcaattctaggggtgtgtttttcgtttttattgcatttttcttatggattttttcaaaagcctaaaataggcactttaggcacaaaaaccacaaaataggcaaaaataggcattataaaagtcatcgtagacaccccaaaccaagcggaaagcgcgtttttcgtgcttataaaataagaaaaagaagaaaagagatagagagagattaagagagggagagagaaagagagagggaaatggagagagggagaaaggaaaagaga

SEQ ID NO: 32869 - DNA, 1469 bp, Heterodera glycines
  unsure (1)..(1469): unsure at all n locations
aagacagaaagtgtttcttctattccgcaaatgaattaggtttcaataaatnnnaccttcctctaaaaaaataatttttctgtcggacactatactaanagttcttaaaccgtttgctattgcaagatagaaagtgtctctctattccgccaattaattaggtttcaattaaatcaccttcctctaaaaaataatttttctgtcggacactatactaaagttcttaaaccgtttgctattgcaagatagaaagtgtctctctattccgccaattaattaggtttcaattaaattaccttcctctaaaaaataatttttctgttggacactatactaaagttcttaaaccgtttgctattgcaagacagaaagtgtctctctattccgccaattaattaggtttcatttaaatcaccttcctctaaaaaataatttttctgtcggacactatactaaagttcttaaaccgtttgctattgcaagccagaaagtgtctctctattccgcaaatgaattaggtttcatttaaatccccttcctctaaaaaataatttttctgtcggacactgtactaaagttcttaaaccgtttgctattgcaagacagaaagtgtctctctattccgcaaatgaattaggtttcaattaaatcaccttcctctaaaaaataatttttctgtcggacactatactaaagttcttaaaccgtttgctattgcaagacagaaagtgtctctctattccgccaattaattaggtttcaattaaatcagcttcctctaaaaaataatttttctgtcggacactatactaaagttcttaatccgtttgctattgcaagatagaaagtgtctctctattccgcaaataattaggtttcaattgaaattatattcatataaaaaatactcaatgggtggtactcaataataaagctcacaatgggtgtttgacaacaagacagaaacgactatgtgtgttagtcacaaaatactacgcttcaatgggagttagtcaaatatacaacacacaatgggcgttggtcaaaataccaccactcaatgggcgttagtcaaaacaacgccgcacaatgggcgttagtcaaaaaaccgcctacgacaatgggcgttagtcaaaaatccgccacacaatgggcgttagtcaaaaagccgccacacaatgggcgttagtcaaaaaaccgccacacaatgggcgttagtcaaaaaaccgccacacaatgggcgttagtcaaaaaaccgccacacaatgggcgttagtcaaaaaaccgccacacaatgggcgttagtcaaaaaaccgccacacaatgggcgttagtcaaaaaaccgccacacaatgggcgttggtcaaaaaaccgccacacaatgggcgttagtcaaaaaaccgccacacaatgggcgttagtcaaaaaaccaacgcacaatgggcgttagtcaaaaaaccgccacacaa

SEQ ID NO: 32870 - DNA, 932 bp, Heterodera glycines
  unsure (1)..(932): unsure at all n locations
cttcctcttcgcctcccttcctcttttctcctcctgttcctttttccctttccatttctcttcctctttgccttctattcctcttcgtcttctgttttctccttctgttcctcttccccttctcttcctcttcgcctttcccttctgttcctctccccctttctcttcccctttttcttcctcttctcctgttccttattccttttcgcttcctctttgccttctattcctcttcgttcctcttcgccttccttcctcttatcttctcctccctttcctctttccctttatcttcctctttaccttctattcctcttcgtcttctgtcttctcctcctgttcctctccccctttctcttcccctttccctacctcttcatttcatcttctcttcccctccctctttttcccttctaccccctcatgttctttttctctttgccttttgttccacttctgcttctcttcaattctcttcctcttcttatcctgtccgtctttccctttctcttcctcttcgcctttatttattcctcttcgtcttctgtttctcttctcctccctcctgttcctctccccctttctcttcccttttctttccctcttctcctcctgttcctcttcccctttctcttcctctttttaccttctattcacctcctgttctctttctctttaccttttgttcctcttctcctcctgatcctcttcccctttctcttcagttcctcttcgccttctcttccttttccccttcctcctcccctccttttcctcttcctcatactcttcaccttttattgctcttcctattctgttcctcttccccttctctttctcttcgcctttttttcctcttcaattcctcttctcatttgttcctcttcaccttctgtatatcttcctctttgtnctcgacttttgttcctctt

SEQ ID NO: 32871 - DNA, 940 bp, Heterodera glycines
ggttatatcgctttgcttttggtggggtgcttggaacagtggaatcatgcgcacccgtccgatctggcaagttaagcaacgattgctgactagccaaaaggttcggtgccgtgatgaaacgaaccagcactgcttaccccgcggcacccggcacggtcccccgaaggaatggatttaattaaattctctccttcggggatttttttccattaggtcgtccgttagcgttcgattgctctagtcaatttttcaaaatttttgttgaaatatttgtcgtgctctgaagggcgtgggaggggggggggcgaaggcccaccacgaggccgcgaagaggccgagtgagtaccttcggtgcaggaaaattattaaattttaaaaattttttaattgctttttaaatatgccaaaaaatgtaggcttaacttttttagtgaaaattcgatcactcatattttttgctaattgagcagaagcgtaccaaactttgcagggatactccccggtaaaggactaacttacactgaaatgagcgccgagctagctggctcaaaaaaattttcgaaaatctgagtctttcgtttttatttgttttttgcataattaattcataaatatttttttcacaaaatgctctgaaacgcaccaaattttatttacatgctagtttaggcactctgatgctttttctatcaaaaagggagatgaataaatttttaaaaatttttaattcctttttaacaggcccaaaagtttaggcttatcttttttttcagaaacttatcagaagcgccccaaactttgcagggatactgaaaggaaaagaattaacctgttttatcacattagcttgtcatcagtttttataaaaattttcaaattctgagtctcctattattttattatttttcaaattttgagggcggggggggggggggggggg

SEQ ID NO: 32872 - DNA, 1012 bp, Heterodera glycines
atagcgcgatagcgctttaaaacatcacactaatgcaattaatgttttgtatgttttaaaataacaaatgagggccatatattaccaagccacgcatgcacaccatagccaactggtcaccctagtttatatatatatagaataaagttgggtttcgtagaaaaaattataagtccccgtggtttgcccggaggctcctgaaagtgcggcattgcttaagcaactttttgaggcgcatctgggaaaaataaggatttttcggtccggcggccagttgagcgccagcggcgctgaaacggccaaataaaaaaaatcgtcgcggttttcgggctgtaacttttctcagggaaccgggagcggaaaaagtccgctgagagggcacaccccagacatgttggctacaactttgtcactgatcactttttgatcagatcaaatgccgagcctgtagaaattggcgactgaacggcgctcaaaatgccggttttggcttttcgtgaataactcgctgggggttaagcggagcgggttagcgccgcttgagcatttgtgtagtttttaaagctgcatccgatggcgttttcagattttgaaaattttcaaaatttttcgagctaggccccctcgaaaatttttcgtttttgaattttattattttttgccgatttttcccaggaaaacggagaccactttcaagcaaccatttttcgagctctatcgattggtggcatttttgaaaaaatttcaaaattttccggaaatagaaaaattttccggaattgagctccccatttccgtttgaggcttataactcgtcaggcgttgattttagcggaaatttgtctaagagcatttttgtagagaattttaagctctatctaatgtgctttatctcatgtttttaccatgagtttaaaaaaagtaaaaaaattatttgtgattttgaaactcaaaaccatagggggggaccccatggtttttgcatttcatgaaaaatttttttactcctaaa

SEQ ID NO: 32873 - DNA, 647 bp, Heterodera glycines
ttttgttaacttcgtccaattcccgcgctttcggcattaaattaaatcctccgatgaatttgacttgtccatgcccttgacacttctgtaattgtcaaagtccacttcgggttgtgaatttacaagaaaaaagcgcgtcttcctgaaaatgtcatccaatcccgggaaattgtcaattgcatatttttgctctgccaattgttggtaaattggatcctgaaaaatgaaatttataaattctctttcaatttatgatgtgaattcattcattttgggtttaaaataaattaaaacatttcttttttaagcctttttcacaagggaacagacaaaattgggcaaaggtgtagaattgtggtcccgatgggaaaaatagtaaaattttaaaaagcattttttctgtggtagaaaaatacgctgatcacgaatctgaactcagattttgaaaaatcattgattttgtctatgactttttatcaagtatttgattttttccaaaaattttaagaaaattaatgggcagtaaaaactcataaaagatgttttagagcttaaaaagagctttcgaatgagctattgaatttatagagaagtcaagtatttaattttctatgattttttaaaatttagcaattaatccctagggg

SEQ ID NO: 32874 - DNA, 1043 bp, Heterodera glycines
aaaaatattgaagaaaacttgaataaattatatttattgttattgaaaaatttttaatttattaatattaaattttaaaaatattgctttaatataattaaatttaattatttttattgaaactgagacaatttccggttcgacctagcacttccaagatctaactaactcacaaattccttaaaaatttcactaaatttttcctaaaatccacaaaattacctttaaaagcgaataaactagttttgtatgtcctgatttttcacgtttgtcctgtatattcatatttttgttattgtaaattaatgtaaaattaatttcttggatcccctgcaaaaattttgaaaattgataaatcgaccatttttaaagggaagaaacaatttgggaacgaaatggagaaggaatgaaatcatttaatattaatacatatttttcaaaagcatataaatttaaaattgttgaaattaaataactggcgaaaaatcacaaattacattttttatttatttatttgcagtttttagggagccgggtcgttactcaaaaaaccatcaaaataaagttgttgtttttttatataattttgcttaaaagcaaccaaatttttagttcttgatagcattcaatagacttaagtgttttctattattttgcaaaatttcataaaaagttataccaaaaatgttcaaaaaatattggttttttgaatttctcatgtcataactttatttaagcttaacaaaactttttgaaatttttcaggtaatttgttagagctatccaattatataatgattataaaattgtatccattttgggcgaacttatgaatcattttctgtcaaaaattttcagagcctaaaaatgtgtgaaccctaaatagttataaaaagtacactcaaattttacgaagtttttcagcaggcgccagcaaaacaatcgcttagtcttgttttttattattatttcactcggctggaatgcgtcagacttgggagggatgaaagttttctaaaaaatttttaacaatccctcattca

SEQ ID NO: 32875 - DNA, 172 bp, Heterodera glycines
cttaatttatgtttttaataactttattttacatttagataggtttaattttgtaggccgatagagcctgttatgaaatttggccatggtcagtgcgaaactcaatgaattgccagaaaataaaagttgaaaaacgattaaattttgaaaaactttcccgcattattaaaca

SEQ ID NO: 32876 - DNA, 909 bp, Heterodera glycines
  unsure (1)..(909): unsure at all n locations
aaattgggaataatcaatttattcatcgattacgataacaatatataaaattttttatgctaaatagtaaaatgaatttaatgaaaaatcttttttcattttgccaaaaatagtgacaattttatgcgatcgcaaaacaataaataatttatcccatacattcaattaagaaaatattataaaggatataatcatttttatcatgtaaattttaataatttaatttagttttccgagttctttattagtctggtccataaataattgatattctaaaatttattttctcatgcttatttccagagcttacgcatagttttttgctaatctattatcattgaatgcaattgtttatttatgcttttttgtacttttaagtttttagtttcattatcattttttcatttttattcattatttttttaattatatttattggcttccaatagcaatgtaggttggaataaatcctcctttaattaattagattgactgaattcccattcatttaataaagtaaataaataaattaaaaaaaattaattgtttttagttatgaaaaagatagatattatatttgattatataaattctttgtaaattatatataatttatatattctttatattttgtttaataaaatttttgattctaactaattgattttttaaaacaagaatttattgtattcagcgcataataatttattaaattaaacattttaataattttaagtaacattatactgtttaaatatttaattttatcttttaaataaattagtattttcttccttgaggtattcatctttttgggcgctagtgcgtttcataaaactgccagccatanaactanaaaccatgtgctttcttaaactgccagcgcgtttttaaagctgccacccacta

SEQ ID NO: 32877 - DNA, 870 bp, Heterodera glycines
tgtgtgaatttggttttgagtggtcgatcaaaaaataccacgagtggaaggggatccaaaccagcagtgtgaatgaagaagaaagatgactaaatatttttgtggctgtcgttgaaaacatgtgatcgattggacggaggctccgtcagcataaacaaaaattgatcggaccggaaggatcaacaacagtgacaaaattagtagatgaattcgatgggaatgggggacgggggtcggtaatgttggttttgaacaaaaccagttgagtcaaaactgctgtatatgtacatacataataattagggatgcaacttttagtgacgaaaaatctcgaaatagttaactaaaatagtgagtaaaaatgccaaaatagtgaccaaatagtggcaaaaagtccgaaatagtgacaaatagtgacctaattttcagccaaaaattaagcaaaaataatttttattcactggttgcagttgcaaatgagctacatttcctttataaaattctcttagcaaatattgacattttttaaatcaaaaattttgggggagaatttttgaaaaatttttccaattcttagtggtgtatttaaaaaaaatttttttggtcgattcttaggggtgtattttttgattttattgcatttttgctaataaatctctgaaaaatgtcgaaatagtgaaaaaaagtgacaaaacgccaaaatagtgaattttcactattttagtgacgaagcgtgaaaatagtgatttctagtgatcgatagtgagatccaaatcgaaaaatttcaacgcagaaatgcgttttttgagctcctttcttcaaaacaatcgagcaaaaaaaatagttaaatcactaaaagttgcatcccta

SEQ ID NO: 32878 - DNA, 982 bp, Heterodera glycines
tcacaaccccctagaattttttctcaaccttcccgattttaactgtgttttatgggtgtagattagagaacaacatgtacctggatccagccctgtatttttcctggatccaggtacaggcacaggccatttttcggcaacctggattttcctgtacatttattttaaataaaatgcatattctttttttctttttacgattaaataccattaattttaaaacttagcggtcatttgccccgcctgcgggcggcaaaaactactgcggattatgaggaacatgatgatgatctgatgcgaaacaatgctgaacgttttttgtttctttttcagcaccgctgtggcaaaaattgcagaatgaccgttaattgatggcaattacataatttgctgtgatgagaatgagagaaaataacaataaatgttgcaatcaaaatatttgtgttaattgataaatgaaaagtaagcttttgctttttagaaaaattgtcaaaattatcattgatatttcctaaaccaattaatggcacaattttttccgtgaaaaagcaaaatagacaaattttcaccgcttagctacatataaaagtcataactaggctgggaatttataatggtcataaagtattgaccaaaaaacatgaaatatggaaagtaattgcaagaatatggacacaatttttcaaaattaagggtataatttctcaaaatttcttcagattcgctaaatataaagtaaacgcttcacaaaggctaaataggtatttaaaatcatttaataaaaaaataaaggcacaatttatttaacgaaaaaacaacctaattacaaaattttgtttatttttgaacagatttatcaatctttaagagaatttgaatttaaactatgtcaaaaagaaaaatttactattaaatgaactttacacaatatggacaatatgaaaaaaatatgacataattcccgaaataaaagaaaatatgg

SEQ ID NO: 32879 - DNA, 193 bp, Heterodera glycines
agtaatgctttctacgtatataccgcagtttggtatcatgaatgaaaaaagaatggatattatttatcactaatatttatccatttaaataattcattcaaaattatttcaaccaatttaaaatattctagataagttatttttatgcttagttgaaaatatcgtactgaatgagttgtatattaattaaaaa

SEQ ID NO: 32880 - DNA, 991 bp, Heterodera glycines
  unsure (1)..(991): unsure at all n locations
tcttccaagtctgaagcttgagtccaagctgctaaaaacgtatttggaaaaacttgaataaattgttcaaaattgtgcaattattattatcaaataaatttttattatttaaaaatggatgggtgatattttcatccaattttttccaatttattttttttttaattctgattggggcaatgagttcctggttcacaatcagcagatggtctcagcgattaaaaaaattcttgttttttaaggatggaatttatatttatgaaaatccaaaaaaaaaaatatttttcaaagaaaaatcacaaattattcatgaaaatttttcaacttttttttttgttgtaaccctcacattttctctgtgctgtgcctctttgatgtattggtccaggatgaacagctggtcgttcttcaccagtgtgtaattgggcgggatctgttgcaacagtgttgggaatgtgccatggtccggcttgggtcggcccgcgcattcttcgccacgttcgttgagcagtcggacaatgcacgtcacacagccgctggccactggaaaatttgggggaaaaaagggaattagtttaatttaatcaattttatacaatttaaatattggcattaattaataataaccctacccttctttgcggtgtcaattatttcaacaccaagctgaaaaaaatagaaaaatgcattaaatgtttttaatggtaattgctttatgctgatgtgagcagtaaaacggggtgcaccatgtttcttcgcccaaaaattaaaaaatttttcaaacatattagaaatttaaaaaaaaaccttaaaaaagtttttaaagaattaaaggaacatttttttatttgagtgatgtttacagttttcaaattgtaaaattttttttgaaattttataattgtaagtttgaaaattttcaccggacgagtttgttggaccagctttttatgcttctcaaccataattnttgaaaataaaaaaaattcca

SEQ ID NO: 32881 - DNA, 803 bp, Heterodera glycines
aattttttaatttcgtatttaaggatcatgaaataaaatggattgggtttattcatgtatacatttaaaagtgagtaatttctatttaatttatatttataaaaacatatcccttcaaaagttttccttttctatggattcaattgacgagaacacataaatattggtaaatttggtgtttttcgatttttcgttgaagcgcagttttctcgttcataattcggattaaaaaccctttttatattttaaccatatttaataaaaaagcctcaattaatttttggcaaatgaatgaagtaaaaatcgtcgttcgtaatgcattacatcagtcttatttttaattattataatttataaaaaaaacatatccttttataagttgtaatgaatttttttttgttaaatttttcatctaaaagagattgaagaaaatcgaactcttctcttaatttatttgtttggcgaattatttaaaatgtaataataattttacaattttcaaacaacaattaatgaaatgttatttgtaaaattaactttattcataatatattaaatagaatatttttacattattaaatatgaacgaattttataataacaataaagtattctgcaaaaataaaaaaataaacagtttaaaagtctataaatatttataaaaaataataatttgtcaaaatatggcatttgaaacataattactatacataaattcaatatatcgtccgtttatcgttttgttttgtttaaataatattattttattttatttttcaaatttatgctgctcaaataattca

SEQ ID NO: 32882 - DNA, 259 bp, Heterodera glycines
caggattggcctggagcgacgggcctggcctggactggagtcgccccgcaacacccgcgcaactgcaggctaacggcttatcggcagacacggtggcctgctggcacgagcacgcaggctgggtgcgcccgccccagctcattgcccacctgctgaacgacccggccatccgctggcgcggcagcgcggcggtggcggagttgcgccgcaccaccgtcgacggccagcccctctggcaggcactggacgccgaagggcg

SEQ ID NO: 32883 - DNA, 566 bp, Heterodera glycines
aaaatgcatttgatcactgatgaattatgatcggtcgatcgatcattcttaattaattcatttcttcttctgcggctgatcactgtttttgttcttttgtccgtcactaattgtcagcagacgacgcccctttttcgctgctttgtcccgcttcttgttcttcttctttcggtggcggagacaatggcctaaattaagcgaaattttaattatttaaacaaaattaaatgccttttttaattgctcacccaatgcaattggagcaactaaaaagacgaatggacacattgttacaattgttgtcccaatttccgtcttcccaataaaccgccgccgtctccccaaatttgcatcgtttcattatccaatcgatgtcccattcatttgttttggccaatgtcagcttttcctttgtccattcgttcaccaattcaaatggcaccattggcattgacggcgcaggaacagaaaaatgaatttggtaactgacggaagaaatggcatggcacgaagaaaatgctaaacattttgattggaaaacacaatcagtgatttgtcgaaatatg

SEQ ID NO: 32884 - DNA, 1359 bp, Heterodera glycines
  unsure (1)..(1359): unsure at all n locations
ttccaattccacgattcgccaaattggccgggtttcctctaaggggggaaaattcgaacagcgcaaaagcgaaaagccctgaatcggcagaaaattcgagcgcaantagccaaaaggaagagagaagagaaacggaagaaaaagcgcaaaagcccaagcaaatgaaagagaattgaaagggaaagaaagaaatcagcggaatttaattatttattatttgaattcattggtcagagaaaattgaaatttgtgagtataaattattattgagaaaagcattcaaagagcgtaaaacctattaaataaatacttatgaaattcaaaaaaaagaagttaaaaatattccgccgaaccccccaatatttcttattttgaaaattcttttaaattttcatttctggcacaagaccttcttgctttcaaagttgaattaatttttatcagcagtacttaagtgtgctgttagggacaatgatcatttatgtaataaaagtaatgaataatttatcaacaaaatatccgtgacgcaatggcccaaaatgcatcatcaacattagagttcgacctgttctggacctggatccaggctcccaggtccagtaatcacgaaaatctttttcctggataatatttttatatttgttatttcgagtgacccttttttatttctttatcaaaaatgttaaaacgattttaaaacattgcatttatttttatttttttgattttcctaagaaataattgatttttcttaaaaatttatttgctttttaaacaatttcaaaaaatccaagtccagagcctggacctggcttttcctagttctttgtccagaaaaaatccaggtcaggcttttttcagaatgcacaactctaataagcaacactcttttaaaacatcaaattaatatttgttatcacgtacagcatcatcagcaccaaaaaatggtcccagcgacaacgaatgccgcgactcactgaaaacatttggcaaattttcaaaataaaagatggacttaattggcaacgcttaattacctaatcaatccaattagggtcaatttgcgtatttgtgattagaaatttaacttttttttcacaattttgccgccaattgggccattttggtctcattttggctccccatattccccctcccccctctctccctgaccaaccgtaggacaattcctcaggaaatgccactttcacatttgaattgtgcgccccgacatcgccaactgcgcaaaagcagtaactcaactgttccccccaaatttcggttgcgattttgctggtgccaacttcgcattggtcctccgtacgtgccgcagtggaaaaagccccatgttgagccatt

SEQ ID NO: 32885 - DNA, 955 bp, Heterodera glycines
ttgacaatgaaaccgctaaaaacggaaaaatgataggtgatcaatggaaatggaatgttaaaatttattgttaactattaattgacagctgtaaattattcaggaaaggttatgatgaattaggtcggtgaaaatcggcggatggaaacccatgcgaagacgaaaaatgaagcggtgccgaaggcaaggaactaaaaaagaaatgattatgctaaaatgaactaaaatttcaacatttaacctggccgtgcttttggcactgtccgtcccctctcccaaacttatttccgcggtcaaaagtggcgacgcggccattgccgctgcgttctccaccactccgttggcacgaagaaaatcagtcagtgcttccaagtcagaagggtcgccgcgaagcaaagtgcgcattcctttttagggggaaacatttgaaaaaccagaatgaaaaatatttgaaaagggtgcaatttgcagaaaaagaatggcgtaaccgatacccaaaggatcatcagtttccaaaaatgaacggacgaatacgtcgtccgttttgggtatttccgctgatgacagatggaaaatgggaggaaatgcggttgaattaccagcgaaggaacgaaaatttgtggaacaaaaaaggaaatgaagaaaaaatttggagtattgccagtcaaatcaatttatttctgctgaaaatttaattacgtgcaagaaggtgccgcctctccggcccatacagctcgagcagcttttgggcgaactccaaaattggcatttcacgtgcgcgccaacggcgcattaaaatggcgaatttgttcaattcatcatgggagagacagacggaaagctaaagcgtagggaaaataaatttgggtaatgtgcaacttccgctaccaaaatataaccattaaaaaataatgagaaagggacaagcaacttaaaataaaaaaagaagggaatc

SEQ ID NO: 32886 - DNA, 1044 bp, Heterodera glycines
  unsure (1)..(1044): unsure at all n locations
aaccgttttttaggcctagctcgaaaaattttgaaaattttcgaaatttttaaatttggaaaaatcgagcttccaaaactctacaataagtctgctgggtacctttccctcagataaaaccccgactcggtattcgcctggtactgaagtgtactttttgagcaagcttcagttgccattttctgcaggccagggggtggctctattaaaaaaataaaaaataccagcatgtagaggacactttggcggggtgccctcgcagcgggcattttttgattctagttttagaaaaaaagttacgggccatcaaacgcaagcaaaagtgagaaatcggccgccgggactcagttggccaccgaatcggaaaacccttatttttcccagatgcgcctcaaattattgataaaaaaatgtaaattaaaaatttatttattattaaatattaaatcaaaactattttaaataaattaaaaacatctaaaaataagcaagaaaaaatactttgaaaaataatgtgttaccgcccggattcgaacttgcccccgccccctcaaaatgatgcctcagaatccccaatcacacagggattctgaggtcataacgatgtcaaaaataaaatctgattacgtattcgtgatcagcggcacaaataacccctaaagacatgtttttggaagatttttgttgaaaaaaatttttcactcaaaaaatcgtatgctcacccctttggtcccgaaccccaaaatcacttttatttttgtatctttttttaaaaaaatgataaaaaggtgaaataaaatttatcttatagagcaaaaaattgcggatttttttagtattttactcttccctaatgacttttctgaaccgagttctgattttttttctgaaaattcgaaaatttccagacattctggaataactnttattcttttgaagctagaaatcctaaaaatcccataaaatttctccgattttttgctatttttttatgctttaatgagctgaattggaccattttgaggcgagttatgaatttttaaa

SEQ ID NO: 32887 - DNA, 939 bp, Heterodera glycines
  unsure (1)..(939): unsure at all n locations
tctaagaganatctttgaaaaaaaatttagtaaattcatcataaaatctctaaaaatccgctgaaactttttcaaaattaataaacaagatgacgatttcctaaacaagtagctttgagcgacttaaatttttattgaaattttaacaaattcttttcatttaaattgatttcaaattaattatgaccctataaattgtttaaaaatgtttgtctaattatatttaagtgatcagcaacttttctgttgcgattgggacactctgagcagtgtggccgactgttgctccatacaaatggcgccatttcattgtcggacaccggctgatgggtgcagcgaggcgagctttgtgctggtcaagaagcggctaaaggtggcacaaaacaaaagggaaacgaaagcggcggcacaaattagggagataatttaatcagggggatcaattaagagaaaaaagatttacaagcactaattgggggcaaggcggcatcaattagaaaagagattaacaggcactaattaggggataagcggcatcaattaagggaaaagagatttacagtcactaattaggggaaaagcggcatcatgggatcgtccataatcgcaaatttgaagcaatttgttaacagattttgtccaaaattgaccaaatttaatgccttttgggcgggaaaatttgaattttttgtacgatttaattgcggattttgcgccaaataattccataaattaataaaaaatattggtctaaaattaaaaaatgtaagatttagaatgttttttcgaatgctccttttcaaggacatcttgaattgaaagacgaattttcaagtgcgagggttaaatttcaaggacggacgtccgtgtgttattgggttactgttttctctcaactgtggactttggttattgttgtccaagtcttcattcatgctc

SEQ ID NO: 32888 - DNA, 827 bp, Heterodera glycines
agtgatgccgttcaatcagtgaatgaatggtgtctccgtactaaggtggggggagtacagtaagcgaaaataatgcccaccgttcggatggatgcccttcggatgtgtccgttttggtctctctcctcggccgtttcttccgccacaacggcgcccgcacgacgcgcagtgtccaaaacccagtccaaattgtccacttcgaacgcaacatcctttgattggggggggggggggcggtaatcagtggaagggaaggggaaaagccgaagacggagaaaacggcggagaactgaccttgacacctaaaaggaaaagtgatcaaaaaatggtcaaacggcacaacaaaaataatcaaatgaacaaaggatggatgatcagtgatcaaagtgaattaattatgccaattatggcttaccatcgccatgtttggccaaatgtgcgctcatttccccgttgttaggcagcagtgccgactcgaacacaaaaacgatctgaaacggttggttggtgggcggtgagtgttccttctcccccggtaaacttcactttgtcctgtttcactgcatatgccaccgtttttcgacttcccgtctcgaggcccctgaagggacaaacggaaagataaaaggacaaaatgaaagaaaaaggcgggaaatgccgaaaaggagggacaaagggaaatgccgaaagtgattaacgagagacgacacctgtaggcgaaagggatgaagccgaagttgacgcaataccaatgggccgcctaaaagccatcgcaattattaaagacggcacaatcccttccgccacccggcacaatcagtcagtca

SEQ ID NO: 32889 - DNA, 1169 bp, Heterodera glycines
  unsure (1)..(1169): unsure at all n locations
agaagtataaatttataataacctacgtttgaattttttcgaagccataacaaaatttgtatttggtcgggttcgactgtaactttgtatttttaaaatctacgaatttataacttataatgttttcctttttaggtttggtaataaattataaagataaacggccatttttttaatttattcatgtaataagccgtgtgtacaaatattatttaggtatttcaagtgcaacaaataaccgagtgcaaactaataaaatggagcttcaagaagttcttttaaattcccggaaaccggaactttaatgcagtttcttccgtctttagatttataagagcccacgggacaagcgcagatttttcctttgttcatgttaagacactgttgaccttgaaaaacgatgaattgtccaaagtgaaaaaaaaaacaaaaaaataacctttggggcattcttcgtagagacattcgtctaaatccacgcattggagaacatcaaaacgataaatctgaaaaaggtttctaacaataaatctgtcccttcccaaatggacctttgaattgtcaatgctcccatcggcagaggcacaagcgcagctcaaattccagcggttctgctgaaatttgagaagacgatgcgaggacagtagctttctattaccataatcgcaaacaaatcatcgttaaaaggactttccaaatctaaaaatgcatgtttttcgcggaaagggaacttcggataaaagcattgctgggggtcggttggtgcttcgcttccccccccccactcacagcagtagtgcgtgttgacaacgctgtttcctgcttcggtggcgttgtgccgttcctcttcgtcttcctccaagtcctccgcctcttccgtcgtcgatggcatnacgttccgtcgtcccctccccgtcgccttccgccgcccccttaggcaatccctcttttcggtgttttcttttttgaagtgccgcgctgccattttctcngttgagattttttacatttctgaaaagtcaaaatacagcgtcaaatcccaaaaaagaccatggcacaaggcggagtgggcgcnaaagccaaagaagccttgggtttttgctgacttagaattgtcaccgcctccgaaaaaacgaagacttttccgacacaacatggatcaggacaga

SEQ ID NO: 32890 - DNA, 968 bp, Heterodera glycines
gcttacaattaacaattcaagactttccttttctgtttttacactcacatgtcggtattggtcgatctccgcctgtgcttcttgtttggcttgtttgagccgctgtgcttttcgcttccgggcgtcattaatctgcaaaataaaaataaatatatttgaaaaatcaacatcaagtcaaaccttttcagcagctcgtttttcggctgcaagaagttgttggatgccggcggtgtgcgacgccattaatctcggaagttgtaacgaagaatgtgcagaggttggcaaaccgttaattaaattagaaaatgcttaaatctaaataaatatttgcaattgaattttttaataaattgatagaaattttcaaaatggacccaatcctaacccacccgccctttcattcaccactaactacgggcttggatgtatgtatgtaaatgaccacattaaacgaaatcaaaagttatttgattgatgaatcgatctttagttcttgttggttaggttgatctaaatgccaattatccaaaaacataatgccacgaaaaataattcaaatctttttaattacctaactttaatctgtacgtgtttgggctaacaataagctgacacttatgtacagcgagtaaagaaaggattaacagaaataattaatttatatacaaaataaaatttaggtgaaaacttaatgtattctccatttgatttgtttttggtttcttcgggtcgtcaattatcttcattcgctcatctctttgtgccaattaattgccggatttttgcgccgaatattcgaaccatgtcgacaaagcctcccgctgataatgagtccaacaatgaaggtcaacagaagagcagtaactcactcgcacgagacgggaattatgaagatggaaatatgaagaatagagacaaacaaaaagagttcggaggacctgctggtccggagccactcgatacgggga

SEQ ID NO: 32891 - DNA, 951 bp, Heterodera glycines
  unsure (1)..(951): unsure at all n locations
cccccccctcttttccctttgggttgcctttggggggtgaatgggtcgtcgtcgtcggtctgtctgtcgcatggatcacttcgacttcctttcgcgcactcttcagccccaccaattttgttcacgctccccccgagggttttgtcggacgaaattgtaattataccccggggcatcataagccatcataatattggcggttcatccgccgacgggcaatgtcccgcacactcgaaaagacttgaacaatgccccaacaattcaacaattaccttcccccccccccttttttgctctgatcagttacgtttgtttctgctactcttttttttgtccaatcacaacccaaactcactcttcaaatttcttaaacaattcaattaatcattttttggttggctaattggttttgtcaatggcttttaaatgatgccaaatttgagtgttgatcgtcgctgatcatcagacagatgaactaattaatgtccaatccccaatcattaaatattattattatttcttttccattattaaaaaaaataattttttcgaaaattccgttttttttgtattagcgacagaatgagccaatcgaattgttcagcagctttaatttccctctcatcacaactgtgaaaattgttgttgttctgctgtggtggaagaaaaaggagatgaatgctctcaactcgaatttaattgaacttaagtgcccgagggagaaagatcaattggcgaattttatggaaatttttagagtaaaaaaaacataaaattaaaaatatttaaaaaaaaacgaaaaaaagagtttaatctttcttcgctctttttttaccattcggtagattcagcaaataatttanatttgtgaaatttaattcgcttctgctaggaaattgcagtcgaattggtcaatgagtcgaaggaaatgttgcgataacgctaaacaaa

SEQ ID NO: 32892 - DNA, 617 bp, Heterodera glycines
cattaatcactgctactgaatgacctttaatgaacgacgacggatcggacgatgcctaagggcattcccgtgggcatgaaatgctcaaatttctgaaattaggcgtgccttacattgtgacaacatatatataatgccctaacattcccttccaaaatccttttaatctcaaaattagcaaaattagccaaaaacccaacagacgcccccccccactcaaacagattgaatttttggcaccctccccccctccccaaattgttgtgcactttttgttccccgcggggcaatgctttttatccgtgggtctaccggaggaggaagaagaataatgcccatgtgcatccattccattagccattgcctgccgctgctgatgaataattcgggggtggcgtgggccctccctcccccccccccttttcgcctagaaattttccgtgcgttttccatccgtccgaattccaacaaacagcagcaaaaggcattttgtgccggaaaatgttttatttgccgcccccccccccaaacatttattttatatgcgcggccatcgataggccccggggggcggggaagcggagaacagatgaatgaatacaaacagaaaatgtaaa

SEQ ID NO: 32893 - DNA, 885 bp, Heterodera glycines
  unsure (1)..(885): unsure at all n locations
agatttaagatttttttttcgcgtaaatttgaaaatttttctggctgctcaaaagttcaatctttaggggtgtattttcaactctcgcctctcgtcccaaaaaacgagaggcgagagacgagaggcgagagtaccaaaaatggcgagagttggcgagaggcgagagatatagagacatagagttgtcccacccctgatatatatatatatacataaaattctttgaaatgcttctgcccatttgagtgtcactcaatgaagcgaaaataattgaagcccatgggacgacggacaccacaaattagcaaaatgaaagaaaatgagaaaaaaaaaaaacaatgaaaaaaagaagaggaccacccaaataaccaattaaatgatcggagagagaaattggaaattcattttttattttgggagaaaataatttaaaaaaaccaatgcttttaacggtgccacggttcgaattggcttggggcacaaagaatgaaatccggttttaatggtgccgtcgtccgtacccccgggggatattaattagattttctattgaattcacaaaattaaaatctctgtgccgtgctccgtcggcagtgtgcaaacacagcacaccaaatcagcagcacaccgtaagccaaacagtgctttggtcggaaggatttccattaatttggccaattttgtcaaaaaaaaaaatgccgcaaaaattggccaaattttgcaacaaaaaaatgaggcgaagactgtgaacaatgtggtaaaattttgtttaatgacctcatcattagtgcacattanattaaaaggngaaaatactaatcgaaaaaaggcaaaaaaaaaaaaatgggaaaaagtgccacccaaaaactttcaaaagattttttt

SEQ ID NO: 32894 - DNA, 291 bp, Heterodera glycines
tcgattagatcccccctctcgaataaagccccccttttgaggggagttgaacaatagagcccccccccctcgattagatcccccctctcgattatagcccccctcaaaaaaattaaaaaaaaaatctttggaagcagaaaaaagtaaatgctattgaaacaatttactttaataataaaacattaacaaaaaaatattatagatgaaagggcctcaaagacgagaatttttccattcttgattaccggcaaaggtgtagaattgcggaacgggccacttcagtctggccag

SEQ ID NO: 32895 - DNA, 80 bp, Heterodera glycines
gtcgtcgtgatgccgagcgcatctatgtaggcaagcgccgcgctgaccattcagtgccgcaggaccagatcaaccgcctg

SEQ ID NO: 32896 - DNA, 876 bp, Heterodera glycines
atcagaagctcaacaaattttgcagggatattaaaaggaagagaatcaacctatttttaactaattcatcccataaattttgtttaaaatattttaaaaattttaaacatttcatacaatttttaaatatgcctattattttaggattatatttaaaaaagttttatcgaactttactttttctataataaatcaaatcgcatattccccggtacaggactaacttaacctgaaaatatttcaacgcttaatgaattttaaaatttattttttttactattcccctctttaaaaaaattcaaaaaatattttgaaattttcaggtccgttccaccacaatcacgcagtccagcactgggcctccagggcctattggtcagcggaattggtaaaaacaaaaataataaaaagaaaaatcgtatttaattacttaaattttaaacaaaataaaaaaatgaaaatatttttgcgcccctcaggcactttgccgtcaccagtgatttggggatggttggtggacagtgcatgtttggtgtgggacaatgaatgtgagcttggctcgtgtcaagtaagtgggcaaatcctctttttataatacgttgttaattaaatttaatatttttatcgtttttaaaaaaggatttatttaaaaagaaatatatttaatgatttaaaaatttttaggcattgttaaacaaaacttgtttggagatttttaattattttcaatttatttttaaaaaaatatatttttaaataattgttaaaactagagtagagcgggaccgggaccaaaacacggacaactgagtacaactgagtaccgaggtcccgggttttttccggttttccccagcaaaaattccccggtttttc

SEQ ID NO: 32897 - DNA, 905 bp, Heterodera glycines
aatgcagcagaaccaacgcaagcatatggacagatgggtggcgggcgggggaatatttggggaccattttgggcaggattcgcatttgtacaacgagtgagtcatcgcgaattggtgggaatgctcacctaaaagaagggtcgaatcaagttggaaactgacaaattattaattaagccgccagcatacttaagtttttgttaaaaattcaaaaattttgtgacatttattttgacaaaaaataaatgaaaaacgcgcggaagacacaatgaataataggagaagcggtgaagggatacttatcagtagtaattattaattttatctgttctttcggtcattgggtcgaaatgccaaaagaatttgcgtgcaataatagttgatttcataagtaaaacgcgcccatgtaaactaaatgtttataatccggcttatgtttctttgctctttggttccaatttcaaacagattttttctcttttttctatttttaatcttttatctacggcaaaattttgttttacatttaataaatttaaattttttcctcagtttttcttgcacaattttttggcgagttgtattaaggacaagttaaccatcgttttattaaatcttccgaaaaggctcatgccaattgcttcatctgcacttatctcaaagagacttttttttagaaaaaaatcttcaaaatttgttatatttgcattaatcttttaaacaacttctccaatgaataaaaaaatcgaacaaaaagttgaaacttttttaccccaatatatgcgtaaaaatcgatcaaattttggagcgaattgctcatttttattcaacactgttttgaaaaataaataattgttatatgaattcgagtctttcccagaaaaatgagtctttggaaaatcaaa

SEQ ID NO: 32898 - DNA, 850 bp, Heterodera glycines
aaagggcgtctccttgttttcgttatacctgaaaaaaaattttttgttatgctttgtccctcttttcttaccatttttcgaatttagcgtatttctctttattcatagatcctggtgcgtaatcctccatcggtggtagatgttccaaacgtattccataattttctttcttgttgtagtaataggggaaaaaggccttgtcctcacagcccaaattgaatgtcgccttcatcgactcgagtttcaccggcattaataagcatgagtctctccatatcagcattgaatgtttcttcgagtttcgcactttgaattcataaattttcagtccattgatgagcggtagcgggttcttcccggtacggcagagataattaaatacaaaatgtcctaaaattttagggttaaaaaaaaattaaattttgaaattaccgtcaaaacgcccggcgttatgcgcaaaaatgtacgtatcgtaattcgtaaaggccattaaaatccattccacaaaatccttcgtcggctcgtgtccctccgcctcgctccaatccttggtcctctcctccccgcaaattttacaatttgtcctatttttgtcgtcacagcattccgtacacgtcactctcaccgaaatataattaataatatgttccttctggtcccccttataaatcgaatcctgcgatgtttccgaatcctgaaattaaggcgtttttttttttgtatatatatatattttttttttgcttaaacttacccaaacgacaattcgagagacatccttttcctctttttcctctatcggcatgctataacgaccccgtttggggtcgtggcacacactacaaagctg

SEQ ID NO: 32899 - DNA, 486 bp, Heterodera glycines
tagacaaaacaccaaaatattactaaataaatttaataaaagacaactcaaattaaaatagagatttttgtttttgcaattttatacaaaaattattattcagaaataattaaacaataaaaagaacattttgttaagtttggaatacattactttgctctgagcatgtcttttataaaaacaaataacacaaaatattttttcataacaatatacacataggaaatatttattaataattttaaaaaattataaaatttatccatttgatttttatgtgtcactgccaagaggatttaaagcatggttttatcaacaaaaaaaactataaaatgaaaaaatgtagattaaattaagaaaatcatttaagctaaaaacaaatttatctcgtttctgggaccttcctttgtcagcagtttatccagtgttttgcgtacaactcatcaaacaaaaaaattcgcttacatctatcttgataggcggtag

SEQ ID NO: 32900 - DNA, 1051 bp, Heterodera glycines
ctttttattcacatgaaaaagtcacaagtctcttctgatctccggttaaaaattgatttgaaaaaggaaaatagatgattatattcttcccaactgaccatttatttaaatgatttttttaattaaataatttatttatttttttattgtattgattaaaaaagagaaataattcaaaaatattataaaataaaagaaaaaattatgcaaaaaggaagaaaatattcaaaaaaaaaagaatggaataaaattaatttgaaaataacaaaaaaaattgggaacaataaagaatttgggcttcaaaaatttatgtcttacaaatcaaaaactaatgaaggaaaaatagaaattgtactaaaattcattgaaatgacaaatgaatataagcaaaaaagaaaatattcaagaaaaggaatggcaccaaaattatgatgaaatttgtaagaaaattggagtaagccaaggaacaattaacaattagaaaatggaaggaaaagctcggattaagtggtcaaagaatcactgagaatgaaaaaaatcgaaaaaatgaaaaatgttggcaaaataaaaaaataaaaattcaaaaatgagtgacaaagaaattgatcaaattatgaaaattgatagaagagtatttctattcgtacgaaataatttggagaagaaattttggaagaatcattaatttctgttattaagtattacactttaataaaagagaacaattaaaaaaagaaaaaaattgtagtaataattttgttatttttaaaaatttggcatattatgatcactcatttttgcattttttcatttaatttttttttcattaccaaattatttcttcaatttcctaattatatcataaattaggcaaattttcttgctaatttcggcgggatcagaaatggcacacttattaattaggctcattagatcctttaccttgacaataaaaatgagttggacagcatttactcccctttgacaccgaactctccgacagatttgaagttgatgaccaaataccaattatttttttcaaaaaaatatg

SEQ ID NO: 32901 - DNA, 976 bp, Heterodera glycines
agtaattattttaatattttttgaagtttacttttttgcaactaaacgaaattttatggaattttgcagactaatagaggactgttgaggctatctaatgatactaagaatgtttttttttgaatgttacaaaaagttatggtgcattaaagttgtcaaattatcatatggtcatgtcttttttttagggtcgtgtaaactgcaataaagccaaatatattattatcactaaatttatcaattaaaataattgccgtattttctctaattatccccagactccatttatccccagcaggggggggggataaatgaaattttttggtcaacgtaggattttttgggtcaacgtaggacctttatcccatttcgaaaaaagataaatattttgaatttatcaaaaactgtcccagcataaccttttgaatcgtgagtggatgatcggacaatgaacaagaaaataggcaacaaataaattgatgagtttgtgggaataaccctaaaaatgaaaagatgtgaatgtccgcttagtatcgaagggtgtggaacagttcaatcaacagccaatttctttttctttgttcagcaataagctatttttcaaaaattgaaagaagttaggcattggaattaattgtttaagatttcaccaataatcaacaagacggcacggcattcgtgtgcgagagatgacaagaaaaaagttgcttatattcaacaaatgtgcaaccgtcgtttataaaatgctaaatccagcaacgagcctattttctttctttcttgatatggcataatcggtccctttcggcgacagaattttttttatctttttgtgtattttatgtccgattgtccgggagcatttttgaatatattctattgtgtatttgcacggtatgtgcggaaattatcaacggctaataatttttactcttaccccaaacaaaagtttcctaaatttagaaaacaaaacacg

SEQ ID NO: 32902 - DNA, 989 bp, Heterodera glycines
  unsure (1)..(989): unsure at all n locations
aaattggtgaatantggtaaaataaatcaaataaatagtttatagtcacaaatagcaaatataggtatcattaggaaagcccataaaaaatgctatccaatggtatgctacttatctgttgaaattggaaaatgacaattttatacgcaattatttttttcaaagcatgatgggacaacacttatgaccatgactgtatgaaacaaaataattgctcccccgattcctaatgtgtgtatataattgccaatgtattgtatgtattgttgccccgattcctaatgtgtgtatataattgccaatgtattgtatgtattgttcccccgattcctaatgtgtgtatataattgccaatgtattgtatgtattgttcccccgattcctaatgtgtgtatataattgccaatgtattgtatgtattgttcccccgattcctaatgtgtgtatataattgccaatgtattgtatgtattgttcccccgattcctaatgtgtgtatataattgccaatgtattgtatgtattgttcccccgattcctaatgtgtgtatataattgccaatgtattgtatgtattgttcccccgattcctaatgtgtgtatataattgccaatgtattgtatgtattgttcccccgattcctaatgtgtgtatataattgccaatgtattgtatgtattgttcccccgattcctaatgtgtgtatataattgccaatgtattgtatgtattgttcccccgattcctaatgtgtgtatataattgccaatgtattgtatgtattgttcccccgattcccaatgtgttgtataaaaaatctttcaattgatttatttttactagaaataaccaagctcgaagaaatttagaaaaaatttttttgttaagacttgnggaagggggggggggcacatattacacctatttttcatccgtgtcacattaagcggcgaacctttccgacgacagaccaaaggagcgtttgctc

SEQ ID NO: 32903 - DNA, 954 bp, Heterodera glycines
tcatcgcggatcagaaaggcacagaacggatggtcagcgacaaaactgtgttctttgctcgaactggcactatcaaccacacggccttttgtggctgccctgtggcaacagtgccctcctcattcacctaaactttgttgtacaaaattagttgtttttttgagaactgaggtaaacggggacgggacaaaatctcgccgcagaaatttcaaaaaaaaaatttcaaacttaaattttagaaaaggaacgagaatagaggagaaaacagtattatcataaaatttcaaaaaaaaatgctaaaaattttcaaaaaatttttttataaattttttattaaaaattttctaagaattttttttggaaaatttgttagaaaaatttttttttgaaacttgcgatgagattttgtgccggcaagattcaggcggcgagattttggggtgtacccaggtaaaactggtcagcgaatatttgattttctctgaaccggcttgtgattttttttatattgcttgtcgattgcggcaaatttgacaggcatggagccagagagggaatctcccccccccctcccggaaatgaaaatttttccttaaacaatttttcttaataaagtgcattaaattttcccggcgaacgtctatcggcaccgccggacccccaatattttaccctatttgaaatgctgaccctaaatggcaaactgacaaccccccttaatatttcaggcgacttactgtgccctctgacaccaacggccgcacttcgtcgtcctcgtaagtgccgcctccggctgttttggcccgctccgaggagttgaagctgtacaacaaacagaacattggcacattcaaaggaaaaatgcatgaaaaagtgtgtgaacgacctgagtgtcctcgaaataaatgaaacatgccttaaacgcatcacaaacattaacatttgtttttgcta

SEQ ID NO: 32904 - DNA, 1368 bp, Heterodera glycines
  unsure (1)..(1368): unsure at all n locations
aattcagtgcgaagtctctcgttttccaacaaaatgtccattggatttggcagtctttgttctatcaaaaggaagaaacttgcaaataataaagtaataaaattattgtattacacctttgtcatggactcttcgaaattccttgacatttttcagcgagatgttctgatgagcagaattattgttgatcttaaagaattgcaattaataaatgtaattaatataaataacattagtctgaacagaatgcaaagtgggcgaccgaagaacaacaactgaagatggctgtttgctgtgaacactgagtcgagaaccgacaacatccaccaactcaaactcgctgttttcgctgcttaactcgcgcagtgattgcagcgagctcccagcacttccatcaatcattgaagccggaaaaaatatgtacgaatagtaatttaggtagaacttcaattaaaaatttaagttgatttggtatttacaaactcaggactgaagtgtaaccaacaaaaaattagagctaaaagcttcaaaccaagttaccaactcgtttttcgtggtgcgtatttgcatagagaatgggcggagagagtgggcaagaaaatgtgttggagggagagaatgaggaggcagggaaaagagtgaaaagatagagaaagtagagagagagagagtgagaacaaaaaaaaggtggggaataaaggagagagggagaaagagtaagaggggaattaaagagaggagaagacaaagaagaagagagagagatagagagagcgaaagagagagaaaggcaaagaaaatagagagaagggggagagagagagggagagagagagcagttcgtgatataaagaaaaaaaaaacaagagagacaagaaaagagtgatatgaggaaaagagagagagggaggagaaagagaaggggaagacagagagggaagagagggggagggggaatagagagagtgttagagagaaaggagcagagaggaaagagctgagaggccccaacagatcctgaaactatttttctatgttttaatctcctccaaagcgcatctaacatcccccgtgttacagactttaacgtcaaaactataaactggggcagaaaaattcattcccatttgctcgggagggtaacagaattgtcggaatcaacttcgataaagaactaataaaaacaaattctttatatcaatttaaaaccgnacttaaaagttcactagggtaatataaccggtaaagctagaacaaaaatacactcataagtagggttgtaaattatatgattttgcatattttttctgcgcatatgctatgaagaaaggggctcaaaaatagcatttctgcattaaattttttgat

SEQ ID NO: 32905 - DNA, 1586 bp, Heterodera glycines
ctctcgaacatgaaacgaagtgcggtgcgccatggccattttatttttcaaataatttttatatttaatagatattccagaaaaatggctatctctatttttgagaaattttctatgcaacaaacgctttcgaacatgaaacgaagtgcggtgcgccatggccattttatttttcaaataatttttatatttaatagatattccagaaaaatgtattccagaaaaatggctatctctttttttgagaaattttctatgcaacaaacgctctcgaacatgaaacgaagtgcggtgcgccatggccattttatttttcaaataatttttatatttaatagatattccagaaaaatggctatctctttttttgagaaattttctatgcaacaaacgctctcgaacatgaaacgaagtgcggtgcgccatggccattttatttttcaaataatttttatatttaatagatattccagaaaaatggctatctctttttttgagaaattttctatgcaacaaacgctctcgaacatgaaacgaagtgcggtgcgccatggccattttatttttcaaataatttttatatttaatagatattccagaaaaatggctatctctttttttgagaaattttctatgcaacaaacgctctcgaacatgaaacgaagtgcggtgcgccatggccattttatttttcaaataatttttatatttaatagatattccagaaaaatggctatctctatttttgagaaattttctatgcaacaaacgctttcgaacatgaaacgaagtgcggtgcgccatggccattttatttttcaaataatttttatatttaatagatattccagaaaaatgtattccagaaaaatggctatctctatttttgagaaaattctatgcacaaacgctctcgaacatgaaacgaagtgcgagtgcgccatggtcattttatttttcgaataatgtttatatttaaaaaaaagtccaaaaaaaggggaatcccgccctttctgatcttttctatgccattccgacccctctacatcgagcacgggagcgagggccgtggtcaggtcgttattggattaatgtttttgaaatcccgatattgctgaaatatggatctcgctaccgttaatcaaatctctattcaaccaagatccctgacccggacttttttggaaatgagacgtgatcggaatcccggtaaaatcccggtgatatcccgtaccgatccgactctaatatataacacaacaattgccagcttcacaatgaaaagattaccacacagattaaagaagaggaaaaacgagacaacttacaaaaaaaagtttacatatgaaaattagtttaaaaagcattcctattcttagaattacatttatttcgatacattatacccgcaaaatcagttgatacaaaaacgaattgaatttcgtggtccgtcccaaaaagcatcctgaaaattttaaattttttttaaattttgcgattattaattgatcattttttcacaggagacagcccgcaaacggataagcactatgtgctgaccaccatcgaaatgtttgcattgagag

SEQ ID NO: 32906 - DNA, 822 bp, Heterodera glycines
atgccattgtatttccgtcctcccatttgcctctttccatttcataaaccacacaatgccaatgttcgcttttgaattgctactgccaatttccaattttttgttgcagtccaaaaatttgtccatttctaaattaaaatttataaaattgcagtttatttttgggaattttgtcactttaaagtcataaaaaatagaaaacaaaaaagacgctctttaatccgaacgaaataaattctaattttaatttaaaaaaagttttttaaatgttgaatattttaatagataatttataaagtcataatctgaaatgatctgtgaactcctatttcgttcttcttgcctcgagaactcttaaaaaaacaaacggtaaattctattttattatttgtcctaattcgataattaattttttctaattgcctcattaaaacattcaatttttcattttttaaataattatttttaaccttccaacaaatttcggagcaaaagtgcgcatttcggcgcattttccgcctccgctgcgactgtttcgtacaaaatgcgaaagttcagcaaccacaaattggtcaaatgtttgctcccaatttgggcactaatttggtcagtgttgtccattagcaccagcaaatcggccatcaaacgggccgacagtcggtcgacgcccttttggccgccgccacgcacaattagcgagtaatgggccaacaacaggtggtttttgttggtgaacaatgaaaatggaaattaggtttaatttttttagtaaatattatctttaatctctatcatatgctttgtttaaaaaataaatttttt

SEQ ID NO: 32907 - DNA, 304 bp, Heterodera glycines
aaattttctccggcggcgcctaacggcaccgccggacccaaaattcttacttttattttaaaaaagtagctcaaagacgcaaaatttggtcattttttggacaaaatccgttaacaaattgcagtaaaatttcaaaattttctccggcggcgcctaacggcaccgccggacccaaaattcttacttttattttaaaaaagtagctcaaagacgcaaaatttggtcattttttggacaaaatccgttaacaaattgcagtaaaagttcaaaattttctccggcggcgcctaacggaaccgccgga

SEQ ID NO: 32908 - DNA, 805 bp, Heterodera glycines
cagtgtccgtttcggggtactcaaacaattataggggagcaaaaatccaacgcagaattaaagtacaggctatagggaagctattccggaaggattcggtatccccataaatctgggcgcatcggctcggggggactgccccgaaaacaaaaaaatcgattttttcaagtgtccgtttggggtactcaaacaattatggggagcaaaaatccaacgcagaattaaagtacaggctatagggaagctattccggaaggattcggtctccccataaatctgggcgcatcggctcggggggactgccccgaaaacaaaaaaatcgattttttcaagtgtccgtttggggtactcaaacaattatggggagcaaaaatccaacgcagaattaaagtacaggctatagggaagctattcccgaaggattcggtctccccataaatctgggcgcatcggttcggggggactgccccgaaaacaaaaaaatcgattttttcaagtgtccgtttggggtactcaaacatttatggggagcaaaaatccaacgcagaattaaagtacaggctatagggaagctattcccgaaggattcggtctccccataaatctgggcgcatcggttcggggggactgccccgaaaacaaaaaatcgattttttcaagtgtccgtttggggtactcaaacaattatggggagcaaaaatccaacgcagaattagagtacaggctatagggaagctattcccgaaggattcggtctccccataaatctgggcgcatcggggtcggaggggactgccccgaaaac

SEQ ID NO: 32909 - DNA, 686 bp, Heterodera glycines
cgacacccgtgccaatgccattgtttttgttgcggaggacgcgaacggcgaagatggagccgcagtgggcaaaatgggcacggatttggtcatcggtggcggtgtatggcagattgccgagaaaaatggaactgattgatggggaaaatgatatgaaaaaagtcattcaatttcgattctgtcaatgattcttctaaatcagaaaatgggcgttctatacaatgaacggattctaatgaaatatgatatctttggctaaagcaaagtctgacgctacttgcaaagagggggcttagcaaaaatcctaagcataattagcccacaggttatagggaagctattcccgaacgattcggcctccccataaatctgggcgcatcgtatcggtgggactgccccgaaaactattacatccattttttcaagtgtacgattggagtactcaaacaattatggggagcaaaaatccaacgcagaattaatgtacaggctataaggaagatattcccgaaggatcctgactccccataaatctggtcgcatcggctcgctgggactgccccgaaaacataaaatcgattttttcaagtgaccgcttggggtactcaaacaattattaaaaatttttagatttttattcatctccctttttgatagtgaaagcatctgagtgcctataataactt

SEQ ID NO: 32910 - DNA, 372 bp, Heterodera glycines
gatggggcccaattgacttccttggaccaccaaattaactgagcttttccattgcatagagcgctcttacagaatttctgatgggcgcagagggcaaagctgaatgttaacacacttttgagagattttcatcgacaaatctgacaagattttaatatctatattttgtaattaataaataatttgttgattctgctgctctatttacgtgttccttcatatctaatgtgtcattagttttgataaaattagatactttatttttgcttgggcctatgccttttgactaatatgttcgtcaaaaggatgatgggtgaatacattcgatctgtttgatttacacggcatttcacttgcattttgaggatccag

SEQ ID NO: 32911 - DNA, 894 bp, Heterodera glycines
aaacgttttcgcatgaaaccaatctcttccacatctctcagctccgtcgtttttcgttattacaattatcaattttctctaaaacattatttaaaaaaaaagttttttcgattaattaacaaacgtcgacgttcacggtcatctctcgcttaatccgaattatttaatttatcaatatttttattttatttttgctacataagaaattattttatcggaattatttaatataaaaattttcacattttcttgcattacaaatttttagattataaaattcaattattttgggaatgattcgcgtacctattttttattttaaggttgttaattttataggtaacaattaacccacccattatatgtaatagataataattttattttaaaatttttcataattattcaaattgctgtttaaattttagtttatatttgatttttaggttaataaattcattataattattagattttaaaatagaacagtttttattattttatatgatctattatttcggcagttttctattttaattttaaaaatatttaatttttcgaaaaatattttctatgagataaaaataattttctatatctaggcaagatatacttttttagattttttcaataaaaaaactcataaatttattttatgactaggaccgatatgttaaatcatcagctgatattaatatttcaatttttttcgtataagagagagagagatagagttaaatgagaatataatatttttgcttgtctaaataatatatattgcattattgtttatataaaaatgatttaaaatcaaaaattaaaaattaggaatttgggaattagcaccgtcatgtttattaatttatgtcagggtggctattgtttgattgattt

SEQ ID NO: 32912 - DNA, 377 bp, Heterodera glycines
tctagagtcagccgtggtctcgccagcatcaccttctgtgagagggaaatcggcattgaggaatcggctgtcattgattgtgcacactacatgcgcgaagtttgtgccagcttcattctgctccaacagcaacaccaaatcggcgggaacaacatgaccgtcgagatcgacgaagcgctgttcaccaacaaaaataatgttggccgtgtgctgccggagcagtgggtcttcggagcagggctgggcgaagctcggcttagcactcgaagccgaagccgaaggcgaagcccaatttttattcgaagccgaagtccgaagctcgaagcccaaaaacccgaagttttcgaaggtttcgaagccgaagccgaagttttttc

SEQ ID NO: 32913 - DNA, 465 bp, Heterodera glycines
catgatagtactagggctggtaattaaatgcacataaaatcttaaaatatgcacataaaaaatgaaaaatatgcacataaatttttccaaattgggggcaaaatattcacaaattcttcaaatttgttaaatttaagcataaaaatctcgaaaatagctaaatgtaatatgaatcattttagaaccaaaaatacaaaataaatgtaaaatttatttattttgaagaaaattgagaaaaactggaggattttctattttttggcataaatttccaattttttaaaatgttacattttttattagaaaaagctccaaaaaatgatatttttgaaattttttggtcattagaggcaaaattggccgctttaatagagggggtcgttttaatagaggatttgttgaaaaatgctcaaatatgcacataaaatatgcacgaaatgccaaaacatgcacaaatatgcatat

SEQ ID NO: 32914 - DNA, 1019 bp, Heterodera glycines
ttgaaactaattcggaaacaatgttttaatgatagtttttgaccccccaaaacaaagcataaaaatgaaaaaatttataattttcttgaaaaaaggaaggatttaaaaagaaaaattagccaaaaagcaattgttctatgcaaagagacaatttttttttgtttcatttaaaagattaaatttaattgcaaccaataaataaaattgtttgtaccgattttaatttatttacatagaaaataaacaatttttgtaaattttgcatctctgttttgccattttcgcccctatttctccattttttttcaccaactctgtcatttaggggtttttgctcaataaaaatccgtgtcttaatattaaaaattaatcaaacacatgccatgtgagaatctcggaaagtcggggcccatgttcgcattggctcaaatggatttgcaaagccttcacaaattgttcctggattagactgaccttcaaaaaaaaaattattgaattcatttttatatgcattttaatagcaataatttaacgcttttcctgcctttaggataccgtttttttttgttttgtaggtaatttcatggactgaatatttttcaaaattttgagcgccggggtgaaaaacatgaatttgtagcggttttgtgctaacacatttttatcatttggggtcaaattttcaaaaaataatggcacaattgggtcctgcgctgccaataggcgctgccgggaaaatctttttggaaattttaatgaaatatgataagaaaatgtacaaaatttgtaaaaaaaaaacttgcatatttattttatcaatttgctaatgggcttaaggctaaaaatggttgccaaccccaatatttgggtcccaaactcgagactctcgagcaagaaaaaagattgaacacaaaaaatctaaaatggggtaactttagcgaaaatagtcaaactgaatattttgattgcttatctgtgccataaatatactaattttagtgtctgtttttctgagattt

SEQ ID NO: 32915 - DNA, 1014 bp, Heterodera glycines
taaagttatttaattcatttttaattttacatgcatatgttgattattaaaaaggcttgctgaaggataattttagatgaaaaaaattaaaaatgagaaacaaaaagagtatgaaaaaagctcattacaatctaaataaatttaaacactttaaaaacaaaataaattaaaattaattatttccaattaactttaaaatcaaattgaaccccgaactaccttaatgcaattttcgacgaactttttaacacaaaacctgaattcgtcgaatgtcaaatcctaatgagagccgacaagtgcaaaagaatggtaactggacatcggaaatcctattttatctttagaacttagtataatatttagattttattttcaaaattaaaaatcatttattatttatattttaattatttaatctaaattatttaccatataagtagtttattaaaatttgaataatttgatttttcctttttaatacactttttaattgctttttaaatccataattttattatattttacataaatttatgactatcgttaacatttttttatttttatatattttttataatggcttttcaaaattaaatcatatatacatataaaaaaaatatttagagtaaacacacacttttaattttttgccttacggtcttaattttgctccctcctgtaaatacatacaaaattttcagtaatggatttttttgtaggtaaattcatttgtgtaatgcccattagtgataaataaatattcccaattgtaatcgaataattttagaaatcactttgttgtaaattatttaatcatgagggaatatttattgtgatcggcagttgggctatgaactaatgtttgtcatattaaaataaataattaatagtatataaaatttgaatttatttttaaatgttgaaattgaaaaattgaaattgagttcataacaattcaccttaagaaattttatacatagaggataatgaaaagtaataatttttaaatcaaat

SEQ ID NO: 32916 - DNA, 1035 bp, Heterodera glycines
  unsure (1)..(1035): unsure at all n locations
ctctanngagtcacatccgttactaaaagtgatttattgttgtcaattttttcatgacactcactcaacttgttttgcatacacaatcaattaattaattgtcattttgttggtgccttattagcgtcgtccttcaattaattaattttttttggtgccttattagcgtcgtccctcaattatttaattgtttttggtgccttattagcgtcgtccttcacccatattcaaataaattaattgctgtaattaaatttaatcacaaccgaggcgataactttcaaaattaaataaataataataattttggatcgtttaattattaattttttaaaataattttgtattattttgcattttttcttttttgatgatataaaaaagcccaatagacttttttcacgtttcgttgtacacatgaaaaaaaattgtatcgcaaatgaactacatcggttttaattgcaatatcaaaatgatattgacattcgtcattaattgatcaaccacgctgcaaatcaaaaaattcaactgatcattgccagttttgtttcagtaaattttgatcaaattccgtttgttgtcgtcgaatcagcatccgcaccattttcatcctgatcatttggttccagatccgatccatttgttgtcgaatcggttgcttctgcttctgcatcactttctccctgatcagatgagtttgtagcattctgatcagtaccttcttcatctattgcatttgattcagttgttgttgtcgtcgaatcggttgcttccgttcctgtttcatcttcatcagttggcccagtggcattctgatcattgtcatttggtcctggatccgatccaactgtcgtcgaatcggttgcttctgtatcactcccatcttgatcagttggctgatcagtaatcccatcattcggctccattatgtcagatgaagcattctctggcggatcatctgttgttagctgctgttcctccgatgtttcgttgtcgtcttcttcgttggaagatctatcatctgctggcaatgca

SEQ ID NO: 32917 - DNA, 1157 bp, Heterodera glycines
agtttcttcaccaccttctttttggagggcgcatatctgtagttcagggtgttcttgaagcacctaattgttgtataaataagaattgattttattttgatctgtgttactcaccaatttgtgttcttcagagaatttttttgccatttcgaagtaaggtttctgaaaacaatcgtttttgagaaatttgggaaaggtcaccttttccttgtccgacattttcttccatttttcgcccatctgaatctaacaatgtaatggtcaatatgtcagcacaacacatcacgaatacaaattgataaatagagaaacaaataaaaaaactcacagctttgctcacttcgttcatctaacaaattgatcaattcttttttttcttaattcgcccgtccactcaccttcattttgggatcgtccgttaaaattcgcttcctttcctgtcttgtccatatcatataagcattcaatggccttttgatgaatttatgagaggaggaacctccaagcgcattgttgtgtggatggagttcaatgtttgttgagatattggccaaggagggagaacttaaatgaaaacatttaataaatttaaattatgagaaaataaattgacttattagtttataaaagacattccaattaaaatataaaatttgttatttaaaaacaaaaatacggtggtgcattgtcatcgtgaagagagtgatgagaaatgttggtgtgttcgttggtcgatgctcgagaatgacagtcgcgaagagacgaaggcgaagcctataaaattaacagaccatttaagggtaatcaaaaaagggaacacacactgcctccgcaattcgactcttcttctccctcgggactgttgccattttgggcttctaagtgattgttttcagaggcaatcataggggaaatgagaataacagcacagtcccaaaattctataaacaaaactttaatagaaacgtcctggtaagaggaattaaaataacaaaaaaaaaagaaagaaaagaaaaaataaaagggaacgaacgaacgaagtggccaaagcaataaggtaaatgattgaaagggaaagggaagcaaagggaacgacgggaaataaagggattgaagggagcaaagacgatgaaaaggatgaagggaaacggggggga

SEQ ID NO: 32918 - DNA, 963 bp, Heterodera glycines
  unsure (1)..(963): unsure at all n locations
ggaacttctgaaaatctgatccatcgtctggtttgtttgcattgcaagcattgctgatcaattgcagtcaaattattccgccgatatacgaaaagtgctcaaaatggttcttcagccaatcgaggcagttccaatctatcgaggtatttatgattattactttctatttaaatttgttttatttttgttgattaattgatagttcatttaattctgtttcatttcacctttaggttagtgggaaagctgcttcagtgcccgaaaatgaggaggagacggggatcgaagtgcgtgagactttgcctctcccggcatttgtcggtgttcgttgggtccccgattcggattgtgaccaatgtacatcttgttcgaggtaataattaattttctttttgtgcaatattttaattttatttttgtacatatttatttgaatttgaataattttgtatttcagtccgttcactttggtcagacgtcggcatcactgcagaaactgtggtcgaatattttggtgcaataaaaaatatatttgtaaatttatttattgccctttttcagcggtcaatgttccactaatgcaatcgctattcctgagcttggttatgacagaagggttcgttttgccccccccccaattgacacactattttaaaatgaagggattttatgggagtgttatgaaaattcatttttaaccatttttctttcttaccttattaggttcgagtttgcgatttatgctatgaaaatcggttgcgacaataccattccgagtccggcgatcaagaanatggttcgttttggagaggatggcgaaactgcaaatgctttggctgacaacggtccgacgactgcaggtccggttgggtcgactgggcatgagtgccctctttcgtctactcacattccgacattgtgcccgtgcatcgtcgcaccacagagggcgatgaaatttctgct

SEQ ID NO: 32919 - DNA, 752 bp, Heterodera glycines
  unsure (1)..(752): unsure at all n locations
atcagaagaggacaacggaggaggggagcacgaacggacgtccaaaaagaaagccatgaaaatggtgatgagcaggacgagggagaagcggcgagcggaacacttttatggaccaattgtcacaattgcggagggacgatcgaggagagcactgagcaaagtggactacaatttccacgcttatgacgaacaattacaggtaaaagctgactgaaagttggaaacaatgaaaattaaggaggccatggagacaattggcacggacgtaaaagtcgaaaacggtacgttttcacatcccgaattatgatgaaaattaaaggggaataggcatttgttaaaagcccaaatagttacagcgcatgaagaggcttcctccgctcgtggtaaggacatgcagaacatttacgaggccgagaagaagcagaagcgtgaggaggagccaagcgaaggggggcgggaggagggcgcaccggcgaggccccctaacagcggggaagggggcagaacgacgaagaaaggcggacgaaagggcaaaagactgaccgacttggacattggcaatgcgtccgagtcggacacggttagtgagaaatgccattccggagacatagaaaattaggacgaatggaaggcgagcagtgcagatgaaaatgaagaggacccagaaccatcggaggacgagtatcttccctncgnaaggcgatctgcgaggtgatttggcaaagagccacaaaaaagtaccaaaacatttt

SEQ ID NO: 32920 - DNA, 322 bp, Heterodera glycines
acaaatcgctttaaaaccacttttatcgtatagagtatggtcgatttgctattgtaaattttcggcttttttggtgtagtcgccaaaaatgatcagaaaaagtgatcaaatgaagcaaaaaattgctaatttgactcattttcctcttacattttaatgaccttttaatagagattttgtttgctgatcattcaactgcgtccaaaatacgcaccctgtattgtttgcactgaaccgctttacaacaaatgaaaaattataaatacataaatcaaaatgataataataactctcggctataaatggaaacggagagaatgta

SEQ ID NO: 32921 - DNA, 1016 bp, Heterodera glycines
  unsure (1)..(1016): unsure at all n locations
ttgccagccctagtgtcaaccccttccccatcattacttgtcttgcttttccttgaacaaccccttcagaatttcacaaaaagctaattttgatctgggaaccctggctacaaccatcctatattttgaaaaaatggtaaaattcacaaacaccagcagttttattaatttaataataaatcctaaaatgttacataatgaatattcctacagtcatacttaatcggatgatgtcattaaaaaaataaggaagtgatttaaatatctaattaataatgaaataaaattattaatatcttctatgacatgaaaagtactaaaatgacaaaacatgaaaagtactaaaatgacaaactataagaatggaaaaagaatataataaacacttgcacttaaataatttgtttgttccgaaaattccaaattaatgaattcatttatctttcaaaagattgaacacgataaataaataaatatatcataaaataaaataagtatatgcttcaaatataattaggaaaaaataatttttttttataaaatattgcttataaatgatattaaaaagtaagtacaatgatcaacattaaaatgcaagaccaacattaaaagaaatgcagtcggacgaaaggcaactaaaaaggcaaaaacgaaaaatgggcacaaaaatagaaaaaaaaaaattttcttaacgcattttagtagcaatacacgtaaaaatagaatcaaaacttaatattttgcggaatcgtctttttggaaatattgccaattcccctaattccatttcctcccccgaatccatcgaacttggagaagtccgacatgccattcaagagttggttctgcgaaccaaccccccgctccgctanataaatttgaatggaagcacgaaaggtgcncaaaattgtccccaatttcgatccaaaatatcataaacacttaaagcttagtcctttaacccctccaaattctctgacgccaatatgncgactgaaaccgagccatccaaaatc

SEQ ID NO: 32922 - DNA, 728 bp, Heterodera glycines
aaattcacaaaaatttcggcacttataaaactccattttttcttaggccagcatagtaaagtaagcccaaaatgtaagggaatttaaattgttcataagaggcgtttaattttttatttatccaatcaattttctgttaaacttttcgagacaaagcagaaaaattttccaattggatctgatgcggactcaatttcttcaacaacaaaataaaaaatattaggcaaggaattctttttctatcctttttaaaagtgatgcataaattttcatggtaaatagtcacaaatcaccattgtttcactgccaattaatttcacttgcaggagaaaaaggcgataaaaatgcatatagatataaataagtcgtttaacaaaattatctcaacaattagtcgggaaagctgaaaaaatttctgttgcaataacctattggcacaagacatgtaagtggagccggctgaaatagaggaaatgccaaagattaaaaattcgtttttatgccccactctgctttgacgggccatacctagccagagagtggagatagacccttggttgatacatttgaaaatgtagagcgggcctagcgcattcgaagaacaccaaatttgtttgggtttgtccccaaacaattcgcttatgacgcgccggaagaaaattcacaaaaatttggcacttataaaactccattttttcataggccagcatagtaaagtaagcccaaaa

SEQ ID NO: 32923 - DNA, 1399 bp, Heterodera glycines
tattagggaccggatttatatagacaaaatatggacgaaaagtcctaaaatatgcacgatcccctaatttgctctcctttttacgagaaataaaaaactgtagttcatcgataaaagatcattaaaattctctttaatgaataaaagtaaaaattataatgacgagttcgttcggaaggaaattttatggctgcatttcgtgccaaaaatattaatcaacgcattattttaaaaataattaaatcagatttttaaatttttggcacaaattgctttttttaatggcattgcaaggcgtgtgtaatggcttaaataaattaatctacaataatttcagtaaatgatcattaaaacatgtgaaattattaaaatcactcttcaaaattgccattacacatttaaatggtcaataatgtgtggtgaatgtcaaaatttcaatggaaaaaattagaatctcaacaaagtgtaatcacaatcagcatcaaattattagtgggtgagaataaaattaaaaaaatgcttttttttaaatatatttatagtatttcatttatttattttttgttttattgcgccatgttttgttgatgttgttgttgctggtgatgctgctgctgttgagctgcagccctcgccgtgtcgttgatgatcaaatatttgtcaaactcatgcggattcaaatcaccagtggacagctcctaaaattgggaatggtatacgattactaaaactccacaaaaccaatactgtaatcaaaattaggcaacactcagattatatgtaataggaattttttttagggttatattcaaataataaaactattagcgcctcacctggaacagcgggtccaccagatagcccccggcttgatgttggaatgaatcgatttccattagctcctgaaaaaattaacaatactctgtgattaataattttgaaagcttttcctccttggctataaggctatgagaccttaaatatatgaatgaacttgcacaaaaatgatccggtcctaaagctataatcaaaaatgatcccttatataaattaggctaaaaccttacatgggggatgatcggattgtaaatctgataacacaaaccaatgatcgacttgtaagtctgtataacccaaacccgaacggccacctgttgttgttgctgttgttgttgttttgattgctgctgcacaaactgttgttgttgctgctgctgatgtgccaccatgttcatgtgttggaaattggctgcctgctgctgatgttgttgctgtggttgacgcgttaaaaaggacgcatcaagcagaccctgggcaggttaagcaaacactataaaatgtatcgagttttcattatttatttatttattgaaattggataactaatgcatatcttctg

SEQ ID NO: 32924 - DNA, 1048 bp, Heterodera glycines
  unsure (1)..(1048): unsure at all n locations
tggaaaaatgtctagacagaaaagatttaactatgtgtcaagaattagcagaagaggccaaacaatcaatcgaaatagccaaaaattatcggcaagaaattgggcatatttatcggaccgcttactcgcagcccgatttaggcattggagacttggcaaataaactaaaagaaacaatgcgcgaaaaccaaatacggtttgaaaagcaaagacctcaggaagaatttagggatgaatttattgcttataaaatttaagaaaaaaaattcgagaaaatgaaactgcatgggaatcaaaggttgtgggacataaaccaaaaacaggtaaaaagggaaacaggtgaaaataggtgaaaaggaaacaggtgaaaacaggtgaaaataggtgaaatttcacctaaaaatatataggggcgtgtatttaatggggcatattagataatgtctcaactagtatcaataaaaagtgccaaaggaaaattttgtgatggttatcgctattacaaacataaaacgaccaagttcaaactttggtggaaatgtgaacttaattcacatgggtgccagggctggggttttgaaaaggaagggttttttacaatgacgcgccgacacaatcatcatcctgacactatattgattgaaatcgaagaggacataaaatatcataatttttctgcgggggcaaaatgctttttgggtgacaacaagaaatagttgatgatgctaagaaaaatccgagactccaaactgaatttagagatgaatttattgtttgtaaactataaataggatcaagaaaaaaaataccaattaaataaaaatgaattttcataaatcggaaaaagctaatgccattttattggaggcagctaaaagagagacggagagagcatggcaaggatgtaggtgcactagaggaagaggttagcgattttgccaaatcttctcgggaaactcttaatcgtgcgataaaatcccgagagaagcccatacgctaatggtgttcggnagtttacataaaatatccgactcaatctgggaaattt

SEQ ID NO: 32925 - DNA, 905 bp, Heterodera glycines
ataaataaaatttaaaaatattagcatggtaatttaagctttattaattgttttttttattatagttgccaaataaatgatgatgaaattcatccataatcgatatgaggctttcaatttcccattatgcgtcaacccagcttcattcaaatgattaatttcctgagagaatcgataaaataaaataaatatttataattttttcggtttctgatggtattagccggaaattgtttacatgaatattaaattgagctggattaaaaaaatattttaattgtttgttaaaattttaaataattggattaatcgtccgggaatcttcgcttctatctgtccgtaagtcggtcattttcggaaatgaatcaaatttttcgaattttcatccggcggcacatgtcagcaccgttggacctaaaactattaattttctaaattaactgaaatattaagagtttgccgtgactttagaaatagggaaaagggccggcggtgccgttaggcgccgccgacgaatttttgaaacttttgccccgatttcttagcagattttgtttaatgaaacaattatgtaattctgaaattttcaattttatacagtgtaaattattcacggaaaccgtggagagagaggcagagagagagacagcgagagagagagaaatgtaggtaacaaaaagaagagaataaaaaggttcaatttgcaattcaagattggccgacatatgcggcgctgacatttgcggcgctgacatttgcggcgctgacatttgcggcgctgacattcgcggcgctgacatttgcggcgctgacatatgcggcgctgacatttgcggcgctgacattggcggcgctgacatatgcggggctgacatttgcggggctaacacttgcggggctgacat

SEQ ID NO: 32926 - DNA, 379 bp, Heterodera glycines
acaccaattcagaatgattacctccgcccgtccctgacggggaccgattcatattctaattgtttgtctggcagtgcaattagccgggattttgccccttcaataactcgcgcaaaaaatttacaatttctgcagattggctcgaaaacgaacatattttggagcatcaactacttgaagatgtcgtcccaagcacatcttccaacgcctcaccaatttttggtccaaattttgagcggaatggttcaaattcgagcgtatcgtacatggttgtgtttggcgtgtttgaaaagagtacccttttgtaatttttttcacttttttttggtaaattttttttttgattatatttaatgaagaatttgcctttttttaacat

SEQ ID NO: 32927 - DNA, 786 bp, Heterodera glycines
attttcaaaatttaagctttcatctaacgggtgcaaacatttccaatgtttttgtgccatactttgcgtttgaccaatgcaagccgtaccacagcattactcatgacccgaagattgaatcccggaactttggtctgtactttttgacgaagcatcaaggtggacactgtgatgaggggtaaattgcgtagataattaggcataattaaattttaattgccatttagcatactgatctgctatccggggacactgatgcgcaatcatatgatcgatgagttcaaaaatatgtccgagttcaaagtgaaacggacattccaagtcggcaacaaagaagtaatgggaaatttaattaaaaaattttttttttaattttttaattttcgaacgattcgctttcattggagtgcgcccaagaaacggaacaatttgttggccttacagacccggagcaatggcgtggcatcaaagtgtacacgaaactgacaaactcatcaaatccactttcgacacgagagctgatcctggagacttccttgacaaatcgaaggtaatcaattttagggtaattagggttaattaacaaaaattttaaaattttagttacacctttgagccaatgactcgtcaactttcgcttaattttggcacccgaatttcactgttcacttgggtcacaactcattttggtatttaattttttgtaggcatttctatatattagtgcccggacttttgaaaaaaccaagaccaacaggatccgcggatttccaaggtcgactagaa

SEQ ID NO: 32928 - DNA, 960 bp, Heterodera glycines
ggggcctggctcgaaaatttttgaaaattttacatcatgtagtacaccattcgatagcattaaaattctctacaaaaatgttctaagacaatttttcgctaaaacccacccccctgacagttatgggcccgggactcaaatgtcccgctcaggccaaaatttttttctatttccgggaaaaaatcgaaatttttccgaaaaaaataccagtcgatagagctcgaaaaactatgttttggaagtggtcttcgtttttctgggaaaattcgttaaaaaatcctaaaattcaaaaacccgaaaaccgttttttaggcctagctcgaaaaattttgaaaattttcgaaattttaaaatctggaaaaatcgagctcaccgagctctacaataagtctgctggccaccctgcgctcaggtcaaagcctaatgagttattcaacggggactgaactgggcaaagttggtactgaaaagttgccaatttctgcagcccttccaagtataggtagaggcctggaattttttttgataattagaaaacacttcaacttagtttcctaccagcaagcattttttgatcagagttttagaaaaaaagttatgggccatcaaacgcaagcaaaagtgagaaattggccgccaggactcagttggccaccggagcggaaaacccttatttttcccagatgcgcctcaaaaagttgtaagacccttccactactttcggggcgctcccggccttcggccgggagattttgttttttgaaacgaactgcaacgtttctctatagtagtataaactagcgggtgcgtgaaccgtcggcattttcgctgggaaaaagcgcttcgcgctttgggagcttcgctacctagtctgtgaagcgattcaaattgatcgatttggttggagagatttttatgaagatataaaataattattagaggcttttagtccacatcgag

SEQ ID NO: 32929 - DNA, 1011 bp, Heterodera glycines
aaattaatcagccgccggcgaaagcgtgggaattggccattaagcaaaaacccccagcagtctgccgggactgggacaattattatgtcctgtgtctgtctgtgttgttcaaaaatgatacacaaatgttggccaaataatggaatttttaatgattttaataatataattaaattagtttacagaaaacgttaaatcagatgtgtaaagggttttttaaaagttgtgtttaattaaaatatgaaagaattaagaaatttttaatacaaggaacaactttttcttatacttaaagagaatatattaagaattaatatctatttttttaaaattaaattagttaattttaaattaatataattaatttaaaattaactaattaatttaaaaaacagtttttttaacattataatcaaaaaaactaaaaaaaaattaaaaattatattttttattttttggatctaattaatcttttttcctaaagttagctctttggaaaaaaaagtacaggtacaggctttttacaaaataccgatctctaatgcttatatttaaaattaaatttcaagttaattacctttttttaattgatccttttttggttagtatttttaattttggaatattaaattgacaaaaagattttttaattaaatttattaaataaaatattaaaaataataaaaaataaataaattcctcacaaagctcaggttttcctgcattttctaatatttttataactcaccacataagaatggtatttcaattttataattcaagtcctctttcatgttcaaaaaaaatttatcggctttatccaatgcttctgagcaaattcatttaacacattgatcagccacaatgtgttcgtgcttttccgtgcgacaaactgatcagtctgatagtaaacattatgtgaaaaaaacgtggcactgatcagcagcaccagcaaaagcaggcactttctgcgtaagtctgaccaatttactattattttttatttttaaa

SEQ ID NO: 32930 - DNA, 936 bp, Heterodera glycines
agatgctgttttgaacgaataaagggcataggttattttgaagaagtgtcaaataacatcagcaataagcctgcaaaatctaatgagtggaaaatacatgagtatagaatttattttcagaaagtgtcaacagacttttggaaaaatatatttgcaatttatcaacaattttgagaagtgagttagaaatgataaacttcacgattcaaaccagttttcggtgctctaattaaccgcgataaaaacatccgaatcaattaaatagcttctgagataataaggtttatcataaaatttcatttaaaaataaaccctcaattattggtatgaacgatactttccaaacatgcacgcgttttgcgctcgagctatttatcatcgggcttgtcaatccaaagcgaaacaacaaagatgctgttttgaacgaataaagggcataggttattttgaagaagtgtcaaagaacatgcagcaataagcctgcaaaatctaataagtggaaaatacatgagtatagaatttattttcagaaagtgtcaacagacttttggaaaaatatatttgcaatttatcaacaattttgagaagtgagttagaaatgataaacttcacgattcaaattagttttcggtgctctaattaaccgcgataaaaacatccgaatcaattaaatagcttctgagataataaggtttatcataaaatttcatttaaaaataaaccctcaattattggtatgaacgatactttccaaacatgcacgcgttttgctttagctatttatcatcgggcttgtcaatccaaagcgaaacaacaaagatgctgttttgaacgaataaagggcataggttattttgaagaagtgtcaaagaacatgcagcaataagcctgcaaaatctaataagtggaaaatacatgagtatagaatttattttc

SEQ ID NO: 32931 - DNA, 978 bp, Heterodera glycines
ggcctggcagggtcgtactcaaacaattatgggggaagcaaaaatccaacgcagacattcaagtacaggctatagggaagctattcccgaaggattcggtctccccataaatctgggcgcatcggttcggggggactgccccgaaaacaaaaaaatcgattttttcaagtgtccgtttggggtactcaaacaattatggggagcaaaaatccaacgcagaattaaagtacaggctatagggaagctattccggaaggattcggtctccccataaatctgggcgcatcggttcggggggactgccccgaaaacaaaaaaatcgattttttcaagtgtccgtttggggtactcaaacaattatggggagcaaaaatccaacgcagaattaaagtacaggctatagggaagctattcccgaaggattcggtctccccataaatctgggcgcatcggttcggggggactgccccgaaaacaaaaataaatcgattttttcaagtgtccgtttggggtactcaaacaattatggggagcaaaaatccaacgcagaattaaagtacaggctatagtgaagctattccggaaggattcggtctccccataaatctgggcgcatcggttcagggggactgccccgaaaacccaaaaaaaaattttttggataaaaattatttaaatgaactgactagataatatttaaaataggttatttctcttcctttcagtatccctgcaaagtttggtgcgcttctgatcagtttctgaaaaaaaagttaagcctaaactttttggcctgtttaaaaaggaattaaaaatttttaaaaattttattcatctccctttttgatagaaaaagcatcagagtgcctaaactaacatgtaaattaaatttggtgcgtttcagaaccctttctgaaaaatatttaagaattaattttgcaaaaaataaataaaaacgaagactcagattttcgaaaa

SEQ ID NO: 32932 - DNA, 75 bp, Heterodera glycines
ccttggcggcaatagcggtatcttccgcgtcatcttcaatgacatcatccgtgcggtagcggtactggcggtagg

SEQ ID NO: 32933 - DNA, 760 bp, Heterodera glycines
ccctcattagtagggaacggaattgatgcatatgcctattttgattatgcactagtttatttaatcataaataatatattttctatttgtttaaaacttctatgttgacttttatttgtctttggtttttttaaaatattttcatccaaattattattttttcttgattaaaattttaaggtttaaaaaatgtaataatcattttaattttttgattaagtttacgtgtgttttgctccctaaaaatcctcaataaaaaaattaaatgcttttttcatgcctatatttgagggtttttgttctccttttcaaaaagtttttttagataccaaatttgttcagtttagttgggaatgaagcgagttatgattgatcaaaataaaaaaatacaaaaaagtatagtccggtaaaaaaaaatttccgggagcgggagcgggaatcccgtgaaaatcccgctcccgttaaaatccctcagaaattttacgggagtcccgggcgggagcgggagtaattcgaaaatttaattaaaaactaacaaaaatatttttaatgcacaaatttaaagggcaatcaatttattaaattaaaaatatatagaaaaatttataaaggagaaatttgaaataaaaaaatcttatttttgagtcaaaaatcagtattttttcaaattgcttcaaataaaaatttttaataatttatttgttgactccctttattaattttaacaatttttttgcggcttattttttgaaaaaacttt

SEQ ID NO: 32934 - DNA, 986 bp, Heterodera glycines
gactaaaaaagtcataaaaaatggccaaaaagtcacaaacaagtcataaaaagtcacgaaaaaatgaaaaaagtcatgaaaaaagtgccaaaaaagcacgtaaaaaatgcaaaaaagtcctgaaaaattaggcgaaagttaaaaaaatctcatttttaataatttatagaataacattttggtcgtatttttaagcacttatttttataaataggtacctaaataggcataaaaaagagattcttccaacaattaagaaaaaattcatccaggtttcattgcctttttatcggtcaaaattttaattcgaaattttctttgtattcttcggcattttcgtcccaaaaagtcaaaaaaatcacgaaaaagtcgcaaaaactcaaaaaagtcataaaaatccgaaaagtgtaaaaaagtcaaaaaaagtcacaaaaatatgcatgttagaagcttcaaacaaactttagaacacttttttagtcattttaaggccgtttagagtcagcaaaaaaaagtcatttgacttaaattcccagccctagtaaaaacatatagatatgccgatttattatgaaatcaattaatttaagttaatttttaatacattttatttttaatgaaatatttttaagttggttgtgaatttaaaattttaatttttttaaaggctatcgaaaccattgatgaatttgttgaattcattaaaaaatattcaaatgatgaataaagaaagcagaatgatgacgatccgcagaaattattgctttatttttcgataattatctaaggaaattgttgctttatttcgataattatttaaattgctatttgggaatcatttaattattggctggtaatttttattgaaattcttttcatatttcgcgaatatgtcgatattttgacatttttacaaaaaataaaaacctaaattaaaagccccttataaactaagcctttctgatccataaaggctcaaaaatgtt

SEQ ID NO: 32935 - DNA, 869 bp, Heterodera glycines
ttttccatcatccccggtgattggacggcgacgcgaacgacgagagagagagaaacgggagcgaaactcccgtcttcagcgatcggaagagttggcacgtccggagtgctggctgaagagctcggacttaggcagttgaacctgggagcaccggcttctcccccaaattgagtcggtggtgccgttattcaaacaacagcccacttcttgtttgcctcccacccttctctccattccacccccttgggaagggaccgaacggcagcgaagagagagagagagagagaaaagagaccgaatttgaggagtggattggagcagaaggaagggagaaactccccgccaaatcggcagagagttttcgccacaaacaaagttggtgccgttagcagggggaaccaacaacaacacttcggtcgccgaggaccaacaacacaagcggtcgccgaggaccaacacaacaaacgaattgtgctaacggcaaacaaagttggtgccgttagcagggggaaccaagcaacaacacttcggtcgccgaggaccaacaacacaagcggtcgccgaggaccaacacaacaaacgaattgtgctaacggcaaacaaaattggtgccgttagcagggggcacctcccactgcacatcaaggaacagcaacgagttgtggtcgccgaggaccaacaagcacatcgatttgtgctaacggcaaacaaagttggtgccgataagcagggggtcctgccacaaacaaggaccagcaaccgggagcacctcccgctacacctcggactaaccagagcgaaacgaaaaagggaacggaacagcgaaccgctcgatgaggaagcggaaaagggaatggaaatcaggggga

SEQ ID NO: 32936 - DNA, 878 bp, Heterodera glycines
aaccatgcaagcccaggcacggatatacatcatcaagccgttctaacaaagaaagggggaaggagggaatatggagagacaagtaagagtgaaagaaaaaagcagagaccaaggaagaggggatgggaagaaaagagagagtgaaagagaaaaagagacgaaggaagaggggatgggaagaaaagagagagtgaaagagaaaaagagacgaaggaagaggggatgggaagaaaagagagagtgaaagagaaaaagagacgaaggaagaggggatgggaagaaaagagagagtgaaagagaaaaagagacgaaggaagaggggatgggaagaaaagagagagtgaaagagaaaaagagacgaaggaagaggggatgggaagaaaagagagagtgaaagagaaaaagagacgaaggaagaggggatgggaagaaaagagagagtgaaagagaaaaagagacgaaggaagagggagagagtgaaagagaaaaagagacgaaggaagaggggatgggaagaaaagagagagtgaaagagaaaaagagacaaaggaaaaggggatgggaagaaaagagagagtgaaagagaaaaagagacgaaggaagaggggatgggaagaaaagagagagtgaaagagaaaaagagacgaaggaagaggggatgggaagaaaagagagagtgaaagagaaaaagagacgaaggaagaggggatgggaagaaaagagagagtgaaagagaaaaagagacgaaggaagagggagagagtgaaagagaaaaagagacgaaggaagaggggatgggaagaaaagagagagtgaaagagaaaaagagacgaaggaagaggggatgggaagaaaagagagagtgaaagagaaaaaga

SEQ ID NO: 32937 - DNA, 965 bp, Heterodera glycines
  unsure (1)..(965): unsure at all n locations
tttttcgatagatttcgtcaaataattatttaaataactttttacaaaatccattatattctttccttgaatttgatcagcgttagcctcaactattggtaatttatgaaaatttttgatgaaagacaaggcaaaagtgtcgctgattgattcacataataaagcttaaaaacggattcatatttaaaagttaatcggatttaataccttcttttgcattgatggaattaattaatctgaaaaaatataaagcataaaaatttacaataaaattttttctaatttttagcataattgtaaatttatgaaaaaaaaatgaatttaaagagacaggaacgatgaaattaataaaattcacgaaaaatcaatgaatatgtatgtattaattttcaatcatttcttataaaaattatttatttttttaaattataataacattaggaaaaaatgaataaaataataatttcttttatttttttaatagaataacattacagaaaaatatgaatcaaataaattggtataatttgcgggaatgactcaaaagaataacaaatgggcaaatattaattaaaaataaattaataaaaaaaatgcttcaaaaaacatagtaacattaaatcagagaaaagacaatttgtgaaataatttaatattttactttgattttaattatttccttcattgaaatggttgcttcggattataaaaatatatttcaatgtactgacttcttatatcccttttcataggggaccagtaaattggacactcggaaaattggacaccagaaaattggacactaagatttcctttttaaaaaaatcaagaattagaaatgaaccaaaaatgtgtgacgattgatcaatgngcctaaaaatgaaccaaaaatgngtgacgattngatcatgggccaaaaatgaccaaaaatgngtgacgattgatcaatgggccaaaaaatgaac

SEQ ID NO: 32938 - DNA, 716 bp, Heterodera glycines
tttttcggttcgcccacactgagactattttcggttcgacctagcacctgacattagtgttcagagagaaaagtaagtgggagagagagaaagaaagggaaagaaagtgagaaagatagagaaaccgagagagatggagagagagagaaggggaagatagattagggaagagggatgcgggagagaaagaagagaaaaaagaaaaagcgagataaagagagagtgaagaggaaaaagaggatagagaggagtgcgggtgaggggggagaaattaagatgagagagagaaatagtgagcgagagagagagggagaaagtgagagaacaggtgagaaagtgtgagaaagtaagagagaaagagagcaacagtgtgtgagagagagagagagagcaaagaaatcgagatacaaattggtaagaaatgagaaagacaccgaaagagtgaacgagaggagcaagagagagaacaggaaaaacaagagagagtgaaagagagagagagacaatactgtgaaagagaatgagatagagaaagaaagagagagatgagaaagagagagaaaagagagcgagaaaggggtgaactagagagagaaagagaaagaaagagagagagaaaaggggaaaggaatgaatgagagagagagggggagaagagatcggacagaaagggaaaataaaaaagaaacagaagagaaaaaagagtgaaagaaaaa

SEQ ID NO: 32939 - DNA, 775 bp, Heterodera glycines
  unsure (1)..(775): unsure at all n locations
attattaggaaaaacaacattccttctctccatataacttttttcaatccatacaatctgcaccaaattttgcatatcgatagagaaaaaaattctgcatcgattaataaggaaatttaatgaattaaccccgtgactgtgaccgtgagtgaaaaaacccgtgaattcacggtaaccgtgaccgtgattcacggcgcatctctattgattagagtgccacgggaccgggacttgccaggacctgagaagccgggaccgggacctcgattttttttcgggaccgggaccgcaagaaaaaccgggaaccgggaccaaccgggaaattttaaaaattcaaaaaaattttaaaaattcaaaaaaattcaaattttaatttatatcaagtgaaaataatacaaaattatttggttttttatttaataaattaaattaatgaaaattttcaaacaaattttcttcaattatttcaaacaattaatcatttttggactaaatcatcgaatattaatagaaattcagatttgattttcacatcacttttttcggagcgctttttcaaaaaacttttgggaaagaaggggtccccggcggtgccgataggcgccgccgggggaaattttaaaaatttgggtgcaatttgttaacagattttcaaacaaaaaaggntggtttttgcgattattaagctcaattggtaggattttcatttaaaaaatgataaaatatgtatcaatttaaaaaaaactatgaggaatcatattttctttataggaaa

SEQ ID NO: 32940 - DNA, 434 bp, Heterodera glycines
cctctctctctccccccccctctctgtcccctctctctttctctcttttctctctcaccccctctctgtcccctctatctctctctcctctctgtctgtatgaaaacagcgaggacatttcttcgacatttcttctgtcgtcccaatgagtaattataaaattttgattattcggtgaatgggaagggacaaaacagaaagcggggaggaggctgcaccagcttaacaaaaagcgaaaaagaagccaaatgtgaaaacatttgaaaaaatgtttggaatgaaaattaaagcgacaaatatccaacgggaagaaaaatttgtgggggaggaagaggaggagggggggggggggggtaaagtggacaaaacattgggtagggggagggacaaattgtgggagattgggggggggggggggtaaaagactccaaaca

SEQ ID NO: 32941 - DNA, 908 bp, Heterodera glycines
  unsure (1)..(908): unsure at all n locations
tgagggatgtcacatttgagggaatggcacctttgaggtatggacatttgagggaaggacatttgagggaatggcacatttgagggaatggcacatttgagggaatggcacctttgagggaatggcacatttgagggaatggcacctttgagggaatgacacatttgagggaatggcacatttgagggaatggcacatttgagggaatggcacatttgagggaatggcacctttgagggaatggcacatttgagggaatggcacatttgagggaatggcacctttgagggaatggcacatttgagggaatggcacatttgagggaatggcacatttgagggaaggcacatttgagggaatggcacatttgagggaatggcacctttgagggaatggcacattttgtgtgattggcacattttgagggaaggcacatttgagggaatggcacatttgagggaatggcacattttgtgtgattggcacattttgagggaatggcacatttgagggaatggcacattttgtgtgattggcacattttgagggaaggcacatttgagggaatggcacatttgagggaatggcacattttgagggaatggcacatttgagggaatggcacatttgagggaatggcacatttgagggaatggcacatttgagggaatggcacattttgtgtgattggcacattttgagggaaggcacatttgagggaatggcacatttgagggaatggcacattttgtgtgattggcacattttgagggaaggcacatttgagggaatggcacatttgagggaatggcacattttgagggaatggcacatttgagggaatggcacattttgtgtgattgncacattttgagggaatggcacatttgagggaatggcacattttg

SEQ ID NO: 32942 - DNA, 732 bp, Heterodera glycines
gtttgtcctacttactgctattttgtgaccccgaaccccacacaatttgttcgaaagtcggaaattttgggagcagaacccaaaagtgagcaaaaatgtcgggatatttgcggacaaaaatcgcaatagagctaaaggctcttgaaaaggcgaaaactgcaaccgaattgtatgctgagccggacaaaactctgacctcattggaaaatgaaattctcctggaaagcgcggcagagagaataaagtcagatgtggaggcagtgaatgccaaaatcgagcaaatttggataaccgcaagcaaatggcatgacgtcatacaaaaaatggacaaggacgaaagaatgtgagcagacagcgtatgaacaatttcaaacaacggagaaactgaacacaaaaatggaagcagccaacacaaagctaacagagctgaaggacctggagatgcaggtggaagcgggagcaaagctgcaacgctccaaagcggacagagacgcgcgagtggagcaaagagaacatgcaaaagcaatgtcgaagtcgaatgcagaagcagacaaaggaaatagcgtgcgagaggcaatgaaatgactgccgcattgtaccaattgccaacactaagaattaagccgtttgggggagacaaacgggaattgcccatttttgaagaagcatttaaagtggatgtggaccaaaagccaggaagcaaaacggagaagctaaatttgctgaaatcgc

SEQ ID NO: 32943 - DNA, 415 bp, Heterodera glycines
cgtcagttggtcttttttaaatctaaattttacaatacccaaagattgggagtaaaaataggtgaaataaatttggaagaaagctgccaaaaaacacaaaatttttccatggcagaaagtccgtccgaaccagggatggcacggaatttcgacttccgatttccgagatttttggggtcggaattccgatttccgaaaaaattttggtcgccggaattccgacttccgatttccgaaatttttgataaaaagtcggaaatttttttgagttttttttcaaaaaattagtaattttgtagaatttcagttcataaattgcactgaaattttcaaaaattttttccggcggcgcctttcgacaccgtcgtactctaaaaaccttaattttcttgaaaaatttacttaaaatcgctaa

SEQ ID NO: 32944 - DNA, 1266 bp, Heterodera glycines
  unsure (1)..(1266): unsure at all n locations
aaagaaacagagagaagaagcagcggaaaatgactaaaaaacaaatatttagaaaaacgaattaaattagacaaatcaccgctttgatttgttccacttccatggttgaattcatatagcatatgagcttcttcggaaaattatcgtgacgaggcgtgaacagccatttggcaaccgtttggccatccgtcgcattggcactgtcgtcgggcggaaattcgagggaaatggcgccatcgaaagacacaaattgaagagactgacaatcattgagcattgacgggaccaattggcgcattcgacgnaaagcgatggggatcaacatggtgtcatagatagtgtccttgaacattgnccaatggtgcgaacacgaactccgaacgcgaacatttcatatcgataaacatgtgttgagcatggcgcgaaaaacgtggaaatggccaaaaaaggatcccattttggcgatngagctgaaatccaaaaatggattgggactcctttccatttctttttacctcgacccaggcttttgaagccaggaattttttcggaaggattgtgggaattggcaaggttttccctgggattgaaattttctttttttggcccattggccaaatttgggccaaattttttttcccatttcctttgcgggtttaaaagggcccccaaaaaaataaaaaacggggttattttccctggccgggccatttaaatggggggaaaaaaacacccccccccccaaacccgggggggaaattaaaaagaaaaaaaaaaagggctttaaaaaaataaaaaaaaaattttttgtttttttcttttttttcccccctttttgggggggcgccttttttgtggggggccccaaaataaaaaaaaaattttggaaaaaaatattttttcccccggggggggaaaggggggggggtgggtgggggggggggggggtgtccctttttttttttttcctccccacacaacaccgccggggggggggggtgggggcgccccacacaaaaaaaaaacaaaaaaacgggcgggggtttcctcccctcctctctttttttttttttttaaaaaaaaaaaaaaaaatccttttcttttttaaaaaaaaaaaaaaaaaaaaacccgggggggggggggagattacctctgggggggggggggagggggggggcggggggcccgcgcccgctgttttttttttttttttttttttttttttttttttctttttttttttttttttctccccccccccccccc

SEQ ID NO: 32945 - DNA, 131 bp, Heterodera glycines
cggacacggcgcagcccacggcagccagcagctctgccaccatcaatgccatgaaatatgcgcgcagattgatcgcgctgccgccatcaccgggcggccgcaccgacgcggcgccgatcagcaccaggccg

SEQ ID NO: 32946 - DNA, 189 bp, Heterodera glycines
acctgctgctgctggacgaacccaccaaccacctggacctggcaacgcgcgaggcgctgtcgatggcgctcaacgagttcgaaggcacggtgatgctggtcagccacgaccgcgcattgctgcgtgcggtctgcgacgagttctggatggtcggacgcggcgccgtcggcccgttcgatggcgacctcg

SEQ ID NO: 32947 - DNA, 932 bp, Heterodera glycines
gattggtggcatgccattctttgccgtgtcttttcctcgttcggtccgccgtcaaaacctcggcattttgtcttacccgctttgcaattcggacattcgcagttgcgccccgtttttcccccaccgcttttgcttttcgttttccccccggctttcactcgttgcttttgtccctttgcatttgatttaaatgcttcacgatgagagtttgtcgacactgatccattgtttgtttccaatggcatttgctgtttcattgtgccattctttgctttttctggcgttctgttgctcccttttttggcgtttcgttgtgccgccgttactgttgttgaacttttgttcttcaaaccggaatcggcatgtgttgtggtgggagtgaattgaggttgagagtttgagaaaaagcacgcatttccaatgttagcccccaattggttggagaccaaacctggcaaaacgaataaaactgagcgaaatggaaacccaattgaacttttaccacccatgaagcgacttctttcaattattcattaatttgtctttccctcctccgaattgtcccacctccaaaagtgttgccaaaatacgacgcaccattccatcctccgtttgactgtgccgaacttgtcgccgtcgtcgtccctgctgctcctcctcctcctccatatgttccgttaagcagcgcggccgtctcagtggcggctgcgctccattgccaagcggacggtgcccacggcgttactgcggcagcggccatcggtgccgccaattgagtggaatttgcgtacgttgaaatgacgagagacgaagagtcgagccacgattgggaacaatggcagaagaacactccgctgaattggaattggaaaagcgaatgaagccaaaaatgggatttgtagcatcagcacaaccttagtgtctgtaaatga

SEQ ID NO: 32948 - DNA, 957 bp, Heterodera glycines
  unsure (1)..(957): unsure at all n locations
ctgcggcgttttcattgtgccgttttgtcgccgtcgccgccgactcagcgccggcacggcacaaaatgcgcgtcatttgcgcacgttgctgatcgtccgtaagacaactggacacgaaaaataaagaaaatttgaaaaaatgaatgaatgcctggcgtaatgaagcggagaacgggaggcctaaaataattaaaatttaatttaattaattaaatggctcttgattttgtgtaaatatgtagatgagaaaaaatggaagaacagctcaattcttcatatgaatttgaatgattgcattttgccatagcaaccggcagaaaatgccattgtaaaaaaaagtcgggagcattaagaagatgagtaataagttaattaaatatttaaagagtcaaagataattgctttaaagtatttaattaaaattaaaatttaaatctaaattaatatgaatataaatatgattggattaatacatattaagaaagtttgaattttatcctagaataatgaaatatatgcaataaaattttatttgattagaataattttattaattagcaatttaataacaatttattttttattctagtataaaaattctttcatccttaattaatttggctatttccaattaatttaattgccttgtccgtcaaattgacacaacgcgggaacatcagcagcaaataacgcgccgcacgtgcccgtccgtgcaacaccttaattgaaattgaaaagtgattttctttgtgtgttaatttaatcgctcatcccatgccaatttattcattggcacggcacgtatcattaacaaaattatgaaatcaatattacaggatccggcagaatattttaaattgaaaaaaataaaattttnaaatttaattgttttttcttttcttttttttattttatgggattnaatatttcatatgttttttgatttttggattattt

SEQ ID NO: 32949 - DNA, 57 bp, Heterodera glycines
tgcccaattcgcggttgagccggcggatcacgttgccgatgtcggcggcgatcgagg

SEQ ID NO: 32950 - DNA, 403 bp, Heterodera glycines
cttcagtttcgctgactctcacggcactctccgctttcggacattcttttgtctgatgccggcgaatacatttgtagagcaaaaaacgcagcaggagaagcgatcagaaagtttcgaattgttgtacaaagtgagcaaatgggcaaagagacggaaataacaaaaggaaacgggggggaagagaaaaggggggaagagaaaaggggggaagagaaaaggggggaagagaaaaggggaggggaaagagaaaaggggggaagagaaaaggggggaagagaaaaggggggaagagaagaggggagggggaagagaaaacgggggaagagaagaggggaggaggaagagaaaaggggggaagagaaaaggggggaagagaaaaggggggaagagaagaggggagggg

SEQ ID NO: 32951 - DNA, 1008 bp, Heterodera glycines
aagcaatgaaaaactttttacctgtttgcacgcgtcgtacaccgcctgcatgtccgccgcggtggtaaagtcaataaagccgaacgcagtgcgatactcacgacgcaaagaattcggtttgatgcccacaaactccacaccgtcggtaatggctaaaaaattaggattaaattgaagaaatttttgtttttcaaatgaacaaaccttgaatttcgcgcatcagctcctgctggcccagcttaaagtctacaaaacggcccggcttggtcaattggctgaagtaaatgcgatgggtccattcccgacgaggcgcgatgttcaaaacgggcggcagagatggcggcgtttgctgctgttgtttgacagctaaagaaaagattaagtaaatcagtgaataaacggtttaaaatacatattatataaaacaaacagtataaaaaccacaatgtatgggtaaaaaacatcccagttgattgaaatttatataattaaaaaaaagttgaccaatttggtgttcgggattgtgctttgcgatgttgttgttgtgctgtggaatctcctttgacggagtaggtgccgtcggaccattcgttgcagcaacagcagcaggaacgtgcacggtcacgatgttatcaacattgttcggcccattccctcgtgcggcagcggcaatggccgcgtacgagccggccacgacagactttggcctttgagcccaactattgtttggtgttgttggccgcggcagtggtgacaaccgcagggttcggctgttgttccgatgttggtggtggtgcagcggcggcagttgcggccaccggctgagacaaagacggcggcggggcggtatcaaccgttttcggaacatcgacaatggaggagggaggagcaacggcggaaatcgccataacttcatccttcttattcggtgtagacgtcggagagggcaatgagtcaacaacggttggagcagcatcagatggcgcatccggctttttctccggttcc

SEQ ID NO: 32952 - DNA, 65 bp, Heterodera glycines
accaggcggccaaaatcgccgcgcaggctggcattcgggccgatgtacacgtgcttgccgacgat

SEQ ID NO: 32953 - DNA, 949 bp, Heterodera glycines
ctttctctgatcactctctttgggctgatcggtctctctgctaatctttgactctttatctgatcactctctttgggctgatcggtctttctcttgctaatctttgactctttctctgatcactctctttgggctgatcggtctttctcttgctaatctttgactctttctctgatcactctctttgggctgatcggtctttctcttgctaatctttgacgctttctctgatcactctctttgggctgatcggtctctctgctaatctttgactctttatctgatcactctctttgggctgatcggtctttctcttgctaatctttgactctttctctgatcactctctttgggctgatcgctctttctcttgctaatctttgactctttctctgatcactctctttgggctgatcggtctttctcttgctaatctttgactctttctctgatcactctctttgggctgatcggtctttctcttgctaatctttgactctttctctgatcactctctttgggctgatcggtctctctgctaatctttgactctttccctgatcactctctttgggctgatcgttctttctcttgctaatctttgactctttctctggtcactctctttgggctgatcggtctttttcttgctaatctttgactctttctctgatcactctcttttggctgatcggtctctctgctaactaatctttgactctttctctgatcactctctttgggctgatcgttctttctcttgctaatctttgactctttctctgatcactctctttgggctgatcgttctttctcttgctaaatcttgactctttctctgatcactctctttgggctgatcggtctctctgctaatctttgactctttctctgatcactctctttggggtgatcggtctttctcttgctaatctttgactctttctct

SEQ ID NO: 32954 - DNA, 1418 bp, Heterodera glycines
ccccaacgggtcggctatgatcagtggcaaatgctgttcgtactttaccggcaccgcaaattagtcgctgcttttgctgctgctgttcgaatgccggcacttccaaataaggccggaaaagccaattgcgcatcagcaaatcgccatccttttgtttttccatttcttttctgcttcaaccgaccctttctcctcaactgaccactctgctcggattgggctcagcattaagcgacgaagccgacagaaaaaggcaaaaaacgaagctgaacatggccaagtgggggaaggggacggagggaccgacggcacggagagacatcggcggaatgagagagcgaacgaccgacggaaggacgacggaaggaaaaggaagaagaagcgaccgaaggaaggttcaaacggtgccaaaatgcaaaagcactgctaaagaggaggcaaatcaactcaaaataacgaaatattaaggatggcataacccataattaattatgttttcgtcgagaacaatttagggagtggggagagccaaaaaaggagaaatgcttgagaaatgctaattaacaccgcaaatagacgtgataatcccctggggcggagggtgccgaaacaatagtgccggaaagggcaaagacattggggaggggggggggggagagcggtgagccgaatttgcatgttctgctcgagtttgggagattctgaaaaaggcacattaaatttggaaagaccgaatttttgatgccggaggaattggcgaaaactgaacaggtaaaactgggagagaagggaaatgaccttcgtttataagcagagcaaagatttttgtccaaaacggaagtaattggggaagacaaaaaattatagcggcggaagggcggtcggcggtgtccttttgggttaatttgactcatggcgaaggcccaccacgaggccgcgaagaggccgagtgagtaccttcggtgcaggaaaattattaaattttaaaaattttttaattgctttttaaatatgccaaaaaatgtaggcttaacttttttagtgaaaattcgatcactcatattttttgctaattgagcagaagcgtaccaaactttgcagggatactccccggtaaaggactaacttacactgaaatgagcgccgagctagctggctcaaaaaaattttcgaaaatctgagtctttcgtttttatttattttttgcaaaattaattcttaaatattttttcagaaagggttctgaaacgcaccaaattttatttacatgttagtttaggcactctgatgctttttctatcaaaaagggagatgaataaaatttttaaaaatttttaattcctttttaaacaggccaaaaagtttaggcttaacttttttttcagaaactgatcagaagcgcaccaaacttgcaggga

SEQ ID NO: 32955 - DNA, 639 bp, Heterodera glycines
gtcgaccataaattgttaaaaaaattttagcagacgtttccttcgtctatcccccaaaaaatcctatttcaaaatttttggaacagtaattcggcataacatttttgtaaaattgcaagaaaatttttttaattggttaggaaattttcttttaaaaactttcggatggggggaggaacgacctgttccggtagttatagattaatcctacaatttttgtacacacctcaggctcaagttgtttggatgtcagaatgaccaggccgtagatgaggtcgcccactttgacgttcggtcggttccgtttggtggccccctcaaaggaagtgaagttgagcagtgccaagtcgatggagccaatgtcaacctggacaattttgttgcatttgaattttggagaaatttattaattaatcatatttagttaaaaaaaaactgggtctggatttttaaaaaattaaaacaaccaaaataaaaataaaaacctttaaattatcggtgggggtcgattgggccccgccgattgggccccgccggttgggccccgccgattgggccccggtacgattgggccccgccgattgggccccggtacgattgggccccgccgattgggccccatggggcagtcgctttttt

SEQ ID NO: 32956 - DNA, 980 bp, Heterodera glycines
atactcgatattcaaggctaaacgattttcgtgcattatataagaaaactttattttttggtactgaagtgtccattttcactgggactcagttgtcccagtgcttagatggcattggttcgagtttataccttgttttttagacttagctcatcaagagctttcgaatgataccaaatttgtccgaatttgggcgttttaaaaggtcaggagcctcccttttcactcaaattttcgagttttaaaccggttttttggcatttccgcaattggagacctactttttcgtgcatagctcgtcgagacgaatcgattagtatatcatttatgtcattttttccggggggttgactatagtatatcccttttcccggtcaaaacaggtaaaaccgggacttaaatactgttgtccgagttttttagtaccaggtctaggtcccgtatttactctagtttttatgtttagagcctaaaaaacttttaaaaaatttttaaaaaagcctattttagcctatctggcgttttgtcctaattgtttttataggtagtttgttttctttctcttcaaaaagcttttcttacaactctgataaaactagaccgaaatttgaaatatcagcgtaattaaaaatatatccatattttttctaattaatcatatgataattatccgtttttctaattttctttattttacttatgaatggacaaataattatatgtataaacaaacaaaaaatttaacacaggaaagatcattgatatgataatgctttcttaacactatatgaattaaaaggataaatagagctaaattcttttttatattaagcttgaggttaaggagataggtatttaaaatggcataagcttcttatttgttgacttagacattctccgtattgatgctgacaatttggtattccctcggacatttttctcatcgcattttccattgttttcttcttcagatgctgaaa

SEQ ID NO: 32957 - DNA, 970 bp, Heterodera glycines
cttcccggcaattcatggccgtaaaatgcgtttgaattttcaacttttgccatcgcatgcaacttgtgtttttattttcaacggcgtgttggcgttgtgaaataaatcagatactgtatccatttgcaattaggacaacccttttctatacaaaaaactgggtttacggtcatacagcgaccgccatcgcctttatagaaagtggccataaaatcagttcgtttaaagagagaactgcactttattctcatattagccgtcagatgcccgacttagcttcaaaacaggtaaagccacacattctctatcattatgaattttgatcgcctcacttcccggcaattcatggccgtaaaatgcgtttgaatttcacaacttttgccatcacatgcaacttgtgtttttattttcaacgccgtgttggcgttgtgaaataaatcagatactgtatccttttgcaatttggacaacccttttctatacaaaaaactgggtttacggtcatacagcgaccgccatcgcctttatagaaagtggccataaaatcagttcgtttaaagagagaactgcactttattctcatattagccgtcagatccccgacttagcttcaaaacaggtaaagccacacattctctatcattatgaattttgatcgcctcacttcccggcaattcatggccgtaaaatgcgtttgaatttcacaacttttgccatcacatgcaacttgtgtttttattttcaacgccgtgttggcgttgtgaaataaatcagatactgtatccttttgcaatttggacaacccttttctatacaaaaaactgggtttacggtcatacagcgaccgccatcgcctttatagaaagtggccataaaatcagttcgtttaaagagcgaactgcactttattctcatattagccgtcagaccccgacttagcttcaaaactggtaaagccacacattctcta

SEQ ID NO: 32958 - DNA, 690 bp, Heterodera glycines
gttttgacgagttaatcgcagtgggcaaaaagttgcgtcgaaagtggcccaatggaattggaagtgtccgcggcattggccgagttggacggactgattgaacttgttcaccaagttgacgagcaaattgaggctcaggagaaccgcctattttccatcaaaaagcaactcgcaaaaatggacgaacaggcgaaattggtcggcgagagaatgcgaacgttggaaaaacgggctgaaagaatgggcggaaagggcacggctgacccaactccgatcattgtgagtcgtccttctctaatcagtgaaataagcagtcgccaatcccttccgtattatttgtcgatttggtccaatcccttaaattttgtttaaagtctgatctcttaaattagtctgatcccttaaattaatctgatctcttaaattagtctgatcccttaaattttgtctaatcccttaaattaatctgatcccttaaattttgtctaatcccttaaattagtctagtctgatcccttaaattcagtctgatcccttaaattttgtctaatcccttaaactagtctgatcccttaaattttgtctaatcccttaaattagtctgatcccttaaatcagtctgatcccttaaattagtctgatcccttaaattatgtccaaccccttacaatagtctgatcccttaaattt

SEQ ID NO: 32959 - DNA, 929 bp, Heterodera glycines
ttccatatcgaaaatgattcatttccactttttccctttatttccctttcaattcgatggaatgtttcggtccgctggtgaaaagtccatttcattcattcattcgttacgttgtccattcattctcatattaatatttccgcttaatctgaactcgtttagctttgctttgctttgctttgcttccaaatgccattctctctgaaggctttgttcaaattcgccattttacaaaagaatttcatttaaacgactgacaaaactaacgactcacttttggaacattttaaaacaaattgatatttatttaacaataatatttataattggcaataaataatttttaatttttgcataatttctattcagtttaaatgtttttgatttttctgctcatcattttgctaacaattcttttatcggtgtttggacagaacatttcgggacaaggtcagtaaaactttattgaaaatataatttataaaaaaataataaatttaaatttaaaaattaaattattctttaataggaaaatcggaggaaaaattagattcaattaatgcaatgggaaaatttgacaaagttcggctgaatgaaaagaattatgggctcgttagaaacttgcacacgaattggtacgcgggtggcatcaaagcgattatgggcaaaatggggagagatttgttcagaaagttattgccgagtgagtgaaacactcaattattttcataattttacaatttaaatcaaagtaatttatttatttgacaatttaattcaacccttaattaaccctaattagcacagacgaacaaaaagtgatggccgattgtttgaatcaaattgaagacaggcgagatttggtgcaatcggccaaatgcctaacaaatttacgcagaatttatcttttgcggatcatcgcttcagct

SEQ ID NO: 32960 - DNA, 816 bp, Heterodera glycines
  unsure (1)..(816): unsure at all n locations
aaaaaaacataattcatacaaaaaataatacatatttaaaataatttattttactttaaaattatttacacagtacaataaagaaataaatatttccaaaaattaagtttgttgacacaaaaaagtatccgaatatattagtaatttggaaaaaattttaaacaataaatttattatcatagcatttctgcattaaaattttttgatttgctgaaggtttttagtgcatataaaagcatatttatgggttttggagaataaatgcatatttcggcatttttgcgttttagagcatattttcgtcattttttggaaattttcataagaaaaatgcaaaaaaaatgaaaaatacaccactaaggatcgacctttttgcgaattaaaaaaatatgccgttgaaaatcgaaaaattttgaatttttgtaagaactttcgaaattgcatatataaaattagaaaatcaaaattttttgcaattatctaaacgctccttagccattgttttttatgtttttatacacaattttggcatttattgagggttaaaagtcattttggttaattttttaaggcattttttagtgcatatttgggcattttggttaaacaataatcaaataaaattttgttcactttgatggtccgtttgtgagtcggcattccagatggagtttcgttgtgcaccgcctccatgttgaagtcggtgcggaaattgtacatctcctcgtttattgattatactttaagtttatganatggtanataaggatataaaaaaatatttgtattttaatactcattaatatattctctgcc

SEQ ID NO: 32961 - DNA, 127 bp, Heterodera glycines
cctttaattatttattatagtttcaattaggaattattatttggaattatctcggaattaatcttagtttagcagcctttgatgatttggcagatccaactaattgtttttaggtcaagggcaaaaa

SEQ ID NO: 32962 - DNA, 456 bp, Heterodera glycines
  unsure (1)..(456): unsure at all n locations
aaaaaattattttagcaataaataaattagctgactatttatatttctttaagtaaattatntagtcagggaggaatcaaaattaatttgcctnagtaaaaaaactcaaattaaaaaatttggtaaaaaagtcaaatttttaattttaatacgaaaattcgtttatttttcggctaaattcctataatttagaaattaacccaattttgctaaaaacaaccttccattactttgatatttgatgataaataggggatattatttatagttgataaaaactgctaaaacagttagttttggcggtacgacaattgcggattggcaattgcggaccggacaattgcggacgacaattttcggcccttccgtagacacatcaatcatccccttctatcacggtaaaaatgagttaaatattttaatataaaaatttcttgcaggctcattaattcataa

SEQ ID NO: 32963 - DNA, 849 bp, Heterodera glycines
taatcagtgccatcgatgctgctatcgtttgccgttcctccggcatcgctaacccggccacttgcagtgtttgtcgcagtttggcattttcacggcctaactcggcgtttttggcacgaagcgtgaaaatgtggtcgaccgcccggcgaagggtcgccgatttgctcagcttaaagtgaaaagaagtgtttaaaaaaagaagacaaacggcggactgacttttgtggcattttcttcggctgatagcatttcctaaagaatggatggaatttccgctgtgattatttaattcatttgctttgggtacggtacctttaactgattgatacggtcattaattgagcatcggtatttcttttcaatcaaattatgcgctgttcgtcgctccgttttttgtccttaattttttctctattattatccattctaattttggctttacttttcccacttttgtccccaattttagcattttccattgccccttccccccccccaaatttcggcacttttcttcccccctctcttttagcccccttcccattttggaaatttcctttgccccttgctttttggcactttcccttcccgttttatctcctcctatatttcggcattcttccttcctctttgcccaccacatttcggcatttttcttgccctctcttttcgcccctcttcgccctcttccccttttggcactttttcttcccccctctcttttagcccgcttccccttttggcactttttcttcccccctctcttttagcccgcttccccttttggaactttttcttgcctctctccccgcatttttgccactttccttttgtcccttgcttcccccc

SEQ ID NO: 32964 - DNA, 558 bp, Heterodera glycines
cataaatacaatttggggttttttaattaaatattttacgaaaatatttttattttttatcaatattttcaaaatatattggtaatttcaaaaatatcttttaacaattaaatgggtaaactttatttattatttttttattaagccaacctgattagaagatcaccgccaaaacatttaaaattggaaaaatttatagaaaatcccaacggttggaaaaattttttagaaaaaataagcttattaaaaggagcacaattctttacacaattgaaaaaaggaccaatggccacaaaactatacgacctgattttgctgatggatttatcaaaaaaatcttttcaaaaattagaaagccaattcttttcacgactttcggcccctttgggctgctgctctttgcccatcctccccattgtaattcaaatcctccaattctcatttgaatgcatataatatgtattatttatttgtcgccttccgtcggccgttcgttgcttttcctccctttcttttccccgcttcccccgtcggccctttttttggttacatttcgtc

SEQ ID NO: 32965 - DNA, 695 bp, Heterodera glycines
tttgtcataaaacagtgcaaaaccactgaccaaatttgtacatttggaaaatgttcggctggtactaaattttttctttgcttaaattaatgtctttattcgttaaggaaaacctttcgcttacagccttgtcatgctaccatgaaaaggcctatctcctgcgcgtcggctgtaagaattttgaaactaaacagaatgccgaactttcgcacttaaaattgaaatgggattgcaaatgcaaagcaggcaataccttgcaaaagttatctttcacaccaccacccacacaaggttgtttgtcgaaaagcattagtggtttcgcaactgaccaaatttgtacaagaggaaattgtttaagtggtaaatacaacattatgagtaagagatatgatttttagttttttccaatttttcctcggctcccaatggcctcaaacgcatcaaaaacaagttttttatatttgttaagctactagaaaaatcaccgctgaaatgaaaaattttctcaaaaattcagcatcaaatttatttatttatttccatgagaaaaaattttgatttttaaaacgttacttttttgaataggtttttcattttgcaacccataaactttaggcttttaatgcctatttcttttttagtgcaatttttaagaggttttttaacgatcgaaagccttgtcatggtaccatgac

SEQ ID NO: 32966 - DNA, 106 bp, Heterodera glycines
cggtacttgtgtggtttacctgacagatttcacgtacattttcagatgcatataaatgtgttttagaaattaatgaaaataggttttaaggggtttttgaggtcgc

SEQ ID NO: 32967 - DNA, 893 bp, Heterodera glycines
agttagtgaagaaagaaaagagagggggaggaaaggcacggcaccacgggggggggggaagacgcacaaaagagggcaaagtcaatggcacgcataaaaacgagaaaaatatgccaagaaatagggagagcgcgagagaaaaaaacggatgatttttctttgacttattaaaaattggcaaaataaattgcaaaataaaaaaagacaaaatccgtgttttctttatgaaagcgaaaatttgtgacattggcgaaaagaaaaccaaaaaataaaagtaaatgccattgttgggtaccaaaaatgccaaaagaaaacaaacgaattgaatattagtgaatgaaaggaaatggcaaaagtaagcattagccaaaagaaatttgaatgttttgttagtccgttaaacaagctttgctattgtctttttacctgacaaatattaaacatttcttattgttttttattatattcatagaaacattttacttaaaagctaaagggagaaaatcagaagtgaaagattggtggacgaagtcatttcagcacaaagcctaaattatatttaaattttatatatttttaaaaatcaattagttttcgaaatttgcgaaaattcaactgataatttttacggctattgttaaaattcgatcatcacgaatttgtcttcagtgttcggcataagacaagccccattcagaggtaattggcgggcacagaccaaaattttacattttagtggcttttcctttttccacgggaaaggttttttttcatattcaaaaaattttcaaaaaaactaagggttcggcggagtcgtaggcgacaacgaaattttaattggtgcgactttttgttaacagaatttaacaaaatgatcaatttcaattttataa

SEQ ID NO: 32968 - DNA, 805 bp, Heterodera glycines
aaaggattgtccttcaaatttatgcattaaaaatatttttgtgagtatttaattaaattttcgaattactcccgctcccgcccgggactcccgttaaaaatggacgggaatttctggaagcgggagttttacgggattccagctcccgctcccggaaaaacttgaactcccgctcccgtgaattattttttaccggtctctacttttaatgttttatatttatatgaaattttaatgttgtatagttgtgcagttgttcttatagaatgctgaatactcaaattgaaattcagcccactttcgggacggatcagcgaattaaaatatgaccattaaccacgttgaaattaaatttatttatcattattacattcaaaaaattaaatagattaattgtatgaaaattgaatgttatgaaaaaaattaatgaaaaattaaaaaattttaataagcaaactttgaaattataattttttaaaaagaaaacaaagtaaaaggctcgagactacgagtatgatgagacaaagggcactaccactgcaccactgaaatcacttaccttttaatatttttgacagaaatttcgaagtaaaaaatgtcggacgaattattgtccagcaaaatcggatgtttagcgaagatggaagaccaacaacattttgaaaaaatagatatgtaaatttttagaaaataccattaacatttcccttgttttggacaatgagatttttgtcgccaatgatttcaagtttctcatcacaattattgacatcccaataattctgttggaaatttaaaattgcct

SEQ ID NO: 32969 - DNA, 843 bp, Heterodera glycines
gctccctttcccctgcccttttttagcctttgtcccttcgtaatgccctccttgagagggttgttctgttggtgctgcgtgtcttcaattggttttatgccgtcgttgctgaagagcgaacgcttcgcacagcgaaaaacgcatcggccgccgtttcttccgccggtcttcgcgttttgtttaaaaagaaaactttgtcttttttcagagagtgctttttctacatttttgtcgcgtcaaatgtttttgggcccttcgcacgaaaaaaaatcgcaagagaaaagcgacgaaattggcattggcacagccgcggcacattcgccaaaggcaatgaccagaaaagataaaaataaaaaaatgttcctccattttgctttggttgactgatcagtctccgcattgatcagttccccctgatcagtctccgtccaaaccaacactttaaggtcgtcaatttctcgtttctcattggttccggcattaaaccttctcggccgacgagtttcacccattcggacactttaaattcgttggagccatcattaaaagcagcgtacaaagcttttattgtacgatgaattggtccaactttatggcattcattttgcctttaaaaggaacaactcaatccgaattcatttggccgctttttggagcctttggagtcggcgatttctgcgttttgcactcttttggaagtgaccaatttgacatttgttcggacttttcttgacgaacttttgctctaccaacggatgctggtacaaatcaatgccctcttcaattcatagacaaaataccattggcactttgactgttcatttcctttttgatcagattgac

SEQ ID NO: 32970 - DNA, 875 bp, Heterodera glycines
tcccgtgcccatcgatgcctcttcgggatctgttggctccgaatcggatggtcgcaaaaactttatttaaaaaaaacgattttggcattcaatttttgattttggcattttttacaaatgcttccaatgagcagttgcagtgccggatgacgaaaagtctcatcgtttgctcatcccatgggatcatgtccaagccgagcacccaaaagcccacaaaatctttgattttggcaccacttaatgccattttcttatactgcgcaacttttccatcttcaatgtcaatcccttcttctaaaatataaatgcattttaaaattaaatttaaaaataattttaaattatttttaccatcaattgtaatgtaagcagcaaaatggcttttgttgccgaaatgaatgttgaattggcgaaaaacatcgggcacaatgtaactaaattgcaatagcaaattttcgattatttataaaaactacagtttttcatcatcgtaatacggtagatcaaaattaccgaatttcaaaaaattacaatataaatggcaaattttaccttttctcgcagaatgatgtgtccaaaattgccgtgtttatcccagcactttgtctgttaagttttatgctaatgccatgccaagtgagttttgccattgaatttccatgctttttggctctgttttggcattcttcggcaattggattctaaaaaaaattttttaatttattttaatttaaaaatgccaaaaaattctttcacattgtccatgttgtcgatgttgaacatttcgttgcttaggtctacagtatcaactgaatgatcgttgtccaagactccggtggccattatgctcgggtagcaaatgatcagactgaaat

SEQ ID NO: 32971 - DNA, 724 bp, Heterodera glycines
gcctgaggtattttcaaaagatgagaaaattggaattgtaaaatgccaattgcctatcatcacatataaaatgggtgcgaaaatggtggacaaatgcaaatggaaaatcggaattggaaaagacaacgaaagcgaactgaacgaccatttgtcattggaacatttggcagagtttgagcagagactgaaggccaagcgcgagaaagaggtgagtaatgggaaaagcatttgggaggacaaaaagttaatttttaatgaattgggaattaattaacgaaaaaccaaccattggcatttgttatgggttttgtggaaccgtacttccattgctcaactcgcggtatcgccggcattcaaaaaggctcccggacatttggacagtggacacttcgacagtggacatttggcagttggacagaagcggacaactggacagtggacacttcgacagtgagtgtattttttttattattataaatggctttagcatcaatagaaaaaatatttttcaacattatttaagtaaatgaattttctttaaactgatcaagcattaacataggtaagtgattctttcgaaaactaagaatatttttactgtttattaatgagcgaggcgcttgtgaattgactattttgagcggagcaatataccaaatgccctaagaaaatatttttgtctttgctaaagccatttataataagtaaactaattcattcactg

SEQ ID NO: 32972 - DNA, 951 bp, Heterodera glycines
acatatcggttttggcctcgtcccccatttcctccgttcatcgcattaaattgttcgtcgatgtttcggaatcggctccccgttatttcttccggtgcgttcacatacggactgattgtgccgtcttttctgtgccattgcctttccctttcattcgcttttccatcgtttcgtccgtccattttaatgcgcgtcccttccggcggtggattaatgtctgcaattgttttaagcattttttgccttccattccatgctttttatgctctttccgtttgtcccattttacccgtgtcttcccttccatttgtctgttcgttttctctgtcgatggcttttaatgggccataatatcctggaattgttttttacgttctctctcgctttgttactcttcttaacttcgtccgtttgtcttcgagaactgttttccccagtcttctttgtattcgttcgtttgtcccgcatatttcgcctgaggccccatccgttcgccgtcaacggccggtcggatgtcttcgtgtaggaattcggacaaagggatgatatcaattactgacaattgtagttaaattcatgaaaaattattgatgccaattttatgtcacaaaaatctcgaaatatgaaaataaacaatgttaaaaaaaatgctaaaatatgtaagaaaaaatgtacaaaaatcccaaaatatgtactacaatatgtaaataaatttttctaaatggttaataaaattcctcttaaagggtgaaataagcacaaattgccattaaaataatctaaataggcttagagatcacttttagtattttaaaaattatttttgatatctcacttttggaaaagaaaacccgattttttcggtacccttttctaaaaaaaatttttaaatttttccacaagaaatttaatataaaaggggtcaaaaaatccacaaattggcaaaatatg

SEQ ID NO: 32973 - DNA, 109 bp, Heterodera glycines
ttgcggcaaccgaaaacacccgtatgccgccccatttgtagtcttcgcgtgcccccggcagactcaggcaaaagtccgctacctgcgcttcgctcatttttcccttaga

SEQ ID NO: 32974 - DNA, 275 bp, Heterodera glycines
aagtagttagccctgccacaccgtcgtagcgcgcgagattttcgcgcactagcgacagggtattgggcgtttttgcggcgcggatcaaagggtttcacgcgctgggcgtagggtttggggtgggtgtcggcgggatcaaagggggttggtcgggaccgtcgtagtgtgcgaaattttcgcgcactaagagttcgggagggtgtcggcgggggtcaaatggtttgggggattggtcgggaccgtcgtagtgcgcgaaattttcgcgaacatggggg

SEQ ID NO: 32975 - DNA, 1027 bp, Heterodera glycines
aaatatgcaatagttatgctctacataataaaagtggttttaaagtgattttgaatacttacagttcggaatgttcccttgtcagctcatcgtgactaatcgattggcatatcatttatgccatttttcaggggcgttcaactacaccgaattttttttatcccaactgaaagggtccgactaaaacactccgactgaactggccagactgaactgacccccaccgggcgaatgttgattttttagcacatataaatccaggccctggtcatttatttcttaattttttgcatttttgaccaaactattggcgttttcaccactggaactcaaatctctaatcgattcagattccttttggacgttggagccaatcccttcaaacgtgacgttaactcgtttgatgcatttcaaatggccgcgggttcatcggttgagtgccttaaaattcttttggaagcccatgaatgtgctctggacaagtaagtcatggaattcaacttcgacatctttggggccgaaattccgagtttcgaaaaatcttgggtgacagaatactgatttctgaaatttaaaaaaaaaaccgtagaaattttcttgttttttttttgccaattcagaatggtttcttttgtgtaaaataagtaatatagccactcaaattttcgaaatttttccaggaaggcaactaacggcaccgccggacttcccttgttcccaaaattttttttgatcgcgtttccttttattttttggttataaattttaactttagcctatcaaaatatgtagttttttcgaaaaatttacgacatttttggtgttgtcggaattccgattttaaaaattattggtcctcaggattccgattcccgaaaatttttggggcatccggaagtacctttatataaattagataaagcactaattgaagtgtcattttcagaaaactccagctgcttgaaatttccatgcagtccctggaaatccgaaagaaaaaggcaaatatagatttaaaaataaatat

SEQ ID NO: 32976 - DNA, 428 bp, Heterodera glycines
attcagcatttttcgagtatatttaagaatatattttttttcatcagttgtatttagcccagaatttaattatcataaatttagatttaaatctttgctttgataccaaggatactggcctcaatttccatcaatggaatttccacagttttcactgaagcaattgactaaaacaaaaataaatattagaaaaaaaggaataaatttaatttatatttttgtaccccaacgccaattaaagtgatgagatgggccacattgaaagtggccatgtcgaatttggcaattaaaaaatagggcaaacttttaaaattgttacttaaacaacaaatagctgaaattgccaagaaaataccatattttttaaatattacaactatttcttcgcaataaattaaattaattaaaaaataaataaataaaatttt

SEQ ID NO: 32977 - DNA, 954 bp, Heterodera glycines
tgccgtggcactcaaatcctcaatgaggcgagtgcttttggtataattaaaatgaaaataattaaatgaaataattttttagaagggatttggttggagaattgacaatcgttaatgatgtaaagcagcaattttttgagctcaacataatggaaggcagttttttaatttttattttaacataaatttcattgttagaaatcactattttgagcgtctaatacttttttttggagaattctttaataaaatccaataaaatactttcgaaaaatggttattttgggccgctatttaatttagttaaacttaatttatgggttttcgccattaaagtataattccaaagtgtcacattttctaaaaattccgattatgtttttaaaatctgataaaaataaaagatataaaaacaaaaaaaaaacattttcgtcatttgtttagccttgcttaccaattatgcactgcccgcttctgttgcggttgattcgattccatttggcacatttattaacgaattcgatagcatagcatttgccatcattgccatggaacttggccaggccattaaggaaaatgaggagggcatgaaaatgtgcaaaattacggtgggatttaattgattttatcgaaatatttgtttcgggaaagcaaattttttgaaaaattgtttatttggtcttaaaaatctgatgcatctattagtgggagtaattaccggttcggattttttaatggaaattatggaaaatttccgatttttcaaaaattgtgtttcattgtaaaaatgaccatttttcataaaaaaatatattggttaatggaggtccaaatcttttaccctttaaaatttgggaaaaaacatagcaaaaatatgtgaaattttaatgattttagataaatgaagaacctttttggtaaaatgaaaatttaaaaactaagtaatttcatgtt

SEQ ID NO: 32978 - DNA, 555 bp, Heterodera glycines
aactggcgtgctggcgcgtttgttaaaactgccagcgcgtttgttaaaactgccagaacgataaaaatataatttatatattttacattttaaaatattaattttaattaatattatatttaagactgacgtattataataaaagaatatgaaaatatttgccaacattaaattatagccaaagcgaaaatatttaatatttctgaagaagacatgtaagcattaattaatcgtaatattagttaaaaatggaagtatttttgaaggtggctacgatttagagataaaatcattggtggtgtaagtataatataaatcaatactgagttaatacgctgattttagcgttatttggccagcaatatatatattaagagaacatctagaaaaaagaatcacacccgcaacaggggcacacgaaactgaaaaatggatgggtaatttagaattagcggcagtcaacaaaatctttccaaataaatataattgtgtgtgaataactaacaggaagaaatttaccggtggcaaagtgtattccccaaatttggaaacatc

SEQ ID NO: 32979 - DNA, 743 bp, Heterodera glycines
ttattcatcattcaattcttctcccaatgtttcttcgatttgaaaatgatctgacgattaattttcaatatttttgaaattttctcgtcacttatttttgggttttgtcctttcatttagcaaataaatgttcacttttgccattttttctttctccgacattctttcgcccattccaaattgtttcttccatttttgaattgttccataatttactccaattttcttcacaatttctgcataatttttgtcccattcttttgtcgaatattttctccctttttgtttgtactcatttttcattgccataaatttttgaacaatttcaattttttgtgcatccgttttcaatttgcattggtatttgtataatcccaattctttgatccatttgtaaattttctttcgatttgtccccaattttttcgctattttctgttcaattgtattccattcttttgttgaatattttcttcctttttgcttgattttcgctttaattttgatgaatttttcaacaatttctctcttttgctgttcacttttctttttcttcccatttttctccaaatatttcttcaaatgttttttgctccaattttttcttttcacctccaatttcaatgataataattaaaaatacaattgaaaaggataatagacatatttttcattgctgaatttccttttaaaaaataaaatttatattttattcgatatgaaataaaatataaataataata

SEQ ID NO: 32980 - DNA, 658 bp, Heterodera glycines
cataacttttttcttacttggtcaatcaatacctacattcttgatatcaaacgaaaacttgaagtctatagaatttttagacttaattctggtctaaaagcaacaacacaaaaaattattcttgaatataatcttaaaaagctatttttcgtgttttctccttgtaattttttcattatcatcagtatttgatcttttcttacatttatgaatctctgagactttaagctttcgtctgataccaagaatgtaggtattgaccaagtaagaaaaaaattatattggatttaaggatttataagctggctaaaaatatgttttcgtgaaattctcatagaaacaaagccgtagaaaagcaaacaaaaactcctaagaagccgggcccttctcataacaattttactttgaattttaaagtgcaaattttaaagggcacattatccccaatatctgctgaccatgggttttcatttttgttttgatttaagcattattaaattagtggcgggcgacacggcgccacgtgaaaaaaaggagggggggggggggtgtttgtgagaatacggggagagacttctgttgttgttgctgctgctgttgatgaagcccctacataatctcattataagcaatataaatattatgtacacgccgaggg

SEQ ID NO: 32981 - DNA, 815 bp, Heterodera glycines
tgtactttaattctgcgttggatttttgctccccataattttttgagtaccccaaacggacacttgaaaaaatcgatttttttgttttcggggcagtccccccgaaccgatgcgcccagatttatggggagaccgaatccttcgggagtagcttccctatagcctgtactttaattctgcgttggatttttgctccccataattgtttgagtaccccaaacggacacttgaaaaaatcgatttttttgttttcggggcagtccccccgaaccgatgcgcccagatttatggggagaccgaatccttcgggagtagctttcctatagcctgtactttaattctgcgttggatttttgctccccataaatgtttgagtaccccaaacggacacttgaaaaaatcgatttttttgtttcataaatatttttttcagaaagtgctctaaagcgcaccaaattttatttacaacttaattttagcactctgatgctttagtatcaaaaaggaagatggagaaaaaattttttaaaaaatttttccttatattttggttatatcgttttgcttttggtggggtgcttggaacagtggaatcatgcgcacccgtccgatctggcaagttaagcaacgattgctgactagccaaaaggttcggtgccgtgatgaaacgaaccagcactgcttaccccgcggcacccggcacggtcccccgaaggaatggatttaattaaattctctccttcggggatttttttccattaggtcgtccgttagcgttcgattgctctagtcaatttttaaaaatttttgttgaa

SEQ ID NO: 32982 - DNA, 1182 bp, Heterodera glycines
  unsure (1)..(1182): unsure at all n locations
gagcaaaaatgtntagtatttgaaaggctatccaaccaagttttaaaattcgaaaatttcaaaattttcgagctaggcctaaaaatcggttttcgggtttttgaattntaggatttnntaacgatttttcncagagaaacgaagaccacttccaaaacatagtttttcgagctctatcgattggtaattttttgggaaaaattcgaatttttcncgngaaatagaaaaaattttggcctngagcgggacatttgagtcccgggcctataactcgtcagggatcggttttagccaaaaattgccttagagtaaaattgtagagcattttaaatgctatcgaatggtgtactacatgatgtaaaattttcaaaaattttcgagctaggccccctagaaattttcaaaaatttttttggggtcgaaaaagggggtgaaaaatttttttctggggtattttggggtgctgaatacgaatatgatgtttattttaagtttcggaaattttagaattttttaaaaattctttattttttggcaattttttggcccttggaaatttgggctaatattggaaaattcatatctagcctaagggttgaccaattttgagcaaataaagctttaaaaatagagaaaaatcaggagaattttatgggatttatttggttttataatgttcaaaagaaaaaaagttattccagaatttctggaaattttcgatttttcagaaaaaaattcataactcgcttctgaaaagttattttggaaaagtaaaataatacaaaaatccgcaattttttgctctattttataaattttattttagctttttatcacttttttgaaaaaagttatagaaataaaagtgattttgggaatcgggaccaaatttgaccatgatttctgagtgaaaaaattttttcgacaaaaatcttccaaaaacatgtctttaggggttatttgggccgctgatcacgaatatgtaatcagattttactttagacatggttaagacctcaaaatcactgtgtgattggagattctgaggggtgggagcgcccgtcctgaggacgcgaagcggccttaatagcccaacaaatttagaaacgggcgcgaagcgcccgtctgaggccgcgaagcggcctcaatagcccaacaaatttagaaacgggcgcgaagcgc

SEQ ID NO: 32983 - DNA, 1084 bp, Heterodera glycines
aaaaaaatccccgaaggagagaatttaattaaatccattccttcgggggaccgtgccgggtgccgcggggtaagcagtgctggttcgtttcatcacggcaccgaaccttttggctagtcagcaatcgttgcttaacttgccagatcggacgggtgcgcatgattccactgttccaagcaccccaccaaaagcaaaacgatataaccaaaatataaggaaaaattttttaaaaaattttttctccatcttcctttttgatactaaagcatcagagtgctaaaattaagttgtaaataaaatttggtgcgctttagagcactttctgaaaaaaatatttatgaaacaaaaaaatcgattttttcaagtgtccgtttggggtactcaaacatttatggggagcaaaaatccaacgcagaattaaagtacaggctatagggaagctactcccgaaggattcggtctccccataaatctgggcgcatcggttcggggggactgccccgaaaacaaaaaaatcgattttttcaagtgtccgtttggggtactcaaacaattatggggagcaaaaatccaacgcagaattaaagtacaggctatagggaagctattccggaaggattcggtctccccataaatctgggcgcatcggttcggggggactgccccgaaaacaaaaaaatcgattttttcaagtgtccgtttggggtactcaaacaattatggggagcaaaaatccaacgcagaattaaagtacaggctatagggaagctattccggaaggattcggtctccccataaatctgggcgcatcggctcgggggactgccccgaaaacaaaaaaatcgattttttcaagtgtccgtttggggtactcaaacaattatggggagcaaaaatccaacgcagaattaaagtacaggctatagggaagctattcccgaagggattcggtctccccataaatctgggcgcatcgggttcggggggactgccccgaaaacaaaaaaatcgattttttccagtgtcccgtttggggtactcaaacaattatgggggagcaaaaaatccaaccgcaaaatttaaa

SEQ ID NO: 32984 - DNA, 448 bp, Heterodera glycines
tgtaaaataaccaatttaaaagaaacaattaacattcttttactcattaaaatgtaatttttgcattttagcaaaattcatactacctcggtttggcacacacaaagcgaatgcagcatataacgatgattaatttaataattaaattatttacccaattaaattaaagcttttcacattgcccggagttgttgaacgcttctttccccgtcctgaagaagctcacatggtcaaagccgtcagagaagtgctcacaaaaagttggagcatcggagaaggggacgaagaagcggaggaaataataaaagtgagtgaataatttgaaaattaaattaattaaaaaattgaaattagaaagtgaaaatgaacccggaaaaatatgtgatgaaatggaacgaatgtggagcttccatggagggcaaaaaaattttctttggtgatgaaataa

SEQ ID NO: 32985 - DNA, 858 bp, Heterodera glycines
  unsure (1)..(858): unsure at all n locations
acagacacatttctaaattctaattagtatgtagtccaagcctattattatttttttgactagtctctgaatggggttatcncagttntagtatcctttttgaaaaacaaaaattttaataactgatacggtagcccaacatccattgccccaatgtacccttcggtttgtcaacgggagcaaacaattgatgagtttgtttggtttcttttttaagcaattttccgtcattgctcaccaactgttaggcgtacagcaacggcggcacttgcatccgatgcagctgttcacgggctctctaaacctatttttattttttttctatctcttctctgaatggagttataacaatttttcacaacagttttgcatttaacagacacattctaaaatttctaattagtatggtagtccaagcctattattattttttttgactagtctctgaatgggttatcccagttttagtatcctttttgaaaaacaacaattttaataactgatacggtagcccaacatccattgccccaatgtacccttcggtttgtcaacgggagctaacaattgatgagtttgtttggtttcttttttaagcaattttccgtcattgctcaccaactgttaggcgtacagcaacggcggtacttgcatccgattcagctgttcatgggctctctaaacctatttttttttttctatctcttctctgaatggagttataacaatttttcacaacagttttgcatttaacagacacattctaaaaattctaattagtatggtagtccaagcctattattattttttttgactagtctctgaatgggttatccccagttttagtatccttttgaaaaa

SEQ ID NO: 32986 - DNA, 727 bp, Heterodera glycines
tttccccactcatttccaagtcctcctgcagcattcctccgcccgtcccttccgcttcattctctgcttctgccgcgcctcctccgtctcccgcttctgtcaaatggacaatgaatgatcagtgatcgtttgtttccctctctcttttccgatttgtctcaccaattttctcctcctcatttgtgctcactgtcaatgccttttgaatgttcgtctccaactcggccaaatgcctttgcgagttgttcagcagttggttggtcagctccacaatttcttcggctttcaatgagtaggcggactggggaccgttgaagatgcgactgttgatcagaatctgatgaagatcggagaaatggatcattcctccttcctttttttgattagcccttttcacctgatcaatgtctcttctgaaggcggcaatcgttgtgtagcggtggtctttgatgttttgttcctgaaaaacagcacaacaatacaagcagagacagcaaattttaatagtgtttaattaattgactatgcgaatgtgctacaataacaccaacacttacaattgtccccaagtccatcggtcgctgaattttgtcgttgtaatgagggaactaaatgaatgaaacaacgaaattgtaaaatacagcaaataatggattgctgttggtaccacctttttgaggtcaactcgggcatgaaaagcggctgatttgggcaagtttttgcactc

SEQ ID NO: 32987 - DNA, 661 bp, Heterodera glycines
cagatttgaggttttatcctcattttgtgctttttgataggtcaatgaggatttttttgttgaaagaggatttgaggatttttgtgactttttgagaaattttgaggatttttgaagctttttgagaaaattgttaaaatctgttaaattttatgaataattttgataaatttttctaatgtttgaaatttaccgtatttgctcttttaatccccccccccctaaagtgctgttcgagactctcggtctcgactcgagaaaagtctcgggtttttaagtctcggtctcgattttcgagactcgagaccgagaccgagacttttttacactcctaatgattggattttggtaaacttatatttttataaattttaggccattttttgttcattttgttaacatatgctttgtctagtgggttgtgctctttgttatgttcttcgttttttcgttggatcagttccccttgaagttgttcacttttcttctaatttttcaaaattattcctttttccgatgagaatttaatcacaactttaacaattaaaagcgtaaatattgtcatttttggactaaataagttaataaattgcactaaaaattcaaaactttctccggcggcgcctattggcaccgccggcacacatttttcaatgaaaat

SEQ ID NO: 32988 - DNA, 217 bp, Heterodera glycines
aaagagtgattagtgaaaatgaatgaatagggggaatatttttgttggcattttcattgaatcatcagcttttaatattgatgaaatttaaaaatttttattttattataataccaatattactacttctcgaaaaggcaaatttcatacaaattacaaccaaaaataattagataatttgaaaaaattatttttcattattacataaaagcaggag

SEQ ID NO: 32989 - DNA, 780 bp, Heterodera glycines
atagggcggcgcaagtgtcgaggcgcaaatgtcggtacatcattttatttacgtatgaatctgacggatggcaaagagagcaattaaaatcataagaaggactgaatgatactttaaaaattcaaatgccattaatgtgaagaatgaatacaaattcttgccccattagagccaattagtgaaactgattttgttctactgtttttgtactaaccgatgatgcctgtttgatgaaggaaattgcgtaacagcgaattgatggatttgggtggcaaaattcaaaagcgtttaatttattaatgataatcagggcccggattttgaggtgctaaaaatcccgaaataggtacctaaatagttgctaaaactaaaaatgccaaatcgttgctaaaatagttgccaaaaaattggaaaataattgctcaaaaatgctaaaatttctaaaaaaaattcacaagccaaaatagttgctaaaaagtccctctaaatcgacccgaaatcatatgcacatgcatatattttacggatatattaaaaagtcgaaatgcccattattgtgaaggggatatttatttatttatttaattttttgattacaatttcttttccttttttgaatgtttttttcacttttacggcattgttttgttgttgttcttttaattggttgttcattagtttaatgacttgtaaatttcaatggcacgcacaaagcaaaaacaaaaaacatttggccaccaaatgacaaattaattaaatgcgcacaggcaaaagtacaaa

SEQ ID NO: 32990 - DNA, 700 bp, Heterodera glycines
aatcgctgacaaagttcaaggatttgctcgcccaaacccgctcagtttgcgtccgccgcttcgaatgatctctaattcgacaaaagacgagccaagagatcacatccctggaggcacacttcaacgccgcttgtgaaaatgccgagctcaccattgacaaaggagcggctaaagggcgtcatcctctggattgcacttatcgacgagcaccacgatttgcggcaaaggagcctaaaaatgctcgaagaagcacagagaagcggcacgcaaatcacgctcaagcaaattgaagaggagttaaggaccattcaattggtaaaagacagcgcactcacattggcttcacctcctgttgcaacgcatgccattcacacccggccacaacagtggaggcacccaaaaggcaaaccaccgcaacaacccaagaggaccaacaatgccaaggagcaacccgcgcgtccaccaaacaccaattacggcaaggcaagccgcggatcaccaactcatccatgcggctcatgtggagaatcggatcattggcgtacggattgccgattcaaggacgccacatgccataaatgccaaggacaagggcacattgcaaaggcatgccgacgcagctccaaccaagcggaaaatcgcagagaaggatccgcccacactggccgtggcaaatccccctgcatgggaattggaaccg

SEQ ID NO: 32991 - DNA, 569 bp, Heterodera glycines
atccttagggttagaggcaataaatccgtagtaaacctcactgggagatattaataatccttatttgtcagggttgccgttaaaaattccgtaaccccaaaaaaatccgtaacttttacggctagggggtgagggggaggggtaaaatttccataaatctttaggggttaggggctaaaagaattagctaatggtaaaattcataaattccccagttttgcccaaggctaaaattgtaaaataaaaattttgagctaaaaattttttgaaaaaattatttaaaaatgaaaattgtggcaattggctgtgctccgaccagcatcggatttgcttatcgccttcagcagctgaaagccgacggaattgaagaggcggcggacattgaacttttggtgttggagcaaaatccgacgcccggaggcctttcatgcacagtttggcacataaatacaaaaataaataaataaatttaattattttaaaatttattattttttaatattgggggaaattttaattaattattaaattgaaaaatttgaagaatttcattatacaaaaaagaataa

SEQ ID NO: 32992 - DNA, 1013 bp, Heterodera glycines
ttgcttctttcatttacatgcatttaattagttttgctttttgtgaattttatagcggaaatgattgtcaagttttttagattttgtatagttaatttgccaaaactttgaaattggggggtctattttttaaaatttttggtgaaaatcgaaaaagcactggtaaatatgggaaaaatggagttctgctgaattttttttaaatcgaaaatttctgggaaaactttcatctttatgtcagaaaaaccaaataaaaaacataaaaaattagcttaaatttccgggactcaaaaaatgaaaaatttataatgtttttgaattttttcgtgggtccaaggcagcaaaagtgccagaaattctccaaaatcataaacccctccctttcggcgaagagatcagagaccattattttcgtaaattgaccaaatccagtaaattgtgtacagttttatacaacactggcagcaaaatgtaataatgagtataaatgttatacatacagtatgttatacaattcaatacacaaatatgcatacgatcaaataccaaagcacatcggcaaatttacaatgaatatatttcttccgcttggattgcgcatgacttccttctcatccctcctcattcgttggccatcagttcggcgagcagtttgggcctagaaattgttgaaaattaaaatttcaaaaaaatttcctcaaaaactctacccaatgtcgctgtcttgaatgttgatgcacagcatagtgtccaacgtatggtttgcgtcccactcccacttcgccactgtgcgccgatccgtgccgctccgctggcgtacaaccacagcctccacgggcacacgccaacgcagcgtcagccactcgcccgtccgttcattctcccgctcaacgacctcgatgttgcgacgcgatgcccgatgacaaacgacgacgtagttgaccgcaatggcactcggcgcttcgaatactggaaaaattgaaaaattacaacaaaaaaaaaaatggaatcgg

SEQ ID NO: 32993 - DNA, 959 bp, Heterodera glycines
ccagtctctcctcccttctcttttcccctcttcctcccttcccctcttcctcatccagtctcccctcccttctcttttcccctcttcctccctccccctcttcctcatccagtctccactcgtctctctctctttctccacttcttcctctccccctcttcctcatccagtctccactcctctctctctctttctccacttcttcctctccccctcttcctcatccagtctcccccccccctctctttccttcttcctctctctctttttctctttctctccacctcttccttcctctcgtcttctgcattctttctcacacattctctcttccctcattctcatccaattgccctctctttgtgccctcctctctattcgttcctctcgtcttctgcactctctcctcttcttcctctcattgaccctcccccgtacagtcatttgctccttccgcacaatttgctttttgttttgtgccatttctgttgctgctgttgatgggctttccctccgccgctgacattaatgttaaaaacgaaaatgccttgatttttataataattcacaaaatttataaaattttgcttataactagggataacatttataattttttcactatttttttcctgagctccccgtagcctgaaatgcacgaaaaacatggttttttcggctgtcgttaagctacttttcgagttattagcaattattttattaatcgctttaatttcctttggcttcggctttgcaggttggatactgaaaatttgatattttttaacctgtgttctcaatactgttcactggaatcgctgacaatttttatctgaatcactttcacagctgtcaagtttttaaaatccctttcaaaaatggtaaaaataaaataaaaattaaacttcgcagtcgcaggtttatttttagcaataaaaaaaaataaaatttttgaaaaa

SEQ ID NO: 32994 - DNA, 954 bp, Heterodera glycines
tttctattggaatattttaagcgacgtaccgtaaatcatttcgactgtggactaccaaataaaatgaccgctaaggagaaatattcgaaaatattttttgaactctcaaatttattgaatcttcagttttctattgggatattttaggcgacgtaccgtaaataattccgactgtggactaccaaataaaatgaccgctaaggagaaatatttgaaaatatttcttgaaccctcaaatttatgaatcttcagttttctattggaatattttaggcgacgtaccgtaaataattccgactgtggactaccaaataaaatgaccgctaaggagaaatatttgaaaatatttcttgaaccctcaaatttatgaatcttcagttttctattggaatattttaggcgacgtaccgtgaataattccgactgtggactaccaaataaaatgaccgctaaggagaaatattcgaaaatattttttgaactctcaaatttattgaatcttcagttttctattgggatattttaggcgacgtaccgtaaataattccgactgtggactaccaaataaaatgagcgctaaggataaatattcgaaaatattttttgaactctcaaatttattgaatcttcagttttctattgggatattttaggcgacgtaccgtaaataattccgactgtggactactaaataaaatgaccgcaaaggagaaatgttcgaaaatattttttgaactctcaaatttattgaatgttcaattttctattggaatattttaggcgacgtaccgtaaataattccgactgtggactaccaaataaaatgagcgctaaggataaatattcgaaaatattttttgaactctcaaatttatagaatcttcagttttctattgagatattttaggcgacgtaccgtaaataattccgactgtggactaccaaataaaatga

SEQ ID NO: 32995 - DNA, 996 bp, Heterodera glycines
  unsure (1)..(996): unsure at all n locations
cttccctatgactcgccatggacatggattctttgttttcttactcaggtaaaaataaataaatcatttttagacatttctgtgtataatctgattatcctccttattaggaccttgcctattattttggccaccgtgccatccacggttagtttttgtgtcgggcgccagagggattgtgccaatcaaaagggtggttccaaattccggaaaatcgaagattttttgcacgaaaatctgtgttccggaaattttttgagcgcctacggtatcccgtattctggaattttttggcctccagaaccgcgcctggtgccaatcagggatggaacataattcctaattccgttcggcttccgattttcgaaattttaccatcggaattccgagcaattttgtgtaaatttttcggcttccgatttttagagatttcacaatcggaatttcgaaagaatttgtgtgaaaataattacttttttacaccactttttaactggacagagatcggcttcttttggggtgttcacacaattcaccactccagcgagtatttcaactattccacttcgtttcgccaagctgctattcaggtggagcaattttgaaatttaaaaaaatatttttcttgaaaatttcatttaaatgggattttccataaaaattgaaaaatatttttttgggggggtgtcgcattttcctggagcaaattaccctttttacttataatactggcaaaaactaattaaaattcttttgttaggacgcaggactggctgctcacgacattttgcaggtcgaaaattgggaaaaataaaaaaaaacatttaaaattgattaataattgattaaaattcacaatanaattcaactttttctggctttatccccatcgggactgatcacaaatctcgggcattttcgttcccnattntnngcttttccgatgaacgaaaacgaaattaaaaatgtcgaaaaaaaggggatgaaactaaaatg

SEQ ID NO: 32996 - DNA, 914 bp, Heterodera glycines
  unsure (1)..(914): unsure at all n locations
attctcctgttncatatttggaagtgaaaaaattctattctaggcaatttaattcctatcaggtgagcaacaattacgaatttttttgcattgattcgctcggttttcaaattgtaatgaagggattgaattctcaccaaattctcctgttcatatttgcaagtgaaaaaattctattcaaggcaatttaattcctatcaggtgagcaacaattacgaatttttttgcattgattcgctcgggtttcaaattgtaatgaagggattgaattctcaccaaattctcctgttcatatttggaagtgaaaaaattctattcaaggcaatttaattcctatcagttgagcaacaattacgaattttttgtaatgattcgttcggttttcaaattgtaatgaagggattgaattctcaccaaattctcctgttcatatttggaagtgaaaaaattctattcaaggcaatttaattcctatcaggtgagcaacaattacgaatttttttgcattgattcgctcggttttcaaattgtaatgaagggattgaattctcaccaaattctcctgttcatatttggaagtgaaaaaattctattcaaggcaatttaattcctatcaggtgagcaacaattacgaatttttttgcattgattcgctcggttttcaaattgtaatgaagggattgaattctcaccaaattctcctgttcatatttgcaagtgaaaaaattctattcaaggcaatttaattcctatcaggtgagcaacaattacgaatttttttgcattgattcgctcgggtttcaattgtaatgaagggattgaattctcaccaaattctcctgttcatatttggaagtgaaaaaattctattcaaggcaatttaattcctatcagttgagcaacaattacgaatt

SEQ ID NO: 32997 - DNA, 643 bp, Heterodera glycines
  unsure (1)..(643): unsure at all n locations
caaagaacagaccccgaagggtttcttcgagaatatgggcttgcagaaaacgccggacggcgcttcgctcggcgaatttgcagtgatgcgaatggacgacatgatgaacttgatcgggcgtggctctctttggttagctaacatttctttcttgcgatgcattaaacgaatgttttgtagtcaatggttaaagacaccgacgataatcccttccccactttttaagccgaaaaatttattttaaaaagttgtaaaaacatgttttttgtgagtcactgattgcgaagatatgtcattcattttggcatatttcggatctaaattctagcaagaacacatgcgaaaactctaactttttaatggggaaacaataaaactggacatcgaaatgctttatttacccaaattgacaaaactttcctttttgcattattatgccatttagcggtaaccaaattcagatgcatttcaccgctcctcgttgatatttgaaacaagagcatttctttaggggtttgaaaagtaattaactaatggtgcgatttgacgaattttnattccccctggagtgttttggaaattggccaatttgcctctcttgactcataatttggacccctttttcattcgttttggtcttata

SEQ ID NO: 32998 - DNA, 836 bp, Heterodera glycines
ttttgcaaaatgtaccaggatttgaacctgaaaaaccgcttggttaaatgcagaaagccaaccaaggtgccgaatttataccttgaattcggatcctgatccatgtatcacaataccggagttgaatccaaaaataatcaatagaatatcaatccaaaaattcgtcccagtccaagtgagtctatgtcctacttcctactgattaaaggccatgtaaccgaatcagaatccaaaaaatctgacaatgagccttatcaatccagaaatccgccggttttcgaaaccgtttttttaattccggccaatctgttccgctatttctccctcactcttctgtcgatgtcgttggccccagcattttctgctgttgctgctgctgccgtttcagctgctttctacggtcactcatccgtgccaattggcgcaatgccggcgtgccggcctccatcaaatacaatgcccggtgccattggctgagctgttgggcgccaaagcaacgggacaaaaagaaacagttgcgacggcgccattcactgttttaaacaaacgaaacattattgtggatgggatgaaactaaatacccaatatttcaaaaaaaaaagaaaaaaatgaaaattacataaataacaaatggccaaaattcttttggtcttcgtaggccgatttaagcaaatccatttgagcggaattggcggaacatttgcgcgcaaaatgcttgaacagaagccaatgggcgcgcaaagtcaacagggaatgtttgcaacactaaaattggaacaacaatttataagcggttggccgatttctgcgattttaaccaattttctgaggaaat

SEQ ID NO: 32999 - DNA, 295 bp, Heterodera glycines
ccaaaatttatgtcaacttttgaaatcttaggggaattttatggcacggcggcaccgataggcgccgatgtgaaaattttttgggattttcatgaattttgttaaaaaaatgtttaaaattaaataatttttcttcttttctccctttgccgccgacccactccccgaaatggtcatccttaacagtgtaaaaatttctcggtttctgagactataaacccgagaccgggaagcgaaaaacccgagaaatttcccgagtcgggaaccgataaccgagatactcgcacatccctaa

SEQ ID NO: 33000 - DNA, 973 bp, Heterodera glycines
  unsure (1)..(973): unsure at all n locations
tctagagtcatnntttttggataaaaattatttaaatgaactgactagataatatttaaaataggttatttctcttcctttcagtatccctgcaaagtttggtgcgcttctgatcagtttctgaaaaaaaagttaagcctaaactttttggcctgtttaaaaaggaattaaaaatttttaaaaattttattcatctccctttttgatagaaaaagcatcagagtgcctaaactaacatgtaaataaaatttggtgcgtttcagagcattttctggaaaaaatatttatgaattaattatgcaaaaaataaacaaataatgaactctcttccttaataattttcatgcaccgaggtactcactcggccgcttcgcggcctcgtggtgggccttcgccccccctccgcccttcaaaattttgaaaaaaaaataaaataataggagactcagaattttgaaaattttttataaaaactgatgacaagctaatgtgataaaacaggttaattcttttcctttcagtatccctgcaaagtttggggcgcttctgataagtttctgaaaaaaaagttaagcctaaactttttggcctgtttaaaaaggaattaaaaatttttaaaaatttattcatctccctttttgatagaaaaagcatcagagtgcctaaactagcatgtaaataaaatttggtgcgtttcagagcattttctgaaaaaaatatttatgaattaattatgcaaaaataaataaaaatttctaaaaatttgatcgtccataaataatttgtaattgatcaggggctcaccaaattttgcagggatacgtatcggaacactacaaatgcttactaattttcctagattttttaaacccggtgaaaattttttgcagacaccaccacttttgcacttaaaaaatttcaaaaactttaaaaaattcatagaaaattaaattcataggtactactgctaaat

SEQ ID NO: 33001 - DNA, 922 bp, Heterodera glycines
tccaacgcagaattaaagtacagactatagggaagctattccggaaggattcggtctccccataaatctgggcgcatcggttcggggggactgccccgaaaacaaaaaaatcgattttttcaagtgtccgtttggggtactcaaacaattatggggagcaaaaatccaacgcagaattaaagtacaggctatagggaagctattcccgaaggattcggtctccccataaatctgggcgcatcggttcggggggactgccccgaaaacaaaaaaatcgattttttcaagtgtccgtttggggtactcaaacaattatggggagcaaaaatccaacgcagaattaaagtacatactatagggaagctattccggactgccccaaatctgggcgcatgggggaccgaaaacaaaaaaatcgattttttcaagtgtccgtttggggtactcaaacaattatggggagcaaatcctacgcagaattaaagtacaggctatagggaagctattcccgaaggattcggtctccccataaatctaggcgcatctgctcggggggactgccccgaaaacaaaaaaatcgattttttcaagtgtccgttgggggactccaagaattatggggaagaaaaatcctacgctcgaattaaagtacagactataaggaagctattccggaaggattctgtctccccataaatctgggcgcatcagttcggggggactgccccgaaaaccaaaaaatcgattttttcaagtggccgtttggggtgctcaaacaattatggggaacaaaaatccaacccagaattaaagtactgactattgggaagctattccggaaggattccgcccccccataaatctgggggccttccgtttggggggggactgcccccaaaaaacaaaaaaaaaccattttttt

SEQ ID NO: 33002 - DNA, 871 bp, Heterodera glycines
ccatcaattatgtttgttgtttttttttgcccgaggcaaaatgtcgctaattactccaactgttagcgcaaaatgtaattttggataagcgaagaattagcttactcaaagtcagcacctgcaaagataattgttatacttttggtagctttattctactcaaatattcacaaaatttattcgccaaacttttttacaaatttgagcggctattaagtttaacaaatattttggcaattttattacttatcgccagaaatttttaatttttttcaaagcaaatgtcacactgttaaataagtattttaaaattaatgaatcatagaaaaaccaaataatggagaattatttaacattaaaaaataataattaaagatcaaaaagaattaattgtttatgcatagcatgcgtttttcacgcgctcagcgcgaccgcctggcaccaaatgcgttctttgaccaagttacagtaaccgtcgccggatgagctgaagtgcactttgttggtgccagttttgtcctcatcagctgccgaacaggtgaccaggaacttctgattggcatagcggcggtacaaagcagtttgaatggcattgaccgagccaatggcatcgtcggtgcggatgctctacaaaattagcaagcaattagggatatgccaatgattggataagtgatcagtttgccaacctcgtcaatgacttgtctccactctgtctgtgggcacggcgtttcgtccgatttgaagtggggctgaaccgcttctaatgccgctgtctcgcgcttcttccggtcacagcaaccgcctccgcctccgccaccaccgcaaccacaaccgcctcctcctcctcctcctgagccacaattgacga

SEQ ID NO: 33003 - DNA, 1012 bp, Heterodera glycines
attccaaccaaatttctcaaaaattactaaataaaaatcgtaaaatatttttcccctgaaaatagttatggcaaaaattctctattctaggcaaaaaaggtctcgtttttctctgcactccatttatttgttcatctcgtttttcgaaactatactattaaaaagtcaatacctgaagcttctgcacgccaaatgcaacaggtaaaatctttgaagcgccccaaacgaggccgtcgcattggacggaacgaactttcgcctcaatctctttgatgtcaattgtgtcgtcccatggcttcacgtcgtaaataacgttggatttggcgaccggcccgggcttcttcgcctttttctccgcataagccttcaggcgctccttagtgatgcgctttttttcctcgtcgtcgctttcctcatctccgaagaggtcgaagtcctcctaaaaagatgagatgagaaccaaaagtaaaatgactctctccaaacctcggcttcaactttctttgccggagtctctttggaagcgacagtctgtgttgtttgtccagctttctttgaccaacttaaaagcacggtcccaaatttttgcaaaacccatcactattattgtcacatggtaaatggaaaaattttggaaatggcaaaaaagggaatagctgtagaaagaattttatttcatttaatttagggactcaaaagacaccaaaaattttacttcaaacgttcaacatcatcgaagctttgaatgtgcttgtaccaacgagcaacgtgcgcatattctttctcggaaggaacagacttgatacttttaaatacgtattggtcttcttgtgacggaaggaaactgaattttaatttttacataatattgaatattaatgtaacccgtggagataagcacgagtcgacaggcaattattgagctcatttaattctttgctgacagtcatcgtcccgatgtgagcttattgtgagcattcatgatagaaaatgaagtggtgcacatgctatt

SEQ ID NO: 33004 - DNA, 853 bp, Heterodera glycines
tgcgcaaaaagaatgccggcatggacaagcgctcgctttgacggccattgtcactgtccatgtcgatggtcaactcactcactggcctatcggtcagattgccgagctcaaaagtgcgagtgcgacggtagttcaactgtgacagtaaagtatttcaggatatagtttttgcataattaatatacaaaaaggaaatagatttggtacttttcggtttcgtgtatacacctcaaaattttcaaaaatatgccaacaaaagatgcactgagttttttggtcgcacaaatgaataatttgccacaagaatacatgaggtttttgcaattttaagggtaaattattccatttgtgcgatcaaaaaataaaattttttgagagtccaagatcccgaggccttttttgagtagtaagcttttttagacctttggttatcccattgtatgaatcaccataacccaaaacagacgaaacctcgacgcgaacatctttgatcaccgtttcgacctcggaccagtccttgggagtgaagtcgcgcatcgacggacgcccgcctttgcgacgctgcggcagtatttccatgacagtgtccaccaaattctttgactcgaagaacgccgcaactttggctaaaaatggttgtggtttggctttagtttatcattgtcagcacccgcgacacttcccgaaacttactgtccaacaccacagccgccttcggcgttctgtcgtcattgcgaaccacacgaacacccttagcaatgccggaacgcaaaatcatcccattggacaccttctcgcggaacaaagtcggatttcgagcgtcgtcaatttctgtgaatcgaatattctatga

SEQ ID NO: 33005 - DNA, 915 bp, Heterodera glycines
  unsure (1)..(915): unsure at all n locations
atatatttaaatttntcgtttacaaagagatatgtagaaccaaaattttccctctttgtttgcttttttccactaaaaaatcgttaataaaaatttttatttacctattttggtacctattttggaatttttgtacctatttaatacctattttgagattttttttaacctatttaagtacctattctgggatttttcttacctaaaaatcgcatccctagtaattacatttcgattagcgctttcatttacaaacaccagaagatacaggatggatttgggatattattttttttgaaatttaccaatttaaccattggttacaactttgaaaagtaacgaatcccccccccccctttaattccgttttttctattataatataatttatattgtatgaaattgcccgtcatgaacagctcctccgtcaactttttgcccaactcttttcttttctccgcctcaaattcaaaagtgccgtagtccgaataattttcggcgaccattttctgcaaatgttcgccgagcgttctcataacccattgaatttgctcagcattaaaatttccccttggaacaaatggaaaattgtgaagaacggcaaaataaaccacaaaatttgtggccataaaatggaaagtcatttttgggacggtgccgtcggattcaaattgcaaaagttgcactctctgatcctaaattagtcatacaataattaattacaaaaataatttgccctgcaaagaatgcaaaagagggaaaagtcccggcacatttctcttccctcaaaattgcactgataaaagccgcgaatttttgtgctgaggtcgaaaccgtcggggaccatacaaattggcttcagagattcgttagttgcttttaaaaatacgaaatcggcatttggaagcgaacttc

SEQ ID NO: 33006 - DNA, 648 bp, Heterodera glycines
cccccccccccccccctccattttgatgatgataatccgccgttggttgccaacccgcctccctcgcgttccaatccaaccaatttcacacattgtgtgagcctcgttaatcataggggcgctttgatgctttgtggaagggcccggagggaaaagtgggcgaggcgcaaaatgtggaggagcatttatttggaggacaaatggacggagggggggggggaggaggggaagcgcgagaacaaatgccaaattgagtcaaagagaggggggaggggaggaaaaatttcactgacagtgccaaagtttatttgtgccgaagttaacgggaggtcgcagcacaaaacgtctgttttacattagaggccagtaattagaaaagttttcggatgcgagaaccgaagcttttggctttttcttgctcttcgagtccaaaaatttttccggtatattttacaaaattatagacgccatggtatatatacctctagccagttgttgtccaagggactataagttttgcaaacttaacagaatgttgagttaaaattttcaaaaaatgtagagtattcttggcattctggtcaacatgaaattcaaaaattcggtgaatgttacaatttttttgatccccaattctctttttggggg

SEQ ID NO: 33007 - DNA, 805 bp, Heterodera glycines
  unsure (1)..(805): unsure at all n locations
ataaatagggatgcaatttttaggtttttacctattttttcctcagctcccagtgacctgaaaagcatgaaaaacatgtttttttcgattgttgttaagctgcttttcggttattagtacttacatattttctagctttttacaaccataagaatcgtcttaaattttttttccaaaatacaccccctaagatcgaccttaaaatttaaaaataaacactcctaagaaatgaaaaaaatttctcaaaaattcatcctccaaatttttttgtttcttgacaaatttttgatttaaaaaatgtcaatatttgctaagaaattattagaaaggaaattacttcatttgaaacagcaatcagtgaataaaaaaaaatttgttgctcaatttttggctgaaaattatgtcactattcgtcactatttcggactttttgtcacaaatctcattaatgatttggcataatatttctgaagaaaattttcgtttttacaacaccctaaattcggaattttttggcacttaaataaaatattgccaaaatattttaaactaatttttaattattattttgtttaaaaacaattccaatttaatgctcagtcaaatcacttattttcagctgttcttatccatttttcaatatatgtgcgatttgtccccaatttcttagctatttttatttctattttaacccattcttttgttgaatattttttttcttttattttaaaattttttcagttatttctcttttttcttctanattttctttttcttcccattttttccaaataattcgtcaaat

SEQ ID NO: 33008 - DNA, 342 bp, Heterodera glycines
ttgctgctatttattgtccgcccctgctctctgtctcatatttgcaataattttgtttttcttactcactaacggatctttggggaaaagagagatagagaggagggcgggggacgttcgttcatcgccggagggggcgtccgttcatcgccggggggggcgtccgttcatcaccaattctcagcgagtgctgagcaattgattgcttcctcagctcaaccgtttggacatttgggttgttcgcccctccctccctctctgtcccccccttctttcggatgttgccattctccgccgtttggtctacgacgttgacttcggccaaggagtggcggtgggggg

SEQ ID NO: 33009 - DNA, 922 bp, Heterodera glycines
gcttttcctttccttttccttggcttttcttttcctccccttccttttcccccctttgtccacccatttggccaccatctgtcactaaagtccatcctttcccaattcgagtttattccttcacatctgtgccataacaaactcttcctctccttatagtaatggcatcgcttccttcccaatcggttcaatcggaatgccaactttttgtcttttgtcgcttttttgggtaaactcccctttcgctgtattaattgtattattatataatgccccctgctgtcccatgttgtgtttgttatcccaccccttctcttatccctttgccgatcacatgcattgggcattcattgcccgaggcaaaaaacggaccgacgaacggacgaccaaacacaaagaatcgatgcccatccgtccgttcatttcccaattcaaaaaattactgaagcgggggaggggggcaacggaggcacaaaatttgatgaaataaattaacattcatttggtgaatattttccttaaatggtcttctttctctcatcccgcaaccaacggcaccaaaatcagaagagattgaaaagaaaaggccaccaaaagaacgaattgggggaaagaaagcgaaaggaacgacggaatgaagaaaggcaaaaataaatgaggaaaaaaatgggcactaattgtaagccaattcgacattcattccattcgacgcctttcgtctgtaatgtttaggggaccagagcgtttgggccccggggtcgtttgggccccaacccaaaaatagaaaaatgtgcttttttaaaaaataagattctaaaaactaagcctgagggatccctcgccacttggcataagttaggtttaattaacattcgctcatttttacaattttacttattccaaatcctattattttttaata

SEQ ID NO: 33010 - DNA, 144 bp, Heterodera glycines
ccacaaatccggccaaaaaatgagccccagcaaccaccactctctgctggaaacaacaggacaaaaacgtcaattgcgttggtcgcctcgtcagagattcgtgcagtgcaacggctaaacagtgccaatgacggcaatgggcaa

SEQ ID NO: 33011 - DNA, 1101 bp, Heterodera glycines
  unsure (1)..(1101): unsure at all n locations
aaatatattcagctaaaaaaaatatttttttacgcctagaacactgtgaagtgataaaaaaaagtagtatttttatggattggtaaagtaataaatcgataatttttaaaataatattttgacgacagttgaacggtaaaaatatagcttatactcatattccttcagaaactggggcacatttgaggaggaataccttaatggagaaattttctgaagaaaagaaaaacaaacggtttaaataaaattgtgacttttacggttatgctcttaaaattgcattgcttctaatttattttcattgagcacaacaaaggtgaggcttaaataataattattttatcagcgttggctttacaaagaaaaataacgataataaatgaaatatattatgtatgcaaaataaattcagctaaaaaatatatttttattacgccaagaacactgtgaagtgataaaaaagtagtatttttatggattggtaaagtaataaatcgatagtttttaaaataatattttgacgacagttgaacggtaaaaatatagcttatactcatattccttcagaaactggggcacatttgaggaggaataccttaatggagaaattttcggaagaaaagaaaaacaaacggtttaaataaaattgttacttttacggttatgctcttaaaattgcattgcttctaatttattttcattgagcacaacaaaggtgaggcttaaataataattattttatcagcgttggctttacaaagaaaaataacgataataaatgaaatatattatgtatgcaaaataaattcagctaaaaaatatatttttattacgccaagaacactgtgaagtgataaaaaaagtagtatttttatggattggtaaagtaataaatcgatagtttttaaaataatattttgacgacagttgaacggtaaaaatatagcttatactcatattccttcagaaactggggcacatttgaggaggaataccttaatggagaaattttcggaagaanagaaaaacaacggtttaaataaaattngtacttttacngntatgctcttannattgcattgcttctaatttattttcatt

SEQ ID NO: 33012 - DNA, 937 bp, Heterodera glycines
aaaaataatttttcaaaattaagtaggcaaaaaaatttcctcccttaaatatttttcgccgctttttccgatactttcgttcccgtttgcatatcgcgttaatatcgttcattcgcttttttccacccgccgatcacgcaatatcggacgacaaatctcgtcgcggaaattttcggcataaatctcgacgaccaaattatttcggctcgcatatcgcaattaatgtaacggtaaatcaataaaatttaaaaattcgtttttttaatttaggatatccatttggctttaagtttatattaccttatcattataagcacttttgcttatatcataatggtttggactagcatattggtatcaaaaaattcttggacatcgaaaaccaaatgggtaaattaatttaaaattattttttatttaaatttttgtgtttgaagcgtttcatcttcttctgaaatagccaaaaagatgattgaagtgaataaacaagtttctcgaaatctaatttttcaggttaattgagcacttttttgtactaatttaaatataaattattcaatattttgttatttaatttacatttattatttaggcttctatacccatcatcatttatcggttcatttatttttcaacttgtgcttctgcttttcaaaattgatatacaaggatgggatgggcgtctggatttcaatacattctcacctttcccaatttttttaccgtccgctttaaatccaatcgtatcattttgcaccatcaaggcttaccgtatcaaatttgtttcgaacataaaatggttcggtatggtgataattagttgacagtttgatttaatggtttttaatttaggttgattatttaggaaaaagcattgaagcgttcgtttcgcatgaaaattggtgatcaaaatgcggttttcaatattcagatgcag

SEQ ID NO: 33013 - DNA, 924 bp, Heterodera glycines
  unsure (1)..(924): unsure at all n locations
aaaaataatatancggaagtaaaaaatatattaaattaatcgtttaaaaaatgatgaaatttctattcatttaaaatttaaaaaaatttacaaataaatattattttgaattttgaacgttggctcccaaataaaaacaaaatatcgaatcaaaatcacaatatcaaacaggccaatatattatttcgaattgggtttataatttcattatttcaggcagaaaaaaaattaaaaaaattaatactgaatgctataaaactaaaaaattatcattgatataaagaagttaataatagctctaagattattaaatactcccaagaccagtgagcgtcgagcgtagaacacttctcatttaataatcctaaaaaatgcaatgtaaataaagaaagaccaaagcaatattaaactttatgagattaatttaaaagaataattaattaccagcacgcttaataacacaataattcgaatattttttataaaatttttataagccgcgtttttcattttgtaaatgattaataattttatattaattaaataaatataaaatagataaattttaaagtatatttataaataaaaacaatcaactttttaaaaattattttttttaatttcaaaaacaataaatgtaagaaattaattattcagaaaaataaagaggagatgccatttagcagtaaatactcaaaatctaataaattgtttaatttataaagaaaaagttaacaaaaaattaaattaaaagataaacaattagagatgctcactggtaaataactctatagaggtccaaaccgcaagataatgtgaaaaaatgaaaaacattgaactttnaatanatattaatgcagatataaaatgaaaaaagattttaatcaaaacgtattttanagttttaagcttaatattgctaaa

SEQ ID NO: 33014 - DNA, 847 bp, Heterodera glycines
tttttaaataaattatatcataagttcttttttaaattttacttcgacaaattcaacacaaaatagaacaaaagttctcttttcgtttttgtgtcttttgttctttccttccattcgccgccacttttattttcccccgagggaaaagcacaaaacacaaactctaaaataaaataaaataaaagcggagagtatttaagtgacaaattcattgggtgatgacaacatttttccttctgaattattttcaatttgtcctccttttttgatcatttaatctctctttttttaatttagcatttcatcgcttttcctaaaatatttttcatttttaaatttgcccaatttccttccaaaacgccaatttatttctgctcctccccaccctcaaaatgctcgtcgactctctccgtcccgccactctttcgtcctccaaaaaacgttcagcgcattccatggacgacaccgaccaattcattgaccacagtcccccgcacaaaaaacaactaatggacgaggaaaatgaccaaattttgacacaaaatacaccaaatgattcattggaccggcggaggccaattgcctttgccacaaaagcaattcacgcggggaatcggccagaacagtgggacatgaaccaggcaagaccatttcctccttaatagataagcgtaattgggtgcgactggcaaagtgatcatcctcaccccccccccccccgtctttaggtcgttccgccaatttcgctgtccaccacttacaaacagtcgcgaccgggagagcccaaagggcacgactattctcgagcccgtacaaaacgaaatgaagcaaattcaaaacggacgct

SEQ ID NO: 33015 - DNA, 946 bp, Heterodera glycines
attattgataaatcacttaagctcaatctcgttgggaatgaatttgtctgaatcataatttatgcaacccacagcaatttgtgctttgttttcatttcaattattttgtgctcttaattaaaagatgtccatagttttggcttaaatgaattatggttttcagactttcaaggacaaattttttctataaacagttcactgatgttgcggtgaatattaaaataattcacccattcatttcaacatggaattaattactgaatatctgttttttataaaaataatgaaaaatctctagagctcaaacgtgttttggaaatgcgtttgtatgaatcgtatttatgaacccaatggcaatttgtgatcagttttcaactcaattattttgtgtccataattaaaaaatgcgcatatttatgttttaaatgaaatgtggctttcagacgttcaaggacaaatttttgctataaattgttcactgatgttgtggtcaattttcaaaaaaattcatcaattcatttaaaatggaattaattacagaatgtataccgtttataaaaattattgataaatcacttaagctcaatctcgttgggaatgaatttgtctgaatcataatttatgcaacccacagcaatttgtgctttgttttcatttcaattattgtgtgctcttaattaaaagatgtccatagttttggcttaaatgaattatggttttcagactttcaaggacaaattttttctataaacagttcactgatgttgcggtgaatattaaaataattcacccattcatttcaacatggaattaattactgaatatctgtttttataaaaataatgaaaatctctagagctcaatcgtgttttggaaatgcgtttgtatgaatcgtatttatgaaccccatggggcaatttgtgatcagttttccactcatttattt

SEQ ID NO: 33016 - DNA, 887 bp, Heterodera glycines
cctttttccctttcgtttgtcacggacacttcgaacatttctccgccgactgcaaatgttttgcgcttatcacttcttttttggccattcctttgctgctggtctttccccccatttatcttttgcactcaaacctttccttgccataattcgtaattcatttgaaagattttcaatttgtcaaagaaatggaaaatgctgcgaccggtggaaagagagtcccccgtttctctcacagcgcggggacagagggcgccgagggggagaaggagccccaggcggaggagccgccctccgccggcaccgccggcgccgatagacctgccgaagaccattccctgctgctcgcccagctgctcgccgccttcgccctgttcggtcttgtcactgcgctgctcttccaattgcccgccttccgcgtgcgaagtcgcattggcacggacggacccgtgccaatccatcagttggacccgcaaatggccgaatgtgcgaagacatgcaggtagattagcagaaaagaggaggggaagagaattaccgtaacaccactctcagaatcgaattggtcgagagcattccccaaaacgtgtcttttcacctttccctcggcaattcgcccgctttggccatcccaacattctccgcttggatgcaactgatcagcgaggccaaacattcgctggccattgcggcttataagacgagtcttcgcggtgagccaacggcggagggagcgaaaattcggtgcaattttagggaaacacgtgctgggggaggaccaaggcaattactcgacccaaggagagacggttttcgatgtgagtgagcaaaaaagaccaatccgaagcccaatttgttgccaggctctactcgatgccggactgagg

SEQ ID NO: 33017 - DNA, 1020 bp, Heterodera glycines
ctttcatttttatgtatattgccaaaacggacaaaatgatcacgacaaaatccgacatgataaaagtaaactgctgggccataaaaacaaaatttaaaaataatgattaagggtttatttcaattttccaatccacgtgaatttatggcaatattcaataatttgtgatttttcatttttcaataacaaaattttgtcctttttgccgtctcgcagaattatgggtaattattgcattcattaaaatttcaatttgtttcaagacggcgcctgttgagtattacggccgtactcaaaattttttaattttgaccaaaaaaaaccacaaacatatttatggaaaccgtcgatttcatttaaaattaatttttaatggtaaaataatttttttttttaatcatttttgcagcttcatgttgtccctagatgtattgcttctcaaaggttattagcattaataataccattccatttcactaatggatttgcgtgtcccgtaatgaattccatttaatattttttgcagaatttcatgataatcatactcaaaaattaattctttcgttcggtgcggaaattgacgaattcaaaaaaaatgtggaaaggcttttaaaattatttaattccttatgccttttttctatttttttttctcttgcccaattatcatgtagacttttcaagaacattctagcaagaataattcaaggactaacacgaagtaaagatttaattttccttgacattatcgaaatttcttatttttatcttcattgtttttatctattatgtttaattatctgtagaacataaaaggtaactcgccgggtgggaatcgaacccatggcctttccatatccatgcaatgttctaaccgactaagctatcctggtgctcccttgcgagctttcgtcctttatccaactttctcccaaactccattttcttctggcatcacatttaccattaccataaaatggcaaatatggattacaaatttcaaatttattataatttttt

SEQ ID NO: 33018 - DNA, 1047 bp, Heterodera glycines
ggaaaggggaagaaggagcaaatgtaaaaggatcccttagaagatgaagagaaaaggaaaagaggaaaaagaaggaatagagggaaggggaaggaagaggagaaggaaaggagaatgagaggatgaaaaagaggagaaaaatggcgtacagcagatgacatggcaatggtctaacattttgggaactatatataacagtatttgtttttgattagaatggattatggcccaaaaattcgaccgttgccatgtaaaaagaaaaaatgttgccaaatgactagtgatgctcgagaccgaaaatttcccgagactcgagaccgaggacttgaccccgagactcgagaccaaaaaaaccccgagacttttctcgagtcgagaccgagagtctcgagcagcactacaatgagaaagtaaacaaactgatcaaacatttcttctgtttctattgttcagcttttcctattccctctttttgtgttcttttaaagtctgtcatttttagggctttctcttctttaagttttaaatgttctgtcatttttcttcggttttccattgtaaattttctgtcattttagcaatttccattaaaaaaaaaaaaaattttggcaacgaaaatcgaaacttaaatggtgcatttgcattaattagtctgttctatgaacgtgagcatatactgtattgtagaaattcttgatcaaaaaattaaaaacaaaattatgcctccagaaaaatttggcgccttttaggaaagactgttcggtataatgtgatcagaaaacaattaattatgtaagtcacgtaggcctaaatgaatgcttaatgcattaatgatttcattccaaatgaacatatactaaaattggaacaatgcagagaagattaacatggcccctgcgcaaggatgacacgcaaattcgtgaagcgttccaaatttttttttcattcattcctcacaaaatattcaataatgggaaaaaaagtaaagtccgggtaaaaaaaaatttcccgggagcgggaaggcgggaacggggagttcaaaatttt

SEQ ID NO: 33019 - DNA, 950 bp, Heterodera glycines
tttgaataaaaatggtaatgttcggttatatcgtctcattaaaaaatgtacaaatgtcattcattcattcttcactctctctttcactttttcccttcgcttttcctttccttccctcactttcccatcgctttacattcattcaccgctttctttccgcactccgcgcactttggtgccgctggctttttgcattcttttttgcacttgccactcgcgcatttcacacaatccgtcgcgcatttattgttcgtctttgggcacacacttttgcattcgtcgatgattaaactctgacaaaaaaaagatggaaaaacttaaaaattcagaaaattagagaataaattattatttttctttgaatttaccgcttcgttaaaagagtttaatgcgacgacaaaaataagacaaaagagaaggaaagcgcgggagaaatgtttcattttttgcttttttaataaaaaaaaaaattaaaaaattccataaaatatgattttgttttcggaaaatgctttaaaactttcaaaaattgctaccaaataaaagtgtacgaatgaatgaatgttcgttcgcctttctttctgctcggccttctcgccttttttcaatgttcaaataaacaatattttcttcaattgcctgtgtaataaataatattttcttttttcgtaattgtgtgactacggactgtccaaataaacaattttttatttgattatttgggaatcaaatttcaaatttcattttaatatttaaagtttattttaaaacatgaaaaattttgtattagtaaaatgaatttaaaacattttattaatacataattttttaagattttgaggatcaggaaatgtttccgaaaatgattgacgggaacccaaaaagcatcgcaaaatgacgtcataaacccgttttgccactgggtgagtgttcattgcctctcttctgat

SEQ ID NO: 33020 - DNA, 437 bp, Heterodera glycines
taacgccttctcggccgtgaccgattcgggcaccgatgttcttgacagacttggcaaaatcagcaagggcgctttaaacgttgtcaaacttgctgggccccttggccaactcattcacacgggcatttccgtgacgcttagtgtaatattaattaatctaaaaatgcatcaccgtgcgtcacttaataatttgcatgtatgtttaaggaagactcggatgaattacgggcgattaagcaattaaatgagaaaattacaacgaagtttgatgaacttgcgcacaagttcgatgtgatgctgaatcaaatggagtttgcggacatcatggagttttatcaagatgtatttttactagagtgcagcggtaccgggaaatttgggcaagaccgggaccgggactttttggctgggacaaccgggaaaaaagccgtgaattt

SEQ ID NO: 33021 - DNA, 971 bp, Heterodera glycines
ttaatttattaactttataaaatttaaatatccgttcctcccatgacaaattaacaaattttaccgcagagttcgagcagtaacagaaggtaccagaatgatgtgctgccaaataatcttagaaacatcataaaattacgggtttgaaactttataaattttgaagggacaaattgtttattagaatgaagtaattaatattaatacatatgaggattaaaatggaaagtccgctaatttgataaattgttgaattatgctattttaatttttgattagtaacaaaaaagaaaataatttaaaatgagtttttttggcttagtttttgcactttaaaaaaattttctggaaaaatatggattaaaaaaggtcgaattcttgaaaatgattcaactgatgattgatcaaatttttaatgcagcgaaaaatgatggatgaacagtcaaaacaagttttattgcccgtcgtccgtcaaatcatttcgttggagcgaaaataaaataaacaaaatttccgttactttaatcgataatattgggcgaaattttacagcttatcattcgcgtaaaatatttttgttaaaaaataaaaaaaaaactttttctaaacataaatttataagaaattgaaaaaatgagagaatttggcaattaaattttggccaaacttcaattttgttttaaattcttttgggccatatgttggccaagagaacagcagacaattagttaattacttaagtccaaacaaaatgtcgtaaagtcatatgttttatggcagacggagaaaccataaaatttatgtaattaattaactaacgattaaacgttaattttttcttcttttgccctaggggatgattgttcgagataaaactgaaagggataaaaaaattgatagaaagcaataagtcgatattcccataaaattcataattttaatgtaattaaaaaaacatacataatattaaa

SEQ ID NO: 33022 - DNA, 551 bp, Heterodera glycines
tctctctcctttccttttctcccctctcattttcccctacctttccctctctctctcctttccttttctcccctctctccttttccccctccctttccctctctctcctctccttttctcccctctcattttcccctacctttccctctctctctcctttccttttctcccccctctccttttcccctccctttccctctctctcctctccttttctcccctctcattttcccctacctttccctctctctctcctttccttttctcccccctctccttttccccctccctttccctctctctctcctctccttttctcccctctctccgtttccccctccctttccgtgtctctcctctccttttctcccctctcgttttcccctacctgtcgctctctctcctttccttttctcccctctcattttcccctacctttcgctctctctctcctttgcttttctgccccctctccttttccccctccctgtgcgtctctctctgctctcctggtctccgctcgggcctgatccccctcgctttgccgctct

SEQ ID NO: 33023 - DNA, 1025 bp, Heterodera glycines
  unsure (1)..(1025): unsure at all n locations
attattcttttaagttttttcaaattaaataattattgtattttcatataattttaaataaaatatggttcgagctgtggtgccgatagtcacatcagcaggagggaaattttggcaaatttaacgaaatttgttaaaaaaatttttagtgtttttattaaactcaaaaaattatatttatttgattgtttttccaaacaggctcaattactcgccgtgtgtcaaacgggacaacattggccaatgtgatcccacccgatcacttgcaaacattggtggacaatggcactgacgcattgctgccttcaacatcggatgcgccaaggaggtctcgtcggatcgcggccaaagtgagttttgggcgggtgggaaaaaaaaagaaatttgatttattttttaattagtttaattaattttacataattcattttttaatttatcgattactttttgattagtttttaagtccaaaataaaaaattaattaaaaaacgcccattaaaatttttccaaaaaaaataaaatcaaaaaataaaccatgttaaaaaagtgtttaattaattaattaattgcatcaaaaatttaagaatggtcaacaggctatgtcaacatcaaatccaattgcagcattacaacctgtgttaccaatgaacccagcccaacagaaattcaacccgcgtgaagactcaacgccaccgcccgcgccactgagtaaaatttaattaaattatttaagaattgtgattggaaatggtttcctgatcagatcatcatttataattatttttgcacattttcaaggatttcctaacttgatggaaaaccatccggaagcactgaaattttatttttctttattctgttaacttttgaattggccctggtacaccgttaaaattacgaattcacaannttaaagtgaattttttgactcactgcttgnaaattgacttttgtngggaattntttgaaagctgaaacgattgaaaattcgacagttgcaagaaaagtgttttaaatgccaa

SEQ ID NO: 33024 - DNA, 587 bp, Heterodera glycines
cgtccatactggaatccacgagttcggctcttgacggtgcagctgcttctacctcttggaccacaatggtagggtataaacgaggcactagcaatgaaaagcaatcataataattaaacgaatgtactttctgttattaccattgctcttttctgattcaatttcgatagaaatctttggggtatttttggttccaaccgatggctcaaccgatgacaaaacagatggataaattgatgcaattggagctgagagcgaatgagtctggaattgtgagtgtttttttaacgagtaaatgaagattaaaaaataataaaaaacatccctctgtttttgcttgaatcggaatcaaaaacaaaacgacctcgaaaatgttggtttttttaacgattgggatgaggcagggggacagattacaaaaaactaagaataattaatatgaaaaatcattaaactatatacacgcttttttgcataaatgtgcgcacgatcaacccaccctttccagttccgacgatgatgacatctgctgttgatcatcttcccttcgcccgggcagagaatgctgttcttgttcgccttttccg

SEQ ID NO: 33025 - DNA, 577 bp, Heterodera glycines
gaaataagcattttttgggattctgaaattttcaatgcgatttgttaacagattttgtccgaaaaatgaccaaattttgcgattttgagcaaatttttgcttgtaaattaaggatttttacggtccggcggtgccgataggcgccaccgggggaaaaattaagaatttttaccatatttttagcatattttcattaagaaattctttattttgcggtttttctcaaaaaaccacaaaaagcctcaaagcctcattttgaaaatttagcctcattgacctatcaaaaaaccacaaaatgaggctaaagcctcagatatggcagctctgattataatccccaaaatgcttccgccacagaaactctgacatataagtatcgtacaatgatcttgcatccccaaatcttttttttgccttcaatttcattttttgccaaaggctttcattcgggttcggggttcgaaatggatgtcggattcgtgatcagcgaccccgaaaaccccaggaaagacgttttgatgaatttcaaaaaattatttttttttaaaaagagagggggataaaccctactattacc

SEQ ID NO: 33026 - DNA, 1115 bp, Heterodera glycines
ttcaaaattttcaattttttctagtctaatctactcaaaacggctcagaattcaataaaaataacattcacggtgcgaaaaatggggtttgacaagtttattggggaaaaaagactttacaaaataatacccctgggagaagggagtgggaaacatgatttcaaaattttcaattttttctagtctaatctactcaaaccggttcagaattcaataaaaataacattcacggtgcgaaaaatggggtttgacaagtttattggggaaaaaagactttacaaaataatacccctgggagaagggagtgggaaacatgatttcaaaattttcaatttttttagtctaatctactcaaaacggttcagaattcaataaaaataacattcacggtgcgaaaaatggggtttgacaagtttattggggaaaaaaagactttacaaaataatacccctgggagaagggagtgggaaacatgatttcaaaattttcaattttttctagtctaatctactcaaaccggttcagaattcaataaaaataacattcacggtgcgaaaaatggggtttgaaaagtttattttgaaaaaaagactttacaaaataatacccctgggagaagggagtgggaaacatgatttcaaaattttcaattttttctagtctaatctactcaaaacggttcagaattcgataaaaataacattcacggtgcgaaaaatggggtttgaaaagtttattggggaaaaaaagactttacaaaataatacccctgggagaagggagtgggaaacatgatttcaaaattttcaattttttctagtctaatctactcaaaacggttcagaattcaataaaaataacattcacggtgcgaaaaaatggggtatgaaaagtttattgggggaaaaaaagactttacaaaataatacccctgggaaaaagggagtgggaaacatgatttcaaaattttcatttttttctagtctaattcccccaaaaggggttcaagatataaaaaaaaaaaaaattcccgggggcgaaaaagggggtttggaaaaatttattggggaaaaaaagacttttaaaaaaaaaccccccggggagaaagggggggg

SEQ ID NO: 33027 - DNA, 1007 bp, Heterodera glycines
atagccattttctgaggcccgaaggaaaatttgagagggctaatttatatgtaatattcgaaagtgcaaagctaattagcgattcaggcgcacattggggcctgaattaagccattttccctttgatcggtacaaaattggccgaaaaagagatagccattttctgaagcccgaaggaaaatttgagagggctaatttatatgtaatattcgaaagtgccaagctaattagcgattcaggcgcacattggggcctgaattaagccattttccctttgatcggtacaaaattggccgaaaaagagatagccattttctgaggcccgaaggaaaatttgagagggctaatttatatgtaatattcgaaagtgccaagctaattagcgattcaggcgcacattggggcctgaattaagccattttccctttgatcggtacaaaattggccgaaaaagagatagccattttctgaggcccgaaggaaaatttgagagggctaatttatatgtaatattcgaaagtgcaaagctaattagcgattcaggcgcacattggggcctgaattaagccattttccctttgatcggtacaaaattggccgaaaaagagatagccattttctgaggcccgaaggaaaatttgagagggctaatttatatgtaatattcgaaagtgcaaagctaattagcgattcaggcgcacattggggcctgaattaagccattttccctttgatcggtacaaaattggccgaaaaagagatagccattttctgaggcccgaaggaaaatttgagagggctaatttatatgtaatattcgaaagtgccaagctaattagcgattcaggcgcacattggggcctgaattaagccattttccctttgatcagtacaaaattggccgaaaaagagatagccattttctgaggcccgaaggaaaatttgagagggctaatttatatgtaatattcgaaagtgccagctatttagcgattcaggcgcacatt

SEQ ID NO: 33028 - DNA, 1012 bp, Heterodera glycines
  unsure (1)..(1012): unsure at all n locations
tttttgtgctaggacaacaccaaaaagatgctctgcgctgtcctgctcttctccggccacactctgatcatgatggtcgccactttgactgtcgaccgttacattccgtccgcctttcgtttgctgcgccttttgccgcgtctttttgcactgatcggtgttccatgcatggtgatcagcaggtggggtgccttttactaatcatttgcttaatacggacccaagggatcggctaatgggataatggcacggaaaataacacaatttggctgagaatttcaatgaatttatttggaaatattttttcgtttttaattcttttggagcagtttaaggtgaatgtgtggatttagatgggcaattcgatattttgtgtcttaaactggcatccttttcattggcatttcatccattaattgcttttttcaccaccatttttgccactttcaggacccattacacttgcgacgtggtcattgcctatctgtctacaattgccatattttcgtatgtttttctcgtccattttaatggcaccgatttttcggcaaaaaattttggttttaatttttgagaagaaaaaattgtatattattagagaccggatttttatgtgctaaaaatcctgaaatatgtaataaaatatgtgctaaaaaatgctgaaatatgtgctaaaaacccccaaaaatgccaaaatatgtgctaaaatatgtgttaaaaattgaaaaaataagtgtgtttttgcataaaaattcccaaaaatctcattctttatcatttttagcccatacaacgcaaatcaaatccatttcgaagtgtttggggtaaaattgtctttttttgataaatcatttctataaattgaaagttccagcagagaacttcgaaatccaatgacgaattaatgaattcgagatttcattagttttctacatcgaagaaaaattttttaatttgaaaanttatgtaataattangaaaaagtcgattttttaggggtgtatttttcaat

SEQ ID NO: 33029 - DNA, 909 bp, Heterodera glycines
attcgggggaggggacctccacactgaatgatcacttttattggagcaatttaaacatttctttatttagcaccaatacatcatctctactgaccaaactgtcgttggtggcatcaacggaagtggcgctgtttcttcacacaaaattgacgacgcgacacttcgccaattgttcctttcctattttactgcggaaaagtctaaacaacccgaaattgcaattgtgatgtcaagaatattgggatattctgcagaagtaagtgtgcttgttatttctttgggaatgatttcggttggcgcttaccaaaattttttccgaaaacagtttttttgagtacgtttgggtcgaatgggcgaaggccccttcaccgattattttttcttttatctccaaaaaattggtaaagagatgttactttagttaggcattgcatttaaagaagaataaatgaaatagaaattaacaatttaaaacgaaaagaaaatgaaaaataatgtttgacaatatgaactgggaattatgatgttcaaatgggctggtgttcatttggcagcctccatttgaaccagtccgttgtgtgtgtaatttatggttttgccccttggatcagagacccgaaacctagtaattcacttccttttttcaaggaacaatcccaaatcagcgcggctttgtcaaagtcgtcctcctccgcttcgttttggttcgcccccttttcctccactccgtccacttctcctggtccgccaggagggctttcccttactgaacaatttgtacgctttttggaacaagaatccatggccaatgctcgcgcattgcttcagccacccatccaagtgctaatttcaaatgatcccttcactttttgctttttcagtctctccctgctgacagcgcaactttcc

SEQ ID NO: 33030 - DNA, 952 bp, Heterodera glycines
  unsure (1)..(952): unsure at all n locations
ggggccttcgcgtaagcgtaagtgatatgggcggacattcaacggaaaacccaaaaggagggaaaggcaaataattgatggatggcattggccaaagaaaaaaaacgaacaaacccaatggacataatctgaaaaaaaacgaatcaacaattaaaaaccaagtcacttggataaggggacttacaatggttatcatcgagacaccttaaaaaggagcaaagagaaagaaagggatggaatgactcactctcgaggttcactccccacagagacatatagccgagaacgcctgaggcaattattggaaatttgaagggcacacaaataacgaaaaaccaattatctatcttaatccaaaacccatttctgatttttcttcgttttttcaggcgcccattttcttttgatttttcattttgatgaaaatttaaaattaaatgtcagcgaaaaaatcagatggaaaaagcaaaaaatgttatggtttttggcttatttattaagctctttcaaaatgaccaatgtcaatggaagcgatggccgcggtgatctgaataaaagcggcaaattttattcagcttatttcggtttcattgttcccaaaaaaatgccaaccaaaaaggcggcgtgccaattcggaatcatcagaaaggagacgaacatcatgcagaccatggccaggaagcagttcctgtcgatgggtgtgcatttgcattggaaaagagtgacgtaaccgaccgaaagagtgccggcttcagttccaagtactgtaagggcaatttggtggacctggtcaatgttttagtcccacctgatcagcgaaggggtaatactcatggaaagtggtcacattgaactcggcgaattggtcggcaatggcacgcatcaaccgacagcctanaaatgcactcaaacgaagtgatttncatacaaatgaattgtctccgtgccattt

SEQ ID NO: 33031 - DNA, 898 bp, Heterodera glycines
gtgcaaataaaaattagatgcaaatgcatgtggttgtgtgcgtgctatggcgcaggtaggtgtgtgtgtgggtgtgtcaggtgcagttgcaattgttgttttggtatgtaattgtaggtattcatgcccaaaagataggtaccaaaaagcaaaatacgcataaaaataaggagtttcatatattttttgcaaaaaaaaatgaaaatatggtaaaaagtagaaatgaatatataaaacaaaaatgatcgagaaaactaaaataaaatgaataaaaataaaattttaacaaaaatttattttaatttaaaatccccggcaagtttcgctgggattcaaaaaattttaattgaggcgaaaaagattgacccggaaatcaagaccgatgacgttaataattttctcgaaaaacagaaaacatacacgattcacaggcccataaggaaaagattcccgagactaaagacgataccgagtggcttccataccgattggcagtgcgatttgtgcatatttgaccagttgaaaaagcataacgacggttacaagtatctgttggtatgcatcgacgtgctgagtcgaatgatcttcagtgcaccggccaagtcaaagaagagtgaggacatgattgaggcttttgatcgggtgttcgacaagtcgaaaattatcccgttgaaaatatatagcgacagcggactcgagtttcaggctggaaaaatgaaaaaatattttgaggaaaaatttattatcaaaaatgtgatgtatagccccgaccttcacgccggagtcgtggaaagggcaaatcggacaataaaagagcgtttgtatagatatttttaaaagaaagaactctacgatgggtccaaggaataaacaaaataataaaaaaatttaacaacag

SEQ ID NO: 33032 - DNA, 878 bp, Heterodera glycines
  unsure (1)..(878): unsure at all n locations
ttctcccttcccctctcctaaaggcttttcgtcggcgtttcgctttgtttgaccttcatttttctcatcgttcacttctttacgctccaccaaacgcttttgtacttttggccatgggctgagtcagtgagtactgtaggctacagtcagtccaccaaataaccgtaaccgcacggatagtcttacggacataattttacaacagcaaattaagttcaatttaaatgaatgatttttttgaggattttctgttctccgcagtttccgctttcgttttcctcgtctgttcattcattgagtcgttttactccacgggggcgtggtaaagaaaagcaatgaaatcgcttaacattcatcagacaaacgatgactcaccaattgccattggcacaggtccaacaattgcaatgacattggcggcgacggagtgattcacaacggatgccgactgatttgggagtgggcattcgccgcggtgagaacaacgaaaggaacagcgaaaggagcaatttttgaatttttgttattttataacaaagcacttgtatcaatcaccacaaaaaagctgatggaacaaaatattaaaattcactcgttttttggggatttttaccgtattttttaaaattacagtaatatttttcattactcctttcccaccgagattcacccccccccccccccacagtttcttctcttcactctgtgcgttttgttcttcaccagtgctttttttgccaagcgacaaaaaacggaagaacgacgcatttatttgcgcgagagaaatgctggaaattttgatcgctaatttgtgaaaatttaagaattcatgattanattttactcacctcactattcaccagggatggggccaattg

SEQ ID NO: 33033 - DNA, 813 bp, Heterodera glycines
aaaattttgaaatcatgtttcccactcccttctcccaggggtattattttgtagtctttttttccccaataaacttgtcaaaccccatttttcgcaccgtgaatgttatttttattgaattctgaaccgttttgagtagattagactagaaaaaattgaaaattttgaaatcatgtttcccactcccttctcccaggggtattattttgtaaagtcttttttccccaataaacttttcaaaccccatttttcgcaccgtgaatggtatttttattgaattctgaaccggtttgagtagattagactagaaaaaattgaaaattttgaaatcatgtttcccactcccttctcccaggggtattattttgtaaagtctttttttcccaataaacttgtcaaaccccatttttcgcaccgggaatggtatttttattgaattctgaacccgtttgaggaaattaaactaaaaaaaattgaaaattttgaaatcatgtttcccactcccttctcccccagggtattattttggaaaggctttttttccccaataaacttttcaaaccccttttttcgccccgggaatggtatttttattgaattctgaaccgttttgagaaaattaaactaaaaaaaatgaaaaattttgaaaatatgtttccccctcccttttccccgggggaattattttggaaaggctttttttccccaaaaacttgtcaaaccccctttttcccccccggaaatggtattttaatagatttccgaacccgttttgaagaaaataaaaccaaaaaaaaaagaaaaattttaaaa

SEQ ID NO: 33034 - DNA, 869 bp, Heterodera glycines
acggtcaattgtatacggccttctctcgggcaacagacggaaacaatgtccgtgttcatgctcccaaccgggaaattgatgcccaaggccgagccaaagtgctgaatattgtagctactaatatgctcaagttacaataaatggcttagtccagagcagttgggcacatggtttttggagagatgccaatcccattcccatctgcactatgttgggtgcgaaaatggtgagaagcttggatccgggacatggaccggtcagccctctttagggcctacaggtgaattgccatttagcgctcaacccaataacgtgccaacgcctggactaagggagggaggagggccatgacgtgcaacgttagggcacttccggtttccattgcattatgcgatgtgtcaactccaattattggaggaaaccaagtgcatgtcggctgacgcaaagaccctaacagactaaacgcgcctaggtagcgaagctcaagaagcgcgcagcgctttcccaagttttaattaatatatacgttatattgacaaggagtttcgtttcaaaaactaatttgagcttaacggctaatgggacgggtctgaaagtagtggaagggtcttacaactttttgaggagaattcgggaaaactatagagaaaaattctgcgcggacgactgagtcccggggaccgatttctcactttttcttgcgtttgacggcccataactttttttctgaaacccgaatcaaaaagtgcccgctgtgagggcactccccacaactgtcctctacatgctggtattttttatttttttattagagccaccccctggcctgcacgcttggctaattgaagtgtgctcaaaatgtacacttc

SEQ ID NO: 33035 - DNA, 816 bp, Heterodera glycines
  unsure (1)..(816): unsure at all n locations
tcctaatcaatggaagtccctaattttaatcctnttttttaataaattntgggctctaaatccgtttcatggagttttcgagaatgctaacgcatattttggtaaattttttcaaattccgttcgaaatcggtttgcgattatgaattgagctaatccgggtttagattcgtaatcagtacccgaaaatcctaagaaacagatttttagtccaaaaataaagattaaattaaggacacccattcgttaggattgcctaaattagtaaatattgcaaagcaaaagcaaatttgaaaatccaaaaaaatgttttcaattttgacccaatccaaaccgctggttttattggccacaaaacctacataaaaaacgggttttaaaatgcactataaacaacttttttgattcgacctggccttggtagaattaatttataaaaaaaaaatttttttttttttgtatatttcagtttgcctttttttcacccaattgttattttccgaataaaaacctgtgagtggaaataggtgaagctgatgtatgggcttttgtaagtgcgaattgtgcgctcaaattccttctcccaaaggcccgacaaaaaggacacattggacggatagaattggagatggtaaacctggatagaaaatggggaaaaataatgaaaatgggaataaattgtaaagaatggcaccgatgttagcattgctagcaaaaaatttaaaaaaaaattatcaaaaggctatgacagtgccagtttttttttgagaaaaatggcaaaaataaattaaaaaaccgttcggattcactgatttcc

SEQ ID NO: 33036 - DNA, 794 bp, Heterodera glycines
aaaagaataaattttaaatttctaaaaatttaaaaataaaaacttacggcgttcacggataaggggagatgccacatttggtccaccatccaccgagttctcaaaaaagccgttggtgccggccatgacggccaaagtgatcagaaaaagggccaaaagaaagcggaggggagacatttgtaaatgtgagatgaatttgttgatttttgattacaatacgattggaaactgtatgctttccagaaaaattgtgggagcttttataagcaaaatcttcttaactgatcagcagtgatcacgaatttgtacggttcatttcataagactaattatagtaattagtaattattattattatgattatgctaaaggctaatcatctgcttttttaggaaatcatgctcacaaaatgtctcaattagttttaatgaattgccttactaagctttgattagtaataatcatgatcagaattcctgatcattttctaaattgccaatgactttttactaatatgatttttttaattgatcatgcgaggttaaatgggggtcgtcagtcgtcatcctatgatctaaaaactcattaacgaattaaaataggtgcaggcaaataattagtttttggtcctgttcgcccacccactaaacttccttttatgggtgtgtaattttggcaaaaatttcgtcaaagaaattcttcaaattactctttaacaaaaagtattttgttgcgagcgatgagctaaaattgaaggaagtgtttgctttgatccaaaaattaaataattattg

SEQ ID NO: 33037 - DNA, 835 bp, Heterodera glycines
tcgattttttcagtgtccgtttgggggtactcaaacaattatgggggagcaaaaatccaacgcagaattaaagtacaggctatagggaagctattcccgaaggattcggtctccccataaatctgggcgcatcggttcggggggactgccccgaaaacaaaaaaatcgattttttcaagtgtccgtttggggtactcaaacatttatggggagcaaaaatccaacgcagaattaaagtacagactatagggaagctattcccgaaggattcggtctccccataaatctgggcgcatcggttcggggggactgccccgaaaacaaaaaaatcgattttttcaagtgagtgtccgtttggggtactcaaacaattatggggagcaaaaatccaacgcagaattaaagtacaggctatagggaagctattccggaaggattcggtctccccataaatctgggcgcatcggttcggggagactgccccgaaaacaaaaaaatcgattttttcaagtgtccgtttggggtactcaaacaattatggggagcaaaaatccaacgcagaattaaagtacaggctatagggaagctattcccgaaggattcggtctccccataaatctgggcgcatcggttcggggggactgccccgaaaacaaaaaaatcgattttttcaagtgtccgtttgcggtactcaaacatttatggggagcaaaaatccaacgcagaattaaagtacagactatagggaagctattcccgaaggattcggtctccccatatatctgggcgcatcggttcggggggactgcccccaaaacacaaaaaaaaatttttt

SEQ ID NO: 33038 - DNA, 1187 bp, Heterodera glycines
  unsure (1)..(1187): unsure at all n locations
aaaaaaaaagaaccaaaaaacccttcaatgcgatgaatgcattttccagaagtccttaaaggacttctccaaatgccccctcgccaatttttgaccatttgtcgaaagaactaaaaaaaatgcatattcgaacaaaagttggaaacaaaaaattaccatgtcgagtcttcgaattcgttccacgagaaaacagcggactgaccacanagctcgaggaaagcatccaattctgaataaatatgactattgttagtaatacaaagcaagtcccaaataaagttaaaattttaatttccaaatttcttctatcatttacccgattcccacggatttgtaggcaatgctttgtctaacgacttaaattgaagcttcacaggtgaaagagccgaagtcgagaaagttgttgaagacatcgaagtggagggagttggtgaagccaatgccgaattttcaatcgagtacattgcgtgcctgctttgttcctccaacgctttggctaatgcgcctgtgagcacaccaatttcttgggcactgcctccagcagaacaacgactgttttccacatcagactggtcgacctgtaaattccatttggtactaagaaattgatacaattatgagggcacattttcaaacttacatgtttgaaggtagtcccttgcttaatctgttccatcatgttgtcccgtaaagtcggtgcgtttgttggcacgggcgttcgttcagttgatggtgggcccactttcttcagtttggtgccttgttggatttgttgcagaaggtcggaacgtttattgttagtcggatcgacgaaagacgcctttgattcagtggtggaaggcactgaattgtccggcagagttggctttgattggaatagtggcggtgggggcggaggaggtggtggaggnaggaggagacgccaccgaactcgccgctgttagcaccgactgtctttgctgcggagatgctaccgaactcgccgcggttggcaccggtggaaactgctggggaggcgccggtggactttgctgattatgggaaaattcaaatcggccatccacccaattgtaaaatacttctttttgctgattaatgaccgtcggtggagttggcggcggcggtggcttcccgcgactgttcttgacttgggattggtgcccattgatggcttgaaaggcggttga

SEQ ID NO: 33039 - DNA, 396 bp, Heterodera glycines
aatgttggtgggttgagtcccagtgattgaaatgctgtgggttgagtcccagtgattgaaatgttgttgggttgagtccgattgaaatgttggtgggctgagtcccagtgattaaaatgctgttgggttgagtcccagtgattgaaatcctgttgggttgagtcccagtgattagaatgctgttgggttgagtccgattgaaatgttggtgaattgagttccagtgattggaatgctggtgggttgagtcccagtgattgaaatgctggtgggttgagtgccagtgattggaatgctgtgggttgagtcccagtgattgaaatgctgtgggttgagtcccagtgattgaaatgctggtgggttgagtcccagtgattgaaatgcaggagaattgag

SEQ ID NO: 33040 - DNA, 854 bp, Heterodera glycines
ctaaagctgatccatgggcagctctctagcactgagctaaaacccattttttaaggagcacgaaattaggggtccgaatggaaagaaaatacggaaagaaacggaagaatgaacgaacggagcacagaaaaggaggggagagaagggaacggcacaatttgacaagaaatgccttcattattttttgaataaatgtcttcagagagagggagaaatagagggagagagaatagaagataaaagagtgagagagagagggagtagggagagataagaaaaagagagatgaagggagtcagaatggaaaaaagagcgagtaaattaaaaacataaaatcattcattgaaataaaataaaaatttattatttattcattatcatttaatttattcctgtcattaagagttatggcccatagggaagtttcttatcagcaaaaggtcaaaccatatttcaatttaaataaaatatgaataaatcaactaaaatatttcattttctgcgttgctaaaaaaattgttttaaataagcacaaatatgtacataattatgttgcagataaatcacaaaaaagatttatgtttgctttttaaacaataaaatattattaatatttttacgaaaattatcttaaaaatatgagtaaaaaattggtttctcttttatgaattaagtttaatgtatttattttaaaaatatttgttgaacagaaaataaaattcgcttttgcagctataataaaagcaattgaaacattccaaaattggaagactttattatattttttgtttttaaaaataccggaacaaaaatcaaaaaagtaacaaattcgaaattgaagcaaattctttttt

SEQ ID NO: 33041 - DNA, 534 bp, Heterodera glycines
tagtgatgctcgagaccaaaaatttcccgagactcgagactcgagaccgagaccgagactcgaccccgagaccgaaactcgaccccgagactcgagaccgagacccaaaaccccgagaccgagaccaaaaaaacccgagacccgagacttttttcaaaaattttttcttacacacttaaaaatcgaaaaaaatcaatcttttgagtttttttctcaaaaatttttgttttttccttatttaagctaccatacatttttccttttcatatgattgacttttttacaccattttttgtggtgctctttttcaaaaaaatgtttcgggaacagggtccggcggtgtcgataggcgccgccgggaaaattttttaaaattttactgcaatttgttaacggattttgtccaaaaaatgaccaaattttgcgtctttgagctacttttttaaaataaaagtaagagttttgggtgccggcggtgccgttaggcgccgccggataaaattttgaaatttttagtgcactttgttaatagat

SEQ ID NO: 33042 - DNA, 795 bp, Heterodera glycines
ccaaaagcaaaggcgttggttgaagctgccgattttccaaggctcgaaatttttaaggatggagggtgggggggggtgcgctgctgaggggaggaaacaaatgaaatgatccattctcaaaaagattaattcggtccaccatcagctttaatgtcgcgcgattcattacatttgataaatgaaggctcttgcaggtccattagtgattggttgttgaagcgatgcacaattattggggagacggcggcggttcagcagagaagaaagacgtataaatttggagaataaattagtgcagttaattttttccaaaccatatgtttttttattttattatttttcactaagaacattaaataaacataaattaattttgaaattttttcatggcgacccatcggctccgccagactatcaaatcagtggagaaaaataaatgaagagtaatggaaagagatatttttaaggactcatataacttttcttaatttgattattaaggacaccgattttgcaggagtgccctattcataacaaaggatgaaaaatgaatcaaatttatatctaataataaacattaatcatctttgccattcattcatttttgtcagattgcccggaacgataacgctggtcccggggcagttgtgtatttttattggatggagggtgggggggggggggcgctgctgaggggaggaaacaaatgaaatgatccattctcaaaaagttactcgacattttcgacatgtccaaaaccggatttactgaccataaaatatcggacacaatctt

SEQ ID NO: 33043 - DNA, 413 bp, Heterodera glycines
ataaaaatcatttttaaacattaaagataaagaatgcttcttaatctaaatgaaaaattatggatggaaatttggttttttatttgatttatttgttgtaaaaatattgttatataattttggaattttagcaaataaatataaatccgggtcctgtccattaatgcttataataccaaaaccaaatttgtaagtttgaatatttctaaggtttgcattttgttgagtatttgatgaattttcacgctacctttcaagcaaatttttatatttaattatcctttccgtattttccactaaatattttagcaataaagaacatttataaattaagtataaatctgtcttcaattgaattaaaatactattaagaagccaattcaaaccccaaaaagtgtcaaaattttttataa

SEQ ID NO: 33044 - DNA, 958 bp, Heterodera glycines
aaaaattccagattcgaaaattggtttcctcatacgttggcgagaatgaagaatttgcgcgacaatatttgggtggcgaacttgagctggaattttccccgcagggtaagtccattttaaagccaaattaatgatgaacacaaattccttattatttaattatagatttgcaaagaacgctgctatttagtgcgtcaaataaaaagccgacaaaaatccgaaccggaaaatacttattaaaatttacaaaatcccagagtgaaaatcccttgcccatttaatatttttaaacttttccacgataaaaattaaaaaaaaaacccgtatgttttcgtaaaaaagtgttaagatttaaataatcataaagagggctgagaattaaatattcgaaaaagtgctcagaataaaattaagatttttttttgaatttttgaagattttttgtataaaaatgtggcagaaaaattattattttgggagacatggattatctggacggatttttgtctgcgtgccatcaattttattgtaccattttaattaggcactttggctgaacgtatccgtgccggtggtgctggcattccggcattttacacgccaactggatatgcaacaatggttcaggaaggcggtaccccagccaaatacagtgttgcggaaaatggcaaaattgaaatttcaagcgacccaaaagaagtgaaaaaaatatttttaatgaaaattttgcaatttaaaagttgggcctttagataaagaaaaatcagaaaatgtttatttttttaaagacacttttcttaggatcatatcaagcacatgagataatattcgtttaatttaaaactcgaaaattgacttttaaaaagtcgttaaatttacagaccatatttatggacaaaattagttaaaaactgcaaaaaaaaaagtaaaaaaaacaaatattttttgtagtccaaaa

SEQ ID NO: 33045 - DNA, 71 bp, Heterodera glycines
attaaatcaaattgatttttattaatccctcagaagtagaaagctgtttctgcacggcaccgaggacactt

SEQ ID NO: 33046 - DNA, 913 bp, Heterodera glycines
  unsure (1)..(913): unsure at all n locations
agcagcacaaccatcaccagattcagcaaaatgggcgaccgatatgtacactctcttcgaaagcccattttataaagataattagggcccataaacatggaaaatattttggatgggagggggctggtaaatcggttacattttaagatattcgatcactttttaaaggattctaaaggaattagtgataatccgtccggtgatgccgacaaacgccaccgtgaaaaattttgaaaaacggcttatataattttatgaaaatatgcattttagattaccgtcgacgacttcggctcccaccgaggcgctggcgcaaatcgaaacagtagccgccgcggctccatggaatcgtcttccggctttgcatcactcgcctctggccaactgggcgcattggtaatcattgcattgtttggtggcttaggttacgctttaccaatgccgtatcgtttggtttataataaaaagatcacatatgcttattgtatttttgttagcagtaagtgcccaaccggttcaatttacggtacccgaaacttttggccaatttgaaagccatttaaatgggggtttcataaaatcctggattttaattttacgatcccatttttacattgtttgactgatggtggaatggtttcagaacgagaacacgtcgccagaatatttgctgactgtgatcaaccatttgcgcatggaactgctgaagaaggaggagcgcatccgcgacatggaggagtacacggacaaactgatcaccaaggtggacatggaattcaaatgggagcctctttcgcatcagtcaccagggggggttttgccagcgaaaaagcggaaactatttgaaaatgataaacttnagtcccaaaaatctttccggtttttgaaatttgacccagaaatacaattttaa

SEQ ID NO: 33047 - DNA, 717 bp, Heterodera glycines
atgaacggaaaaggcgtattggggcccgctaaaaaagcgtccaaaccgagttccaaccaatcactaatgaccattaatcattataaaaaatagttctcgaggtgcgaaacaattaaaaaatgatgtttcaaccggtttaaagcacgaaaaatttcaccaaaaacttttgaaaagatgtatttcaaatattaatggctcattttcgagtgccccctggaaataaacaattttcctgaaagcaaaatgggcataattattaatttttcaccgaaaagctgcacggcaccgccgtgccttaaaagtacgcaaaaacgggagtaaaaatgcactggtaagaattgattttttttggtaaaaataataatttttgattgaaaatctgttaaatatatagccaaaattccaaaaaaattttcctggcggcgcctatcggcaccgccggacccttaaatcatttattatttcaaaaactggctcaaatttgcaaaaattggtcatttttgaataaaaattgaccattcatggcataatttattaacaaattgaacttatttcagggcaaaatgtcgttgaaattaatttaattttccatgaacaaagcatgaaaatgaatatattttaaaatatttttgcaaaataccgaagaaaacaaaaattatacgaaaaccttaatttttttggttaatatctgttaaaaaatagagcttaaatttcaaa

SEQ ID NO: 33048 - DNA, 439 bp, Heterodera glycines
cgggactcaactctccagcatttcaatcactgggactcaacccaccaacattccaatcaaagggactcaacccaccaacattccaatcaacgggactcaaccctccagcatttcaatcactgggactcaactctccagcattcaatcactgggactcaactctccagcattcaatcactgggactcaacccaccaacattccaatcaacgggactcaactctccagcattcaatcactgggactcaactctccagcattcaatcactgggactcaactctccagcattcaatcactgggactcaacccaccaacattccaatcaacgggactcaactctccagcattcaatcactgggactcaacccaccaacattccaatcaacgggactcaaccctccagcatttcaatcactgggactcaacccaccacattccaa

SEQ ID NO: 33049 - DNA, 927 bp, Heterodera glycines
ctctagagtcgtggtttttagtttttgaatttattcgttaggaaaagcttacgggccaaatagacagtcaatactcattattatttctatccttcatatatttttattaatatttattttaaaagatgtgttcctttttcatgcctcaacattttcggaaaataattttcacaaaatgtttaatttttttataaatcttcccttttatagtgttgccattgtgtgaatgaataaataatattaaacaatttttattttaattaccaaaaagaaaaatgaaataataattgtaataataataataataaacaataggtgggtgggtgatagtgagtgagtggcctattcgttttgaaatgatgcaaacattaaaatattattacatttacaaatttggttgggacttttcgtaaatggccaatgtcattatggcacaaaaggcggaaaagaaggcaaaaacccttttaacggaatggaaaatcccgtccattttcacagaaagcaacggggaaaagcatcggaagatcaaagccaacggccgacagaaggctaaagtaaatatcaatgagagacaactcaatgaatgaatgataaacttaaaaattaaattaaattgtaaattttaatgctaaaatatgcctcttccatggtcaagtgttgatctggcaccaaatcctccaaattatcgaggctggtcgacaaagggtcaccgccgcatgcgaagttggccaacccggagaactctgtggcgctggcgtgccttaattattaaaatttgaatgagggtggttaatgccagttttcattccaaattttcacctcagattgtctccattctgtgcttgttggctttggcattgtgggaccggcgagggcaaattagcaaatcttgcggaaccaattcacgctgaaacataaaatgaaatt

SEQ ID NO: 33050 - DNA, 464 bp, Heterodera glycines
aagattaacgagaatccaaatccccctccttcgtctccgcttgagcctgcaaatcacagaggcaaaagaaaagtccgttccgtgaatttgtcgtccgtgaaaaaaagacacacaaatgcgtaaaaagaatgagctgtttcgcacctgcacattgcattatataggtagttgttcccttctcgttggtaattagttagaaatttttaagaaaaattcattctttgaacacttgaaaagtttataaaaagggtcgaattttggatccatcatcactttgcctaactattccctataattgtcctatggaaataatcaaatccatagcaggcacgctacaggtgtaaaatttttttttcctttgtaaatttttttaaacaaactttttttgttcaggcatgcatggaggcatcagcaacaaaatgcgaagtttaagcggccttcgttttaatcagaaattaatgttt

SEQ ID NO: 33051 - DNA, 239 bp, Heterodera glycines
tgcggactctacatttttgaattgaaaaaattggctttactctttctttttctccatattgaccatcatactcatactccccccacccttttcttcttccgccacccacctccccctcttgatagtttaaactgaaggcgggaaacgacaatctgatccccatcaagctagcttctgcaggtcctgctcgagcggccgcccgggggtcgatccccgatctagtaacatagatgacaccg

SEQ ID NO: 33052 - DNA, 805 bp, Heterodera glycines
  unsure (1)..(805): unsure at all n locations
cttattttaaccgcggttaagaaattaaccgcaagacgggaataaggcccctggtaattactcactggtttgcacacatcaccaaagatgccaaagcaacagccaaaaaaagtgacgaagaagccgacattttaattttaaaatgatttgaagttgaaaataatattaaaaagagaaaacatttaaagtctaataaatacaaatgacatttttattgtttttgctttttcactttgcgttatgccgtggtaaagctcaatttaccacttctgcaaatccgatttttacaaatattaattgctttacaactaattcaatacatataaaatattataaagtcagttttttaagattgcgcttttccacagattaattagcccgattccattcctgtttttaattgctgcacatttagttttgattcaccggaaaaaaatgacggtaatcaatgcggcaaaaacgatgcagccgatgccaagcggggtgtgcaagccgatcactccgctcacaacgataataacagagggcctgaattttgcgatcaataataaaatctcaaaaagaaaaatattttttcaactaaagactaactttttgggtaggcctaggcctagtttcaatgtttgacctgagaaaacccactgaaaacccaggcctggatccaagcctaggttcaatgttagacctgataaaacccaggcctgtgccaaagcccatgttgatctattctattgacctactttgngagcacacggtcgggcatgtagntgcaaaagtcgtcgcgacagcattgaaattttgtcgc

SEQ ID NO: 33053 - DNA, 807 bp, Heterodera glycines
  unsure (1)..(807): unsure at all n locations
tagtgagggatgcgcactgtgcccccagaccaactatgcaccgtttatcccggatggagtttgggagggaatggggaaaagccaaggcgcctttgaccaagccccgaacccccaaacgactcattgactgttaaagatgtgtttattcattcgatgttggatttaaacgaagcgagaaatcggaataataattgaagtctgttccatcactactactgactaactgatcactggggaaagagaaatgcgaagagaatgggcgaagaaacattacaatgagaaaaggaaaaacgtgtgaaaaggataaatgtgattgaattgataatggccaatgggaaataattaaatgagggaaatgcgtcgaataatccttacaactcccccctttccttaggatcgtccccgatccttaaataaaaagtgaaatgaataaatgaatgggtccaaactctcggcttcgcccttcgtctctccaatccgaacttccacggccaagctgcgcattacaataatgagcagcggtccaccttcatctcagatggatggcatgggaaatcggagaaaagcaaccaggggtcattccggtttggggaagagatgtaaaagcatgatgagagaagagagcaagaatgggccagagaaagtgtgaggaaaaccgacgcattttaagaattttgaattgggggaaagaaggncattaacangttcgaaatanagacaaatgaatgataatttcanaagaaatggagaagagagagagtgagaaagagagagtcaaaacaanaggaaagtggcaaacgtgagggg

SEQ ID NO: 33054 - DNA, 272 bp, Heterodera glycines
  unsure (1)..(272): unsure at all n locations
aaaaaagattaagcgaaatcccataaaataatantttgcatttaaaataaaaagagggaaagccaaggaggagagaaatgttttcaattacatttctaaaaggcgaaattggctgaggaggaatgaatgtttatgacagaagggataaatgggcaagggattgacgaatggggaggatttattaaagtggaaggggaggaaatgccattcactcaatcggcaatttgcaaaataacggcacgaaaatatatgctaaaacggcgggagggggg

SEQ ID NO: 33055 - DNA, 1366 bp, Heterodera glycines
  unsure (1)..(1366): unsure at all n locations
tgcaaggaaaagcaagtacacnaggacacgagcntggcgcaaaatagtgagcaaaatttaattaatttattaaatttttattgcattttaggcctttcattttgtgatttaaatccaggaacaatgaaaattactgccgatgcaagctatatgccatgtaaatttgtgccataataatttaaaataaatcaaattttatataaatgtaggtttggctgtactcagcgaggtatttttaaaataccttcaaaatgagaataaagaaacttttgcagattaagacatgcttccaggaaaagattctcagtgatcgaacaaaataattaatattgtaaattttgaagaataaaaatttaaacttccaaaatatgtgtttcctaattaggccaggattttcctttagaagaaagtttggcattacttcagaggcaattaaattttaaatgtgaagttttttgggtaacattaagtttctgaaattttttgtaaataaaaatttataatctagtttagttatttcttcacgtatttaagcaattcttttttttcatttatttgccaagtcttttcttgcattttatgtcatttttcgccattcatgatcaattaacatttttcgcgccatttcccgactatgcccaaaactgacatttgtgccataatttttcacattttggtggccgaaaataaaatttaatctttcatgaaataattttttataaccaaattaggggccatagaatccgaatatggacttaagtatgtcctatcttttcaacctgagcttgtactgctctaactcaatgcatgaagttggagctcagctgtacaggctcagtgagaaagcagagttaaaatctaaggccatattaagaatcaacgtgcctgaattacccaaaattatgaaaattccttgttttctgatcgcattaaaaaccaacaaaaaaaaatgttagcggtggttccataaaatgctattttttggagaccattttcaaactcggctctccaataattcttttattacaaattaaaattgttaaatgaccaattttctttattgactctaactccttgaattttatgcccgcggaattgatctcttgcctgaaaaatggcaatttgttattttattttaagtcatgcttgtgttttgttgaattttaaaaaattaaattttgtaaaaaaactttcaagcgacaaatttagttgactccctgtgatttattgttttaatcattattaaaatttctttttcgttaataaataaaaatcacaattagcataaataacagaaaagcaaataaataattctatttctcactattaattaaatttaaagcaaacaaaatattattttctgata

SEQ ID NO: 33056 - DNA, 921 bp, Heterodera glycines
  unsure (1)..(921): unsure at all n locations
cttccgttccatcgtccgccaatgctttcgccgctttgtccctttccgtcgcttcgtttgctttttccaccgtcgtcactttgtcagccatttctctgatcacttcgaccgctttttcgatgttcgtttcgcgtgtctttgaactgcaaacgacgaaacggaggaaaaaagtgcagtgagtgaatgaagcgaccaaatgaacgcgtcgatcgtcgttaatggccaaataaagcgactcgttcagttcattgctggtctcaacataagggacaatgaacaaaggtacgataaaaaactgtgggtcctacagtaaccacggcagggttatcactagacatacagtaaactaccacggcactttttgcccgacaatggcattgggaatggcattagcaaattgacataaaacgatcacttagagtgattcctttgtaaagattaccttcatccgaaagcagactaagcccaaacgctgggggacgaacagctcgaaacggtcgtctctgagcaaaagatcggcgaacattttggccaattcgttttgctaattaatgggcaaaatgttgcaaatttgactttcccaatttgacgcaccattctcaaaaattgttgaattcgctgaatgccaatcgcacgaaacacaaaccaaattttcagtgccctgaagcgacggctaagtccgacttggagatgcttaattaattaaggaaagcgaaaagaatatttgggatggaggggaaaatggaggaatcacccgaaaatcgtacgcatcactttggtgttcatgcttaaggtacaccgcgtcgacgttgaaaatgcgattgcttcgtctccgttttaaacctanatgacaaatgcggggctaggtcgatccaaaaaaaaaactcagtgattgataaaataaataaataaatttaatta

SEQ ID NO: 33057 - DNA, 852 bp, Heterodera glycines
gcccaaataacccctaaagacatattttttgaagattttttggtgaaaaaatttttcaactcaaaaatcctatgctcacccctttggtcccgaataccaaaatcggttttatttttgtaacaattcgtaagaaagtgataaaaatgtaaaataagatttatattttaaagaaaaaaattgcggatttttgtagtattttaattttcaaaaatttcttttcagaagggggttatgaatttttttctgaaaaatcgaaaattttcagaaattctggaataactttttttctttttaagatagaaatcccaaataaatcccataaaattctcctgatttttctctatttttacaatataattgcatgaaaattgatccacccttcgatttgttatgaattttcgaaaattaacccaaaatcccgaaggccaaaaaattgacgaattttcaaaaatttttaaaaaattccaaaaaatctgaaacgaaaaacaaagttcatattcgtgctcagcacctcaaaataccccagaaaaaaaattttcacccccattttcgtccgaaaaaaaatttccgaaaatttctagggggcctaggtcgaaaatttttgaaaattttacatcatgtagtacaccgttcgatagagcttacaaagctctacaattttgctctaaggcattttttggctaaaaccgacccctgacgagttatgggcccaggactcaaatgtcccgctgaggcccaaatttttttctatttccgggaaaaaatcgaaattttttcaaaaatatcaccaatcgatagagctcgaaaaactgttgcttggaagtggtctccgtttctctaggaaaattcgtt

SEQ ID NO: 33058 - DNA, 636 bp, Heterodera glycines
  unsure (1)..(636): unsure at all n locations
ttttttaataggattttgttcaaatcttntggtttcaatttttattttgattttgattgtcatgcaattttagtacaatgccattgcctattcgcttttttgttcttaaaatatgccagcagaatggacggaatggcaaattcgtttcgctgctcactgccgcccttcacagggaattgtcgccgccgcatttccgacgcttttttgcctcgaccacttccgcttcttccgatgatggttttgttgttgaaaaggtggagaatggaaacgcaaaaaattacgaatccattgacggcgcatggaaatgcacaaagtcagcaaagcgtacagcccatttaaaattagtttaatttcttcaattttccagctgtgctcatctgaattggccccagcagcgcatttgcaaacattgcactattggcatacccaccgaagcgcaaatggcgattctgaaacaattgctttgggtgtgtccaaagttggtaaaaaaaagataatccttcggaattgttatcccgacgcgaaaagggataaaaatcctcttgggcaaaaaatcaaactaaaaattatcttttcatatatttaacagctttcattctaaagcttttaatgcgtttacaccattcagaccaatga

SEQ ID NO: 33059 - DNA, 895 bp, Heterodera glycines
  unsure (1)..(895): unsure at all n locations
taatacccctngggagaagggagtgggaaacatgattaactttttagtgaaagtttgatcactcatattttttctagtctaatctactcaaaacggctcagaattcaataaaaataacattcacggtgcgaaaaatggggtttgaaaagtttattggggaaaaaaagactttacaaaataatacccctgggagaagggagtgggaaacatgatttcaaaattttcaattttttctagtctaatctactcaaaacggttcagaattcaataaaaataacattcacggtgcgaaaaatggggtatgaaaagtttattggggaaaaaagactttacaaaataatacccctgggagaagggagtgggaaacatgatttcaaaattttcaattttttatagtctaatctactcaaaacggctcagaattcaataaaaataacattcacggtgcgaaaaatggggtttgacaagtttattggggaaaaaaagactttacaaaataatacccctgggagaagggagtgggaaacatgatttcaaaattttcaattttttctagtctaatctactcaaaccggttcagaattcaataaaaataacattcacggtgcgaaaaatggggtttgaaaagtttattttgaaaaaaagactttacaaaataatacccctgggagaagggagtgggaaacatgatttcaaaattttcaattttttctagtctaatctactcaaaacggttcagaattcgataaaaataacattcacggtgcgaaaaatgnggtttgaaaagtttattgnggaaaaaaagactacaaaataatacccctgngagaagggagtgngaaacatgatttcaaaatttttcattttttctagtctaatctactcaaaccggttc

SEQ ID NO: 33060 - DNA, 621 bp, Heterodera glycines
  unsure (1)..(621): unsure at all n locations
ttaaatgttatttatgttgggaaagggtcataaatctccattgttctccttttctccaacataattatttactaaaaatcagaaaaattcaataattaaacttttataaaaatttaattagccttaaagttttcaatttaattaacagaaagttttgtccagatacaataaaagtattcattaaagcctggagtccaaaaatacaatttttatttgttttcgagtgatgtcaagtttataaaatatattttaatgaaataaaaataattattttgctaaactttggcagacgcagtgattaaataagtgaggctacaggagtattctacactcgataaaataaattcgacccaaataaaagaataaaacatcaattgacgagataatattaattaaaatgaaaatttaagttgactttttatataagatcagaaatctaatttaatacaaaagtataacgagtccgttaatttttcattaatattaaaaattatactaatattttaaaagttttatccaacaaataaattcctaaatataccaaaatattcaccaaaagaggtcttttnaacaaatgaaaaaattaattaattaaaatcataaatcattttattgatcatt

SEQ ID NO: 33061 - DNA, 318 bp, Heterodera glycines
aaatgatcgaatcttattaggaattcagatttgcttttcacatagctttttttcggcgcgcttttccaaaaaacttttagtgaggaaagaagggggtccggcggtgccgataggcgccgccgggggaaatttagaaaatttgagtgtaatttgttaacagattttcaacaaaaaaggcagctttttgggattactactatgctcaatttgtacggatttttctttaaaaaaggataaaatatgtatcaattaaaaaaaaatatatatgtggatcatatgttgtcgataggaaacacatgagtatacaaaaagaaaatt

SEQ ID NO: 33062 - DNA, 51 bp, Heterodera glycines
gctgcgccgaaccggatttctgcgatgactaccgggtgatgttttcgcaga

SEQ ID NO: 33063 - DNA, 374 bp, Heterodera glycines
tgtttgtgcactttaaaccctttgccattattctttgtcattttgccggatttcgaattccactacttttacaattagcccttgaatttagagattatagtaaattctcttaaatgtatataatttttgtatgttttatcatttttgagcaaaaaggaatgacgcatttcccgtccccccccccacccttttcatcatttgtttctctaaattcagaattttttgccttttcagtgctgatgagtgcctcgtcgtctttggacctataaaccgcgaaccggaggaaaaactgcgcccgtggaaatacgaacgaaaggacagcggagtcaggaaattgtgtgttttgtgtcaatttaacgggtgcactcccgcca

SEQ ID NO: 33064 - DNA, 775 bp, Heterodera glycines
ataacctataaacaagtttatgaaaacctgtaaaatttaaataaacataagaaatagacacaaaaaaacaaaaaccggaaattttaatattcacgaaagcaataaccatttaattcttccgaataataattaattaatattaaaaatatcacggaaatgttcaaccagaaaattatgcaccaatcagaacaagatttttatttagaagtttaattttttttttttagaaaatttcattaaaatctcaaagaaattacaccaagctaaatttatttaaaataataacaaacaacactcaaatggaaataaaacaaaataataataaaatagatttttattaaataataatttaatgtaaaaaacaaaaactttaattgtaatataaataagttattcgttatattaagattaagaaaagaatgaaattcatgtcaacaacgaccaatatagacaatactcaaagaatgagaagaagaagaaaataaaagattaattgagaaaaagttaagtaaaaataaagtataaaaaatttttaataaacgatttaaaagtaaaacttttcggaattctataacgaataaaaaaatacttgaaatttttgccttgtcaaaaaaagcatgcatttttgggccaaaaaatgagtgaaaattttaaataatgattttcattatcttaacctagaaattttggaataatttctattggactttatagagaacacaatgaacttcaaaatgagtatacagcgacttcatgtggttatagttgaaaatag

SEQ ID NO: 33065 - DNA, 305 bp, Heterodera glycines
aaatggaagcgggtgataatgagaagacaattaacaaaataattaattaattaattagtggtgaatcacttatcattaggacaatgaaaaggatgagagacggagaaaaacgcaaaaaaggcaaagtttggaagagacaaaagcaaaaggaatcgatcagagaagagtggcattcttagatcagacttaagcaggttcgaaatcccaactattttgcgaagttgatatcccattctccggatggacgatattggattaggtaattagccgactgaattagcaaatgagtcggtgtttcttccccc

SEQ ID NO: 33066 - DNA, 737 bp, Heterodera glycines
  unsure (1)..(737): unsure at all n locations
tgtgtgatttggtgcttgcgctttgccaatttgtccgagtccgacttcttcattttgggcagaggcgccaacggaagctgtgcctggaaagagacacaaaagcgtaatgtgaaaaaccattgaaaatcgcaagcaatttccaaggacgtccttgcagggaatccctttggcttttcaaggacaaaaaaaaaatcttggatagtggtttttgtaagatagtaaaagggaaaaggtactgggagttcgagtccactccatgatcaattattaaaaaaaaaattttttttgttccaagaaatgaaaaatgacaatttttgaagaaattgctaaataaatttgacattctttggtatcattcaaaagctcttggaatatctaaacaaatgctaaaattttgacgcatcagaaaacaaagttatgcctttgaaaatttatgtttttttttgcttgctaaaagttgggagataaaaaaaacaaaaacaaaaaatttagataccattcgatgtagaaaagttttcaatcgatatgaaatgaagaaaggtttaaaaaattatataaaatttcaaaatatgaccaaccccccaccccccggttatgaaaattaatacaattttctaaaaattacaaattccagccaggattaaggaaattgctacgaagaaatttcaaattgagaaatttcatgaaattttttttttaaatgacccctcccccccccacgnngacacaaattctga

SEQ ID NO: 33067 - DNA, 796 bp, Heterodera glycines
aacatgtaaataaaatttggtgcgtttcaccactcctttctgaaaaaaatatttatgaaacaaaaaaatcgattttttcaagtgtccatttggggtactcgaacatttatggggagcaaaaatccaacgcagaattaaagtacaggctatagggaagctactcccgaaggattcggtctccccataaatctgggcgcatcggttcggggggactgccccgaaaacaaaaaaatcgattttttcaagtgtccgtttggggtactcaaacaattatggggagcaaaaatccaacgcagaattaaagtacaggctatagggaagctattcccgaaggattcggtctccccataaatctgggcgcatcggttcggggggactgccccgaaaacaaaaaaatcgattttttcaagtgtccgtttggggtactcaaacaattatggggagcaaaaatccaacgcagaattaaagtacaggctatagggaagctactcccgaaggattcggtctccccataaatctgggcgcatcggttcggggggactgccccgaaaacaaaaaaaatcgattttttcaagtgtccgtttggggtactcaaacaattatggggagcaaaaatccaacgcagaattaaagtacaggctatagggaagctactcccgaaggattcggtctccccataaatctgggcgcatcggttcggggggactgcccccaaaacaaaaaaaaatctattttttcaagtgtccgtttggggtactcaaacaattatggggagcaaaaatccacgcaaaattaa

SEQ ID NO: 33068 - DNA, 1062 bp, Heterodera glycines
  unsure (1)..(1062): unsure at all n locations
tccatcgaaatggggtgtgacgcattggtcctagtgacggaagagagcgccgggccatcgaatggcacaaaagaaaatgccgaaatggacgaaacgagcgacgggaaagagaaagaaccaatggcaagtgcaaattcgaaggtaatgcaacggaatccgaaggtaaaatcaaaaatttaatcattgaaggacttcttcgagttggaggacgaactttcgaaggcggaaaatgtggcagaaaagcaaacgaaggcaacgcaacaaatggacaaaatgcggacaattttggcaatgagtgacgacggaggaaatcaaaaccaagggtttgccgtgaatcgggagaatctcctgcttattgccgtctttttcccagcgctctctccgaactccttccgattgccatcactttgagacgtctcaatcgcctctccaatctccaaattatggccgcgcgtgagaaaatggtcaaaatgcgcgaatgtgtcgagaaacggaccaacgaattgcgaaatgggcatgtcggagttgacttcgtaaagaaatgcgtcgacctttgcctcgactttccaaggcaattttcaagttgaataatttcaatgttttttcctttgattttcagcccttccgactccgacatcgatctcatccacgtggatcagtttttcactgaaaccaattctattgtgcttccggaatcaattcgtaacgatgcgcaccaattgcgagtggcacgactaaaacacgaattttggactcggaaaaggtcgaaaaaaactaaataaatggtggtggtactgataaattggcaaatttgcttcttcagtttggtggacagagtgaacgaagttgaacagaagaaaaaggccgtgttggaagcgattggtgcggcggagaaagcgctgggaaaagtgaatccgcgggtggacacgctgaaaaagacggccaaaccattattggacatagtagggctcanatcggtcgcactgtccgtacacaacagagaaattcccttccgacccgtgccgataggggcggaaggatttcggggaatattcggcgacg

SEQ ID NO: 33069 - DNA, 1274 bp, Heterodera glycines
ttgaatttgaagtgttaaaaaatgacaggagaaaacggacaacagtgaccacgcctgatgcgcaatggcttaaaaaaagttgaaaaaagtaaaaaaaggggtaaagcgggacaggaaaataagaacatgaacacccgcgttaattatgcgatgtataggctggacgaagccagaaagcaacaatatgatcagatatatattcaggcatgtgagagcaccaaatttcaaatgcaattggcaagggcaatcttacagataaatccaaatgagggggttagaaggatttttgatagagatgatttggtcgcgcattgggaaggtgataatttggaagttggattttgcgcaccactaacacctgaaaaaatattttgggataaaaaaattggtaatgagtgttacgaatggacgccagtttttgcagaaaacacaatattttttgttaaacccggcacaagggagttgagcattttggggaaaaagtcggaatgtgtggaaaatggcagtgtaaaggaaatgcataatgagactcaaaggggaataatccaaaaaatgggtgaaaatattgagaaaattcgacccaagtaccgaaatatacaaaaccctttaattttaaaagccggagcgctttttgaatcagacaatgtgcgaattgaggaaacaattcgtgaatatcgctcaaaaatgaataatttgcccacaccaacattacgtttagtcgaaaaaccaaatattacggaaattattaaattggttaaaagcgaggcaaatgaaacgcttggtgtgataattggtagatccggagattggttggaaatagtaaagaaaattccggagaaaaccaaggaagcattaaattatttgaaaggcctatcatatgtactgattgcgataccattattaattcttttggcattgattggatacattggaattaaatacagactgataatatttgccggggttcgtgctgggtcagtattggcaagagtgttaagagcaataatgggaatgaaaaaacgaagtactagagttttggcggtcccaacagctccggagttggatccaatcgatgaagaagcttatgttctggattatctgcctccgagacgggtagcagcaattacgaatgacccgcggagactcccatctattcgggtccgcctaaatgatttgttaacagcagccttggttgattcatgtgctagtgtatcctactgtagagaaagaacagcaagaaagcaggacttaaatttttgagcaaatgacggaaa

SEQ ID NO: 33070 - DNA, 1317 bp, Heterodera glycines
aaaaaaaaaaaataaaaaaatttaaaaaaacttttttccccccccctttttcccccgggggaattttttttttaaaatttttttttttccccaaaaaacttttttcaaccccccttttttccccccgggaatttttttttttattaatttttgacccctgtttgggttagttaaattaaaaaaaaataaaattttgaaaatcctttttcccccccccttctacgaaagactcagattttcgaaaattttttttgagccaataagctcggcgctcatttcagtgtaagttagtcctttaccggggagtatccctgcatagtttggtacgcttctgctcaattagcaaaaaatatgagtgatcgaattttcactaaaaaagttaagcctacattttttggcatatttaaaaagcaattaaaaagttttaaaatttaataattttcctgcaccgaaggtactcactcggcctcttcgcggcctcgtggtgggccttcgcccccccccctcccacgcccttcagagcacgacaaatatttcaacaaaaattttgaaatcatgtttcccactcccttctcccaggggtattattttgtaaagtcttttttccccaataaacttgtcaaaccccatttttcgcaccgtgaatgttatttttattgaattctgagccgttttgagtagattagactagaaaaaattgaaaattttgaaatcatgtttcccactcccttctcccaggggtattattttgtaaagtctttttttcaaaataaacttttcaaaccccatttttcgcaccgtgaatgttatttttattgaattctgaaccggtttgagtagattagactagaaaaaattgaaaattttgaaatcatgtttcccactcccttctcccaggggtattattttgtaaagtctttttttccccaataaacttgtcaaaccccatttttcgcaccgtgaatgttatttttattgaattctgaaccgttttgagtagattagactaaaaaaataatgaaaattttaaaacatgtttccccccccccttccccccgggggaattttttttaaaagttttttttcccccaaaaatttttaaaacccccttttttcccccccgggaggtgttttttttttaaatctcgaacccgttttggaaaaaaaaaaaaaaaaaaaaaagaaaaaattttagaaaattggtttccccccccctccttcccccgggggtttttttttttaaaaatttttttttttcccccaaaaattttttttaacccccctttttttccccccccggggaggtttttttttttt

SEQ ID NO: 33071 - DNA, 904 bp, Heterodera glycines
cgaattgagaaatatgaatgtatttctgcgacgccttctatacttaattcggccataatgggccaaaaattcataagttaagaccaaaagagggattttagtttcaaccggaatttctataaaaatgttcctgtgtaacctatctttgtctattctgataaataagaaattgaaatattcatattactttgcctcccttaaagctttataatgaaagcgtcgttgtctatttaggatttgccgtcgcaattctgtaattccactttggaatccaaaggaatttgcttcgcttttacaaaatagacagtgccgaaatttgtagatcggctaaaccttaactgaaacataccatatcagcgagacgccatgctgatttgttgtaatcataataaaaaggcccttattgtttaattcggcctttcctataagcacaatgtgtttgatgggctctacaaaatattgcttgtgcaaagcaattattttcttggaggctgtaattttctgtagtcatatcggcaccgccggacccttccttccccacagtttctcaaattctctttggataaagcgcgccgcaaaaaaagggtgtaactttcccaaaaaaaaaatccaaaataatgtaaaattacttaaaataatttgatctttttaaaaaatatagaaataaactaaaaacagtttgaaattacctttaacatggttaaaaatttagcctattaaatattttttaaaaaatttattatattttttttttgaaaaattccgactttcgacttctgagttccgacttccgacatttttggggtcggaattccgacttccgacttccgaaaatttttggggcatcggaattccaacttccgacttccgaaaatttttagtgcctccggactccatccctgat

SEQ ID NO: 33072 - DNA, 729 bp, Heterodera glycines
acgaaaattttttgaactaatttattccacaattaaaaacctaaaacttttaattgtatcctcaaactaagggaatgaagattctaataggtggaaaagatgatgtggctctagtaaagaatttcatgcgcagattttgcaccagaaaattattattatttattttttttattttgaaggttcttttggcgtccggctgtgcccataggggaggccggaaaaaatttaaattaattaaattcagggcttcaaactgaaaattttcataatgagcatttggccgacaaaaaaccttcataaaaaattattccaatgaataaaaaaaaaatttatttttgtgatttaagccaattttttaagaaaaataaggaaaatttgaatttaatcttatttcttatttttttggtcttgatgttcttattttgaaaaattttcgatcacaccttagaaagttttaggagaattttggggaccggcggtgccgaaaggcgccgccggcaagaattttggaattttcatgaattttgtaaagaaaatgtgaaagtatgcagcactaaaccacaccacttctacgagatcctttgccctccgccgttcgcttctcaaccgaccgaacggcccgaaaagctcggctcggattaagcattgtaattgtattccatctctccttcacatcatcatgaaaaaacgataaataatttgaacacagacatgaaatagagaaaaaaa

SEQ ID NO: 33073 - DNA, 890 bp, Heterodera glycines
  unsure (1)..(890): unsure at all n locations
tcattaaaccgccaccgttttgtccctcacggtttcattaaaataatgcgttattaaaaattgtttttattattttaatcatttagcatcattattattttccgttcgtaatccgacgacgataaatactcaaatccaaaaaaaccaataggaaatgttttgtacccaagggagatgagacaggacaaaaaagagatgagataaaatctgaaattgaaaaaaatccctcattttttcatagacaatttcccattaggtcgtcgtcgctcgttcatccaactccaatctgttcatgtactttctgattcttattaacaacaaaaaaaataaataaataaatcccttcaatttttatgcgaatttatattcaaatggactaataaattggaattttaatttttaaatttattgggctaaaacaaatatgctatattttaatttatttgtggaaaatttattttagataataattttatagcggctaacatttatttttgtatttaaattgaaaaacccacaaaaattgtttcgccaaaatgggttcgctttaccgctcggaggaaatgcgattttgccagctgattgttgaacgggacgcagccttttcatgtgttgctgagcttggcaagcatccattcgtccaattcaaagacgtaataataaaaaacaaaattaaatttaaatttaaccaatatatttttaaattaatttcataaaaataattacatttttaaatgtagtgaaatggccgaagttaacgtcttccaacgaatgttcacgaagaacatttcggcgttttgatgaaatggaacgcaaattgagtaatttattngtcgaattttatntccnnattnttttaattttattaaatttgaaatccagaaactttc

SEQ ID NO: 33074 - DNA, 144 bp, Heterodera glycines
cgccggctgcagctggtcggccaggaactggtcgtcgtcgccctggtcgataaggaccggcattttttccgcgccgctggccagcagatggcagctgtcgtactgcagccactggctttcgtcgctgcccagataggcggtgaa

SEQ ID NO: 33075 - DNA, 477 bp, Heterodera glycines
atacacctacaaagtgcttgctacggcatccactggggtgtgcagccattttgctgccatatgggaaaacagcccattccacgtttcgtctgggtagagaagtgtcattagacaaactcccaagcattccgctggagagcttctttgcccgtcggattcgtgaggcccaactcatcatcattgatgagatcaccatgcttcacaacacggtgatagaggtcatcgaccgagtgtgcaaagagatggcaattcgccagcacaaggatctcctcttcggaggaaaaacggtcattttcagcggtgacttcaaacagtcgctgccggtcgtgcctcatgaaggcttaaccgctcaggtgacagcctgttttcaaacgtctccgttgtttggtcaattcaccacgatgaaattgaccatcaaccagagactgggccaaggtcagcaagcgtacttgcaaatgtgccgccaaatcggggctc

SEQ ID NO: 33076 - DNA, 1107 bp, Heterodera glycines
atggcgaatgaaaatattttaaattattttaaaaatacaataaaattgacaattaaataatttaaagaaatgaattttccttctataacaatgctaaaaagaaaatcttgtctgtattatgatttattttaatataaaaatataattatgaataatatttaagtgcaaatgattgaaagggtaaaatgtgattatggattttattgcactcttaataatttttttggcaatattaaaaaaataaaaatatttagaattatatttatgattaataacacatcaaacatcaattaaaatattaattaatttattaaaatcatttttgagactgaaacgagaactcctagccatttctcacacccatacttttacaacctctgcttttattttaaaaatatttttttcatttcaactaatccgatagatttaaataattttttaataaaataattcaaattatattatgataaataaaaaatctaatctattactttttgttttagcattttttttagtccaaccaattaatgaagttttaaatattttatttttatgcctttcattttttatttaagacttgggcttatattttttgtaaatcttaacgcgaaaattcttcgtttcacctcacgattcttttcaaacctcccggcagcagggacggatgagtcatttcaatttttgggatttctaactaaaatactttgactgccagcatcattttggatttatactttatttccttactgttttgtataatttgaaaatttcttaataaaaatgcatcctttttggattcatttaaaaccttttccgaaacattaaaaatttaaaaaaacacctgcattaattttacgtttattaacgaaatttctttccttctcaaatggtaattatataatttaacaaaatattattcatttctgacttaaacttgcagccaatacttatgtcaattcctttcttcaccacctaaacagttttttacttttgtgtgtcatctgatcacattcatcattaacaaactatttgtttaataatcgtttttgttttaccattaattaacccaccaaaaattgtcagcagatttttgcacataaaattcca

SEQ ID NO: 33077 - DNA, 1069 bp, Heterodera glycines
ttaagcgcaaaaatatttattcgattattaactttttttaaaatgcatatttgtttttccatttcaaaatctttgacagaaagcataaaaaccaaaaaaaagattaattaaattcatttcattgatatttgtaagaactacgacttaattttggtgtaaaatttaactaagagtcaaaaaggggcttatttttgcccttcagtttggaaaagtttatcttcggcatttcgtccataagtcggcttgccaatccgccgtcccaactcggcacttttctcatccctttgcttacaccgtccaattcactactttttccgtgctttgtcgggccctgatggaaagaactgagttggccgcttgattgtcctatcaatgagtcgtaacttgcacttttgccgattggcctttgccgccgaattggcgaaatttgctgttttgactttgagaaatttggcaaagcgtacgaaaatgccgacgatgggaaggcggaaggtgccaactgatgcttagcagctgcaagagaagcagcagtgccgactgtaaaatgccatagtccctttttgaattttaaaaatggcacttttccccactaactttttggcattttgtctccctccaccgtttctccattatttttcgacattttactcagttgcgacttgccaatgttctttttgtgcatattcactggtgccgcttcgctgctgctgaacctcggctttctcaactcgtgccgcctcagtaacattttggtcacttggtgcgctgtcaattctgagctttgttcggccgattactttccgttttgacggtaaaataccgtaaatcattgtgaatgtttcgagcattcggcgcgtttgggaacatcgcccgtccgtttggcgtttgttccgttggcatttttttgtggcccaaaataatggaccggatgagcagagaaaaagggaaagtttaagaaaaaaaaaggggcgagtaaaaagccatttataaatcctaaatttttatgaatcggaaaagaaaaaaattttttttccattattgttaatgacaaaaacctatggtaataaag

SEQ ID NO: 33078 - DNA, 687 bp, Heterodera glycines
tttctcaaccaaattaaacattcttggtattatttgaaagcattcgaaaaatgctattagcctgcaaattttcaaatatttttatttatgcacaaaaaaatcagagcaaaaaaaagttcgaattactgggtttttgagttccttctggccataacttttttgaaacttaaccaaaatttttgagattttgcaaattaataataaacacatagagctatcgaacaacaccaacaattcttaatttgattgacagtgaacaaagttatggttcaaaaagccttccgacgacgtttcggccgacgacgttttggggtgcaccgcccccaaacaccagcagcagtaggcaaagcaaaacagtgaactttgcttgccttttttccccttccttttatgtttctcccattttttttttttttttgctataaatttatcttttagcctaattgaaaaaagagattaattattaaggctggtaattatttaatgcaaaatttttggcaaaaataagtccaataacgggaaatttcaattttttactcaatttcttcaaaattaatttgctttattttgtttattttttctaaaatgttttttcataccatatttagtctattttcgggtattttattgcttaaatttagacaaatttgaaaaaattttgagaaattttaaacctcaatttgggaa

SEQ ID NO: 33079 - DNA, 872 bp, Heterodera glycines
tcctctccagcagcagaagagcaatagggaacaaacatcctttatgtctttgttttacatattcctctttcttcacctcctttttctccttgcctcttttcttcccttttcctttcttttcctcccccttttccactcacttttcttcctcctcctcccctctctttctcctcgctttttcttcctctcctcctcccctctcttttcttcctcctcctcccctctctttctcctcgctttttcttcctctcctcctcccctctcttttcttcctcctcctcccctctctttctcctcgctttttcttcctctcctcctcccctctcttttcttcctcctcctcctcatccgtctccgcacattttgccaccgccggggcgctgctcaaatcgtaaaatttgcacggccataaaagcgcagcagagaataagcattttttaaatgttacaattcatatcacaccaatgtgccaaaggcgccttttcaaaaaaggaacaatgccaatctttttgttttgaaaactagttttaaaaaattaattattttttgccgattttaaaatcgatcacgcagatgtgtgcattgaatatatatgtatgggtgcaacagcacagaactgaacaagtttgccccccccccgcccttccaattttcaattttgtcccctctctttcctttctctccttttccatttgtcccatttttttgtcccaatctttccctcccccctgtttttgctgctgctgatcatcatcttcggcagcagctgaacagcaaagaatgaatgacaagatcatcttttcaatttcatccatttgttcgccttttatctctttctctctgtccctcctctcttttgtctctctctcttc

SEQ ID NO: 33080 - DNA, 634 bp, Heterodera glycines
taaagtttgatgaaaagatgcccattaatgccggattctccgtgttcagcgcataaaattctgtgggggggggcggtaataatggggaaagcacccaacaccaaccctctaaaaattggtcttcttcgcgtgcctgtaaaaattgccgagtttggccccaatgttttcatataatgtcaaaaatattttatttcctcctttggaaaacatcgctaattcggcgtatgttttccgtttttttttgccagtgccaatggcttctcccccatccgcttgtccttcaattagtgtgcattaatgatgcataatcgtcccattagcgcttcttgcccccccccccttccgtttgttcccctttctaatcacgcgatgagaataattctcgcttcattaatccgtgtttttctcttttttttaaaaaaattgggggcttcaaaaaattgaaaataattttgttattttttttatgtccttttttgccaaatattttattgtctttttgaaaaaatgtgggtaaaaattaatttgaaaaataaatgaaatgcaaattttaattttataaattattcaaaacaaatttttctattttccctcgtcgaaacggaaaactaaagcaatgcaaaaaatattaaat

SEQ ID NO: 33081 - DNA, 1026 bp, Heterodera glycines
  unsure (1)..(1026): unsure at all n locations
atttgaatgtatcaagagaatttttttttatcaaaattttaattttgtaggctaccgaagaaaaaagtcgaaaattgaccactcggaaaattggaacttccacaaccactcgggcaactccgccaaaaacaaagctgaaaactgaaacaccacacgttgtaatcttttaaaaattttgaaaatagagttacacgggtctgggtatttcggcaaaaatcggatccgggtattgacgggcccataaaagctgggtccgggctatgtggatattgtaaaaaaaattaagaaattttttgagaattttattaaaataaacattagttatttttgtctaaaaaatttttgagctttctttacgtaatggtaaaatataagattttcaacaaaaatctttaataaaagtgtaaatgagatcaacatgagaaagaattgaaccatagaaagtaaatattaagtaaattaaaaaaattttctttcctccaactttgctcaacaatttaaccaagactcacattattactagtgtatatttttggacccagttggactcggatctaccaagtcgggaagccgggtatccgggtctggacacggtcgggtacccggacgcgggtatcatagttgaaacttcaactgtcgtaattatttcctcaaaatttaaatttaaaatctttttagccgaatctgttcactccacgggattctactgtgaagcatttcggcacaaattgtgtccaaattgattttccagctgaaattgcccagttttcgctgaacatttccgcctcattattcggcattgcttgtaaacaatacctaaaaaaatacgaaattggacaattgccaaaaaattacgatgaaaaaatggaaaaaaaagacaaaatggaagcgtgtggaaaagtgccgacagagacaaattgcaaaaagtgaaagaaatggaaattanaattanaatcaacccctcgtaattgaggtcatacgaactaatttggatgtatgaaagcaaaagtcagcagaaaattgcca

SEQ ID NO: 33082 - DNA, 1032 bp, Heterodera glycines
actcataaagtgcattagagccgaaaaatttacataattttttcaaaatttttggcgagcgagcaaagcttggacagaaaggcgaataactctcaagggttctctctttttttagttgtaaaataccggaaacttgcccgaaaaacgggggaatttcaaattttcccattccaaacccgtcaaaaaatgttggttccatttttttttcaaaattccgagcctagaaggccaaaactacacactcatataggtatgcggaaacatttgcttccatttgtgggagcattaaatatctttttggtcattttgcccacactttgccaccctcaaaaaatcgtaattaaaaaaaaaaatttccataatttttttttgtgttcaatttccaggacctcaggtcgtcccttcgaatttgttatcggagcggcggcgagaaagtgctcgttttgggacaacaatttatgcacaaaagttgggcaaaatcagtgggcaatgccgaaaaagatggcatgttcaatggcctactgatgggcatggaattgctttccgaaggtttacttttcaaataattttccaatttttatatgccttttccatttggtgagaaatagtaccctaaattaaagttgttccaagaatttttaagcgaataaaatttccaatcaaaaaaaaaaaattctttccggaaaaatgcatttttgatgcaaaaatttgatttgtttggtctcaattttcgggggaaaaaactgaattttccaaagattaccgtaaatgctctaggaatcgtgtgaaattttgaaattttagcgaaattcgctaacaaaatttgtgtaaatttttacaaaaatgtgcttttcagatgatgttctgcttgcgttcgaggacagcactgtttgtgtgttcaatttggccacaaaatcagttgtcgacgcggtcagaattcatttgtttaagtaacaattgttacatttttccacaaaattcaaaaataatttctttaaaaaatccgattgtgagcatttttgagtgttaaaa

SEQ ID NO: 33083 - DNA, 762 bp, Heterodera glycines
attatatttaaatttttaattgggagaatttaatattattgtataatatgatatatttttaataactttcattatttctattacaatgaattgcctattttaacgaacaaataaagcaaataaaatataaaataatttacaattttgccacaatgaacattactggaagcataatactgtaagcaaaccatttttgtacagtaccctttccgacctacaataccgtatacagctggagcgtgcaatcaacgcggccaaacttagcatgactaaacatgcttctgctggcaacaatacagacaacaaaaatacaatacccggcgaaacccaaagcatcgcacaaaatgatacggtagagctgcaccgtatcaagcaacgactgttggacatgttagagaaaattcggcaaacaaaggaccaacaaatgttggccaaagcagcacgacgacgtgaaatgatggcacccaaattgggcacaaagccacagcagccccacttcggctccatgatcatttctggcacgctacaacagcgagaaggtgggtgagttcggcatggcacggcaccagcgaaaaagtgccaagaatccccccaaattcccccattcaaaaacctaaaaaaagagaagagcgggaccgggaccaaaacacggaacatttgagtaccgatgtcccggttttgaccgggaccgggaccagtcccggttttttcccctgttttcccagccaaaatttcccggtttttcaacccgaaaaggtcccg

SEQ ID NO: 33084 - DNA, 274 bp, Heterodera glycines
aatataagtcatttatactacattttaaaatatttatttcaattaatattatatttagtactgacgtattataatactataatatgaaaatatttgccaacattaaattatacatttaaaacgattgataaatcaaaatttatctaaaacatatatcctatctttaataaaaaatattttaccaaattctttataaatgaatataaatattttaggccttatttaattcttattttttgaattcagatagaaatttatatttaaagtgataata

SEQ ID NO: 33085 - DNA, 750 bp, Heterodera glycines
  unsure (1)..(750): unsure at all n locations
ttattttatttttntggggaaatttcgttaataaatgcaaaaaattgggtgcatattgggaccaccgttcggtcaccagcttggttcagttttttcaaataaccaaaatttgaaaaaatttaaaattttggccgaagaacatcggttaagaattctcgctaaagctttcagtgggttgagttttaccatcaaaaggaccttttcatattttaaggtcttcattagaaaaatatatcgcgattagttctgcgcttaatcgaattttggctattaaactaacaatccttcaaatagagtatgaaatttgatcgcgggttcattccgaccgttaagcatttgtacagtcggcatcgcttacatgacgccaaatctttttaattaatttttatctttatcgaacatttaattgtttttaaataattccaaagcttcgcactctccgccatctttgcatttgtattccttcatcatcgaaattgtgcgacgaaaaaatgtttgcaacctgcaatttttaaggcattctaaattcatgtgtttaaattttttccaattaaatgggttaatctcaatttaaattaaaaatgaaattttattaaatagtttaattttttggaattttgtccctttttcattttatcggtccattaaatttaattactttcacaacatttggacccataatagaaatattgacacgggcagttgcacaccgcacattttaagagataaagtgactttttgccagcgtta

SEQ ID NO: 33086 - DNA, 605 bp, Heterodera glycines
gccgaagggattcgctcggagacaatttgcaattggtcaacaatataattaattcttaattatatttcccaccgataaaactcaatgaatttgccaatgctcgctgatgctcgccgaaccaatgctccgccacttttggcgacaaacacagaaaaaaggactgagacattgcggcgacagtttggcctgtcaaaaataaataaaatgcctttaatttcatttgctcgcttcgcccgccctaataaatccttgaaaatcgacccgtataaaagacgggcaatcgccagtgtttgtccaacgacttaagggaggaaattacgcgcagaatagcgccagccaaattcagaagggacgcaaaatggcactgaaatgcaatcattaaaaagaggaggactttcaagggaaaatgccgaaattagaatgccaaaacgatcggtgacgaacattccgatgagaccggtcaaaacgccaaccaactgaaagatttgtgagctccaaaaatcaacatcacaagagtcgacgacgctaaacagaggcaaaaatattaagacacagtattttctattggttttcgatcactcttcgatttatgttccatattaagt

SEQ ID NO: 33087 - DNA, 602 bp, Heterodera glycines
cgagtctcggtgtgcgcgagggggcggggcgtcgttatgtactgcttgaaatggtgcctgaggcgaaattctttcgtcgttcagcttagggatgggtggattgacagactgtgaaatttgaagtcaatcggacaagggctatgcgagttttagctctcagaccccccccccccccagttctgtactttgctaaacgttaaaattttttttatcataatttaaattgcaaaaatgaaaaaaaaaaaacatacgaaaatgataactgattggtcctcccttttcattgctgattctctgcgtattggcgcaaaatttcggcctcgcgttcggcgcgctgaagaagcgcggcttcgattcgacggtgtccaaaaagaaacgaatctgaaaaatgtgatgaaatttaaaaaatgctaaattgaaaaaaacaagcttacaattgtcgggtcttcacgccaccaattcaagagcaaatcctcttgagtctttttcgattttgtcatactgaagagagatttcattgtcagttttctctaattttgcatcattttgttgcgaaaaatattggtggttgtcgagggatatttttcatctcttccattact

SEQ ID NO: 33088 - DNA, 742 bp, Heterodera glycines
aaaagcatttaattttttaataatataaaaatgaacgttaatattgttgaatgatagataattcgttttcatttcttgtcaacaaaaattaaaattttaattattaatgtgtattgtgaaaaatttatgtgtagaattgaaaatttaaaaaaaaaataaaaaatttttatttatgttttggagactataaattattggaaagcattaaatagggcacaaaatgcaacaaaaagagctaataagtttaaataatgttttaggtatttaaaaaaaattaatttaaataatttttttttggaaaatatgtttttagcagagtgccacgggaccgggaccgggccgggaattcccggtcatccgaggtcccggtcccggattttgaaaagctcaggtcccggtcccggtagggcaaccgggaaaaacaagcactggtaagaatgggggtctgagtgaaaaattagtgatgaaaattggagttaaagtgaaaaaattttaaaaatatattaatatattctttaaaagtaacgcttacaattgtgcggtatcagcacggggaaagtgcctttggatggaccttttatatcatcataattctgaacaaatacctcgagaattccccaaaaaatggcaataaatccgacaaatgtaatccatttaatgcaagagtattttcatggtaacgcaccaaatccatcgcaaattacagttgttggagaagcaattgtcagacgattttttgaaa

SEQ ID NO: 33089 - DNA, 797 bp, Heterodera glycines
ccattaatctaaaaagcaattagcgacaataaaaaagaaaaaaaaatttttttaaaatttgaccaaaatataggacccaaacttaactagtaccgccacggtagaccaaaatataggacccaaacttaactagtaccgccacgaaatgtccaaaagagtaaaaacccacgaaatgtccaaaatttttcaaaatttataaaaacaaaatgagtctaatttaggatttttagggttttcggggtcgctgaatacgaatataccctttatattaccccttgcctaaccttaggcccatctgaataataaaaaactcaaattcgagacttttcgtgggctggacattttgtgggtaagcgaaaaatttaagagcaggcagatctttgaatccgtgggtcccactaactttgttcgaattcgtttcttaatttgttttttaaagcaaaccaaatttctgcaatttctttttctggtttacaatgtcggattcagcagacgaatcagcagatccgttagatgctttggtttttatggaacaagccgaggagaacggcagtgatttcagcgacacaaaggaaggaaagggaatggcggaggaaaactcatccgacgagtccgaatacaacgaagtcagtccaagagggaagcacttctccaaatttgttgttttctccattcagttgcaaattgctttcaaagaaggactgctgcagaagcatggcttaaacgcacttcaaacgaagaagcgagaaacaatttacaaaaaggcaggacctttttctatttttatttactttaat

SEQ ID NO: 33090 - DNA, 825 bp, Heterodera glycines
cccctttcgctgatcgcttttcgccgcttgcttctcataatctttgtgcaactttgtcccataaaagtggatcatttgctccatcgtttccggcatttccttctccacaaagtgtgccaccctctctttgtgccattcgacttccttctccaaaatgtcttttcctttggcacttttttgtctctgccctttccttattctcgtctctcccgtgtgtgccaagtattgcaagtccgtgatcacttcgaagccttcattggcaatgttttccatctccgacaaattgatcggtttggccacggccttcccattgtccaatttcaaaattatgtcaaacaattcattgtttgctgccaaaaagaggcgtgtctcgtacattttttcctcctcttcctcagtgtttaggtatattaggaaaaaattggtccaatttcgtagcaaatctgctgctctgtcacgcatttcttaatttaatatgaattcaattaattaatgctttttaaattttgtagtttaaaattttaattaattttaaattatataaaaaattccaacgtaaggtatttatttaatcaaattagtctaagagagaagctagaccccttcgcacttgaaaatgttaagtgaaaatggtatttttattgaaaatttagattttcttgttggtacaccctccaagacacgcctcaccaaaatttcccaaaaaatttcgcgaaatttccgaaaatcctcaaaattgtcaatttttttggtgaaaaatctgttcaaaaaaccgaggtaaaaagctaacaaaaaaaaatttccggtggtccctatcggcacccc

SEQ ID NO: 33091 - DNA, 841 bp, Heterodera glycines
tgagtcccattgattgaaatgctggtggattgagtccctttgattggaatgttggtggattgagtcccactgattgaaatgctgttggaatgttggtggattgagtcccagtgattggaatgctgttggaatgttagtggattgagtcccagtgattgaaatgctggtggattgagtcccgttaattggaatgttggtggattgagtcccactgattgaaatgctgttggaatgttggtggattgagtcccattgattggaatgctggtggattgagtcccattgattgaaatgctggtggattgagtcccgttgattggaatgttggtggattgagtcccactgattgaaatgctgttggaatgttggtggattgagtcccattgattggaatgctggtggattgagtcccattgattgaaatgctggtggattgagtcccgttgattggaatgttggtggattgagtcccagtgattggaatgctgttggaatgttagtggattgagtcccattgattggaatgctggtggattgagtcccagtgattggaatgttggtggattgagtcctgttgattggaatgttggtggattgagtcccagtgattgaaatgctgttggaatgttggtggattgagtcccagtgattggaatgttggtggattgagtcccagtgattgaaatgcagaagaattgagtcccagtgatataatgcaggagggttgagtcctgttgattggaatgttggtgaattgagtcccagtgattggaatgctgttggaatgttggtggattgagtcccagtgattgaaatgttggtgattgaatcccagtgattg

SEQ ID NO: 33092 - DNA, 711 bp, Heterodera glycines
tcaaaatcgaaacttatttaatgtttaataaacatgacatataataccgaaaattcacttacttaacctggatccgaacctgacccccccccccccctccccctcagaatgatgccttagaatccccatttatgcatggattatgaggccttagcgaagtcctaaccaaaatcaaaatttaaattcttgatcagcgctctaaaatgggtcggggtcgtttcggcatcagcccaagttttttgactataacttttttttctttcatcgaaatccaacaatctcggtatcatttgaaagcataaaacatgtttagaagttgtttctaagcgatcgcttcccgattcaacaattaccaaaaaaagttataaattgaaaattgcaaaagtcgaaacttgaaattttttctttataacttttttacagactagaaaatctttttgctttttgtaattactaatagagcatgtgaagggcttttgaatgataccaagattgtttgatttcgttgtaatgaaaaaagtggttctagtcggttttacgcgtcccatcacattttacgcgtcccatcacatttttttgtgtccatggcgggatggcattccgaggccctgaggccactaattttcggaaataggagttccgtgccatccctaactaacagaaaaccgattttttggcgagtatttagtacattttcgagtaaaaatttcg

SEQ ID NO: 33093 - DNA, 880 bp, Heterodera glycines
ttataaacattaatttcaatgtctgtaatctgtttagattttcaaggctgagtaagtcattgttattttccttgtacaaaaatgatttttgaaagacatcagccaatataatacatttttgttcattctgaaaaataatttgcccttgttcatcaataagtgttggtattccggtgttatttttaagcctatttctaacaaatttatagagagaatttcttccatttgaaatacatttagcctcattttcacaatataatttatgagtatgttttttatattccctgcataatattttatatttaattttaagctcacaacactcagcttttccttttagcatgctatgtgttcggctttttcccggactaaggttttcatttttttcatcatgtttttgcttaatagttgttttaagcaatttcatggatacatatttatcaaaaagtttttttaattcagtcgtaaatatataatatttctcatttatgtctgaaactgtaatttgaagggattttggcccattaaattagaaaaaggggagccaacttttacatcataaatgagttccttgggctgactaaaaaccaaatctaaaatattattttctcttgttggttcatgcgttcaatttgccgtgagaagtcgcgcacgtacgccccgcacagccgcatcttagagaaatagagaaaaacgaaagagtggattaggctaggcctaaactttcggctaggcataaggtttaggattaggcctaacaaaagcttatttaaattttcatcggcaagattttggggtgctcccgcgaggcgcagggaaaattagcgggaattcctttttaatttttcaatttgtttctgtttttccctttatggctttt

SEQ ID NO: 33094 - DNA, 1591 bp, Heterodera glycines
  unsure (1)..(1591): unsure at all n locations
cttgacaataataatggcaatttccatgttaagcattggctgaaaaaactgaacagaagcatttggaaggaaatggtgaattggacaaaactgacaatgaacagcatcaattggtactttcataagtttggcatttaaattttttcctaaaatttgaaaatgcgactcaattttatttgaaaattatgaaaataatttattaggacttttatttacatattttgaggttctcaacaaattttatatatttacaatatttcgtataaattactgttaaaaaatatatttatttacatactttttcataattgaaaatgttaaggaattttgcgaaaagtttgccaaattggagttggaattgagcgaaaagcaaaatgaaacacgtgggttcttcttatttaaaaagaaacattaaaattgctcaaaatattttcatgacaatttcataatttaatttaagattttaagagaattttattgttaagtttcgctcggcagaatcgctcaattggtaaatgaggagaagaaacatttggacaaaatcactgctgaatttaacaatcgtcatgaagaacaaacggtgaataattggcattggcaaaaacttaaataaaaataatttattttataaaatcaaaaatgatttatttaaattaataaagtaatttgataagaatttttaaataaggtgcaaaatgagttccgccaaaattgttgggatgccctcgcttgtcacaatcggctgtttattaatggcaaaagtttgacgatcaattacagaggatttttaatgtttggtaattaattctaatgaaaatatttttaaaatttgttttttcaaggctattgttccatcttcgctaaatattccattttgttgaacaaagattgctccaacattttttactttgaaatttcagtcacaaaaatgaaaaggtgaggtgatcagaagaaaacaatgcgtttcagaaagtttggcttatcaaaacaaaaatatggcatgaaagatttaattttttaaactttagctttaaaaaattaaatttaaatgatggatttttataaaataattcaatgactcttaaaaggcaaaaaaaatttttagattttctaccctctccactcctccccgttgaattctatttaaaagcataaaacttgttttgttttttgacttcgaaaacagatgttcaaacttttttaaaagttttgccttttaaaaatttagttttattctaaataattgaaaattttttgccttttcgaaaaaatgttcaaaattttggaaaacttaaggcatattcgagcactgccaattgtgtgcttaatgggtcctggaaaaatgctgatgtcaaattttttcctggcgatgttgtcggatgcggcgttaatttggccacccaacaaattttcttcaccaaaaatggccatcgattgngttaggaaataaattaatggaatttttaaaatttattttagattttgcctttttacacaaccatttgttggatgcgtcttctgctgatcaattgtttccatttnngtatttgtggaattctggngatcaaattgaggcaaactttgggccaaa

SEQ ID NO: 33095 - DNA, 810 bp, Heterodera glycines
  unsure (1)..(810): unsure at all n locations
ttataaatagaagacatcaaaatcagagtcagtttttataggatagtcaaattgtttcgaagttccatgcttaaaaaatttttaatatttgaacatttataggcattcaaaaaatgtatatgtgaaatctgtcaaactataaaagctcagatttgatcagctagtgaaaactgataagatttttttttattaaacaatagaaataaattattatgcaaaagttaaatagtgtaaagccagaataacaaatataaaaatattttttaaacttttggttaaagattttttaaaacttaatattattttaaaattaactgattcttaccttctactaattccttcaattgcttctccggtcaatgcttttttctgcgctttaatggccgcaattcctatgagcattggcgcagtgtcaaacggttataaatgtattaaaataattttaagttttttccgaataagaacaaatttttaaaccaaaaatttttataaagaaaaaaatattaaatttttgggtcaattttttgaaaaattttaattcttttgggtatattttgtgaaattgtaaaattttttttgggtcatttcttagggggtgtttttttcttttttattgcatttttgttaatgatttttttcaaaaacctaaagtaggcacattagcacaaaaaccccgaaataggcaaaaataggcattataaaagtcattgtagactcctcaaaccaagcggaaaacgcgtttttcatgcttatctttgtgtatcaagtgcgcaaaattttaggcatttgcctanaaaatgaagccatatt

SEQ ID NO: 33096 - DNA, 1049 bp, Heterodera glycines
gtttcggttcttttcgtcgtccattccctcccaccgactcataaaccccgacattaaactccataggtcccttcttccctcctaatgctttatccctattaaatgtgtttgcctcccccaatgaatcagaattccctcccccgggcgtatttccccccccccccccaataatcctccccagggattatgccattctctcccatcagtcgtctctccgtgccgtcattttcttcgcgccgcaaatccgtccgtcgtactctttcattcactcttccatctgtttgttctctctccaactctttttcttctccaattcccgtgccattttttaactcatttttcaaaaataacggaaattaaacggtgctaaacattcgaacgattaatttgttcttggaatggcatcattattagccttttgtcctgggaatcccattgtctctctgagggattaatttttaattaattgtttgttaattgggcgaattgaaataacggacaaagtaaaagggcaaaacattggcaaaatgccactgatggcgagggggagagattttctgtcgtttattttgaaaattcaaatttcgatttgctttctcttagggtttatttctccgaatggccgtctctttcctccacttttcctccatcattctgtgctccgttttggcccttcttctgttggcaatgttttgtgaagtccgtgcggcccccgcggtttaccaaatggaccgaaatgcctttcgaatgagtttcggcaagcgatcgcagcccatggaaacggaaagcagcgaattgaatgtgcgttatttggagaggggggggggggagggaatgacaaattgtgccgatcaaaacaagtgtttttaaagggtgccaacatcgccattccgctgctgtacgatatggccgaggccgaaacagccgcgcaaaaacagcggcacagagtcagcgcaccgtgggccacccggtggaaggtcagtctgttcagcaaacggttggaccgaaatttgtacaacatcggtttcggaagacgacgccgctgacag

SEQ ID NO: 33097 - DNA, 402 bp, Heterodera glycines
  unsure (1)..(402): unsure at all n locations
tatantggaaatccatatattttttcttggactgtggcgttgcctgaaacgcacggaaaacatgtttctagcttggtttgaagcttctaggatggatttatatatccatatttttccatatttcgcaatttatgtccatatttccatgtttgtccatattttggcatttttccaaaaaacctttattagaacggcccccaacatatgaattgacctttttgatcccaaaaaccggaaattttcccaaaaaatctttttttttcgctaaatttcccgagaatattaaaaaattttaaattttcttaaaatcgataaatttatgtttaaaataagcaaaaagctaaaattttgcttttcggattgatttttccaaaaaaataataaattctagctttatcttgt

SEQ ID NO: 33098 - DNA, 1077 bp, Heterodera glycines
caatcggttatttatttacataatgattttgatatcatctacattaaaaatgaattatttaaaatagattcatcaagcgctatgtaaaaaacgaagacataaatttattaaattttggggcttttttggctttttacgactttgtcagattcattcaatgcctagcatttcgaattaatatgtaattataacttttttcttttaatgcttatttttctttacttgcataacaatgtgccgtccttcagttgtgcttggaagttttcgcgcgttccgttcaccgtcattgtggcaccggtgacctgcttgatccagttgagcaacagctcaccctcactctcgttgtatttgctggcttgctaaaattttaattttatttatttttttaaattttccccctttttcttagttcactttgttcatgatcgaagcaccaacaccaccagcgacacttaaaattaaaattcataatttttgttaaatccattttaataattacctgcgagatcccatgttgttggctctgtgtttacgcacaaattttacctaaaatttattttaatttattaattaattttaaaagaaaacaaaaaaattaggtttgaaatttttaagttcctccgattgttaaattgcaaattttgaaacatttttatctgatccatttgacaaagcattcgcttccgacgagaagctctaaacttgaataaatagcctccttcccacgaattttcgagataaatcccatacattttgtgcccttccgtaacagctgttgcctggagagaatgaacaaaaatcacatgcttattcagtatgctgtgttgagccgagattgatcggaagaatggaaagtgatcagaaaaggtaaaaaaagaatgggtcgaaagtgatcagtgtaaaaggagagacgaagatacacagagagaaagagaaaggaaaagagagagagagaggagagattgagaaagataaagaaaaaaaatagaaaatgaaaaaagagacagagaaaaagagaatgagagatagtgagtgaagaaaagagaatcatcgccgcttccaaggtgatcatctgaa

SEQ ID NO: 33099 - DNA, 615 bp, Heterodera glycines
gcatgcgtggcacccgtgaacagttggaatgggtatgcgtggcacccgtgagcagtcggaaagcgagggcttggcgaatgggcatgcgtggcacccgtgctcagttggaatgggcatgcgtgcacccgtgaacagttggaacccgagggcttggcgaatgggcatgcgtggcacccgtgagcagttggaacccgaggcttggcgaatgggcatgcgtggcacccgtgctcagttggaatgggcatgcgtggcacccgtgctcagttggaacccgagggcttggcgaatgggcatgcatggcgcccgtgagcagttggaacccaagggcttggcgaatgggcatgcgtggcacccgtgagcagttggaatgggcatgcgtggcacccgtgagcagttggaatgggcatgcgtggcacccgtgctcagttggaatgggcatgcgtgcacccgtgaacagttggaacccgagggcttggcgaatgggcatgcgtggcacccgtgaacagttggaacccgaggcttggcgaatgggcatgcgtggcacccgtgagcagttggaatgggcatgcgtgcacccgtgaacagttggaacccgaggggttggcgaatggggat

SEQ ID NO: 33100 - DNA, 1372 bp, Heterodera glycines
tacgttctactcgtgccaagtagaattcaacgacatgccaaaattttttgtcctttctcattgataaagcaactttttggactcgtatcctgtattgttcaactacctcttgtgagccacggatcagctcctccaagttccagcacaacaaccgcttttgcacatcgggtggcaacatgacgaagatcacctgcagttcatgctccaacagcacaccccaaagggccaacacttcgcacgccgtgcacaccaatgagcgcagtttgttcaacgactgtcgttcctgctccaacactgtgaagaagagggagaatttcggcataaatcaagaaaaaatatttttctttgagtgactaaaaactggttgaaaagggggtggtgataaaagtagaaaatatggaatttacgctaaaattagatacattttggatgtcagatagaaattttgcaaataaaaaaacactcacaatttgagtcacccgcgccagcaccttgtcgcttttgttgtgccggggcaagatggaagaacggtgcggcaccaccatgttgaggcgatttgccaccaccgcccgtggtcagctgatgttcgtccatggcacggcgcagtgcggccaactgattgccggcacggctcacttctgctgggccaagtgccgaatacacctaaacaacacagagtccgacgtttttaaaagggccctaggaaacagcattttttcgagaaaaaaagaaattccatcaaccatataaaaaatgaatcacggggtgacaaactgcaaaggtgaaacaaaaatggctattccatctgctaactaatgcattgggttaaatcccaggcattttgtgacgaaaatcttttggcattttccctcaaatccatttaaaatgaaacattggcccccttttttgctcacattgttgctcgactgtgccgtacacagattccgtcgccacacatccttcacaatccgcgcgaacagtgtgtgcaatgactcgtgccgtggcgatggcatcaactgtttttgtatagggaaaaacatgggaacattttttttgtattttattgtaatttggacattgatcgactcaaaagccccgatttttttacacaaaaactaaacatttaggtacgcacattttatggtaactctcgagtttagaaagagtcgagtcaagcgccgtaaaaatgttttcgatttcgatcatttaaaagccactgactgttttctaaaacccaattttacctgtgctccggccacgatggactggtccccgtcaaacgcgccgcccggtgtcaaatattgctgctggtgatgcagcggcgtgtgtccgttcatgtgcactgctccacctcctccgctgctccatgccg

SEQ ID NO: 33101 - DNA, 1196 bp, Heterodera glycines
  unsure (1)..(1196): unsure at all n locations
aattcaattttcctcggaattttaataaaatttcatttcccctggaacaaagcaaacactgaaaagccccaatccataggatgtggtcaacctcaaccagcctttgcatatctttaaaaatccaacatcaatacttacctgatgtttctgttattctttatgattttggtttcataatagacaatggccaaatgcgggaagagcacgaatttggcatacaaattttgattggctgaatttaaatttatttaaaaaagttaattttaatctttattgttgctaccattctttcttgcgcgatacacagctttcaaatgattgggttttattaggaagaaatcactgtttacgctccatcggttttttggctaaattacaatttatttcctttaaatttcactcttaaccggattgggcttcttttgtgttaaatttgacccgagcacgggctgctggtgttcctcgtgttgaccaaagtttagatgaaaatccttgaattattatatcattttaatttaaattataaaatccttgtcattttttagctaatagttttcccaaatgtccgaccgtatgcaaatgtttttgcaattcatcactaagaagattcagggaaaagccactgtgccgaaaaaaatcaacaattggttggagcagatttaaagcagccgtttgaagaattatcgcttgtttaagttgtcgctgaaaaatattctattgttttaataatccattttaagctacaataaattaccaattcattttcgattttgtttaatttggcgtccgattcgttctaaatggtgaataaaattatttttgtttgttcaaatattagcgcattgattttacacaaaaataatttaaacattcatatttaatccttacattgtgcttttgcagttgggcaattttttgttcaatttcttcgtatttgacttggaaataatcaatgcccgctgaatggaaattaaatcaatgacagattaattacgttttaatttcagaaatattttctcaccactttcatttttgccattcacaaatgtgcctaaacgataagtgcagaataagaaaataatataaacgtatgctaatagccatataaaataccaagatcagagagatttgatgcaaatatttgaacaaataaggagggcttaatactgacaaattctgtttcattttccgnttat

SEQ ID NO: 33102 - DNA, 926 bp, Heterodera glycines
atttacatgttagtttaggcactctgatgctttttccatcaaaaagggagatgaataaattttaaaaaatttttaattcctttttaaacaggccaaaaagtttaggcttgtgtggtaagtgtgaagaactgtgttcctccaggcaaaaaattctaagaaaatttataagcatttgtagggttctcagcagtttccctgcaaaatttggtgagcttctgatcagtctagaacgttgggtgataaaatgaaaaaaataattaaaaaaaataatgctggtgtgctaagtgtgaagaactgtgttcttccaggcaaaaaattctaagaaaatttataagcatttgtagggttctcagcagtttccctgcaaaatttggtgagcttccgatcagtctagaatgttgggtgatcaaatgaaaaaaataattttcgaaaaataatacttgtgtggtattaattcataaatatttttttcagaaaatgctctgaaacgcaccaaattttatttacatgttagtttaggcactctgatgctttttatatcaaaaagggagatgaataaaatttttaaaaatttttaattcctttttaaacaggccaaaaagtttaggcttaacttttttttcagaaactgatcagaagcgcaccaaactttgcagggatactgaaaggaagagaaataacctattttaaatattatctagtcagttcatttaaataatttttatccaaaaaaaatttttttttggcttctcgggccgtcccccctaccgatgcgctcagatttatggggagaccgaatccttcgggaatagcttccctatagcctgtactttaattctgcgttggatttttgctccccataattgtttgagtaccccaaacggacacttgaaaaatcgatttttttgttttcggggcagtccccc

SEQ ID NO: 33103 - DNA, 90 bp, Heterodera glycines
  unsure (1)..(90): unsure at all n locations
gcatgccnnngcaggtcgttgaaatcgggtgacagaaggcgttgcatcagaatgcctccgcgtcgcggtcgtccagcaggcgttcggcag

SEQ ID NO: 33104 - DNA, 736 bp, Heterodera glycines
accaaaaatgcgaaactagaaaaattagagttttgactttttgttcaaatttgggttcgaattgggtcgaaatggatataggaatcggattcgccgaccgtgaaaaccctaaaatgactttactttgtctaaaaaattgaaattttttttcaaaaagggcggggggggggtaccttttaagtttttcacgtaaaacacgttgtagctaaaattaaacgtcaggttcgtgatcagcattaaacaaatttcacgggggtgacaaaacccggaagtacccaattaattgcccgttttgacaatttccttttgcttcagaggcatttccttcaaaagcatcaagcatcttttatggcgaagtgtattctgtcctacattcaatgagtgtggcgaattccgaaggatttgaatgatcactcttatttgttagctcactcattcttttgttgtacttttattattgtataatatgtaaaatatttgtccaatttatttttcggtacaaatttaggtacttaaacaataaaaaacaaacatttttaaattaacgttatttaaatattcccattttttctaggtcagtcctcggttcccaacaaatttgcgctgtctttggcatgccatcccaaaactttctttacgccccccctccccccaggggttataagctttcggctgtccttccttttttccaatttcttctgttcccgtacgcctttatttccccctccttttaaca

SEQ ID NO: 33105 - DNA, 983 bp, Heterodera glycines
tccagtaaaaaaagttagctctggcgtcccccagggctctgtccttcgacctttattatttttgatttatattaacgatcttcctgatgcgttgccatcaggagtaagaattaaattatatgctgatgatgttaaattgtatatttgttataaagcaagagccgacccagaaattatgcataaagcattgcataatttatccgaatgagcaaataaatggcaaatcagaatcttaattaaaaaaacttttgtacttcatttggggaataaaaaccccaaagaaatatataaaattgatggaaatataataaatgttgtggatacaattagggatttgggcataaatattgataataatttgcaatcttccaatcatgtcacacaaataataaagaatgcatatttgcgtatgcgttctttatttcggattattaagtcaaagtcttctaggatttggattattttgtacaaaacttatgttagacctttattggaatatgctcctgaagtttggaatccatctattcaaaaaaatatttaaaaaattgaaaaatgacaaaaatatttcaccaaaagagttcttttcaaatgcagccttccacccattccataccaacaaagattagaatacctgcaactgccgacaattgaaagcaggcgaaagctgtctgatctgatcatggctcataaaataatttatggccgaacagatctgaatccctttgaaatattcaaaccttctgaacgctttaacattcccttttatagacttaattcgaaatataaactaggcaaaaaatttataccttttgcagggcgggtaactaaaatttggaaccaactcgataaaaggctcattgaaataaactattaaatcaatttaaaaataaaatttaaactatctctattcctgcaaaatagaccggaaaaaaattaaagtcagaatttttagttcattaaaactaaaagtgatttggtcaata

SEQ ID NO: 33106 - DNA, 565 bp, Heterodera glycines
ttatgtcaaaataggggggggggggggcggcgcaaatccctgcggcgcaagtgtcattttggttgggcggcgcaagtgtctgcggcgcaagtgtcggcggcgcaaatgtcaatcacccatccctggtatgtacggtatatatcggtgaagcctttgcatacaatttgtaaaataaacgcaccaccacagcaactggcaactgcttgtgaccatcaacagcagcggaattgcactcaacggcctgtattccggaaaatccaggcatggaaaaaataccctaattggagagattgtaattatatcagggctcggattcgtacttggaagccaagtacgtaaaacactaacaataaacagaaaatagagcaacaaatcagttcccgtaaatgatttattttctctgctatttgatccctgctcgatatcgattttttgcataattatattaattattaactgggaaaataacgtcatagcaccgatggccaatggtgccgccaaccgactgcgctgatggtggaccgtttacgccgttcggagcacgctcttcaaaatatatttgtta

SEQ ID NO: 33107 - DNA, 866 bp, Heterodera glycines
  unsure (1)..(866): unsure at all n locations
aaacattaagaataaataaaactgtaatgagcttcgttcattaggtttgaatttctgcaaattccaaagttttaaatctaaaatattcattttattaaaataaaatatgctttaattacaatttgctgaggttttttgtcgctgaaaaaaatgatcgcataaaaaattttttggaagaattttggccataaattgggaccaaatcagcgacacgatgaaagttttgagcatttaagcgaagaccaacaagccaataacagcaaaaagcagatttgctaaaaacttttgcgttaatagtaattaaaaggggaatgaatttttgatcacttctacaattaaaagataaattggcatttttttaataaattcatcggcgcctaatagctaggcatctgcgaaccataattttaaaaggtttttctcatttctttcttaaaatttgagattttttgagattaaccacgacaaaaagcacaaaactaatataaatttacaaaatttaaaaattaagaaattttacactaattatgtatttcccaaagattaaaattacctaaatattttgcagcgtactttttcctccaattcggcatttaattggtaatggtccaatttgtcggcaacattttccctttttgcccattcaaataatttatttcgaattttactccgttgaaatgcacaattttcagtgaaattgtcgaactgagaagtcagacccacaatgaccgcgaagtttttatacttttcttcaattttaacctcattanaaagtgtttgccagtttttctgatgttcggacagaattttattacctanaatctttaatttttaaaattagtaannaaatgtctanaccaagtgcc

SEQ ID NO: 33108 - DNA, 82 bp, Heterodera glycines
tgatccggtgcgcaaggcggccgaactggtggcgaaccggtgcaagacgatcaccggcgccaagcggctccctgcggaggca

SEQ ID NO: 33109 - DNA, 1060 bp, Heterodera glycines
  unsure (1)..(1060): unsure at all n locations
aatgttggctgagcaactcagaaacntgatctcttnttctccagaagggctttgtgctctttgctcaacatttgaatgtccatggccaatttggaaatctccagccntaatccgttccacttctttaagactatctgacacactcaacgacaacaaatccgcttgttcctattaaacgaaatggtattttatgaaaacagttccccccaaaccgaatgttttttttcaaattaagaaattaaaagacaatcatgaattttttaaataaaatttcatgataaattttttaaaaatttccaacgattttttgacttttatttctccttgaaacttacttattattagtaaaaattttcttaagattttttaacctcttattggtgatgggaaatgttttcccccatatatcgtaaagtgtcttattacgaaatatgttccatgcaatattaaacatattttgcatttacctccaaatttatcctttcccgttcaaaattgcgcaatttctttgccaagtcaatctttgaacgttttctgtcaatgtatccgcccgtcattggtccacgacgactcacttgatcacctatgtttcaatttaccaaattaaatatgattcaaaaaagtcatgaatatcaccgtcaagagtaacacagtcaaatcgttcttgtttcgcaacccgagaacctgccgcaagatcacggacgaacacacaattaccaaagattgagcgaaaaacgggctcaaagttcgggtcgtattgaagatggtccaggatgggacttgcatcctaagagagacaattcatttttcagtggaattaatacattttttaccgcgtcagaaaccgggcggcgatctttcacaagcacacgattaagcggataaaagttcacttccccggggagccctcgttggttgatacgctccaataatttcatcgccacgcggtcgtcgctgaccacgtggtaaaagaggcgcgactcggcagtcacttcaaccgctttgatgtgctgactttcgtattctgaacaagtcaatcacacagccttgaaagaggaaa

SEQ ID NO: 33110 - DNA, 839 bp, Heterodera glycines
ttttatttacatattttagtacatagttaggaggctttagtacatatttcatacatattttagcatttttttatacatattttatttacatatttcgcgatttttcttacataaaaaaagaaaccctgctgatcagcactgaactgttattaacttttgatttccctccaaaatcgtattaattaatcgcccctggcaaaggtcggccccttcaattaccgcgtcgtgaacaaccgcgacttggtgccgcatatgccgcccctttggttcgaagggtaccgccaccatatgactgaagtgggacattcggcaaaatgactttaaaaacaaatgctaaggttttctataacaacgcaaagaacaaaaccgaggaatttgtcatctgcgcggatgaagccgaatcggaggaatgtgcgggaaaatattggtaagcaaagaaaggcacaattggaaaacaatttcaaaaaatgtgccaaaactgttgttcaggttctacaatgttcgggaccatttgaattattttgggaaatcggtgtccgaatggggagagaagggatgtgccaactgacagaaaaggacaaaaaagaatgaatgaattgtgcaattaataattcactaattgtagtaacaaaataataatccaaaatatttttttattttttattattattatccgaagaatgaaacttaaaaaatatattaaattttaagggctctttttgatttgagtgggccattctcagctgaacatctgccaaatgatcccaaaaaatgatcatccaatgctttatcccctgcttctcccccccccttttgtcctctgttttttcgatttgttt

SEQ ID NO: 33111 - DNA, 917 bp, Heterodera glycines
aatgtaaactccatttttaattacgataactaaaacagagttgagaagcatttttattcactgttcataaatacaaaaaaaaaaaaattgaatcacaacgaaaaaagcaaaaatatgagggaaagagagacttttttttgttttgtacaatcaaaataatgggcaaagagtgaccaaattgtgattattattaccagtgttatttggaaaactcataaatggaaagaaagtaaaaaacaaatgaattaaattggacggaaaaacatcagttcgaattggaaaatttaaaagagaaagagagagccttttatttaggtattagaaatttatttctgagaaatatttaaaaactaaaaaagccgatgtgagaaaaatcatcaaaggaagtgcgacttttcgcctttagtctgacaataaaaatttcgctaaattcactaaaaatcccagcaatttttggcgaaaatctgtgcaaatttcaattttttcacggcaccgccggacggaccctcgtttccccaaattaaaaagcgcgccacgactaaatggcgttaaaagcaacaaaaaaaaagagttggtcgtacacgggggcggtacccgctccaagccgaaaccctgggaccgctcccctggggtacgtaccccccccccccctctcccgaccctaaatttaccactaacaaaagaaaaaagtgggagaaaaaatgtttttctttagtataaatttcacagggaatcgggagaaaaagcacagcgaatgaaggatgaaaatgtcacgactggtcaatgctgagggcggtcagaatttgttgacgtccgaattttgagacactgaaaaaaacgaagtaagcaaatgaataaaaaatgccataagtggcgaccatactcgagtacagaaaggatgaattcgctggcgtcaa

SEQ ID NO: 33112 - DNA, 855 bp, Heterodera glycines
cttaaaaagtctacaattttgccctaaggagttttttcgttaaaaccaacccctaacgagttatggacccgggactcaaatgtcccgcacaggccaaaaattttttctatttccgggaaaaaatcgaaatttttccgaaaaaaataccagtcgatagagctcgaaaaactatgttttggaagtggtctcagtttctctgggaaaaatcgttaaaaaatcctaaaattcaaaaacccgaaaaccgttttttaggcttagctcgaaaaattttcaaaattttcgaaattttaaaacttggttggatagcctttcaaatactacacatttttgctcagaaacaatttttcggtcaaagcaacccctggcgagttattcgcctggtactgaagtgtacattttgagcacacttcaattagccaagcgtgcaggccagggggtggctctaataaaaaaataaaaaataccagcatgtagaggacagtggtggggagtgccctcacagcgggcactttttgattcgggtttcagaaaaaaagttatgggccgtcaaacgcaagaaaaagtgagaaatcggtccccgggactcagtcgtccgcgcagaatttttctctatagttttcccgaattctcctcaaaaagttgtaagacccttccactactttcagacccgtcccattagccgttaagctcaaattagtttttgaaacgaaactccttgtcaatataacgtatatataactagggtggacagttggctatggtgtgcatacgtggcttggtaatatatggccctcatttgttattttaaaacatacaaaacattaattccattagtgtgatgttttaaagcgctat

SEQ ID NO: 33113 - DNA, 995 bp, Heterodera glycines
ttaacagtcttatataatatatatgagtttagtattcaataatttattgattgcttttccattggatttctttactccccgtgaaattacgatgaattgacagtgcataaatgaagccctaaaaaattgaccaagggaaaattaattttacaagtgggcgaggtgtgaacgttcctgttgaccagcaggacagtggagaagtagaataagtgttaattaacaattgatggtgatcatttttaagggaggagcttgttgttgatcgatttgggcggaatgacgaggagagtgaaaaccaatgcagaaaatgggagaacggcagaactttcggattttctttgggtggataaattttatctttttctttccgtagattagcttttttttccttcgctttttccctatcgataaatttattttgaaatcatttcgttgttttaattatttactaattttttctgaaaataattttctcggaaaaatccttaaaaatcttcgtgttttattcagggtccgcattcggtgcccaagtttaaagtgtctaatattcggcttccatttcgcgggtgcccaatttaccctggagccagtagtggcacgatgggtcattcttttttgaggtttttggccataacttttttatgtctcaacttaattctagcagactaatattgactgtcaagcgctttaaaatcttatcaagcttatttaatttggatcagaaatttttttattaacgcttgttaggtagcaaaacacacaaacttaatcaaaaaacttaatcttgtttaaatcaaaaatttaattatgtttatattttaatttaatgaaattattaattattttaaactttttcggataagaacaattttatagcaaaatttatcgagaaaaaaaattctattttcataaatcaatttttgtgaaaatttttcaattcttaggtgggtattttttgaaattgtttcatcattttcttacgggtttttactttt

SEQ ID NO: 33114 - DNA, 989 bp, Heterodera glycines
  unsure (1)..(989): unsure at all n locations
agcaactaaaaaccaccgctggggatatacgatcttttttcctaaatttttcagtactttcctgttatgcgactacaagccaaaattttaaaaaaacaacaaaagggggcgcaaaaggcggtgaccaccaataaataaaatgggtgatacaatccaggggaagtcttgaagtcaatacacagggttttatatgcattacatgcgcgaattttggtttgtagtcgcataacaggaaactaccaatttttcaaaatttattatatgtacaattgatttattatatacgcacaggtcgttcgccattaattgttgcgtgtttggttggacatttgcaaattggtaatttaatgaaataattattggagcaggattttgtgctttttgaaaagggccgatatgaatttttattttaatttttaattaaaattcaattatttctttttttttaattctggtttttccaaaatttctcattcttaaatttataaacaaacaacaaaacaactttatgaatgccgtcaaattcccaaaactttaaccttaattaaaaatattaattgttttttaagccaaatttcttgtggaaaacggcgcggacatcgaagttgtcgcttctgatgggcttactgcggtgagggccgcaataataaaggacagtgttgaaattctcaaatatttgctcgtcaacggcgcgcgcattgaccgctgacgagtttttaagaacaagaactttattgatgagtttctaaactttgggataaaactgagaatttgtcattttacccatgctcataacttgaaaaattagctggaaaccccgccgaaaggtgtttttacacttcgccttaaattttattccagtttattttatcgaattggtcgnaataataggatgaaaataatttttagccccatttactaatngattttttgccaaaaaatgactacccttttctttttatttatttattttattcaaaaaataaaaa

SEQ ID NO: 33115 - DNA, 644 bp, Heterodera glycines
aggattaccaattgacttttcaccccaagaaaataacagaaaatttccaattaattagcaagtgcttaagccgcttagctgcgttttgaatccctacagaaaatgaattcgaattttatttttgaaattgcttcgaaaggattaaacactcactaccgtacccaatcacttcaaaatgtttggtgggtttcctttttccgccaaatcccttcgttgcatttgttctttttttgaatttatccgtgccaaagtcgcccaaatgccgtcgtcgtcccctcgcgcgccctttgccttttgctttttggcattcgctgtcctttccccattgcccctcctccttttgcccatgcttttcgctccgtctctccaccaatccgtcggtggcatcgctccgtccaatggcaccgctctctccgccacttttcctcctccgatcggtccgtcgatcagttccaatgcttcctctcttgcgtcggttggccttgttcagctgaaaatcggccttctctttgtcaatggcagccaacggttgcgaatgcttttcggctttggccaatccgcgcccgccgtttctttggcactcgaaagggcacggcaggaacacctcatcgacaacatcaacttcacgttggtcgggcaataga

SEQ ID NO: 33116 - DNA, 1081 bp, Heterodera glycines
ggtacatcgatcacttcgttatcgcttttcttcgttccaatcaccaaattttcgacaaaagaggcaccaatttacagttgtttattcctccttcatcggtaatggatggccagccaatttgggatgttttggcccgtgaaatttggccaatttttgcatcaaacattcgccatttgcgctttaacggtgatgatcatttggacaatttgcgtcgtcgcacttcgccgacaattctcaccgatctgaatcagttggattcaatcgattcatttgatctgttgcccgctgcgtttggtgatgattttgatgggccaaattcaacaatttctgctggccaaattctgtccaaatggttgcactctccgagaaaagatggccaacccaagcgattgagttgttataattacaacgaacaagggaacaccaattgggtcaacaatttcaaggaggtgtggcccaacattttcaacaatcactgatttttaattgccttaatttttgttttcaatcaaattgtttttagcattttcttcgtgccaatgccatttcttccgtcagttaccaaattcatttttctgttcatcggtcaattccaatgatgccatttgaattggtgaacgaatcgacaaaggaaaagctgacattggccaaagcaaaggaattgggcaacaattggataatgaaacaatgcaaaattattggggagaaagaggagaagcagcagaaaaatgaaaatttggacaacagttgtaacaatgtggtcttttggctttatatttgcaataattgcattgggtgagcaattaaaaaaggcatttaattttgtttaaataattcaaattgcgcctaattaaggccattgtctccgccaccagcagaagaagccggacaaaacatcaaaaaagtggcgttttctgctgacaatgaatgagtggtgggcccagcaaaacagtggttaacagaagaagaaataattatttaagaatgatcgatcgatttcaaatcagtgatcaaatgcaattttatgaaaaaaaccctctcaatttggtaaataaatccgaacgtataaaatggccaaaaa

SEQ ID NO: 33117 - DNA, 1457 bp, Heterodera glycines
ttatttcgaattattgttattttctcagcgagaaatcttttttacaccctaccgtaggggacagtccaaaattaataactcttatgaaatatattatacacactataattcacatcgacaattaaatgaaatattttatattccatttaggagggattaaatttaaaaaatcttaattcgttaaaaaactctaaataaagtaaatttgaaatttagtagcacaaatggttgtaaattacgtgctaatacttattattttaaatatatcattattcaagttcaaattaaaaaattaaagtaaaataataactgcaaaaataatgtgttccgaacacaacaatctttcaaatattcaatctaattaaactatttaaacaattatttcgaattattgttattttctcttttcttataagattttataaattcaatttttttatatttattatattctttaatttttaattatttttcattacttttgattctgtccttaaatttcaatttttttaaattaaatatttccaatcaatttccatgtggatcgattaaagggaccatctccaaaaagacgatggcagcgcaccacctccccactatccgcgcggattttacattttttatcatattatatcttccattccccacaacttttttttaaaaattatctgtagtcatcaaggttttaaaattaaataatttgatttcccgctctaaaaactaaaaaatccgacatttttcatataaattttgtttagcatttttttcgcgcactctcaccatttttttatgttccacttttaaaatatatgaaattatcttttctaatttaaataataatttttctgttaaattcccaataaagtttttttatctgtacagttcccaaatggtttattatttagagggagaggcaaaaatactagccttttaattgtttattcatcacatggaaaaacggatatgagagaaaaaattttattacagaactaaaaaaatatcccaataaaattatttataatatttcgtgtttaaaaattatttgcgaaaaaaaattattaatacaaaattattattttgcgcattttcatagtcatttatttcccgcactaaaaattatgttggacaaaacaaccgagggggtttattccaaatcatttttcttgaaaaaaaattttattttttcgattattgttgcatttacaatcgataatttccgttgatatctattaactggggacacaaaagcaaaaaaaaaaaacggctgaacactcgcgcagtggcgcaaaacatacccgagaatatcattaggctgggggttttttgtattacaactaatggccggggatccctttacaatttaatcatttttccttcttttagaaattactctttttctctgtttctctcctctctcctatagtgaatgcgcatctctcttcccagggggggccaag

SEQ ID NO: 33118 - DNA, 525 bp, Heterodera glycines
ctgtgaattgacggaaatgtaaaatttgaattcatcgtcgtcaataatactggattcaatgtgtccgttaatgaagttaaggactgtgcctacagtacaccacttccgttatggacaatacaatacatttcggtatgtattttttaacgatagaatatataaaagttatatttctggaatatttattaaaatatattttgtaaataaatttaatttatatgttaaaaaactttttggtaattaaggttggttatgataatgcatcctttcatccgcctattatcacctgtcacccgtcaaaacgatgttttaagccaacatccaataattccaatatgtttatggaatttcccgagaagaaaggaaacaattgaataattgtgtaaaaaactactattataattattttattttactttatttataaaatttttactattttagaaaaataaaatatttatttattattcaatttgataacgaaggagaagtgtaggatggctaggccgtatcgtatacttcgcc

SEQ ID NO: 33119 - DNA, 58 bp, Heterodera glycines
ccttacgaagtgtcaagcggcgccagcggtgcgaccgccatcgagttcaaagaggcgg

SEQ ID NO: 33120 - DNA, 1015 bp, Heterodera glycines
cctaaacatttcgggcctaactttctttaaacgcaacagattttactgaaattttacagacgaatagaggactttttggggtaccgaatgataccaggaatgtttgattttgatgcttctagaaaatcactttgctttattcccccgaaacattggtcccccgtcgtgttcatccgcagcagttaaatttggcgccgttgttgttgctttggccaaatgaaaggcgtaggtggaggaaatgtgtgggtttggcctccttttgccatgctcacactcttccatggtcatttcgtggtcaccaccagccgatgactcacaatcagacgacggcaattgggcggaacggaaaactgcagcaaattctgagaaaaaacactttgcaaataaccatttacatattttaaatttaatacttacggaggtcgaccccctcccccctccactttgcccacaaagtgcctcaaaacggataccccccaatttttcattaaaaatttttcaaaattgcaaaatgcagtcattttttggacaaaatcattaacaaatcgcaataaaaattacaaaaatttttcccggctgcggcgccgcatctccctgttgcgcaaaagttttcggaaaaagtgcgcccccaaaaaaggcagttttcaaaagcaaaaaataaaaaaggttgtagatttaaatggccggaccctttgcaaaattggccgctgaccttcccccctttttactgtatgatctaattagtagtaatttgtaaatttaatctgcccccttaacctttttgtccatctccgccaaattcggctacctcaaagcaccggtcgttgaaagtgctgtggaaatgactcttcgggatcagttgcaacacggtcggactgcgccataattttgcaccaaattcgggagggaattgacgacaaattggcaatgatttgatcaagcagctcttgtggagcattttgccggtccacaaaacgcgtgcacgccaattcgacggttgacacgggcgcaaaaa

SEQ ID NO: 33121 - DNA, 646 bp, Heterodera glycines
ttttaagtttatgaaattcgctaaaaagctaaaaaaggaaaaagtgagtgtcgattttgtcctatttggcgaggccaccgccgagaacaacaaaataattgccgattttgtggacattcttaacggcactgaagagggaggagcctcgcatttgttggtcgtgccggttggagacaccaaactgtacgatgcattgcttcgttcgcccatttgtgcgggtgcgggcgctgcggtaggcgcagtcggagaatttggcatcaacgacgaggacgacccggaattggccatggcattgcgcatttcgctggaggagcagcgtctgcgtcaacagcagcagcaaggcggcgaagggaggggtgaggggcggggacggtcccaggatttcggcttgggggggtacctcctccctggcgacgatctttttttttcactccactttatttttgcgggcggtttttccaaaagacttttggggaacaaggggtccggcggtgccgataggcgccgccgggaaaattttttaatacgatttgttaacgaattttgtccaaaaaagagacgaattttgcgcgtttgagccatttttaggaaattttaatcaaaaaaatgccgatttttttgaacatttagtgaaattttttggaaa

SEQ ID NO: 33122 - DNA, 353 bp, Heterodera glycines
atttgatatgaaactaataattgtttcgccgttttttagccgtttgaatttcggcacttttcacaatgattgcggcattttgttcgacaaggacggcgggcagtcgaattgtgaagggcattgtttgctcctccgatttctcctcccattcgctgtgcggtccgccgctgatccgttcgccctttgacaatccgttgcgccgttttgaaccgcttacacccaacaaaagcgccgacggcacggccgacggtgttgcgtcattgtcagccgagcaaagtggcacggtgtgttgttgtttgttcatagtttttggcgccaggacatggccatagaaccaaccccatgggttcggg

SEQ ID NO: 33123 - DNA, 169 bp, Heterodera glycines
cagtttcactcttccaggctggagtgcagtgatcatagttcactgcagcctcaaattccagggttctagtgatcctcccgcctcagcctctcaagtagctaagaccataggcatgcaccacaacacctggctaattttttaataaattatttttttatttttgagacaa

SEQ ID NO: 33124 - DNA, 988 bp, Heterodera glycines
gggaatttcgcgtgaaaaggcacagttttttatggaggtaaatgttagaacagaaaacgaatttaaataaaaacagagtataaatttaccaactattacggtaactctcgtttttatatcgtaagacccgacggatgctctgaaggcaatacggcgccaagatgcgcgaattattgtcggactattttatgtgaccgaagtacgtcctgacatttgctcatatgtttttttcgtcaaaatgatgctcgagagtctcgataagagagttcaaaagtgttaatttctggttttgaatgtgaatttgggcctgattctctgtcaaatttctcaatcaagcctcaaaaattctcaatgcgggcacaatttaattagcctcaacccattcattttcattaccattttaaatttaggcacgccgtgttctctgccaagttcaatttatttaaaaaaacagtgttttcaagcgaattttaggcatatttacatggtctttatggacgaagatatggtcagtgcaattaaatgcttcttaatctatctgtaattttggtcattccgctccaagtttggtttatgatcggatggtattccgacgcgtggttcattccgcccgaggaggaggcgttgaactgctcgcgcgcacaaatggaacgggccgcgcagtttcacttcaccacggagagtgtgatgctgtcgcgcgacttgcagccggcgatctctggcatgacgggcgagcaatttcagacgcgacttcgccgccggatcagcaccgacccgcacgaaactggcggatggcccgaggcgccgctggcatacgacgctgtgtggtcagtgtgcttttcattccgtaattttaattaactaattaattgaccaagggcattggcactgacgctgaactgcacgatggggtcgttgccattcggcgtcaactctttggagcagttcacgtacaatagcactggaattgcgaggaaaatgttcaaat

SEQ ID NO: 33125 - DNA, 946 bp, Heterodera glycines
tgaggtgtatgcggagaagctgcagaaggacaaccacgcatttgtcggcacataccgggtcagtgtcatccaaaattccagggaaaattttgaaaaaattttaagcgattttttttggaaaatttttaaaaaattagggtaggagacgttacgggtggggggagacgaacaaatgtttgttgcaattaatccttcttttctttgtatgattcttttttttttatttcttgcccattttcgttttgttttttgttcccaatttcaaaaaattttttagcagattaatgcggatgattgttcccatgacgggtctctatctgtggagaatgtgctgtgtgttgtcggccaacacagtgttggcaagcggtacagccattggactggtggtgtacaccgggcgggagacgaggtgagagccaaccgacaccaatttttctatacaatttttttgccaacgtttttggttgatgccgcctctatcatttacaaataaattcagatcggtgatgacgacattgcctgacagtaaagttggcctgctcgatcgagaggtgagcaaaatttgggggaaaatgttttaaatgttgaataaggggctacaaacaaaaggttacccgtcaagatttccagtaaaaggcccggtattttgaaaaaaaaacccaggctatttaagacctggttttccgagtcgaacccggaaaatttgcttgttaccccaccaaaattatcattcatttcgttaaatgagtccccccccctgaacaggcgaacaactttaccaagattttcttcctgttcgtgctcactttgtccactgtgatggtgctgatgaaggggcagtggacatgcaaagaggcagagacgcgggacgaaacaccgccggcggcatgcggcacgatcgcgatgtgtccgcgtcgtttgatgatgacgcgaaatacttgtacat

SEQ ID NO: 33126 - DNA, 988 bp, Heterodera glycines
catccctttccatccctttaccccccccccctaccttaccccttattatttgttcttctccgcttgtccacccttctccattttgtgcccatatgttttggccatttgcatttggctgctgtgatccaaaacatttgccaatttgtctttttaatttatgaaaaatggcgctaaaggcaaaggccaataaaatcaacaaaacggcgctgaaaacaatgtcggcaaatcgctttccccttcgttttttcttcatctttttattgtcaacttaaaaacatattttatctttttacatttttggcaaatttaggctttctcaaaagctcttaacaatacaaaaaaatcaccagctaagaattttcaaaaatgaatctttagtgattttttcaaaaaacaaaaaagttctaccgattttaaaaccaccagttttttaaaacttatattttacgaaaataattgtttttgatggataagacagaaaaataattttctacctttctaaaatttaaattacagaaaaaatgtctctcgataaacataaatttatttgttttcacttacattccaatgccaagttgccatttgtgccgttttcgtcctccaccaccttaagaaaaagttgcaagaatcgctgccacttggatttgctccattgctggtcacttttctgttttttatctcgcttttcatcgatgtaaatttttataatggttgccaatgcgcgctttccactcattttgtcatttgttaacaatttttcttcgggaatttgctggcgttttgcccaaaattttacaataaattttaaatattttttcagcgatccttgcaaaatttttcctgaattgttcagcacttaaccgaaaaaattgccgaattttatcgccatgtgagatgaaaactttacctgacattgaatgtaaacttttcgatcacttggctcagtgccggatcgttcgctttatgcctataaaacgttcatattttt

SEQ ID NO: 33127 - DNA, 932 bp, Heterodera glycines
ggcaactcatccacgggcaactcatccacgggcaactgatccacgggcaactgatccacgggcaactcatccacgggcaactcatccacgggcaactcatctacgggcaactcatccacgggcaactcatccacgggcaactcatccacggacaactcatctacgggcaactcatccacgggcaactcatccacgggaactcatctactggcaactcatccacgggcaactcatccacgggaactcatctaccggctactcatcaacatttttattgaataaatattaaaataaaattgatagcaaaataattgcttaaaaaaatattttcgattcaagttattgttgggcgtttcttaaaaactgccatgtgggcgagaattaaactacaaatataaaacaactatagagaaatatttttaacaaaattttattgatataagtttttatacatccgtatttcttttttaatttcttattctttaaagtgttcgccaaaaacatgaactggcaagcataacgaattctaaaaaataaactagagtgccacgggaccgggaattttgggcaaaccaggatgcggggcacgggttgactgtgctcttaggtatgtataatcaatgtagaagaagactatggaaattgatattttctttcctggagtgtgggcggctgaatagagcgcaaagaacgtgatcctagcttggcttgaatcttctaggatggacttccatatcaatatttgccagatttcccgatttatgtccatatttgtgcgtattatgtcatttttatcgatacatattttatgtgcatatgttgatgttttaccaaataacctctatgagaacggtccccggtagataaattgacctttttgagcgcacccaccggaaaattttccgaaacatcattattgcgacaaattttct

SEQ ID NO: 33128 - DNA, 969 bp, Heterodera glycines
aatatttgcttaaataaaacttaaaaataagataaagaaccaaaagatggatttaaaactaaaaatgcaaattttgtattgtcgtccgttgaaaacacctccaagtttgtcaatttcaaaaaaaatttctcatttaaaaaaaaagaaaaattcgcaaaagaatggtgaaaatatttattaaaattgccaaaatgacgacgaaaacgcaaatttttcgtatttttgggggtgtaattttttaaaatttccaaaaagtcgatctttaggggtgtaatgacgtcgaaaacgcaaattttttgtattttcggggatgtaattttttaaaatttccaaaagtcggtgtatttttcgctttttttgcattttcttgtgaaaatgtgccaaaaaagatcgaaatatggactaaaaaggcaaaatggcgaaatatggatttattccccaaaacccccaaaatatggatttatatggactaaaaaccttcaccaaatcaaaaaattttaacgcagaaatgctatttttgagcccctttcttcatagcataagcgcagaaaaaacatgttaatccatataatttacaaccctatttatgacaatcccgaaccctaacaaaattctttttttttgttcgacatgggatatggttcggaattgttaaatgatcagtgaacccgaaaaccaccagaaattgaattagacaactttattaattgacctaaataattttgctaacttggaccaaaattttcgacaaatacaaatgataggtttacaaatacaggtcatgtgcaaaagtgatgctccaaaatgttttaatcgacaaaaaaaataaattttaagtagagaaaaaaattcagaaaaaaatcctgctaaattttaggctaacctttgatactgatccaaaaatatttttaaaccaagattagtcagatacactcactctccttaaatggtgatcggaatacccaaaaa

SEQ ID NO: 33129 - DNA, 1082 bp, Heterodera glycines
  unsure (1)..(1082): unsure at all n locations
cggcatcgacatcgcaaatgtgcaatgccgtaaacggaagcgacacccgcgcactcctcatgaccgcaacttcaacggccttcaatccagcacaaccgcatctcagcatgactgcggcaattttcatcgatccaggcagccacagatcattcatttcgttaaaggcagcacagctactggatcttccgttggtccacactgaagaatgccacttgaccagtttcggagaacgcgaaccaaaaagatacatcagcgacctggtcaagctcggatttctctgcacgagcggggaaaaactcatcttcaacctcaacgccatgaaattcttggtcaacgacatgccaatgattcaactgtcagagctggacaagacagagttgaggcaacaaaagctcaatcctccgcatgaacaacgacaacctgacatcatgctcggaattgatgtctggcacgaactgcaggttcaaccaatcgaaaagttgccaagcggcttcacactgtgccgatccaaaatcggcaaaatcttcagtggatcaggacgcatcgaaatgcatcaaacgccaaacgtgacatttgtcatgtcagtccacggcactgagcaagaagaagccaatcaatcagtcacgttcgaatcaaccaaagaagagacggaagtcttcacaaccgaagatgatttcaaaaaggacgaacaactcaacaacttcttcggattaaatctgattggcatggacgacacatcaacaccaatcgatcaggattatgtgatgatccatttcaaaaagaacctcacgttcatcaacaactgataccaagtcgctttgccctggaacgaccgagttgatgctcttccaagcaacatccatcaagccaaagccaggctcgtctcattgatcaaaagactgcgcagcctcaacctgattgacaaatatcaggcaattntggacgaacaagttcaaaactcagtcatcgaatacatcggtccacccgagtctccatcaagtgcatggcctgtgcattttctgccacacagagcagtcatcagagcggacaaagcaacaaccaaaatccgaatcgtcatggat

SEQ ID NO: 33130 - DNA, 693 bp, Heterodera glycines
  unsure (1)..(693): unsure at all n locations
aggatgaggtcatgccgacaacagtcgcggttgttgtgccgtgccacgcacgcccgcgtcaccaacaatgccaatggcatagccggcacccaaaccgcacaggccacaggtcagcccggcagcaagatgcgcaaaaccgttgttcaacgtgtaaccatttgaagcggaggtcactttacccttgagcaccatcgccaccacgaggccgtaaatgccgatgatacctttaaaatggggaataagacagtgtaacaatcttggtaaatgagattgtaaaacactcattttcgaaaattttggccctggattttatagaaaccccacattcggttgaatttttaataatttttcgaatgttatgttaaaaaataccagccatgatgaccgggatcacggatttcatgatcaattcgggacgcatcacgcccatggaacaaatgccgaccgccgactttgcggtgccataagccgcgccgaacacggtgaaaatttgtgccgatgcagcaccaatgtagccaaagaatggcgcataggcagccctttcagcggtctcgaggtcatacgtcattttctgcttgaagagatttacagaatttgaaacaacaatgaaaaagcggcaggctganaaattgngaaatgattttanatggacggatggaaaaaacagggtatacattanatgagatggcattt

SEQ ID NO: 33131 - DNA, 937 bp, Heterodera glycines
  unsure (1)..(937): unsure at all n locations
aattaaaacgcactcctttcaacttcgaattcgggcggcattttcttgttgaagtcgcggatgaatgctttcattcgctcgtcgaattcgcccggctttttgtcacgggacataacgaattggcgcataaatccgctgaattctttgttgaattcgcgtaggatttgctcggagtcggaagagcggccgaaattggcggatgaagatgaactttggtgtcggtgttcgtccccttcttccttttgcttcgtctcctttccgtcctcatattctgccgattgtcgacgtgtgccgcccccgcgacggaccgtacgaaattctgaacaaaaaaacgttccggattaaagcgatggaatttaggaaattgaacatcccatccgctttttgaatgcgttcaatagaaaactttataaacaagcccctcccgctgatcccattgcaaaacgcacgtgtcaatgccgtcccctccattcggtggaacggagaggagtgccatcgattcaaaaaaatgccaaaattgtttattgtggcaaaacggtgggcggcagtgacgcacatcggatggaccattttgactttttgttttgcttcacttttaaaacaattggttagacaaggttgaattgtttcatataaatagaattctaatgcaaaaaaagcaaataatacgaattaaaaaataatgcttcattctgaatgcatttgcaaatttacaaaataataaaacttatgacagaattaaatagggaggtcggcaatcaaagggccaaaataaaaaaagagaattaaatgccaaatggaaaatgccaattccgtcgtattatccgtgtccattcgttcttcgtcccttttgtccccccgtttttttncattgtttcgtacgccgagcgtcgcttccactcanaaccggccgttgttggaccccttgcataactga

SEQ ID NO: 33132 - DNA, 1033 bp, Heterodera glycines
aatccagaaatatttaaataaatgtttaagaaaaaatgccaaaatatttaagaaaattttgaacaaaattgcgaaattctgagcaaccaaaattgaaaattctcttctaatgcgactttttcaactttttattttaaatattttttaatttagcaatttttaaaattttcccgaaatatttaaaaaaaataaaatcctcaccctaatgatgaggagcattggacatggacatggatgcgatatatacggataaactgttttcttcttggacccatttttaaatactttcgctaattgcatgaaacccaatgcattttaaataaatttcggcacgattgtttttctcgccaatttaataatgaacgacggatttcccttttccggcggcggatgtttcggcttcttcctgttcatcggtggtgatgaacaatttgatgaatttctttgcttcaacgagcgtctctttgcagaacggacaaatgtaatgaaattgtccatgatcgtccgggatttgaatgtctgaccaatatctagaaaatttgtaattccacagaagatggaggataaattgggataaatggcatggatgaaggcattttctaggttttttttttgaaagatttttccggattttcaatgtattttggggtgtccagatcaccatgaaaagtgatcaagttagagttttttgatcagcataaaacgttatgctaaatctgttttttcagattttttgactaatatttggcatcattcgaaagcccacaaaaaatgttagaaaaaatttaaaaaaaaattgtaaattgtttttttttgtttgcctttgaatatacatttttttgaaaattgatttaaatttttgattgtaaaggctcaaaaatggaggcactaatgtgaggcgtgacatcaaccgttggaattgaagaaaaaaaaaacgatcattaccgccggggatggtaataatgaaacggcctatgtccagttttattatcaaagggtttttaattagtattatttaaatgctaaacggtaa

SEQ ID NO: 33133 - DNA, 947 bp, Heterodera glycines
  unsure (1)..(947): unsure at all n locations
tgcagataattgggaaagcaaaccatncgggcatcaaaacgaagggaaaggaccaattcataaataagttcgggaggaagttttatttgttgggaacaattcattttttagagggatgtatattttttgcaacagtgaatgaatgaatgggtctcatccgttctttggtcagaagggaggggcactgggtttctgttcccatagacgattagtataatatggctatttcccagattattcatgtgattaacaatgattttatctacctgctgctgtcgttcgtcgttgtccatgcattcgtttatttagttaggttgcttaaaagagatgatgcttaagaaacaaatgttttttaatatgcaaaaaattaaaaaggtacaaatgcaaatcacaatgcttaagtgtaaagtccaaatgtaaaaaaagcaaaaaatacattttgttgatcttctttccaaatgatcagtgatgtgatcttgaaatgcatcaattaaagattaattatactattaattattttgagcgattaaacaaattgattccgtacggtgatttcatttgacgccctttcttcatttttgacgcaatgacatggcacacaatgttgtcaatgcagtgcaatgtttcgtcacgacgcttatcccaaaaaaataatgaaatacaaattttttttattgtatgtatattttaaggaaattcagggttcaatggaaaaatattttaaaaaattatttgcattgtgagacacagacaaattcgaaatgttcgaatctacagtgtttatgaagccaacagcgggtgcactatgcttccccccatatcgtttatcccatatggtactgacaaaattggtggtacttcttgttggtgtaggtggccgggccatgccgacgacagggcccattgccggtgaccatgataccgttctgctgctgatgcacatcatc

SEQ ID NO: 33134 - DNA, 148 bp, Heterodera glycines
ccataatgattcgccatttacccggcacagtgcctacttctggatgtcgcaaattttaggcatatccgaagacgtagccaacatttccaaactaaccgaagatcaaattcgaaccgttatgatagaatcgcggcgcatgatgcaaaaa

SEQ ID NO: 33135 - DNA, 920 bp, Heterodera glycines
  unsure (1)..(920): unsure at all n locations
tttgacaattctgttaacaaatcgcattaaaaattacaatatttttctcggcggctcctaacggcaccgccggaccccgctgttccccaaaccggtttttttacaattactgctcagctctaatagaaaataattaattaataataattaatagttattttttgttttttcggcacttctttgggccgatgaaaaatgccgtgaaaatgggattgaatgttctgcagagaatcgtcgtcaaatgcttggcccggcattgttcaaaattcgctttccgcttttctcaaaagaggaattttctgaaaatattggtaaaaaaaataatatttatttttgggtcaaatctttttctgactatttaaattagtatattcacagcctttctcttatttacagttccatccggcattttaacaacagaagaagtggtcggcattgaacaataccataccaatccgaatttctgtgggatttccggtgacttactgtatccagtgcaatttcctaaacactggcgaatttggacatttggaacattaataatagacattggaaaagtgtccaaatttcacgagaggaagttgagagcagtcgatacagcaaaactttgtacataaatggacttccatggagaatatatgccaaaataaatacaaagatgggaagcactgacaatgagaaatgcttgggcttttaccttttgtgcgatgcttcagaagaaggtgctaattaactgctcattagtgctaatgaacagcgacaattaatggcattaagactcaatttggcgctgctgtgttcgttcggccacttttcgaattgtctcgcaaaagaaagcggcggataattcactgggactttttgtgaccatatttttaacatanaacagctggtgggggttccctattttattacttttg

SEQ ID NO: 33136 - DNA, 929 bp, Heterodera glycines
tttatggatgtcaattttgggacttttcttcgacgtggccatcagcgggttgtttcgtgacaaaaacaaaccagtttgatgttattcgaatgagctagacgcgctctacattgtcaaatgtatcaacaaagggtctaccgccactccctggcgagatatggcctgtcaaagcagaacggggccaataaatttgaatttttgttaatcttcggcagttgcctttatttcgagcctactctacttgtgcatcttttcccaatatggcactgcttccgaattattgaactgtttcacgactgattgttgagataatttttttttccgattcctttatctccaagcatgagccttataagtgattgttcatatccttctcttgaaaaaaattgtcactaaaaaaaacacgttttctgaatattaacaacaaaaatttttagacagtttctaaagaggaaggaaaaaaatttttcatttgcctaatatttatttatactgttgaactgttggaaatgcagctgatgccgtcggaaaagctccgattttttggggaagtttttttctttcagtttcaccactgattgttgaggcaattttttcgccaatttcttttgtctacaaacattatttattgcgtttcatcctgtagtgtgtaaaaaattttcagtaaaaaaacttgttatctgaatatttacaagcaaaatttaagaccatttccaaagaggaaggaacaaaaatttttgcctaaattttatattatattgttgaattgtttgaaatgcatctgttgtctgccgttttgaaatttttcaacttttcgcgaaaagatttcccagaaaatgcatgggacaaataaaaattaaacttctattatgatcaatttaaatttcctatcagtttcgggtttgctttaacacgctggcctatgaaaa

SEQ ID NO: 33137 - DNA, 1100 bp, Heterodera glycines
  unsure (1)..(1100): unsure at all n locations
ggggggggggaaagggggggaaaaggatgaattgggagggtttaccatgttngggcagtacaaaatcagggaattccgacgagagttccttcgaagagaaagtggaaattcttntagatgaacgaaaaccaaacgaacaccttgaaaatgtttttgagagacggcggaattggctgaccatttggcacagaaaaacagagaccatgtgcctaactggggaattggtcaagaaaaagcaacagaagaaatgtgccgaacctgtcccaagttgtggtaggggtcttgacctgtgagagaagagaaaaactttgggagacgagcgaaaatggcacaaaccgatgaccacaactcggattgtgttaaagggtgtcagattgaacgcgttgaagatgagatgacgaggcggaaaaacggagacaccccaaaacaaaatgagagatttgaattggacgcatatatctactgaaatgcacctgtttggcttgttcctccaaaaagcaacaaatgttcgtcatgtatttcatttggaattccttcctcaacagtttctgccacgtcggttcagcgagcgcatgcgaaggatgccacggagtgggagaagacgacggaggcgaacggactaaaaaaagcattacaaattgagcatttttgggtgactgctaaacgttctcgcccaatgccgtactttcccctgtgccatcgtcgttctgttggtgtctctccgcttccaaaattggccgcatattttccttcgtttggacattctcaacggcgccgtcgcttccgtccgcttctttcagagaagtgcttctttaagtggatgcgttagatataactaaacatatttaatggcttttattttacggttttttcctttgtggtgggcaaatgctttcgtcggctttcatttgtttccgtttgactccgtccgcttgcgaaatgcgttggaacgaaaacagcgaatgggtcagtttgaattgtttgggtgacattctcaagcgaacgaaaagcaatcaaacgcaagtgaaatcaatcgccaaagtataaaaacatcactgctaaaaaagcattcattttccaaaccaaggaaaacttaaaat

SEQ ID NO: 33138 - DNA, 943 bp, Heterodera glycines
ttataactcaagaatttttttgacatttcagctattttctgtctaataatcaagctgaaaatttttttcaagcataccttccctaaaataataagagccacacaaaaaaagcgaaaaaaactgtaaaagaaaaaagtctttatgaaattttttttcgaaaatggtcccaaatttgccttaacaaaattataactcaaaagttattggtttacataataaaattttgttttttgtattaataattttcttttttcgctagatccattattttatttggtacagaacggtatttatttgtaaaaaattttttaattattattttgtatctttcattaaacatattatcgcaaatagcattgaatacaaaaaactataagcattttgttaaaaaaattatcaaaatattttaaatagttaacatttttaaacgaattatattcagttattgttatcaaaatagtacgacactcatttaaaatttgccaaaatcacactaccgtcgcgatttgtgacggttggctttgacggccaaaggctattatgttaattttctttaattcattttcttgttttttggttttatgattatagtctattttatgattaatgaattttgtaagttatctttttatagtataaagtttttattatttttttttcttcttaagaaacaccataataaattatttatttttgtttaccttttaaaaagttataaaaaattaataaatattattatcttggccaagttctttctaattttttttcaatgtaaggtcgcatgcctttatttcaaaataaaaagtttaatattggataaaatagattcctacacatctttattggatacttcaaattcttttattattgatgatttaattgcaaataaaccttaaaaatatgtatttatatatttttgttttttattttcatgaataatttt

SEQ ID NO: 33139 - DNA, 896 bp, Heterodera glycines
cctttcagtatccctgcaaagtttggggcgcttctgataagtttctgaaaaaaaagttaagcctaaactttttggcatgcttaaaaaggaattaaaaatttttaaaatatttattcatctccctttttgataatataagagtcagagtgccttattcaacttgtaaataaattttggtgcgtttcagagcagtttatgaaaaaaaattatgaattaattttgcaaaaataaataaataatgaaccctcctccttaataattttcctgcgcccaaggtactcacactcagaattttgaaaattttttataaaaactgatgacgagctaatgtgataaaacaggttaattcttttcctttcagtatccctgtaaagtttggggcgcttctgataagtttctgaaaaaaaagttaagcctaaacttttttgcctgtttaaaaatgaattaaaaatttttattcttcaccatttttcataatatttcggggggactgcccgaatacaaaaaaaatcgattttttcaagtgtccgtttggggtactcaaacaattatggggagcaaaaatccaacgcagaattaaagtacaggctatagggaagctattcccgaaggattcggtctccccataaatctgggcgcatcggttcggggggactgcccgaaaacaaaaaaatcgattttttcaagtatccgtttggggtactcaaacaattatggggagcaaaaatccaacgcagaattaaagtacaggctatagggaagctattcccgaaggattcggtctccccataaatctgggcgcatcggttcggggggactgcccgaatacaaaaaaaatcgattttttcaagtgtccgtttggggtactcaaacaattatggggagctaaaatccac

SEQ ID NO: 33140 - DNA, 119 bp, Heterodera glycines
cggcatgccggatttccccttcggcctgaccatgggcatgatgctgtccggccccatgctgctcctgggcctcggcctgatcctctgggcgttgctgcgctttgtcgcgccaggccccg

SEQ ID NO: 33141 - DNA, 420 bp, Heterodera glycines
tctagagtcaaaaaaaatttcagtgaagaataaattgggggaccgtttcgttgtgaaagtcgcgcaacgaatcgcagtcaaaagtgtgacttttcctgcacaaaatttagggaggagaggttcaacttttgccaaattgctaagtgtttacctgtcaaagaccggcacaatttgtccatttcgattcggcacaatttctttgccgaccataaaccaaaatggcattccctcggtgttcagcgagaattcagtgagttcgatggttttcgtgtccaaaacctataagacaaatgacaaagtgttccttcatccctcatggttttctggccaaaaatcacccgaattggccccgactgaatccgtttgccaatcgatgcgtttggcacaggcagtggccgaagttggacggacgaaggcgat

SEQ ID NO: 33142 - DNA, 590 bp, Heterodera glycines
ttggtgtattaattggcacaaaaaagcggggtgattcatagtcaaaaattgacatcatcagagttttgcacagatattgacgggaaaaagcttaaacggaaatgctaatgcttaaacggactctctcaaattatatttcgacaatttattggaaaatttaataaggtgaatatatttttttaaattaacactcaaagaaatttttaccaaataaaatatgcttttattttcccaatgttaattgacaaataatttaatattattccgttccttttttccatcatttgtttctttccatccattccctttttcgtccttctttaatccgatcagaacccgttgaccaatgctggtggaaaatgaaattcaaatatttttaatttcttttgattaattttatttttcattttcgacaatacggacagatttaagatagtcatgttccttttcaaatgtattttttgccgaaaaagcattggaaaagctgaattaaccaattctgtacatttgtcttttgacaattaagcaccgcctttatacgaactatgcatagtaaaaggatgtgacaacgtctcatttttatgaatact

SEQ ID NO: 33143 - DNA, 768 bp, Heterodera glycines
aattcgaatattcttttgccattttaaaaattttctcaaaatttgtcgctaatcctttgacaaattccgaaaataaagcatctttaatctgaattttttaattatttaattttcattgagttttaagtctcacccaatttaaataatcatcgaatttcgaatacacaattatattatgcttgtcatcatttattgaattggctctccatgcttcattctcttttgccctttcttccgcatttttgaacattttctctaactttttgtcaaatttttctccacaattttctcgaattattccctctaaactttcatttgtttggcattcattcgctgtgtcaattgccaattgcaaaatgaattcattaattggcaatatttgttcattttccaattttattccaaatttcaatctctcctcatttaacaattttggttcgaaataataaatgaaaagtttctttaatttctattcaatatgtttactataatttggtttaaactaaaattgcgaaatttggccagacaaatcaccgcataaattattggcccattaatttcaattttgtttttaaatacaaattttggattcactgtaggaattccaacgtactctctaaacaaatattcgtacaaaatgtctaaaaattggcgatatttttggcattctgcccgttaaaattcgtcaaatacatccacaattttgtcacattgccaattatttttcataaaatacacaatggccaaggtgtggcctcatatttttgc

SEQ ID NO: 33144 - DNA, 930 bp, Heterodera glycines
tttccgggttttgaggtcaaaaaggccaatttgtctgttgggggccgttctattagaggttttttggaaaaatgctaaaatatgcacaaaatgccaaaatatgcacataaatcgcgaaatatgcacaaatatgcatatggaaagtcatcctagaagcttcaaaacaagctaaaaacatgtttttcgtgcgtttcaggcctcccacagtccaggaaaaaaatatgcatgtgcatataattccaagctaaaagggggcgggaggctagcaaaggggaaaagaggaagtgcttaaaaatttggctattttttaacgttaaaaattctgaaaatttttcctcggcggcgcatattgtcaccgcccgctccaaaaacttttttaaatattagctccaaatcttagtcatttttggacaaaatcttttaacaaattgtataataattttcaaatttttcccggcggcgcttttcggcgccgcctgacccccacccatgttccacatttttttggaaaaagcacgccgcgaaaaaatctgttttaaaaataaaaaaggtcggtaatttacatagccgggaacccttcacaaatgattcccaaaatgaaccctaaaaattcaaaaagaaaggatttttacatcacaaattataattcgttttccttccggaaccgccaaaccagtaaatttttttgttttaaaagggtttctacaaggttattgaaattaatttaaaaattttcgaccatagctctgaatctgccatttttgctatttttctcccgcggcccatattttgggatttttcgcctcaaaaaacatgcaaagcttttattcattttttaaataaaatttgaaaatttaaaaaaaaaattttctttgaaaattacggattacgggaaattgcggggttttttgacccccgcaattgcggatt

SEQ ID NO: 33145 - DNA, 845 bp, Heterodera glycines
tcatcaattgttagctcccgttgacaaacctctttgagattggggcaatggatgttgggctaccgtatcagctattaaaatttttgtttttcaaaaaggatactaaaactgggataaccccattcagagactagtcaaaaaaaataataataggcttggactactatactaattagaaattttagaatgtgtctgttaaatgcaaaactgttgtgaaaaattgttataactcctttcagagaagagatagaaaaaaaataaaaatagggttagagagcccgtgaacagctgcatcggatgcaagtgccgccgttgctgtacgcctaacagttggtgagcaatgacggaaaattgcttaaaaaagaaaccaaacaaactcatcaattgttagctcccgttggcaaaccgaagggtacattggggcaatggatgttgggctaccgtatcagttattaaaatttttgtttttcaaaaaggatactaaaactgggataaccccattcagagactagtcaaaaaaaataataataggcttggactaccatactaattagaaattttagaatgtgtctgttaaatgcaaaactgttgtgaaaaattgttataactcctttcagagaagagataaaaaaaaaataaaaataggtttagagagcccgtgaacagctgcatcggatgcaagtgccgccgttgctgtacgcctaacagttggtgagcaatgacggaaaattgcttaaaaaagaaaccaaacaaactcatcaattgttagctcccgttgacaaaccgaagggtacattggggcaatggatgttgggctaccgtatcagttattaaaatttttgttt

SEQ ID NO: 33146 - DNA, 1024 bp, Heterodera glycines
cttatttattaggaatatctaaaagtgtctctagtaactctttagatttagcatgcaaaatttgtgtttatattatctcccatcacaaagtaattttttgtaatttttataattgacaaaattttgctaatttccttccataaaactcaaatttttcgaatttttgggcggtatttttttttaaatttccaaaaagtcagtccttaaaagtagtatctttttgctgttgcagcatttttttaaaaaatggccaaataagctctaaaacccccccccccaaaaatagcgaattatgcctttattcgctaaaatcccaaaaatatgcatttatatgcactaaaaacttcacaaaaaaaaaaattaatgcacagaaattttgtttttgagccacctttcttcatattttaggaaaaatatgcaaaatcaatcaattgcaaagcccaatacagtaatgaccaaaggttttagagggttttaatattcaataatttttatttttttacaacgattacaaaccaaatttactaacaataagcacatgaccgttagttactgtatcgtttgtttgtttttcacccactaatttcgcaatggaattttgcctttcaatttctgtttagataacttatcagattatgtatttatatctcataattagggatttgatttttaggtatttcctatttttttcctaagctcccagtggcctaaaacgcacaaattgttaagctacttttcgagttattagtgcctattttctaggcttttatttttagagcctaaaagcctaaaaaaattttgaaagaacctatttttgcctattttggtattttgcccaaaattattaacaaaaagcaataaaaacgaaaaatacaccccaaagaatcgacctaaattttttttttaatttttttcataacaagaattttttgatttaaaaaattatttatctcaatacagatttggcctaaatttttaaattttttttgatacattttgtcatgtcattttccaccaataaaaa

SEQ ID NO: 33147 - DNA, 1479 bp, Heterodera glycines
  unsure (1)..(1479): unsure at all n locations
aatggccaagttcagtcagttcaaattggaaaatgaggcgctgcaattggattttaagagcggaaaaagtgccaaacaaaaaaataaaaggctgaaaacagatggaaaggcaaatggaatagaatttgagcaaaaaatggaaaaaatgttcaggaagataataatagagaatgctaaattggcaaatggaagctcatcatcggcattttcatcgtcgacatttccatcatctgcgtttccgttaccgatttccatgtgcaccgtacctatttatgatgccgctttgcgcgtgccaatatatgacatgagcgatgctgtaagtttctcgaaaaaacaaatattcgggttagggctgccattcgacaaaattactcggaaaggcttccggaaaaaatgcgtcagcaatattaatttccataccaattcaggattagttttcaaattataaaactactgtatctctttttaaattcactgactcattttccggtcaagcttggaaaaataaagaattacagaagtagccaaaccagattgaatttttgaaattcctgccggaaatgccaaaagatttaaatggttgttttttcgtgccatttttgataaaaaatctcaacacttgcagattgaagaagaattatttcctaaatttgtgaacggaagtgccgatttttccacacattttgctgctgtaccatcaaataaaattaaaaagtacgaaactcatcttggcctactgtatgcgatgaaaacaaattggcgttgtgccaatgccaaaaataaaattgacaacagctgcaccaaatatcgccgatacattgacattttgtatgaatatttgttcatgatgcgctatgggattaagtctgtgaaagccgatgtcgagactcttgtagggccacggtaatattatgtgtaaagaagcaggaagttcatgggttacacgaattacggttacgttccctttatagtcattcgtcgtaaagtagtagttagatgaaagtgttctggatattaacccttaactattcccctattttcaggaggggttttccttgctctctcatcttattcatgtccggaatcacccatgtaaagtctcaactccctccccgattaaccctaaaatactatcattcatctcaccatagcgctaaagaattttcttaggcggtggttcaattagattcttatgatgttttaaaaaccgtaatagccaacgggtcttaccactcccggtagcccctgagagaattagagtgaacggaccgcgaaacatttttaatgcctcttatttatttgatctatttatattttcatagggaaaaaatttcgcgcatttggggcatatccagaaattatcaaaaaatgatgttccgaaatgcaagggtctgtgctaaaacgcctgctccgngtctcgtaatgtcaggggcagtatagaaaacacttaattttatgtgggcagttcatttttcaatt

SEQ ID NO: 33148 - DNA, 945 bp, Heterodera glycines
  unsure (1)..(945): unsure at all n locations
atgaactgacaaataaaaattatgataaaaagtgcaaagattagcaaactttaattatttttataaattgaatacgatcaatataatcgtttactaatcagcaaatttttgtgaatattgaaatcctaatgtatagtgaatataaaaaacaatttacgttatgcgctttggcttttgaaaaatgaaaaaataaaagtaaatcttctaatatcattttaaaaaccaaaaagagattaagcaaaaaataaatgaactagctagataaaattattttataaaattagtaaaaaaatcctttatggtcaaaatcatacttatatgcatattaaattcaatatattaatataaataaaaaggaatactgactcatgaataaagaatgattgatcaaaatgctgaaaggaatttaaaagaagaaaaaaacaatttcacatattaacttggtgcaaaatattaattaaaacagactcgataaataataaatttggttcttcccgatcaaaaagaaaaaaaaaatgaaattattagcaaaaaacaacagttactgaagaattcaacaattgataataaaatataactttataaaataaaaaatcgaagacacaaatgaaaggtaattagagcgagtctcgtaaatcaacatcgcttattaaactcaggtcatcttacagtggaatggtaacaaatcatgaaaaaaataacgtagatccaatgaaaaatgattagtcgattttgtaatttaaatttttaaagtttgtaatttgctttttgttccaagaagcttttcaacccactgatatcatgtcgtttaatttcgaacaaaaatatacttatataaacattaaattcaatgtaattattaattaatataaataaagacaaatactgactaatgtataaaagaataatttgnttanaaattcatcaaataagcgtaaatcaact

SEQ ID NO: 33149 - DNA, 930 bp, Heterodera glycines
aaaaaagtcgaaatttttgaagttttttctttatattttttagatgcttgtaaatcttcgctttttgtaaggctaatagagcatgtgaagcgctcttgaatgataccaagattgtttgatttggttgaaaaattaaaaaatttatattccaaaaacttgggcgctggcgccgaaacgacccattccctgaactgcttgattctgccggtacggtgttggctggtggtgagttgaccctcccttttttatattttcttcttttttacgctttatgtacaatttattttctgtatgttttgctttactttttttgattggacatttgttttcattatttttttttactttctatgggtaaaaagcattattcattaatcgtctcaaaaattaaaaattatccaccgccacctatcggcaccgtcggactctcagtttgttatgtttatcaattgttgaacgcctaaaactagagctcagtatattaaaaaagcctggacctagagaactgaattctatgtttgatctgggcatggatttcctggacaaaagtccatgaaaatccaggcttgataaccaaaaaagtcccaaaaatcattttatagtcatttttaaatttatttaatcatttttaataaattggaataaaattgatcactttaaaaaatcagatatatatccaagaaatccatggtctttttttcatgtcaaatctgtcctagattttcttcatatttgacttattcctggcttttctggaattaatccaggaaaatccaggtccatgctgagctccaattaaaatctaaatttgtttatctttttttaaataaattttgatatgctaaaattattatgaaaaaattaattatttaatcttccaattttaaaaatccaaatcccgcgcccgatcatgtttcaaagctagttttt

SEQ ID NO: 33150 - DNA, 796 bp, Heterodera glycines
  unsure (1)..(796): unsure at all n locations
ttcgccgttttgtcctccgaattcgcccttttaagatccgaattcgccgntttgncatccgaattcgccgttttgtcctccgaattcgccgttttgtcatccgaattcgccgttttgtcatccgaattcgccgttttgtcatccgaattcgccgttttgtcatccgaattcgccgttttgtcctccgaattcgccgttttgtcatccgaattcgccgttttgtcctccgaattcgccgttttgtcatccgaattcgccgttttgtcatccgaattcgccgttttgtcatccgaattcgccgttttgtcatccgaattcgccgttttgtcatccgaattcgccgttttgtcatccgaattcgccgttttgtcctccgaattcgccgttttgtcatccgaattcgccgttttgtcctccgaattcgccgttttgttctctgtttttggcgttttgtcctcgttgcctcccattttcggctcctctctttcctcctccttgcctgttttgttgccctctttgtcttccgttttcccttcctttttcgccttcctcgcagctttgtcgtcgtccttgtcttccgtgtccgcccgcttttcagcactgttccatttgtcctgtttaaacggtcattgatgattggtttgcgataaactttgagcttttatgcttacgtttttgtccgattgtatgtccacattcttctgctgctcgtcctttggtcgctcatttggtgggagacaccaacagatggcaacgcaggtaaaaatgaacaaaatgaaaaaacgcatttctttct

SEQ ID NO: 33151 - DNA, 539 bp, Heterodera glycines
atttcaacgcatccaccgaaactcgccccaccatttcgcattacgacaccattatgatcataggagactgccatgataagaccgggacccatacaccggaagcgtttttgtactccccgaaggtgagcaaacacaaatattgacttgctcaagacacaaaatcgactatctgaacaaacccgaaacagaaacgcagccgcacgattcagagctatacgacgaagacagatctctatccgtcgtcttattgatagccacgttatttcacgtgatagagcaatatgaaaagctgccctcgaagactcaccacactatctttaactatccatttatttacactcatttcttttttaacaaacaaaactgtttttaattttcctgtgtatgcacaacacacgcctattgttatcccttttatacattttttttgtggtcctcagataaactccaggtgcacatgtaagctggtcaattacttgactctttccctttgtcatcacggaacttgggtatttattcttcttattattaacgcttga

SEQ ID NO: 33152 - DNA, 931 bp, Heterodera glycines
  unsure (1)..(931): unsure at all n locations
cccgattgatgtaagctaacatgaaaatggtataatttcttgaataataaatggtgattaaaggaatttagtaaatataaaaaactaatttaatcttagcatatatttaaattttataaatattaagtacataaaatgaaacataatttataaataaattctaaaatctgataaaaacaaaataaaacatataaaacaaaaaagaacttgaaggaaaaacaactttaaagcatgccgtgttaaagaatgactaacattttgaggaaaaaaaagcaattaaaagaaataatttttgaaaaataatataaagtgaaagaatataatttaatgaaactaatcattatgcttattttatatcggtatcaacaagactacgaataattattttaatgaagccttgtaaattaatataaataaaacttctcacggaactcaacaacatgatggagaaataatcatgaaaaataattacaaattcattgtaacaaaagataaatccaaaataattaacaacagtgaaactgcgttttgattctggtgtcaagtgaagggaatagaaattaaaaccatttaattagttaaattattcataagaaatgtgtacaaaaagtttttgttaattgtttaaaattgatttatatatatatatatatatagatagaactttctcaagtataactaaatttttatttttttgaaaatcatttggattgatagctttaagtgttttctattacccgtcagaatttaaaacttttttttgtttttcaaaaaggtaaagttattgccaaaagaaatcaaaatcgaattttatgtatgttcattaaattattaatttgcataataaagcggaaagaattanatggattaaaatattatggcgcatatgtaatcctgctgtnaactcactcccatttgtcttatctaatca

SEQ ID NO: 33153 - DNA, 1348 bp, Heterodera glycines
aggtaattagaatatttgcccatggtaaatggcaccgatccccctaatattaatgcgtcttggtcataaaacttaacaaattctttttgacaattaatacatttcagccaaacaattttcttgcttaaaagtgttctctccaaggatgactcattgcgaattggccacttcttcggccacaacaatcgacgaattgcaaaacggcgatcgccttcagtgtgccactcgaatgcaaaagttttccggcgaattgcttttggtagaccgtcgcgagggaatttttgtgttgcgcgaaaggaaaggcaatgagcgacagtttaacattcattttatccgttttgctgagcttcaatcggtgcgtttgttaatttttttgcgcagcacttttgggcgacgcaaaaaaagggaaaaaataaaattgggaaaaacaatttaaatgagataagtcaaaatgggtcctttttcggttgcttttcctattttttgtccatttctcccgtttagctgaagaaactttcatcccctccgtccaattttgatggcatttgccatgtcccaacggattctccggcgaccgctcgcgatcggttggtcaaagcggagcagcgactgagccaactttgggtggacaaaacgccgagcgaagcggcgaaacgcacttttatcgaactgaagagaatgtgagagagagagcaaagcaaatggacttcgcttaggttttgacattaatttacaaaatacaaatcagattcgacgacgtcgtttgggacggggaaagtatcaaaggtaagcgaacggacggaaggaatgacgattgttcactttgttgacttattgcgacttttcagtgctcaaatgtgtcgtggtcaccgcaccgttcgatgaaaatggcgtcgaatgtatcgactcgcgcgcttcctccgtcggcacattggcgcgagtgaagaaaattgtcagtgaattaagcaaatgaggttttgaaagcaaagcccaaaaacaattttgcattccaatcattgttttcttatggcatttctgttttgggacaaaaaagcaaatggttagaggcaatgccatgccgtgtctttcgcttcccttttgtacgtttttgggcttcccttttctaagtccccgtcgtcctcaccacttttttcttcctcttcataatgactatttttgttcctttctttcccttaccttctgctccttttttccctttctcctttctccctatctctccgtttctctctctctctctcgctattctccccccccccttttctccttattccctttttgattttctttcaaacatcttccccccttcctttctctctctctacttctt

SEQ ID NO: 33154 - DNA, 916 bp, Heterodera glycines
agtgcgctaggttcgatgaaactttttaaaatataagcctaaactttttggcctgtttaaaaaggaattaaaaatttttaaaatatttattcatctcccttttgatagaaaaagcatcagagagccttatttaacttttaattaacatttggtgcgtttcagagcactttctgaaaaaatacttatgaattaattttgcaaaaaataaataagtaatgaaaaagtcagaattttgaaaaattttaaaaacaacaagcgttggcattttttcaggttaagttagtcctttacaatggagaaggcctgcaaaatttggagagattatatcgattttagtgcgctaggttcgatgaaactttttaaaatataagcctaaactttttggcctgtttaaaaaggaattaaaaatttttaaaaattttattcatctcccttttgatagaaaaagcatcagagagccttatttaacttttaattaacatttggtgcgtttcagagcagtttctgaaaaaatatttatgaattgattttgctaaaaaaataaaatagtgaagctttaaaaattaataaaaaattttaaattcagaattactggagttagcatcatagcagtgcttttccttgtctttttgatgctctcgcaaaatctggttcgcttctgaccagtttataaaaaaaaagttaagcctaaaatttttcgcatatttaaaaagcaattaaaaatttttagattttttattcatctccctttttgatagtgaaagcatctgagtgcctaaaataacttgcaaataaaatttggtgcgtttcagagcagtttctgaaaaaaatatttatgaattaattatgcaaaaaacaaataaataatgaactctcttccttaatattttcctgcaccgaggaactcactcggccg

SEQ ID NO: 33155 - DNA, 1053 bp, Heterodera glycines
atgggttttggtctgatcgaaaaatgtccgctgggagcgtactccgcacaagtgtcctctacaaaattggtgttgatcattttttgctacgactaaccgtattccgtgtacaagtgagcaaaaattgccaactcgaaaaccggaatttcgtttttcgggaataactctgcgggatttgcttatatccagtgcacatagaaatgattatgtgtaattttttgagctctatccaaccgtgtttttggatttttaaaattttcagaaattttcgagctaggcctaaaaaacggttttttggttttttaattttctgattttttaacgaattttccaggaaaaacggagaccacttccaaaacatagtttttcgagctctatcgattggtgacattttcagaaaaattttggtttttttccggaaatagaaaaattttttgctctgaccgggacatttcagtcccgggcctataactcgtcgggagttgattttagccaaaaatcttgcaagagcatttttgtagagaattttaagctctatccaatgtgttttatcccatatttttaacatgagtataaaaaaagttataaaataaaaacggatttttaaatgcaaaaccaaaggggggaccccatggtttcgaaattaatggaaaatttttttgcttctaaaattgccaaaaaatacttttctggggtaatttgaggtgcagggcacgaatatacactttatattgagtttcggatattttggagagtggtaaaaaattttgaaaaaacatcaaaaattgggccacgaaaaaatccaggaatttttgaaaattcataactctcctcaaaagggtcaattcgtctcaatttaagcgtaaaaaattgagaaaaatatgctgaattttatattttttattaggtttataaatgccgaaaattcaaaaagttaggcttggatttctggaaatatttatttttttattaaaaagttcataactcattccaaaaaaaatgctaaggaatatttaaatattcataaaatccgcaatatttttctctacaaaa

SEQ ID NO: 33156 - DNA, 1261 bp, Heterodera glycines
atatgggataaaaatgcaaaaatatgggaaatataggacatacatcgcaaaatatggaaaaatatggaaaatatggatatagaaatccatcctagaagctccaaaccaagctaaaaacatgtttttcgtgcgattcaggcctcccacagtccaggaaaaaaatttggatttccatataatttgcatccctaaccattacaaacccaatttcttaccagtgtatttttattcaagggctttaagaaataaatataatacaggttaccgtgccacaaaattttctttttttaagaattttacttgtaaagatttttaaaaaagccatgcttttggccaccaatttctcattccgccgctgtttcctccaatttaaactcggctttccgtcccttttttgtctccgtttcacttcgctctttttgcttgccattgtctccattttgtaccttcttcaaaactccaatgataccaaaagcatttcaaaagcgagcaaatggacagtgttttcgcttgaaaatggccatcaaaatgacagcaacaaatggacagtgccgagcacagaatgccaaagagtgttcggcggtgacaaagcgttggtccagcgattggtgcggcacagacgcaaaattagggacccaccgccgaacgaattggcgatgagttgtgatgcgatttgggcacggcatggagacgaagaattgttggcacaacagcgatgggacaacgacaaacagcaacagcagaacgagaggaggaggacgacgaacaacaatggcacatccattgaaacgacagaattggaacggcaaatgccaatggcattcgcgcgggttgtttacacagtgagttgcaccggcaccggggagcagttcgtttcccaccccctcgccccgaaaaatttttttgttttgttaaattttcttagtttttttttctaggaaaaactaaaaaaaatttgaaagaatttctccaagaatctttttagactttttagaaataatttttttacataaaaatcaaaaagtttcccttttggttttttctggaggcgctatgtttagaatgccggttttttctagtttgatgactttttaaagaatgggcggcacttggaatttcaaaatgcctgttctttgctctgttcgaagcttttatttttttcgggaacgaaacgcacgcaaatttttctacaaattttcacagtttccgatgggcccattaattgtgtaaatctccatttgtcttccctcccccccccccc

SEQ ID NO: 33157 - DNA, 849 bp, Heterodera glycines
caatcgccattttatttcacagagggatttttatatttagaggtcatcgcagaaaaacggctatctctttttttgataaattttatacacatacaaatgctctcgagcacgatagggagggcggtgcgcaatagaccttttatttttgagggaatttttaaatttatactctatcccagaaaaatggctatctctttttttgataaattttatacacatacaaatgctctcgagcatgatagggagggcggtgcgcaatagaccttttatttttgagggaatttttaaatttatactctatcccagaaaaatggctatctctttttttgataaattttatacacatacaaatgctctcgagcatgatagggagggcggtgcgcaatagaccttttatttttgagggaatttttaaatttatactctatcccagaaaaatggctatctctttttttgagaaattttatacctcacaaaagcgcttgcgtatgagacggagggctgtgcacaatcgccattttatttcacagaggatttttatatttagaggttatcccagaaaaatggctatctctttttttgataaattttatacacatacaaatgctctcgagcatgatagggagggcggtgcgcaatagaccttttatttttgagggaatttttaaatttatactctatcccagaaaaatggctatctctttttttgataaattttatacacatacaaatgctctcgagcatgatagggagggcggtgcgcaatagaccttttatttttgagggaatttttaaatttatactctatcccagaaaaatggctatctctttttttgataaattttatac

SEQ ID NO: 33158 - DNA, 469 bp, Heterodera glycines
cctgacgggtttagcagcggagaatattaaaaattccggcgaatttttgagaggtgcggcgaatggcaaatgccaaattcgtacatttgttttactaatgaaaagggttgtcacttttcttgcataaagcgtttcggaatgagttcgactttttcaaatgtcagcttttcctttgcttctccaccgttgccatcgaatttcgctcggtttgccttctcctttaattgtgctaattgctttccaccgtccgtcgatggcacaacacattttgtccttatgtatttggtaatggcctttcctcccctccccattttcattttattacaccgatggatgggcccaattaaggcttcttctccccattctgaagaaggggagaaagaaagaaagaaaagtcggatgagccaaagaagggagggaattggagggggagaaaaagtgaatgataggccggggagaggggggggca

SEQ ID NO: 33159 - DNA, 796 bp, Heterodera glycines
aattcaagggacctcgtggagcagggcaggcagcaatcctctgaggagctcaactccattttcccgggcattgacttgcgctccaaacagggccaactcagccacgaggagttggacgcgttcattgtccacggcacgtttttttccattacgactcatggcacaaaattaatttatttcttccctcattaccgctagaattagaaaaattttcaagaaattttttcatattgtttagcaatttggctaaatatgacaaaaatgggaattttcagcgaaaacggataaaatttctactctttgaaaaaaaaattatgggagagaattttgcgcgctgttaattgaaggtcgctaattatagctaattggtcccttcattttcagcgaatatccgagttgaccagctcaagaggcaattggcggaacaccaagtcagtgttttgcgaatcaacacacacacacaaatttattcctttttaggccttggaggagcaacgagttttggaggcggtcgaagaacagcgaaagttggacgaaaggtctgacatcagtcaaggacgattcctggcttccagtttggattgacgggagcagcacgcccccccccccccgcgccccgaaaattttttataagagccaagagaaaaattttcagcgatcttatggaaaatttcaaagctaattgaaaaaaaaatcatcataaaatcaaaaatcgattgaaatatttttacttttaatgggttgtcgtttttgggtttgtttgtatcccttgtccatttctcttcatttaacttta

SEQ ID NO: 33160 - DNA, 639 bp, Heterodera glycines
tcgcttcaatctgttaaaatatttatatgaatagaatttctccctaagtaaataaaatttactgggcgtttaaagagaaaatttactgggttttttataattttcttcgtttttgttgtaaatctggcacgaaatcctgatgacttatccgatgattgacttgttgttgatttctaaaaaaagattaatttaaagtttttaaatttttcggaagaatgacaaaactttttaattcaaaaacccatagaagagtttgacacttcaaaaaaacctggacctagacatgaacctcaactcaatgttggacctggtcgggggtcggggtggggaggagctcaattgtcgggggtcggggaccccgatcggggaatgattaaattttattttaacacaaaaaataaatttttctttttcaatgctcgtaaatcttcccttttttcactttaatcatctgatttcgttagcgccaataagagagagttcaagctggcgcctttaaaccagggcttccatttgttcttatttataagaatgttctgaatttgggctagcgacgaaattattccgatttcttaaaaaaactcataattttgaaattttatggcattggatttaattaaaaaaattggcctttttggt

SEQ ID NO: 33161 - DNA, 1176 bp, Heterodera glycines
  unsure (1)..(1176): unsure at all n locations
cgacgaggaaccaaagatatcagctggagggaagaaatcttttgagcagaaaggaagagtaatggaagaagcagcgacagctgcaaaaaggagtcaacgaagggaaaaaggagtggattagcagcagcagcagcagcagcagaagaagcagcaattcatcattcaccatggagggtgacgaaggggcaattggattagagggagcaaaaggcgtggggggagggggggggggggagaagcagcgccatagggacgggggaggaaaaagcatggaaaagtcgcagattcccaaggaagaagcaaatgtgaatgggtgccacacatcaacgccatccattcatatgtggacacatccatgctgaaaggttattacgagcaaagggacggcgcaccccaaaaatggggggagaaaatgggcaaaaagggggggagtaaacagttaattgtggtcgtcccacttcccctaccccccggggggactcggacaaaatgggggacggacggcaaaagtggggtaattgccctcatcttcgggggcagtgggcggaaggggcaaatgttggcaatgggtggtcgcnccgcccccctcttccggcacccacacattgcccctcccctcctttctttgctgccaaaactatggtgtggccactgagcgaaaattttttgccggaaatgggtctcaattggacccatccgccggggccgcgcaactgctgaccaaacgaacacaacaatgggggagagaaagacatttcgaggcacaaatgccggaaggggtgggcactgtttcggcacccgcccattgcgacaagcggcggtggcgaggcgtaacaaattggaatttgagaggcggcatgggtcacacattcccaacagcggaaattcaaatggatttacaaaaatggaatatttattttgtataagaaaaatggatgaaatgacaacaattgcacacacttaagctgagcccgtacttttttttgattgaatagattatttcttcttaaatccaaaaagaataagaccaagttcaagtgaatacaaacaaatgaaatcacaagaaaaataatttgttgggctttgagacacatggccaaaacaaatggacattttaaaacacaatacgagaaaatggcatttgaaaagacaacgaaaacgaaaaaaaaacaattt

SEQ ID NO: 33162 - DNA, 1008 bp, Heterodera glycines
ttgagtcccagtgattgaaatgttggtgggttgagtcccagtgattgaaatgctggtgagttgagtgccagtgattgaaatgttggtgggttgagtcccagtgattgaaatgctggtgggttgagtgccagtgattgaaatgttggtgggttgagtgccagtgattgaaatgttggtgggttgagtgccagtgattgaaatgttggtgggttgagtgccagtgattggaatgctggtgggttgagtcccagtgattggaatgctggtgggttgagtcccagtgattgaaatgttggtgggttgagtgccagtgattgtaatgctcttgggttgagtaccagtgattgaaatgttggtgggttgagtgccagtgattgaaatgttggtgggttgagtgccagtgattgaaatgttggtgggttgagtcccagtgattgaaatgttggtgggttgagtcccagtgattgtaatgctcttgggttgagtaccagtgattgaaatgttggtgggttgagtgccagtgattgtaatgctcttgggttgagtaccagtgattgaaatgttggtgggttgagtcccagtgattgaaatgttggtgggttgagtcccagtgattgaaatgttggtgggttgagtgccagtgattgaaatgttggtgggttgagtgccagtgattgtaatgctgttgggttgagtcccagtgattgaaatgttggtgggttgagtgccagtgattgaaatgttggtgtgttgagtgacatagtttgaaatgtatcttgactatgtttacaatactctatatggaatagttacttaattctttctcttcaatggtgcttttctgatgtaatgaaaatgaaacgctgcttcggatgcatggacaccataacggtgcattttcatacatttcttggtacttttctgttttgtgtacacatcctaaattttattgacaaatacctttttgtgccatccaaaaactccgtgcatcttttgtacattattttt

SEQ ID NO: 33163 - DNA, 641 bp, Heterodera glycines
tgcttcaattcggagtaaacaataaatgtcaacatttcctattcgtcgcattaatttgtcattcagtgaaagtggcaggggcaattgcctgcgcgaccccgcagaatcaatcgcttcgcacgaccatttgaaggacggccgacttccgggccaacggtactttcattttgatttatccataatcaaattgctttttcctctgtattaaatcccactgtgtttcctttttcggtttaccgctgatcagcagtgttcgtacttctggggaagagactttcaagtggaaattcccaacggccgctcttttgaggtctttgccctgatcaaaggccaatcagtcggtctctgattgtcttgattgtttgttaggatatttgtcgcattctttggtgcgggaacagtggctccaccatttccaccgctcaccccgccttggagggcagttggtgcggaccccaacgggtgatcaaagagaaatcggtccgggattgtttggctaatccttgtcaaacagtggtgccaccgtgggcaatgtgaagaatggcaccctcaaatgggcgacttcccaactgaagtggacggaatatgttccgattgaacttccgctgagaagcaatgtccgatcactcagcggcaaatca

SEQ ID NO: 33164 - DNA, 1056 bp, Heterodera glycines
  unsure (1)..(1056): unsure at all n locations
attaaaaagttgtagaaaaaatttcgcttttcgcatttcttattttcgcatattttggcttttcgcatttcgcttttttttcatttcgcatttttcagtttcgcaaatttcgcttttcgcatttcgctttttatttttcaatttggcccatccctgctgtcggcacagccaaccctaagcacatcgaatttaattttaattccacatttttcaaaaaatatttaatttatttagatgatatttgaaaatgaaagggcatgggatgtggtcgatcgttggctaaatgcccattatttttctttggaatacggcaacacaagaggtgaacttgaaaaaattgaacaaatgctgctcattgcgaaaggggcgattgtggaagacgcatatttcgacattcataaaattttaagtgtgccccaattttttgacgcaccccaaagggtggaaagcgatgaagatattttaaaaagtaaatatttattaaattctttcaaccccttcaaaaggggggtttattcgagggagggttctattcgaggatggggctctattccaggaagtgcggtatgtgagtcttacaattagcccatccccactcgcaacagaaaacagaaaatgaaatgctctagctttttaattgtataaaaacaatgcttttttaaagaaaattaattaatgatgcaaacattttattataataaatttcatgtttttgagcatttttttcatttttatgaaactttgaaaaacgtaaaaaatgggataatccctaattttcctaattagaggcgaaaagtcaaaatatggatttctgcggagtaatatctcatcgaaatagaaccgcagaagaaattaatactaatacttaaaaattcattcccgaatataattagccaaaggaaatcagttaaatcaataaaataaattaattcacttaagaattattggcacaagataatgttgttacttatgaagaaaaactgacaaacggaacacatcgtaattattttgtgagacgtcanaaaattttatgaaacaattgaaaaaaatgaacaa

SEQ ID NO: 33165 - DNA, 941 bp, Heterodera glycines
  unsure (1)..(941): unsure at all n locations
caccagcagatgaattcgggacatttttatcaacaatcttcctaaaattaaacgaattttggggtttacaatttatgcagatggcacatccatgaatttctgaacccggcaaaaatttatgaaaagcgaaatctcggaggcgcataaaattactaattatgaaaaaaaaatttaaacgcgaaatttctgagtgaaattcagaattatgaagtagatctatttccgtaaattgcaaaattcggataggtagatagaggcattcatataaatttacatttacaaacaatgaattaaaataataatgataataacttccgaccaaatttgttagctgtgttgcatgcatttctctaataaaaatgctgaaattttttgtcttaaatctaaaaaatctatggccctatatataaactacactttcaattttttttttcagttatactgagccgaaaatttcattgtctaaaatttaaaattttctatggccctataaactacaactttttcggcgtcttctacttaatacatatgtatgtatgtggtgcatcagcagcagtaggaacaacatcaatcacacaatgtttgctcacagttgatacacacacaccaattggcggtggtggcaattggtaggaggcgggtgaattttttgatggaaaaaaggtcggcggggccttcgtttttctacttggccaaaacaatggagcgcgcgaagataagtggatttttgattagcgtcaaggggggggggaggcggagaaaaagtggggtcaattgggggcggcggatgtttgattagtcatttgggaagaggacaaaagcagcgcggaacagggtttaaaaaaaattatgtaatagtanaataataaaaataggtaatttttaaggaataaaacaaatagatgagtaggcgtgattttgattatgaaagaaccaaataa

SEQ ID NO: 33166 - DNA, 360 bp, Heterodera glycines
tttttttttttttgggtggggggcggggggggggggcggggggggagaaaaaaaaaaaaaaaaaaaaaaaaaaaaaaaaatttcttttcttttttctttttgttttttataaaaaagaaaaaaacaccacccacccttctttttttttttttcctttctccaggaaggggggggggggggggggggggggggggggccccccccccccccccccccccccccccttttttttgtttcttctctttcttaaaaaaaaaaaaaagaaaaagaaaaaaccccccccccccccccccccccccccccccccccccccccggggggggggggggggggggggggggggggggggggggggggggg

SEQ ID NO: 33167 - DNA, 810 bp, Heterodera glycines
cttttggcgccaaaataggtaacaatttgtttgatggcccttagaggataaatattccatggttctttttaacttttctttttgatatttgagcctaaataaatttaaaaaccccgtttttcaggttaccgaggttttcgcagaaattgaaaaatggttctgaaacttcacggagacctgttctggccaccaagtgatagctcttacttgaagaaatatatttagttttcttttttcatcgtcttgaaaaatatccaaaattccaattacggatcaaaatactgaaaaatcgcaaaatccgtaacccctaattacggggtccaacaactccctaattccgtaattcgtaattgcgtgcagccctgatccatatcaaactaatcatatacccaatacacaaggtttggatgattttggaaatggatgaattgggtttgaatgcgttggggcatcattcctggcaatcgcttagttgtgaaacttttttgtccaaaaaatggcaattttgtcagtgatcaactacctaatttctctcttcttcattttttcatagcaatgaataatattgttgccaattttttggccacgctttgctccattgttattttcatcgtccattttcctaaatgtgctcaagctgtgacaacgacagtgaccttcggaaagggtgacacatcaacagtccatgtattgcataaaggtcaatggttgttcagctttgaaacagagcaagacggcaacgggatactgtataagaatattaacacaagacaatggacgggcttgaaagataatgattcaatcgatttc

SEQ ID NO: 33168 - DNA, 795 bp, Heterodera glycines
ttagggcaaattcaccaaatttaccattcagtcaaaagtcaaagtattccttaatttgaattaacgccttatgattttcatgagtgttaaattgcattttggtaaaaaaaaacattcgggtacagtaataacggaaaagaggaagacaaattgacaaagggttactgtagattcatcgaaagggaataaaatgtttttgttgaaaggaattgtgaaatgaacttatatgtacatatgtgtatgtacaaatacatacaatatttgtttttgttcttattatcgtataaatttggctttgcctttcgtttgactgtccgccttttttttattggttggcaaagtgtcactgataaataaatgatgataatcgagtcgatttggtgatgaaatacacaagtaaaaccaaccattaaaaccaaacaatttgaaaaaatggaaaattgggatttcaaagagaaaggcaactcgactaattagtggttattagtaattactaatcagttacaataatcagtgaacgtttcactcgctaacactttgaaatttaaagtgttgtccctcgttcatttgggtcaattgactgttttcgagtataaattgtctttcccccctccccccgggcgttgtctggtcccatttaatgagtcgtccgtccgtctgtcggtgatttggatcatcatcatgatcattagatcattcagtgattaccactcacattttagttaattacatagcaccgcaactgtgttattatcgcaactgcgacggactggcggagaaacatcgccgagccga

SEQ ID NO: 33169 - DNA, 1043 bp, Heterodera glycines
  unsure (1)..(1043): unsure at all n locations
cacagccctcctcatggccaacaactcttaagggggtttatttatttattttatttttttcggacaaaaatttgtacccaatgggtagtatttgcaatggcccttgttgtggtactcaacaatgcacttgagctgagggtacagtaggcggatccggtgcttcatgtagaaatactgttggactttgacatctgaacgcatggtgttggaccgaaacagaatttttggaaacttgccaagaaatccctcaaaggcgtaggtttccgcagcggctttcaccgaaaatgtgccgaacttgacctctttggtcttggaatcacgaccctggtaggttgttttgagttttttgccggccaggtaagcgttcgctttgttcaccgcctcggggttgttcaaatattctgctaaattttcgggtttacagtttagcagtttggatagggcagcagtcagagggagtaccataatctgtaaaaaatcaataaattggcttgggtttcactgtgtgtttaaattggcgcccttttgtatctttctctaaccactactctctcgtctatgtgtttgtggatgggcgtggcctatcgattaaaagggacagcccgtctggaggtcgctgcgcgctaacacccctctcactatcaatcaataattacgtgttttttcgcaggttcattttatgcttttaacaattataatcataaactatttcttaatcgtaatggccccgagaaaaatcaatgatcaattgttgtttgagaacaaaattaatcattttttgagttttttataataattttaaatttaaagaaatggatgagtcgaaacgggaaaatttttcccctcaaaatgatgatgacgtcatcacaattggagacaacaacactcaaacactgcttgacctgcaaccggggccctcaaaaaggggaagcaagcctcgcttggacaaatccatngagaaatgcttcccaatgaaaaagcaaaagcatggaagctgaagggttngcttttctgcaaattctttgaatagccaatttttagta

SEQ ID NO: 33170 - DNA, 911 bp, Heterodera glycines
gcgcttgataacgctcgctagcagctatccgtttgatcctggctgaactgatgagtacatttcaaagattaagccatgcatgtgtaagtttaacctgccagacagggaaactgcgtacggctcattacaccagctataatttacttgaccttgacttcttacttggataactgtggtaattctagagctaatacatgcaccaaagctccaatctccccagagcggagcgcatttgttcgccacaaaaccaagcgccctccgggcgtccagtgttgactcagaacaactaagctgatcgcacggtcttgtaccggcgacgtgtctttcaagtgtctgccttatcaactttcgatggtagtgtatctgactaccatggtgatgacgggtaacggaggataaagtttcgactccggagaaggggcctgagaaatggccactacgtctaaggatgaaagcaggcgcgcaaattacccactctcaacgagaggaggtagcgaccagaaataacgagaccgatctcttatgaggacggtcatcgcaatgagtaccatttaaaccctttaacgagtatctatgagaggccaagactggtgtcagtagtcgagttgattccagctctcaaagtgcatataattattgctgcgcttaaaaaactcgaagctggaactgtggtagtctactcgttgcacactttgtgcgttacgggaccacttgggaaattgtgcaaaccgatattacaaatattacaggtgaatatcctgacttcatttctacatattatatattcctgagattcaagagtatttccccgctcttattaattgtgggtaacatagtgaacccggacaaaaccctcgcaaaatataaaatttcaacgaccaaaatccaaattcgacgtacaaatgatctct

SEQ ID NO: 33171 - DNA, 759 bp, Heterodera glycines
  unsure (1)..(759): unsure at all n locations
agagaaaaatgggaggagaatggattgaatgtaaatacacatttgaaaataggattgaaaaatcgaaagaaaagagagggacatagaaaagcgacggagagcgaacggaacttatgttcagtctcaactcattcacctaacgacatgctatgctaactctcggcatgtcctcaccacacaaggacgtgcgtacgcaaagacagagaaagagatagactgggagcaaatgagggaaaaagggagcgaatatttcttttctggggattgcgattggaatggggtgagaaatgaacttaacaaatgaagagcaaagaaaatttcataaaaagtgcaacgaaagtggggagggaaagttcagttataaatcatttgttgaaaaggaacatgaatggacagggagaagcggctcatccgaaaaactggaaggaatttgctttacaattttaggtagattcacaaaagtgattgagtgaagaaaaaatttggatttataaactacaaaaaaagaacactgtgggtacactgcactgagaaaagaaaaatccagaacttttctttttggcattatgttcatgaatttaaagtggattctgcggggcactgtgtgcgtttcnggngttccagtttcggggccagcatgtttttggctataacttttttctttgtaaaccaaatccaacattgttggtgtcgttcgaaagcttaatctatttagaagctttttctaagatatcgctttgcgactagacaattatcaaa

SEQ ID NO: 33172 - DNA, 922 bp, Heterodera glycines
tgctttcgtaaacgccggacgattcagtacccgtcgaatatggacatttcagcacccattttatttatacataaaatggcaaatacgcccctaactcgcatttttctcatcattttaggaagtcattcaaaaacaattgttgcaataatttaagctaaattaattaaattacatacaatgatgcagcggaatgagccaaagcaacaaaattggttttgtttttacgtgggtacgtacagtcagcacaactgttattataatgacggtaacaatccatttcgtccatctcgcttataaaatcagtgaatgctttctcgtcaataacaataaattggtcaaagatattttcagccatagtgaaaatttggatttgattaaatctaaattttataaaggaataacaaatataattataaaaaaccgatttttttttatacaacaaaaagaggcaaaataaaatgcaaatctaaaatctaagaaaaccaatttttaagaatggaaacttaatgccaataacaagctgtggataatgaacataatggtattgaattgtacaaaaagtaattaaaatttaattttataatttatttattattaatataattgataaataaatacaaagagaacattcttaaaatatacactcaatttgcatttcttttctcttattttgaaactaataagcaataatatgtaaacaaacaatgaatgtgtaacaaacaattttttatttacttcttacataagatcaaaggactggggagttttcttaaaaattttcaaaaaaagtacagtaaatggagcaaaaaaaaaatggaaatttaattttaaaatctaaataaaggcaacaattttttgcaaaaacataacagtccaccagtgagtgaacccattaaaaaattccatgtgagatatgcttatt

SEQ ID NO: 33173 - DNA, 819 bp, Heterodera glycines
cataattggtttgagtaccccaaacggacacttgaaaaaatcgatttatttttgttttcggggcagtccccccgaaccgatgcgcccagatttatggggagaccgaatccttcgggagtagcttccctatagcctgtactttaattctgcgttggatttttgctccccataattgtttgagtaccccaaacggacacttgaaaaaatcgattttttttgttttcggggcagtccccccgaaccgatgcgcccagatttatggggagaccgaatccttcgggagtagcttccctatagcctggactttaattctgcgttggatttttgctccccataattgtttgagtaccccaaacggacacttgaaaaaatcgatttttttgtttcataaatatttttttcagaaagtgctctaaagcgcaccaaattttatttacaacttaattttagcactctgatgctttaatatcaaaaaggaagatggagaaaaaattttttaaaaaatttttccttatattttggttatatcgttttgcttttggtggggtgcttggaacagtggaatcatgcgcacccgtccgatctggcaagttaagcaacgattgctgactagccaaaaggttcggtgccgtgatgaaacgaaccagcactgcttaccccgcggcacccggcacggtcccccgaaggaatggatttaaataaattctctccctcggggattttttccattatgtcgtccgttagcgttcgattgctctagtcatttttaaaaatttttgttgaaatatttgtcgtgctctgaagggcgggggggggggg

SEQ ID NO: 33174 - DNA, 825 bp, Heterodera glycines
  unsure (1)..(825): unsure at all n locations
aaaacggacagacattttaatgacaaaagcattgaattatttgacaaataaatcccattaaggaaaagcatgacgaaaacaaaagttaaatcaaaaatcgaatcctgttaacgattaccagttcattttctattaaatttgttaactttgctgatgagtcagcatcgtcccttaatttaagtaatgtttgtcaattaagtaattattccactttttgtaaatgcgaaaacaaaaaattaaagaattaatttgtaattttaaagctaaagaaatttaattttgtaccctcaaatgaaatgctgagataagacaaattaaaaagaaagaaagcatttaatttgtctcttctcactgcgtgactttgcttcatcgattgcggcgacattttataattttctctttcttttcatcagtttcccaaatttttctgattatttttaaaatacttttataattaataatttatttttaattttaaaaagatcaattatgtttttgtgtttattccttttaattgccatttcaattattccaaccacaaatggctacaaaatgctcgtctacagtccgtcagtaagcaattcccatctgatttcaaatgcccgggtggccgatgtgttggccaatgatggccatgacgtggtaagaaattggcattttgattataatggcattttctgcgcacaaataattcaaaaaaataaataataaatttgcggtattttcaaatcgtaaattattttaatttcaattttcttanaaatgactatccttttcagactctgctcgaaagtcgaatgatggctccgctggtgaaaacttttc

SEQ ID NO: 33175 - DNA, 589 bp, Heterodera glycines
gagaaacataggcgggcggagggacggacggcggacggacatacggagaacgacgctggttacccatcaatctgagaaaatggcagaaaatcctggcaccagtcgcggacccccaaccttttcgagctaagcgaagcgatccccgacactttgaagttgccgcctctgctgccgttgcccgcggcggcgtttccctcccgtgccatccctccgcctttgcgcgtgctcagttgccgcttccatcgtttggtcaaatagggcgaatatttgcttggctccaactgcacgaattggtgcgaaagttcgtccgactgatcgcggcaaaagtcaatttccaacttaaatgtgagaattgttggcatttattaatttaattgcttttttgtcctctctacgacctgaatttggtgctgaatgaggtgaatgtaattgtaaagcatcggcaccaccaaaacggcactgactgtggtgagagtggccacggcgatggcaatgaaagcgcagcgccgcagtttgagggccaaagcgaattcgtcaaattggggggagacgcgcacaaatccctcgggggacggcgaatttccctttt

SEQ ID NO: 33176 - DNA, 572 bp, Heterodera glycines
cgtatcgtcggtctgattattagtctggaaccacggtcttactcgtatcgtcggtctgattattagtctgggaccacggtcccactcgtatcgtcggtctgattattagtctgggaccacgatcccactcgtgttgtcggtctgattatcggtctgggaccacggtcccacttgtattgtcgatcagactatcagcgtgagactacgattccatcaatgcctgtcaagggcaagtattgacatgtcgtcgtaacctgtagaacggagtaacctcggtgtgcggttgtatgcctgctgtggattgctgctgtgtcctgcttatccacaacattttgcgcacggttatgtggacaaaatacctggttacccaggccgtgccggcacgttaaccgggctgcatccgatgcaagtgtgtcgctgtcgacgagctcgcgagctcggacatgaggttgccccgtattcagtgtcgctgatttgtattgtctgaagttgtttttacgttaagttgatgcagatcaattaatacgatacctgcgtcataattgattatttgacgtggtttgatggcctcc

SEQ ID NO: 33177 - DNA, 943 bp, Heterodera glycines
caataaaaaaacatttttatattatttaagtcttacacattgtaattactaagtgattatcactaattaatcagtttcaatttttatactttaatgatgacaaatgggtggaacctttaattgaacggtcttttgctattgatttgcaaaaatcacttttaaaactaaaaataggagatgattataaaaattgaacaattgataacaaacatttcttaatttactttcaataatttatttaaatatcatttaaattcgaaattataaacagacaattttttcattttcaactttccaagaataaatgtgtccttttgcttgtgaaaatggcaaaagaaaatgtcgcgcgttaaatgttattaatatataataatagggatgatgggcttgttgatgacacgaagcagcacataagaataaatgttaatttgttaaataaaatagaaaattaattttttaattttgttagtctgctgcactcaaaagtttggactttttccttcaaaaatatgttagcagataagttttgcactacaaaagtattaaatttcagagaaaaataatttggaaaaataatgcgggaaaaaaaagtttgaaatttattagcagttatcaccaaaattaaggaatttgggaaaaattaaaataaatttgattttttactataatcacacgaaaaaataattaaatttgttttttttaatttaattttcaactttaattgagtgaaattttccctattaattaaattcaaaacaaatttttatttactagcaaatccctgaaatcactggcattttttgcaaagaatttttcttttctaaagagcccattatttttttccatgacagctgctcactttgttggtacatcttttgcaccaaatctccattctttcatcgaaactcttctctttttatgtatttttgatcaatttccaaaa

SEQ ID NO: 33178 - DNA, 843 bp, Heterodera glycines
cctgacatggcgggtgcaactgctgctgttgatggcgtcaagtcggggggaggagctcgcgcataagcgccggggtttggagccaaagttggataggcggtgcctgtgattagtggcaagtgatcagaaaagattaggaagcccccagatcatatggcaattgaattcctcctgtgatcagagtcaagattggagaatgaaaggaccgtttcgtgaaaaatcggcgagaaaattccggaaaattttttactttttttttggacggcaaaacaaaatactgtgattgaaacggtaggcaaagtggaaatttttttgtacaaattccatcattaagcctgtcccgtttagtagggtttccgttgtgaattactatacacgagtgtacggtaatggcggattactgtaacggtaacatacgcttggcgactgttatgtgacaattacctggggcaaaagcaacccttgtcaagtcaaatcgcgctcgcaacggcaacggtagtgggcgggacggaaacggcggtgcaaatgcttttggcggcatcaccggcgcggacagtaccggcacgggcacctgctgtgccatgtactgtaactgcctaagctgtgccgtttgcgcatcgctgatcggagacggtggcggcgctccattcgatggtgccgccgccgaagcggagggcggcggccctgcgggggcatccgccgctgctgcaccgccactggcaccgcctcctcgtccggcgggcccttgcgcagcagccattgatgggccaccaccgccttaatgaaagcagaattggataaccatactgtctgtacatctgggtacggtagataaacaaatga

SEQ ID NO: 33179 - DNA, 897 bp, Heterodera glycines
ttgagttcatctataaattatttttaaaccttttctttctacagaattttcgcatatacgactacattatttgcattcatattattgtcaactttaaacaaaagcaattgataaatattttcgttattaagacgagtggttttgggctatttcaaaattttttaataattgcagattaatgccgcgtcggctaccccgtttcttctctagtaattatttttggcgttcaacaagcattatttatgaatatttttaatatgttggacatgaggatttgagttcatctataaattatttttaaaccttttctttcaacagaattttcacatatacgattacattatttgcattcatattattgtcaatattaaacaaaagcaattgataaatattttcgttattaagacgagtggttttgggctatttcaaaattttttaataattgcagattaatgccgcgtcggctaccccgtttcttttctttctacagaattttcgcatatacgattacattatttgcattcatattattgtcaatattaaacaaaagcaattgataaatattttcgttattaagacgagtggttttgggctatttcaaattttttaataattgcagattaatgccgcgtcggctaccccgtttcttctctagtaattatttttggcgttcaacaagcattatttatgaatatttttaatatgttggacatgaggatttgagttcatctataaattatttttaaaccttttctttcaacagaattttcacatatacgattacattatttgcattcatattattgtcaatattaaacaaaagcaattgataaatattttcgttattaagacgagtggttttgggctatttcaaaaatttttaaaaattgcagatta

SEQ ID NO: 33180 - DNA, 98 bp, Heterodera glycines
taccagtaccatgctgttttggttattgttgccctgtagtatagtttgaagttaaataatgtgatgactccagcttacaaatactttatattttttat

SEQ ID NO: 33181 - DNA, 896 bp, Heterodera glycines
  unsure (1)..(896): unsure at all n locations
tactcttggacacaatgccaatgccatacaatgcacaatttgaaatggatgtaaagccaacgacgcttcgacgcatggaaagcatacncggaggaacattttatggcattagaaacgccaaaagaaatgggcgaaacgtctgctggacaggaagaaaagccatctagcgaactggatgatatgcaaaaataccttgaacaattgccaaggacaattgagcaagtgccagaaacgccaagagaaatggacggtatgccaaaagacccgaaacaaatgccaagagagttgaatgagaaagttgcccaaacgccaagagacgcgtacgatattcaacaataccttgaccagttgccgaggaccattgaagatgtgccagaaacgccaagagaaatggacggtatgccagaaacgctaaaagaaacgggcgaaacgccaaaagacccgaaacaaatgccaatagatttggacaatgctcaacaagagctgaaccaattggcaattgaaaatgcgccagaaacgcgacgagaattggacggaatgacaagagctgaaactatgggaatgcttggcattatgccaaaagaactgccgaaaaagccaaaaaagacaagaaagatgagtttgccagagcagttggccatccctccaaaagatttagaaggaatgcaaagcgaacacgtcgatacgccaagaccagaccaaaaatatataccggacatggaatttatgaaataccgtattccatacggtacagagacaccaaaagtagatgataataagcaggaagagaaggcagaaaaggtggaagagaaggaagaaatggaagaaatggcggaaaagcacaaagagtcagaggaaaggngagaagagttnaaagaggaggaggaaaagcgacg

SEQ ID NO: 33182 - DNA, 856 bp, Heterodera glycines
gacgacattctgttgaacagtcagttgggcttgtccatcacattccaactgtacctgggacgatggagcaacacggtgacaatgtttgcaagggtgagtgacgaaaaaaaataataaaaaaaaaatttttcaatttttttattgctttccagacttaccatgaagagttgaccaaccggtttggaggcgactattcacactcggtgctgctgaacaaaacaggaggtaattatgcaaatgtgaaaatagggctcgcgattttctggaaaaagtgtgcctttttgaagagttggttaattttttaacctatcccgctaaaattttgcaattttttccccggcaacgcataccattggtccttcaaaaacaagtttttttttttttaaatcgggtttgtttttgtgtataatggatgattctttaaaaaaaatttccatttattttttgcagtgtgcagctttgccatccgacttttgcaattccggaagcaaatggacaaactgaaaaccgtacaagcaaaggacttaatcttttcggtgggctatttttttggcaattctaatatattttttctttaattttgaacattttaaacaaattttacattttcccatttagcaaatgccacgtgaaaaatacgcgctcgtccagcacacgttccgtcaactgaaccaggcttacgtcaaacggttgcacagtgcgggcagcagtgccagtgccaatttgtcgtcgacagtggcaaccgccggtgctggtggtggtgctaccgctgagagtggtggcacatcatccagtgatcagcaacggtactcatcatcagcaaccagcacagctgttgcagcaccgttgttgacct

SEQ ID NO: 33183 - DNA, 793 bp, Heterodera glycines
tttcagtttgtccccgcttattctttccccgattgggttcaggtgagtccctttttccatatatgtcctaaatttgttcgtccatttggccactttttcagccctcttgttctctccccttccgtgtgagtttccgccccccccccctttttcacccgtccccctaaattctcgcctccctttttcagtttatctccatgggttcttacgcccggtctcttcaatccctacataatcaggcacgtgtcgtccgtcctctctcgtcaatgcttttccctcgttcagtccctacgtgttctcgccgttcatccttggccctctcatcctccatccgttcattctctccccttatgtccgttctttccaagggcgtaggcagggggaggggggagggggggggaaatgtttgctgacaacagaatgagattattaacaaaaaatcatcgagaatgtattaggtttgcatttgtgaagatatatattgataaaggtagaatatataaggctcatattcattttttgggagacttttcgagtattttttaagttcgtctaacagggagaggaacttaccaatatacaggaatccggacgaacgggaataattgtcccattttgtcaggattccctgacattttacccaaagagaaacctcgcgaaacgcaaagagtaatcaccgaaatttgaaatttccggactctagaaaattttgtacaaaaaacatagcgtttattgcagtgataattatagattgaattattagaaaacttacaaaattttcacaggattcatt

SEQ ID NO: 33184 - DNA, 1300 bp, Heterodera glycines
gaagaattgtcccctccccggaatgaaaaaaaaacaaacaaacaaaattttcaagaggtaaaaaacacaaattttttttttttttataaactactttagggggcagaaaaattccttcccttcctaaaatttaaatttttttgaattggaaaaaactcaatttttgactgtcctcaattcccgccgacagattctgctctaccaactccaatgctcggagaccatcggcaactacaacaagttgaagcagttcggcgactcctttctggtggaggcctccgttctgttgccgggccatgggctcgagcacttgcaacaggcagccaaatcggtgaaggaatttgcggaccaactgcacccgttgtgcaagctgagctacgtggactatggcagggattgaccgggcacggcacggaggacagcgaaaatgccgaaaaatgcaaaattggaatttctcccaattttttttgatttataaaaaaatttcttttttttacttgcttattttgatgcaatttattatgtcattcatgatcatgaacattatatttatcaatcattccgaattatttgtttatttaaaaattaaacggtgaccctttttattttttctggcaaaaaaaaaatcgtttttacaaaattttcggggttttgccttttttggttctaaaattcacaaaaaattatatgtattaaaactgaaacgctcactttgaatggagagaggggccttgcaaattttcaaaatgcaccgcttttaactttacataaaaaaaattataaatttttttttaaatccaaaatttttatgccagaacaatgctcttataccattggcaactacaacaagttgaagcagttcgacgccttcttctgtccgctggttggtgcctccgttcttcttccgttgccgtcggtggtggtcaatgcgttcgaccatttgcaacacgcggcggtggccaaaaacgcgtcagtgatgatgaatggaaaacggagagggagcagtatcagaagtacgagcaacacaaccagcaacagcagcagcagccgagggtgggcaagcagggcggcaacggccaatggcggaaaagcggcggcgccgtccggggcaaaaaaagcaccgtcgtgcgcaacgatttcttccaaatttatgtgcgctcgggcgcgggcggcagaggactggcgaggtgagagaagccatgtttgacagagaatgattagtgaatggtggggggtgggcagggcatgtcgaaatttacggcattagtcgaacgatttaaaaaaaacagttgcgcctgaa

SEQ ID NO: 33185 - DNA, 792 bp, Heterodera glycines
attaaagtacaggctatagggaagctattcccgaaggattcggtctccccataaatctgggcgcatcggttcggggggactgccccgaaaacaaaaaaatcgattttttcaagtgtccgtttggggtactcaaacaattatggggagcaaaaatccaacgcagaattaaagtacaggctatagggaagctattcccgaaggattcggtctccccataaatctgggcgcatcggttcggggggactgccccgaaaacaaaaataaatcgattttttcaagtgtccgtttggggtactcaaacaattatggggagcaaaaatccaacgcagaattaaagtacaggctatagtgaagctattccggaaggattcggtctccccataaatctgggcgcatcggttcacggggactgccccgaaaaacccaaaaaaaattttttggataaaaattaattttaatgaactgactaaaaaataatttaaaataaggtattttctcttccttttcaggatcccctggaaaagtttgggtgggcttttgataagttttctgaaaaaaaaaattaaccctaaaattttttgcccagttttaaaaaaaattaaaaaaatttttaaaatttttttttccccccctttttttaaaaaaaaaaaattcaaggggcccaaaaaaaaaatgtaaaaaaaaatttgggggggtttaaaaacccttttttaaaaaaaatttttaaaaaaaattttttttaaaaaaaaaaaaaaaaaaaaaaaaaacccccttttttttaaaaattttttt

SEQ ID NO: 33186 - DNA, 963 bp, Heterodera glycines
  unsure (1)..(963): unsure at all n locations
aatttatgaatttncggataaattttntggggttttttcttgtttttttgtcaaaattaatctttattttctaatagtttttcaccaaaaatttatgaatttctgtgaaatttaattttattttttatattttgtaaaaaatattttgaaaaatattaattttgtttaaaaaactatattaatcacaaaaaaataaattaaaaagaaaagtcaaccggtatcgaactcataagaaaagaattgttattgttaaagcaataaccactataccacacaatatacaataaacaaaaagaaatttactttatttaataaaatttggcaaaatggttaaaaaaattcaaatttcttataacttttttgccttttcccccacaaaaattccattcttaggggtgtatatttaaccccgaccccgatcggggttaagggtcggggttcggggttggaagcgtcggggttcggggtcggggttttccccgaaaatggccaaaaatgtcggggttcggggtcgggggcggggtcgggggcccaactctactgtaaattacaatacattatactgtagagtaccatttgattgcccaatcctgcacatgaaccgccagtcgggaacacatatttgtcaacttttttggggaaaagcctggaataattttgaaaacgataaaatataattttaaaagacttaaattgagaccgtcacaaaaaatgtcatattcaaataccgttcatattcttcttccgtaggatttggtttgcacaacgaaaaggcgaattgcaaattcggatcggatggctcaagggaatgcgatggttggacaaacttcaaagcataaaattggaccaaatagccaaaatggaaaaatagttgctatttccatatagccataaaaagataaataggtaaatcccaaaaattgtgtccgttttgtctgatttgcctttcttttacccatgctt

SEQ ID NO: 33187 - DNA, 745 bp, Heterodera glycines
ttatatttatttatttattatcctcttattttatagaacactattttagatttcttcactcaactgttcaataattttattttgtatgaattaccaccaataatatacattaaataatctttttttttttaatttttcatgccgaattccaaggtatttttgaacagagaatcaaatcaattcctcatcattaaatttagcgattttattaattattgtatctttttgtaacaattaatgtctttaacgctaggattttgtttaaatttttactttagcatgtaaaaaataaccaaaatacttttgacgctttaaagaattaatattgtttttaaccattaacttcgtgataatatttacttctccagacactcacaatcagatgaaggctggcacactttacacaagattaaaattattttttgatttttaaaatttgattgcattatcatagaattttaaccaaaaaaggaaagcttatttatttaattggaaatatcacaaatttatcctacactcgatttatacaaacattgttggatcctataaatttcgaatgatttttttttattttctgcgtcctatactaaataaattttcaccattttggatcctaaaggtctaaatgtattttctaaggaaaaaattaggttttgggtgcattcacaattcccaaaattgaaaaaaaataaaaacatccagcaagaacattatgcagatgcaagtgttgcctttatattttttt

SEQ ID NO: 33188 - DNA, 975 bp, Heterodera glycines
ttgggtgattcatttaattgatgatgcccgagttggtaaaacgattgttcatttcttccaatttttgcatgggttcaattcccattggcgccgggaggcattttctccctttcctcagtgggcaagagattgtgaatgacgcgatttaattaatcgttggctcgcaaactctaatcagacacagagggcaaagtgatcagtggttcatgttgatctcccattgtacccgcttcaccatcgggcattgggttttgcaatggactaacaatttagtttaatttcattttataaaaaatgctttttatttattttagtgtgtgtgtgggattttaggcgctaatttgacatattatgttgaaaatttattgaatgcaaatacgtttttatgcgaaaaattatttttgaaaaaaaaaacatttctcattccgtcttccagaaataagaatttatttggtacttatccttttttaccccctcttgaaaaaaaatttacttctaaatgggaaaattttattcgctttggtcagatttttgcaaatttgactccaagttaatgcgcattagtcaatctttcgtcatgattttttttttatatatataattttttccgcacactttttaaaggtcaaacaaatttctgtctctgaaattctgccccgcacttccgacctgatcttcctgaacatcaaaacgtacgaaggtatggggtaggcaggcgtaaaaaaagttacaaattttttttttgagaaatttaattttgtttatgttagaccatccttacactttggaattgaccatgaaaggatggcgcgtttgttccacgcacaccgattgtatgaatggtaagttttgcaatttattattggcaaaaaaattttaaattttcaaagttttcaggcgattatcacaacgtggcactgcacacgcgctattttcagaacgcaaaggaattgcttaaggtgaaaacaaaaattt

SEQ ID NO: 33189 - DNA, 1076 bp, Heterodera glycines
ctttccctgtctctagttgtgggtggttctcccatcgcctactttcttctctcatatcttccctcttccccatatatcaataagtgccctttttagggttgttttttcttgtacaaaatttttggccattttttctaaagctgttaaattagtctgctgctcaattgttttttttggctctatattttctgtgggggactgatttgtgttcgtgctcactttttcatttccttttctttggctgtccacagttccgtccatttagtgccattgatcatcgaatctttgatcgattgataaatgtattttaaaatgttgataagtttggcgatccaatctggcgaaatttctttcgcttttttaggttccggcaaattgatccagctcaatctggcatcagggccaaatcctttccgcccgaattcaactgcttgaaacacggcataggtggttgtctggtagtggaaaattcactatagaataggttttgttcctccgctcagggtgtcataaggttaagcctaggctgaagccttaggcttaggcctaagctttagtctaggcctaggctttcgcaagcctaggcttaggcttaagctttattttgtgaaatatgagttgtcttttgcacgagtagccattttccgccccccccctcctccggaattaaaagtttttttaaattttattcaatttcttaacgaattttactataaattttataaaattttccctggtggtgcctagcgacaacgccggaacccaattttcctatatttttccaaaatacccgtttttttacccgaggctccaaaaatttaggaaaaaactggacaaaaaattttcggccagaacagaaaaaacagctgttcgggtgcccctccttatttctggttataggcctgtccccgtttttcggcaagagagaagagtagggaattgggggggggggggtaaagcattttgtccaatggcactctaaacggtcatgcatttgtccatggagggatgccaaaaaaaacatatatttctcccaaaaattgcatatacaaaagattgatgatcgggcttttccc

SEQ ID NO: 33190 - DNA, 665 bp, Heterodera glycines
attctgaacgattcctccaccgaacgctcccaatcggggcggcggtggggcgattgtcgttgtcgttgtggtggtgctgagggcaacgaattggttgtgtccaatcgtttgcatcaaccgactcacattagcgtcatcatcagagggaaaggatgccgcaacggcgggtcactttcagcctttggaacgatttgctgagtggtcgagaagaaatcggcagttgccagagacactgtccgatcagaaacgaagggccaaatcactgaaggagtgctggtcattgtggaccacagataggaagttgttggttgctaaatcacaaaaacatttggcaatgtgccacaattaaaatgggaattgctgttgtccaaaccgatcaccgacttgctttgacgttgttctaatggcttgttcagttgtcatttgatcagttgtccgttgctcagttgtccgttgttctgttgtcttttgttcaattgtcgcttgtactgttgtggccattctttctatcgtccttttcggcgagttcggctcggtcactgtgctccattctgcttctgttagagtcgtgatggtgctgttcctccttggaattgtgttatgacttagacggctcggacactgactccgccgttgtccccgttggcttttctttcgaatttgct

SEQ ID NO: 33191 - DNA, 874 bp, Heterodera glycines
  unsure (1)..(874): unsure at all n locations
tacaattttgctctaaggcatttttntggctaaaaccgacccctgacgagttatgggcccgggactcaaatgtcccgcttaggccaaaaattttttctatttccggaaaaaaatcgaaattttttcaaaaaaaataccattcgatagagctcgaaaaactatgttttggaagtggtcttcgttttcccgggaaaattcgttaaaaaatcataaaattcaaaaacccgaaaaccgttttttaggcctaacttgaaaaattttgaaaattttcgaaattttaaaacttggttggatagcctttcaaatactacacatttttgctcagaaacaatttttcggtcaaagcaacccctggcgagttattcgcctggtactgaagtgtacacttttgggtaaaaaaaattagccaaggctacagccttgggcgcccaacgtagggcttaggttttgctggcaaagttgtcggggatagtctgacttaaaatcctaccagcaagagctaagcgatcccggtccaaagaaaaaatttcgtagaagaaaaactgcaagaaaaagtgagaaatcgcttcctgggactcagtcgtccgcgctgaatttttttctatagttttcccggattctcctcaaaaagttgtaagacccttccactactttcagacccgtcccattagccgttaagctgaatattagtttttgaaacgaaactccttgtcaatataacatatatattaactagccggtgtgtgcttacatgtttcttgggtgcttanagcgcttcgcgctntgngagcttcgctacctaggaactgtgactannagaggcacaaaagtgattanaagaggtacaaagtgataaaggggatgggaccatccc

SEQ ID NO: 33192 - DNA, 597 bp, Heterodera glycines
  unsure (1)..(597): unsure at all n locations
aaaaaaaaaaaaaaaaaaaaaaaaaaaaaaaaaaagaaaaaaaaaaaaaaaagggggggaaaaaaaaaaaatcaaaaaaaaaaaaaaaaaaaaagggaaaaaaaaaaaaggggggggaaaaaaaaaaaaaaagggtgccnaaaaaaaacaaaaaaaaaaaaaaaaaaaaaagagagaggggcaggggaaaaaaaaaaaaaaaagaaaagggggggggggggggtggggggggcaaaaaaaaaaaaaaaaaatattgggggggggtgagagaggaaaaaaagaagaagaaggagagaaaaaaaaaggggggggggggaggggaagaaaaaaaaaaaaaaaaaaaaaaaaaaaaaaaaaaaaaaaaaaaaaaaaaaaaaaaaaaaaaaagcggcggcgcgggggcccccccaaaaaaaaaaaaaaaaaaaaaaaaaaaagaaagagagggggggggggggggggttcatccccccacaaaaaaaaaaaaaaaaaaaaaaaaaaaagaaaaaaaaacacccccccaacacacaatttttattttttattttttttttttttggagaaagaaaaaaaaaaaaaaaaaaaaagagaaaaaaa

SEQ ID NO: 33193 - DNA, 638 bp, Heterodera glycines
tttcttaatttattccattgactgtcattttaaaagctttttggtgcgaaatgcaaaaaattttcgtttcccccccccctgtgtccgcttcggattttctggttacctgtctgtgttgcaccgccagcctgtcgccctcccctcatctgcaggcacaagtcgcgggagcagcagttgcggtgctcatggtggacacggacattgtgctgagaaaaaaaatattttgaaaaaaaaagatgcggtttttttgtgaaaaaattatttttttcgaaatttcgatttgaaaatcgacatacaagtcaaaatatgtacgaatcaacttgaaaagcattcttaggttaaaatgggtcaaaaaatctttgaaattgtttcacccaagccacccctaatcaaaagcataatgataagccatgtaatcccacccaaccgacaacctggacttcccgcgactttgtgacggcccggcccgaaacgtaactgccgttggcaaacggccacatgtcgtggatgacctggcgcccattttgagggcgtgttcagcggagtgaacagagaaatggcgtctaaaaagcgggaaaaatagaaattcggaaatgtattttatggaattcggggcattgaaattttgcgaaaaaaac

SEQ ID NO: 33194 - DNA, 1121 bp, Heterodera glycines
tcttttctcggcgtgttcaaccatttagacaacgcttggccagcagttgcatttgggccgtcatcagcgatcatatcgggcaacaattcaaaggaatcgattgagtccaattgatcaaccagatcagtgagaattgtcggcgaagtcagacgacgcaaatcgtccaaatgatagggataggtaaattgcaaatggcgaatgtttgtcacgaaaatgggccaaatttcgcgggtaaaagcctcccaaattggctcatcatcctcatccaatgaatacagataaaagatgaaactggtgcccattctgtcccaaatccgcttgttggagcggagaaaagtgatgacagagtgatcaaggtagctaaacagggaacaacaatacttaaatatgtacatacagaaaatggcaggtgcacccaaaaaaatttcgccgtcgaagaaaaaactaagatttagaaattttcaagaaaatagaaaattctagcgttttttcgaaattttatgatgagttaattctttcaaaattttcaacaaaatcgcaaaaaaaaatttttttgaaattgtaaaaaattctaaaattttttcggtacttttccgttttggggccaaaggttgaattttttaaatcaaaagcgggtgagtaaaacttgactcgtatttgtgtgaattcctctgacgcgaaaatgtcaaaaccctgtggcgcagacccttcattcgaagaaatcttagctctaattatggcatttatgcctcgcaataattttggcgcgtagctttagcaattctacgcgcccgttttcggcggcgaaattttgtcctgttccgtaaaatggcgatttacttaatccgaaggtccttaaagcggattttgtcgggcatcggacggtccggcaacagaaattccacaaatttgccatcgatcagaacagaaaatttcggttttggtccgatggccttgcgaatgttgatttgtctccaaattgtccattcgcttttgccgtcaaaatgtttgtccaccaacgcattgaaacggggcgaaagcaatgccaatttgagaccaagttgggcatggccaaagcatggaagaatgtccatccaaacatcattacaaatgcagctaaa

SEQ ID NO: 33195 - DNA, 587 bp, Heterodera glycines
tgattcggttgtcgcacctttggcacggggggcgcccccattttacgacggacagtgaaaatggccaaactgcggctgttgcacggcacaatcgtccgccgatgccacggccacttggcccatcgccctgtgcttttccttcctgctccgctggacatcattatgcttcttgtctcacacctttactttctcttgccgtgttttttgggattttgcagcatttggagggggaggggagggagggataaagagggagggggtcatttcttggggggggggaaaggagcagcgataaacggagagaacgaaagagcggcgggggacaaagggaaaagggacgacggagtggacagcagcgagagcagaagccgggccaagacgcgttctcaatttgagagaaaagagaaagaagtggcaaaatgcacttttaggaatttgtccttagctgctttttcatcatttcgttgccaaattctttctgtttttttgtctgtcaagtttctgtattccgattttaccttcaagactcgaaatgttaaagtgtttgcttttgtctttccgcttttccccatggcatcgattgcccc

SEQ ID NO: 33196 - DNA, 623 bp, Heterodera glycines
cccccccccctttcaggtgatcaaccctggggacgaagcgcatcggctacgccttcaagaccaccaaaccgaagcgcatcaacatgaacccgccgaacggagtgctcggcccaaaggagtccgtcaacgtggccgtctcctgcgacgccttcgaccccggcagcgaggacaccaagggcgaccgtgtgaccgtggagtggaccaacacgccggacccagccgccaccgcgttcaagctcgagtggttccagggagacgggatggtgcgccgcaagaacttgccgatcgagtacaacgtctgatggaaggatgcttcgtcacctcaacatggacatgataggatcccacccacccaccgtcccaaaattgtcattttgtcccccatcatgtaaattgttgtatctgtatgtaaatttctgtgatcatcacttcaaatgaatgtatatttaattgttgcctatgtaattgtattgttgttgtgcttaataaatgttcatatgtgcttcaattcaaatgcttttgtaggaaggggggcggggtggtaaaatttggcgtctgtttggtcggagggttagctcgcgtagaactctgtctgctcactccttgtaaattcaggtcaaaat

SEQ ID NO: 33197 - DNA, 881 bp, Heterodera glycines
attcgcctgcatatccgtccagcttgtctccgcagaagcggacgatggactgactgattgatgccttttagcaaccgttgcgaatgatttatatttttgtcacaaaatttaattttttttttcgttgcaaaattttcatcatttgataaagatggcttggccaaaaatccagcgatttgcttttacattgatctggattcgaatggataaaaaagactggagtgatgatagccccgagttggcatgcaagggaccagcagtcagagcagtagagaccggcgagggacgtgatcccgcgcgggattttgcgggatccaagcccgcaatcccgcatttttggaaaatgcaggattaatcccgcggaattccgcccatcaaaaagttcgagtttcaatcccgcagcgggatccgcaaatttggtttttttttggcgtgctaaaacgcacggggaggccgaaatctttttggtctgccaaaacggtgctgttagttttcgacagtggtgatctcgacagtgattgttttcgacagtaaagcttctttaaaaaaaaacttgttctatatggtataagtccaaggttacccttgaaaatttcccgaaataagtacttcgctggtcaaaaataagattttagggtaaaaaaataaggacattttttaaaacacgcttccaaaactaaatcgcatttttattcaacaaaatcaagcattagcaacatatttctcgccgccaacatttttctgagcaattccggcttagaaatgagaaatgatacatttccgaacaatttttaatcaaaattcacttttacttgcaccaggcttttcaatgtttctacttcaagcaaatttctcgtattttttttcgcggttttgagtca

SEQ ID NO: 33198 - DNA, 242 bp, Heterodera glycines
cagacgctgtttccaattttgcaagaatatgtcagggggggggggctctataattcattccgattcggcggcaatgtatgtcaacgttcgacgacagcagagccacattgtcaatatcccgaccattccaatgccaccatatcgtcatgtttgggtcaaccaccgagccaattttattgatcccctcactggtgcttgtacgaatttggttgagggattttggcgcccggaaaatgcgtcag

SEQ ID NO: 33199 - DNA, 101 bp, Heterodera glycines
tggccttcatgttcacgccgatggcgtcgattaccggaatcgacttaccgtcgccgcgccccgtctcgcgcttgaagtcttcggcataggcaccgacgtgg

SEQ ID NO: 33200 - DNA, 780 bp, Heterodera glycines
agaaaaaacagctcatttccaagaataaatgtcaaatttcttggtgtttaaggggcaacagaaatttggacagtaaagcgagggaaaggtgggaaaatagtgctcaggccggccgttgagaaaagcggtccgtccgtaccagggctgcggtgccgataagcgccgcctaggaaaaattttcagaaattttaacgaattttgttaaaaatagccaaattttttaggcatttcatcttttccccttcgctagcctcccgcccccttttatgtatgttaataatactacaaatttccaagaataagtcagatgaaatcgaaatatgggtagcagccttttaataaaaaagaaaaaaaaattcattttataaaaaataatcttacaagaaatcgtctcgaaaaataatccaatagtcaaattacggatcaaaattgcggataaatcccaaaaatccgcaacccgcaatccgcaattacgggggtccaaaaaccccgcaatttccgtaatccgcaatccgcaattgcgtccagccctgtttccaacccaaaccaattgcccatccctctgaagggtaaaagacgtatgaatttagataatggaaaaaggcggacagatttggcacataaagggagagagagagaggtggggatgggaaaaagagagagatagagagagagagtgaaagagagagagagagagtgaaagagagggatggagaggagaagagagactgatagagaatagagagacaagagagagagagggaggaagagagagagagg

SEQ ID NO: 33201 - DNA, 1006 bp, Heterodera glycines
tcaataccagaaatagtttgtgaaaccaaaaaaaaataaataaaggtttggggaaactataaaccaaaaatggaaattgttttgatgtgtccggaaaccagaaaccaaatcaggaattgattttctgataatacaaaccaaaacagaaatagttgtccggaaaaacacaaaccaaatcaggaatttatttgcggaaaaatattttaaaaaacataaaagttttgtgtaaaacacaaacaaaaatattaaaaaaatttttgggtaaatataaatcagtaatgtgaattttgtttttgtttatacaaaaccaaaaaacagcaaaattaaataaataaataattattgtaatgcaaaaatggttgtttataaatcaacttttaattaattacgaattgattgcaaaaatggggttagatgtggaacattgggctcagtgtgaactgctcaaaaaagctgagaaagtttgccgccgtgtgcctaattcaattcatttcagagggcttttgatgaagtaattgtgcaagagtaatagcgaagtgtagatggaattaattacttttaaaaattcgttaaagaacagtaaaaaattaaaatttgtttgtttaactttgtttgtctttttttgttagattgtattttagaaattaaaaatgggtataaatttaattaaaatttataaattatgaatttatttagaaaatatggatttacaaaaaagatttaaaatgcttgggttttaatcaaaccaaattttcccattaatattatcataatttaattgggtaggtaaaaagtaaaatgattttttacagtaaataaattcaatttaattttgttaaagtaaaacattaaaaaaatttcttttgcactgtttttttgacttaaaaatttgtaacttaattaaaaatgcattaaattttcttgaacccggaatcaatattatatggcaaattggaagggggttctcatcgccgctttttccattcgcattttgcttctgcaaaat

SEQ ID NO: 33202 - DNA, 592 bp, Heterodera glycines
taaagtacaggctatagggaagctattctcgaaggattcggtctccccataaatctgggcgcatcggttcggggggactgccccgaaaacaaaaaaatcgattttttcaagtgtccgtttggggtactcaaacaattatggggagcaaaaatccaacgcagaattaaagtacaggctatagggaagctattcccgaaggattcggtctccccataaatctgggcgcatcggttcggggggactgccccgaaaacaaaaaaatcgattttttcaagtgtccgtttggggtactcaaacaattatggggagcaaaaatccaacgcagaattaaagtacaggctatagggaagctattcccgaaagattcggtctccccataaatctgggcgcatcggttcggggggactgccccgaaaacaaaaataaatcgattttttcaagtgtgcgtttggggtactcaaacaaatatggggagcaaaaatccaacgcagaattaaagcacaggctatagggaagttattcccggaaagattcggtctcccccataaatctgggctcatcggttcgggggggactgccccgaaaacaaaaa

SEQ ID NO: 33203 - DNA, 977 bp, Heterodera glycines
  unsure (1)..(977): unsure at all n locations
tttattttannattaaaatttttgaaatttgcaaattttccccatgtgtgcatgcgcttacccgacttgtcaccggctctttatctgcaccgtttgcgggcggaattctgtcgcccatcggttcgggcccgtcgtcgcctttgaaagggagatcaatgatttaaattttgactgatcacctaatttaaaaataaaaattgatcagtcaaagtgtctgtggttgccggaaatccaaaaattctgtttaattaccccaaaaaattttctctgatcacccccggaactccattccaaattgatcatttaagaaaaaggcttcttatcgctcggtattccattcaaataaaaaagaagttttaatcccccaatcactcaaaattttatcaatttgttctgtttaattacaccaagaaatgttctatataattgatcatttatgaaaaaggcttccgatcactcggaaacccattctaataaaaaaagttttaattccacaaatcactcaaaattctaacagtttgtctgaaattagattcagatcattcaaatcttttagatcagacttaatcaattttaatcattcgaaagacactctttctttaatcactttagagaatccattatattaatcccaaacaattttccgttaactaatcccgccgaaaactttcagatcactcggaatggaattctaatcatttcaaaaatgccatttctattgcttctccctctcctccccaatttgttcacttgctgctccggtggttgtggcactgagttccaatgcgaatgatccgccgccggcaccgccgcgtgccggcggtgccctcgcttgggcatccggctgatttttggacgacgacgacggcgatggcattgtgacgcgttcgtaccggctggcagaagtggaatgcaaattggctggcgtgttgtgaaggcaaatctgataaacattttgaaaaattattaatttaaac

SEQ ID NO: 33204 - DNA, 877 bp, Heterodera glycines
aaaaaacttagcaaatagtttttttttgaatttctgcggcgagatttcggccggcgagatttcagccggcgagatttcggcggcgagattttgtctcggcgagatttcggccggcgagattccggcggcgagatttcggcggcgagatttcggccggcgagattccggcggcgagatttcggcggcgagatttcgtcccgtcccccataaaagttagcttacaattagcaggaatttttttaaaaatcttgcctataaatatttagttttttgaatttgtaatctttggttttaaatacatgaccacctaaaacgaagttgtgacgtttttcgacaaggctgcttcgaggcaaagcttattcaagttaattaattgaaccgttggaaagcccacaaaaatgcaataaaaaactaaggagatattttacacattcatcagcaaatagaaattttatcactatttaaatcaacaatcattaagtggtgttaaacatatgaccacaatgactatatgttaataattattgttatagcgagagggctttctgagggcactgaacgaaagcggacttttgctggaggagcccgaggccatcccccacactcaccttaacgaccccaatttggtatgggaaacgtttccaattcagcacaaccgagctgacaaattggacgagttggacttgagtctggaaccgggcaaaggcgtttgctgatggcacaaataaaccttttttgtcttgtttccattttgtttctatgtgaaagatgggcaatgaaattttcgaacgatttcggtcatttttttgatttttcattcgttctttctcattttatgggccagagacggatgacagacagccctatgttttttttc

SEQ ID NO: 33205 - DNA, 832 bp, Heterodera glycines
gggatgggttgggaaagtatgaaaatagggaggagagggggaaaaggaggaaaattgggcaaagaaaagaaatacgcaaaaaaataaggaaaagggagcgggaaaaaaagatgagaaaatgaaaaagataagaatagccaattaaaaaggaaagaaatggcaaaagagagaaaaacaaagaaaaacgcaaagggaaaagagaaaaagcgcaacggatgaaaagaaagaggtccccgaaaaagttcaaggagagcaaaacggaagcgcggaatgtaatgcaagtcgatctccaccccctaattaccctcctaattgccgcccccccccccactgaacttccgtctcccactcattgcgatcagtgtttacttttcctctttttacttatctttttaaaatggcagagaaaacattgaaaatggggcggaagtctgaaaaagagacgggaatttttgacgaaatatcacagcagttggcattcaaaagtatggtcttcttgcttattaagggacaaatttatattgttaaaaaattgcctaattttgctgcatttttcgtttttgtcccatcgccgcgtccctcgacaaacaaaaaacgatgcccttaaaaacggaaacgcaaaaaacaaaataaaacaaatggaaatggacgccgcgccgcgttagaatcaaaacagcagcctttgtcccttttcaaattccgactctttttttgtttttcccactgaattaattggccattgttatggcgtggtggccttgtcagtgttttctgttggtgtcgattttggatagagagataatgaaaaaatataaaatgagaagggattgga

SEQ ID NO: 33206 - DNA, 753 bp, Heterodera glycines
  unsure (1)..(753): unsure at all n locations
ggcagattttcaaatttctcccctccccagcccttccaaaccaatgatgattaatgcgtcacctgtttctccgcaacttcgttgcgcacaattccgtcccggcgttgggccaacacttcgcgcaccttttgctcattgtccaaacaacggcccgcgtaaatcaaacgttggcgcgacgggtcgggctttgtgacgcattcctcggccaaatgagttttcagttggagcacactgaaattggtgtgatcaattagcatcaataattttggcacagtgttttatcttccggggcatttcccaaagactttttttggtcacagattttcattttttgtctgtttttaaagttctgaacagtgaaaaacaggtttattcatgatgaacaaagttgaaaatcctaattttgtggggaaaaaaactcaaaaatttggacatgaatttacttccaatcagccggacattcaagagtgtggtcgggaaatgattgcatggcgcaacgaatggtcaattgaaaagttgcggcggtgccatcaattgtcgacattattttgctcggatagtattaatactgtgtctttatctcttaagattggattaatgaaatccgttaagtcattgaaatgaatgcatttactanaactgacaaaatttgtcagaaataccatcacaantgtcgtatatttcttaaattgagccctcgggggctttattttttcatcctcaaaaaatggaggggaggggggctttattgca

SEQ ID NO: 33207 - DNA, 891 bp, Heterodera glycines
  unsure (1)..(891): unsure at all n locations
tcatgctgaggtggtgacggttttgtggagttggctcaattttggttggtaaaattgtggtaatgacccccgggggacagataaggaggagagaatagggcgataatggcttaattaattgcattttaatgggggaacgaagtgggcattgattgcatattggcgatataattaatctgttgaattatttgattattcaatgcgcgaattacggcaccaaaataatggcacaaatgccaaagagcaaaaagtacgacaaaaactgcacaaaagttgaaaaggcatcgccaaattacaagtcggcataaattaaataaatttcgtttctaaaggcggcaaattaataaaaagggaattagggagagatttggggccaaagtgacaagaaaagtgacaactttggcggtggatttgccttttcggattatgttcagtcagtggattggacggaacggacggcggacggacaattcgtttttggcattgaatgggccgacaatgccaaggcgggcatagggaggggggaggggaatattgggcagaagaattgctcaattccgacatttccggcggacatatggcaaagaatttgcgaattttgggcaggggagggcaaatgccatcccaaaaggtgtttatttatttatttatttgtcaatggcaaaaggggcaaaggaaaggaaagaaaggcatttgcatttttagtttaacaaatgaaagaaaaaacattttgaaaattggcaacatttgaatgtcctcttttgctctttttctttttattattttgcatttttaactttcctcccaaatccttttcattanatttggcgctttttacgggcgtaaattacagagtgccccccccccccgggtggtcacttcttttctttt

SEQ ID NO: 33208 - DNA, 665 bp, Heterodera glycines
ttattaaccgtccagtcttttaggagggcttgggccctgcttattttctgcgagagcttcttggcggcaacgctaatagaccccagggaagtggggtcgttcggcaatacatcggaaccggccccttgtattgagttggtggaaatggcggtcaaaagagcgcggagtttctatcgaataatgtgcacggaatgattaagagaaacaaaaaaaaggcgaaaaaattaaaaagagttaaaaaggagtgaattgaagatgttacccctcaacattacttagtcccccgttagtttttgcccggtttaagctcgaaaacggtctgaacaagagcatcagacttcttaatcaaacaatggtaaacacaggggaaaaacaaggacaaaaggggtgacaaaggcgaggcggatgattcagtaaggtgctggccaaaggcaacgaaaaaaattgccaaggcggagaccgaaggaatggcgaaagccaaggcaaaatagagaaatcatgggggtcgacccctctgacttcgttcgtatgaggggcccaaaagaggaggggacttcatattggttgggacaaaaatgtgaaaaatgttgggaaaggtcggagacgaaggggtcagagagaggcgactttgtaaaggcaaaaagaattaaaacaatttaacaaaa

SEQ ID NO: 33209 - DNA, 1240 bp, Heterodera glycines
  unsure (1)..(1240): unsure at all n locations
aatgtggcccaaattttagccccccagccacagccccttggttctcccagttttagttctggatttgtcaaataaattcaagacttccaattaatatcaaaatttctcttaaaattttttgaacncnaatcaaaaaaggaaaaaaatttgcagtcaaaaaattattcgaatttctccaattttgtttccataatttccgaaagttattcggtatcataatgccaaaacaaaacgaaatcgttctaaaatattcctttctggacttgacttggtttcttgatatcgaagctgttttctacgctatttctaaaacggttataccaaaccccagatttttgaatccggttttcagaaaaaatgccttgtggtgaaaacaatatttcacatttcactccataactttgtgagttcggcacggatcgagaccgggataagaccattggaaagagcagctcgagctctacaagaacgtatggaaagaaaaaatagttatttctgggactttttcagaaatcagaattaattctccaatgtggcccaaattttaggcccccagccacagccccttgcttctcccagttttaagtcttggatttgtcaaataaattcaagacttcaaattaataatcaaaaattctcttaaaatttttttgaacccaattcaaaaaaggaaaaaaatttgcagtcaaaaaattattcgaatttctccaattttgtttccataatttccgaaagttattcggtatcataatgccaaaacaaaacgaaatcgttttaaaatattcctttctggacttgacttggtttcttgatatcgaagctgttttctacgctatttctaaaacggttataccaaaccccagatttttgaatccggttttcagaaaaaatgccttgtggtgaaaacaatatttcacatttcactccataactttgtgagttcggcacggatcgagaccggcataagaccattggaaagagcagctcgagctctacaagaacgtatggaaagaaaaaatagttatttctgggactttttcagaaatcagaattaattctccaatgtggcccaaattttaggcccccagccacagccccttgcttctcccagttttaagtcttggatttgtcaaataaattcaagacttcaaattaataatcaaaattctcttnaaatttttttgaaacccattcaaaaaaggaaaaaaatttgcagtcaaaaattattcgaaattctcca

SEQ ID NO: 33210 - DNA, 954 bp, Heterodera glycines
  unsure (1)..(954): unsure at all n locations
ccaaaacncggatgccaaagaagtgaccattaacaacctccccaaaattgccaataaacagccgaacaatgcaccaaaatcgattgaaataaaactgccaattttggacgccaaaatcgctgccgaaaaagcagtcattaagcagtgtataaaagtgaccgataaaatgcatgaaaagccaattgtggatgccagagaactgagcattagcaaaattgagaataaacagtcgaacaatgcaccaaaatcgaacacaaaaatttccatcaagaagaaagatgtttctggcaagaactcaaatgaggaaaacagaaaacaacaaaccatgaagaagcgagaaaactgatcaaattttagtgcgatattcgagcttattcaaatcagacacttccggcgatagaatttagggtttttcttatctagtaaattaaaactttagacaccaaaacgaaatttattgagcttgaaattttcaacaaatatagtgtttgttaagctcctaagaatcataccaatttttaaaattggtggacaaaaaatgttaggtcacttgacgccgaaattccctgtccaaatttcttttacgacgtacataccagaaggatgttgggaattttttgttgcgttatattcattttttggaattttttgccttttgggaagtgaatgcaaaagctctctctaaatttccgttcacaatgtgtttttttaatatgctaacatttttttaagtattagtgaaaacaaattttttaggaacatttaatctgaaataatttaaaaatgaattacttttttcggttcccggtgattacgtcagtggaaattaattttaattcataaaaaaacgtacatctagctaaatttttcaaaaattcaaatgtcgagtcataagcagacttgtcgacgagtcacgaatgcaaaatctctgcagcattctcaatgtgctctgct

SEQ ID NO: 33211 - DNA, 1042 bp, Heterodera glycines
gggggtggttaaaaggatggatcaataaaaaatttttgtggtcgaagaaagatgttaagcggtaggagcaaaaaggtagttcaaaaaccaaattaataaagggaatagatggattattttttgaaatatattaaattttatgatatatctagaatttacttgcagggttttattgtttagcaggatatataatttagttagatggttcgagtgcgcatcctaaatttctacataaaaaaaatcggaaaaggcaatattttcagtcttttcaaatccgttagagcactcactgtattttccataataatgtcatttttctttcccctaaataaaataaagtataattcgcatatatatcaatgaaattgcgaagtaaaatctgtcagattgggtagttcaattttcggtttgtggctttagaattaatagaataagtattagtattcacgtaatggctgtaattatgcagtgtataacatgaggtatcgctagataaaaattaggatattccacttctaaaattagagtatgtcaaaatcattaccccttccgtagaaaaagattgacgacttaaatattgtttcatagatcacaaatttgttcagtttagcgaggaatgaagtgagttatgattgatttaatgtcattatttctaataaattttaacaagtcacgatagttcataaaattgagaaaataagatacaaagtaaagtatacagaaccacaaaaattatccataaaaaaatgggtcggggtcgttttcgcgtgggccgttttcgcgtggggcgagtttttgaactataacttttttctttgtcaaccaaatccaataatcttggtatcattcgatagccctaagtgttttctattagccaacaaaatttggaaaaatttcgttaaggttcaaaaaagttatggtcagaagagttcaacaaaccaaattttccaactttttttggctcgaactttttttatattgaacgaaatttttttggattttgcatgctaatagtgcatctgaagggcttcgaatgatacca

SEQ ID NO: 33212 - DNA, 919 bp, Heterodera glycines
tgagatcaccatgcttcacaacacggtgattgaggtcatctaccgagtgtgcaaagagatggcaattcgccagcacaaggatctcctcttcggagggaaaacagtcattttcagcggtgacttcaaacagtcgctgccggtcgtgcctcatgaaggcttaaccgctcaggtgacagcctgttttcaaacatctccattgtttggtcaattcaccacgatgaaattgaccatcaaccagagattgggcaaaggtcagcaagcgtacttgcaaatgtgccgccaaattgggctcggagaaaccggagagcacttctggattcctcggcagttcctcgttaagagcaaggaagagctgatagactatgtctatcctaacttccaacaactccttggcaatgacaaggagctgctcaatcgtttgattctcgctccgcacattgacacgtgcgacgaagtcaacgacatcatgatggcgaatgtgccaggtcatatgcgggaatacttgtccacggataagccccttgacgaccgcccactggacatcgatgagatcgagtccgaagtggctgcgttgaaccggcgcacagactcgggcatgcccccacacagtctccggcttaaagtcggatgcgtcgtcgtccttcttatcaataaaagtgataaggaaggactgatcaatggcacccgcatagttctggaagaacttggcgatgatcgcctcattggtcgtgttatcaatagcaatgctattggcggccaagtgaagttctttcttgaaagaacacgaaatgtctatgaagacaaatcgcctggcggcataaaatatgagcgtttgcagttcccaataaagcctgcattcgctatgaccattcaaaaaggtcagggccaaacaatccacactgtcggcattgatcttgaa

SEQ ID NO: 33213 - DNA, 802 bp, Heterodera glycines
gattgaaatgctggtgggttgagtcccagtgattggaatgctggtgggttgagtcccagtgattgaaatgctggtgggttgagtcccagtgattgaaatgctggtggtttgagtcccagtgattgaaatgctggtgggttgagtcccagtgattgaaatgctggtgggttgagtcccagtgattgaaatgctggtgggttgagtcccagtgattgaaatgctggtgggttgagtcccagtgattgaaatgctggtgggttgagtcccagtgattgaaatgctgttgggttgagtcccagtgattgaaatgctggtgggttgagtcccagtgattgaaatgctggtgggttgagtcccagtgattgaaatgctggtggtttgagtcccagtgattgaaatgctggtgggttgagtcccagtgattgaaatgctggtgggttgagtcccagtgattgaaatgctgttgggttgagtcccagtgattgaaatgctggtgggttgagtcccagtgattgaaatgctggtgggttgagtcccagtgattgaaatgctggtggtttgagtcccagtgattgaaatgctggtgggttgagtcccagtgattgaaatgctggtgagttgagttccccagtgattgaaatgctggtgggttgagtccccagtgattgaaatgctggtggattgagtcccagtgattgaaatgctggtgggttgagtcccagtgattgaaatgctggtgggttgagtcccagagattgaaatgctggtgggttgagtccccagtgattgaaatgctggtggg

SEQ ID NO: 33214 - DNA, 1019 bp, Heterodera glycines
tctgggcacagtaccgagaccaacggcacgacttgttttttcctaccatcactcaaacacaagccataacgggtgagagagatcgtagtgagtcggacagatccgtcggcaaacactcggaagtcgctgtttttcgcaaaaaaaaatttagatggcttggtgtgccataataggctatctggacaaattttagaaaatttatagtttctgatgaattcgttagtgtgtaaaccattcattcattcggcaggtggtcccagcggtggctcctcttctgttgccgggtatttgaccgagagaatgtttgagcctccgcccgcacgcattgccccgccgccacaaccggcggaaaaggcatcgacagaaaggaataacaacagcatcgatcctttgaggggtcccttgtaaaaacgtatattatgttcaatcccaagtgcctaaaaagcatctgtgttcatattttgacttgtctattccttctaattgttgattcttatttttaaaattgattctttaatttaaaattgcattgtttaattatgaggacaggccaatagtacgttcccgatttgtgcccaaattcacattgttttgtaaaatttattttaactaaatgttactaaattcttgtcaagttttttaatgtaagtatgcttgagccaaggcccgtatcagaaaaatatttcgagaggggacccgaagagttttttaacattgggtctctccttgaacatactgttgtgtccccgggtttaaggctttaagccatttcaaattaccgtttttagagaggaatttattgaaggaaaagcattaagaaaatatttacgtattcaaaaccgggaatagtttgggtcaacaacaacctcagagcattttgggtgggtcagtgcaattggttatttgggaaaggattaacaaaggcaaggaatggcactgagcagactgacccatcgcagacatctcgcagcccccgagggggaaatgggaggactatatactgacacaaaggggttgga

SEQ ID NO: 33215 - DNA, 938 bp, Heterodera glycines
  unsure (1)..(938): unsure at all n locations
tcccaggggtattattttgtaanagtctttttttcaaaatatacttttcaaaccccttttttcgcaccgtgaatgttatttttattgaattctgaaccggtttgagtagattagactagaaaaaattgaaaattttgaaatcatgtttcccactcccttctcccaggggtattattttgtaaagtctttttttccccaataaacttgtcaaaccccatttttcgcaccgtgaatgttatttttattgaattctgaaccgttttgagtagattagactagaaaaaattgaaaattttgaaatcatgtttcccactcccttctcccaggggtattattttgtaaagtctttttttccccaataaacttttcaaaccccatttttcgcaccgtgaatgttatttttattgaattctgaaccgttttgagtagattagactagaaaaaattgaaaattttgaaatcatgtttcccactcccttctcccaggggtattattttgtaaagtctttttttccccaataaacttttcaaaccccatttttcgcaccgtgaatgttatttttatcgaattctgaaccgttttgagtagattaaactagaaaaaattgaaaattttgaaatcatgtttcccactcccttctcccaggggtattattttgtaaagtctttttttccccaataaacttttcaaaccccatttttcgcaccgggaatgttatttttatcgaattctgaaccgttttgagtaaattaaactagaaaaaattgaaaattttgaaatcatgtttcccactcccctcctcaaggggttattattttgtaaagttcttttttccaaataaactttttcaaccccaatttttccacccgggaatgttatttttaatgaattctgaacccgtttgagtaaattaaattagaaaaattgaaaattttga

SEQ ID NO: 33216 - DNA, 1231 bp, Heterodera glycines
  unsure (1)..(1231): unsure at all n locations
tgaaaatttctcaaaattcatcaccaaatctttttttcttgataattttaaagttttgataagaacgaattgacagtgctaaaagaaaaatgagaattttctgttaactgaaaaaatgttagccaaaaatcaccaaattttgtgctttttcgtttttttgtgcttatttttccattctcatgcttattatttcgtgcttaataacattttgcgttgaaaaattcggtctctgtcatgaccaaccggttgatcagccggaatgtgctgatcattattttgaccatggcgatgatcaggatcagccggaaacggggtcggatcttgctcaaacatttcaacatctttaaagaatagagaaaaatgttggaactttttgcgcaatgctcataaatatcttatttctgtagttttgcgtaatttacaaccgaccgactagacgattttatgttcacatgaactttcatcgctgcaaaccacgtcaaataaagcaatttctttgtttagcaaattcataaacaaagaaaattgtcatataaacaaatattaaaaatggccaagttgaatattctcgagaaaataaaaaaacgatttagaaatttgtcataaaaataatttctttcgaataataaatgaaaaggaatttaaaaaaaacaagttaaaatcataaaaataaatattaaaacggccgagttgaatattcttgagaaaataaaaataatattgaaatttgtcataaaataatttcctttctaataataaatgaaaaacaattttaaaaacaggttaaaccataaaaatcgagaaataaaaaaacgatgtagaaacttaagttttatctatccataaagaatgtaatttgcaacagtatttaatcaataacaatttatcattagctagctaaatatccaatgaaatttcgttcaaaatctgtcactccatcttctaaaaagcccattactttgacgtcgatttgtcggctttaccttaaattaaatgatgctattaaaggacataggcgattagcaactcctcatcgcaattttttcccgtcaaattttgaaataggtttgaaataataaatttttaattaaataattttttattaaagaaaaacagcatgactattaccaacgcaaaatcactttattccgggtgaagcctaatatttggaaaacagtgcgacgggtattagtgtaaaataaaataaaaagttcaaaacaaaagtgnttta

SEQ ID NO: 33217 - DNA, 527 bp, Heterodera glycines
ttctcttcttcgtccttctttgctttctcttccgagtccttcctcgctttttcgtccgcttccttcctcgccttctcttctgcttcctttcgcgcctcttcttccaattccttccttactgcctcttccgcttccttcctcgcctcattttccgcttctttcctcgccttttcttccggtgtggctgccggtcgtcggagtgcccgtttccattcttctttttctgctttggcattttctttggccttctcttccgcttcctttcgcttggcctcggacttcgcttccatttgctctttttcctttctcttccgctcgcgtttgatcttctccgaatatgctcttcgctcctttatttgttcttcttcttcctcttcttggattttggccttcgcatcgattatcaattgaatttggcgatcgatttccgccaatcggtactccttcttgtacatttcaacttggtccgggtgaatcacttggacttgatccactgagaatggcgtgaggatcggtgcataggggcg

SEQ ID NO: 33218 - DNA, 940 bp, Heterodera glycines
gtgcgtttttaacgaatattcatttttttaaaatctcattattcgtaattatctctccaggcaatctccagtctcgtcaaagcggcctatcaggtggccgtcgattcgggcgttgcctcggtggacgagaagggcaccccgcaaacattcattctcagcactgtttacccgaacatggtccaggaactgatcaaaacatcggatcggtatatattttttgttttcggtcactgattacggaccgctaattccgcccacttcaaaataaaataaaattttgtttttacagaactgactcaaacgcaaacaatttgcgcatttctgcctatgaagcgttgatggagttgatcaagaacagtccggccgactgttacccagttgtgcagcaaacgaccatggtcatcctgggcaaattggagtcattgttgagcattgaagacgcactcgtctcctccaacgagcggtcacagttgcgtgatttgcaatcccaactctgtgctacacttcaaagcgtgttgcataaaatcaaggccgaggtaatgcgcatacaccaaataatatagtttttttaatcgcaaacacgctgatgtatgtgagtgggtcgctctaatttttagattttcttacaattaacaaatttccaaaattgaacccggaaaactcttaattccttaaaaattggcttaaaattgtcatttttaaaagtaagtatgtgccaaatttctcgatggattgttaaaatatctcattcctcttgggatgacgaacaaccaccatagtttgggacccttttgcttttcccccccgccgtttccccccccgtgtcgtttcccccccacgtcgtttcccccccgaaaaattttttttaaaaaatttttcggggggggaacgacctgctcccccatagtttagcatttgtgaattggattagagagcctaa

SEQ ID NO: 33219 - DNA, 816 bp, Heterodera glycines
gttttcggggcagtccccctgaaccgatgcgcccagatttatggggagaccgaatccttccggaatagcttccctataacctgtactttaattctgcgttggatttttgctccccataattgtttgagtaccccaaacggacacttgaaaaaatcgatttttttgttttcggggcagtccccccgaaccgatgcgcccagatttatggggagaccgaatccttccggaatagcttccctatagcctgtactttaattctgcgttggatttttgctccccataattgtttgagtaccccaaacggacacttgaaaaaatcgatttttttgttttcggggcagtccccccgaaccgatgcgcccagatttatggggagaccgaatccttcgggaatagcttccctatagcctgtactttaattctgcgttggatttttgctccccataattgtttgagtaccccaaacggacacttgaaaaaatcgatttttttgttttcggggcagtccccccgaaccgatgcgcccagatttatggggagaccgaatccttcgggaatagcttccctatagcctgtactttaattctgcgttggatttttgctccccataattgtttgagtaccccaaacggacacttgaaaaaatcgatttttttgttttcggggcagtccccccggaccgatgcgcccagatttatggggagaccggatccttcgggaatagcttccctatagcctgtactttattctgcgttggattttgctccccataatgtttgagtaccccaaacgacacttgaaaaaatcgattttttg

SEQ ID NO: 33220 - DNA, 939 bp, Heterodera glycines
ttcgactaaacggcttccgcccaacgcttgtcatttgtgagccaatgagttcagccattcggcgcgaacgacgccgactgaagcgacttcacatggccactccccaggaaccgaaaaaacctggagcagtgtcggaggaagaaggaacagcagttgccggaccatcttcggcggggagtgtcgccaaagcgactgagaaaatggaagaaaattgaggaagagaaatttaattgatttaaattggataattttaaatattgtgattaattttattatttaatttgtgatctttgaaattgtgattttgtccctccattgaacattttgtacatttttagcattagtcactctttttgttgttgatcgctctgtccaaattgctccacctacgctttttctttctatttaaacacgcacatttctcactcctcacatcttatacagacatcttattcattttatattatatttattaaataaacttctttcttatttgggaattattttcccccttattccaccccgccctctctccctcgcgccttcccatttttgcccccatctcgccgtccgagccaacagggtcattctcagggtggtaatactgcagaattgcggtcagccgaaaaattaaaaattatctctctaaaagacccagggagattaaaaataccctggtcaaggatatgatatccatttggaccatttctgaatcctgagccttaattcgaacaaaaagtataaatgaaaatccttcagaatcatttaccatcattatatactttttgcaaagaaaattgaacccaaattccagtggggctgcaattcaaagtattacactgtatttctttctcactttccacaagactttgactcccgagcatccctaacattcgcatcattctctctgctgttgtgcaactacggacaaatgctttt

SEQ ID NO: 33221 - DNA, 1004 bp, Heterodera glycines
ttttgctgcagttgtcacaccaaaatgccgatgatgacgagcagcagcagaaggtcacgctgggcgttgaacgctttgcactgcccgaactgctgattcggcctggcgatgttgaagtgcagcaaatgggcatcccagaagcattgtgtgcggccattgaacggctgccaaagggtgcggcggggggcaggggtttaaccgaaggcttttacttaaaaaaagatgtgataccaccgtgtgtgtgctgtacccaatcccgcattttttgggaattgcgggatttgctggattaatcccgcgggaccccgtctcacgcaatgccgcagccggatctgcaaatttaaaatttcaggctctaatattgactcgccgtagggggcggagcaggtcaccccgcctcgaaattttttaaaaattgttagaattttttttttgaaaaaactgagtttttaaaaatttttagggctgggggaaatgaagtgcacctcgtagcggaggagaagaaggagtacttttgcttattgctttcagaaatgcagctgttgatggcgcggaacattgtgctgaccggcgggaacgccctcttcccgggctatcgcaaaagaatgtaaaaatttggaaaaaaacaaagactcacattttaccaagaaatagtgtaatactgttgtttgtcccccctttttaaataaaaaattttcaataaaaacaaatttcctatggtttccgagggactaggtcgtttcggcgccgccatttcggcgctagcccatgttttttgtgtataacttttttctttgtaagcaaaatcaaacaatcttggtatcattcgaaagtccttcacatgctctactagccttacaaaaaaaaaccaacaaaattctagcctttaaaaaattattaagaaaaaacttcaaaaattttgacttttttgaaattttcatgtataacttttttggtatttgtctaatcgtaaagcaataccttagaaaagcttcaaaacatgt

SEQ ID NO: 33222 - DNA, 993 bp, Heterodera glycines
aattttgataaacagacgaataaatgtaccaaaagagacattatctgttgaattggaccaagatgagaataatccgaccaaaatcactccccgttttgatcaaattatgctgctgtttgatcaatgcaacttaaatgcgtcggttatttgacaaccaaaacgtattgatttatttattcttttcccttttcgccgcagggcacggccataaaattgttcatttaaaaaaaaaacattcttttgagtgtgtttctttcgaaatcccaattgcccccgtcacttttcaattgctttccctcgtggccgagtcctttctcggaaacggtccgtcccccgggggacgtgggtgtgttatgttatgtgcggtgtttgtcatttgtgtcgtccatcgctcgccacaatatttgttgctccattcgtcgtccatccggcgaagaggaaaaaatgatcggaaaaccaaacagacggagaccgatcgggggggggggggaggcgaaatgagtgagtgatcggactgatcagtcagtgggagcagacgacgccgaaaaagcaaaaaagaaaaaaaaacggagagacaaattcacagacactcaaaacaaaactaactcatcatcatcatcagcagcagaaagcagtgatcggtgtgaagaggaggaagtgtttttctgttttctccggttgtgagccgttcggaaacaccggcggaaagtttggcgttttgtttttggaaatggaataaataaatataaatgaattaaatttggaaattctttcttacatactattaaaaaagagctaaaaaagtaaaaggttaagagacattgagaaaagagatcaaaaaagcgtaagaagacggaagcggaaaatggcaaataaaattttattcgtttttacaaaaatgtaaagttgagcgggaacgggaaatttttgggcaaaaccgggaccggaacttgccgggggccgggacctccaatttttttttcgggatcggga

SEQ ID NO: 33223 - DNA, 565 bp, Heterodera glycines
tgcgatcacacgcctgtacatcccgaagagtgcgcgatccgactcgggccagtgccgcattgttgccaccaatgagaagggcacggcggaagcgcgtgtgctcatttcagtggttgatcggcccggcccgccggagggaccgatcacttatccggccacaacaaagtgagaaaaattcaaaaacggatataatatttttttttggtttaaccaatttttttcatgacaaatttcagtacttttttaaaagtaatttttctggcgccgtctcgcttatacgacgtatttttaaaaaatgttattttattttcagtccaacgcaaaaacatttgagaattttttttcaagatttacacctcaattcagaattatagttaaggtgaattgcgtttccatcccagaaaggaaattttaaaaaccgaaaattttttaattttttaaatttcctagaaggttttttcttgtagaagatctaagaaaaaatttcaaacatgcatttttaaaaatttttctttaaataactgtaaaaaaacatttttgagataaattcatttaagaaataata

SEQ ID NO: 33224 - DNA, 921 bp, Heterodera glycines
ataaaagaaacaagtgtttatgaaacatttaaaagttcgttcattatgctttgcatcagctcaacatcgttgttgctggtttgtgccaaatgcagcacagggttggtttgaatttgaactggcagtgattccgatacagcaggtgtttgcaaatgaagctgagaatacatattcggtgccggtggcttaacaataatttggtctaatccaaatttatttaaaaaaacctgtaataattcaattcaagacccaaatccaatggccagcgtgtagttagcaaatagaacacgctgaactgacacccctgtctgcccgctgcccggtggaggaacggatggattaaatggtagcacatagtaaggcaggccagcataatgctttaaaaagggaaaatgtattggctaaattggcctatttacaatttgggggggggggaagatattgctgttaagctgatccttataattctcatcaccagagccgggattgcaactattcaaatatgaatcacgcaaacaattaacaattaatctttgtaatttttttctttttagttaaagtatttttcaaaagttgaaaacaaacgaacccaagctcaaagctgaaaaaaaccaacacaggacaaggctgaacctcgcttcttggggttggattacataaggaatcattgccttggaattcaaatgtgcagttatctcatccgattgagccaaatgcgcgaactgttgttctatttgatgcattgtagtaaagatcgactaaaacagtattaaagtacatgacaaaactttttgtagtgaataaatattttaaaattatgaactgacacccctgtctgcccgctgcccggtggaggaacggatggattaaatggtggcacattgtaaggcaggccagcataatgctttaaaaagggaaaat

SEQ ID NO: 33225 - DNA, 880 bp, Heterodera glycines
ctctctctctttctctccgttcatttgttttcccttcgcttttctcttctcgcccaaactttgttctttcttattactttgtttgagtggtgaatgaatgcatggaagaagaagcgaacgaacgccaatacgattacgaataaacgacgaaaaactttttccctccccccccccccccactcttttgcccacccatttctctcttcttcccttgctgatgctgtttctgttttgtttgctgctgtcggtttcagttaggccatgttttagttgctgatttgtttaatcaatcaatcaattttttgggggcgatggcaattacccaacggccaattgtcacgtgacagaatgattaattgattaaaaaagcctcttttcgtaaaattcgtatccgtcattccccttttttttaatagataaatgaaaattgattttccctcctcttaattgtttgaccttttttaaagtaaattcacattgcctgctgacatttttactcacttccaataatttcgctcatatttctttttctccttatgccctccttcattttttactttgagaaaactgaatgaaatcatcacatccaaactgaattgagttgttcgttttcatactccaaaacatacaaaagttgtagcaaaactaaaacaatgatgagacataacgcacagctgtttatgtattttatttcgttaataactccgttaattaggtaagccaatttgaacggaaactgacaatttgatctttttgaatgccatctttttttagcctctctcattctcaaatttccaattgtttcttaaattaagctgctaactaaattcgttaatcgaagcgacaaaatgaagtggacttacaaagaggagaactcttt

SEQ ID NO: 33226 - DNA, 572 bp, Heterodera glycines
ttcttcatttgcctttctcgggggtatcaatttcattcgacccgtagcaaaacaatgggcaaaaacaatggacagattgaaagaaaattgacattgaaaaagcaaaaacaaaagaagaagtttgattttgaacaaaaagcaaaagcaacggacgggtcggatcaaaaacaatcatttaactttcatttttaatttatttattgctttgactcaccaaatgggagggatcgaacgaagtatgaactccgccccccccccgcacacctcaagaatttctcgagaaaaaaggcctaaacccaaaaaattgccaataattttttcggaattattttacccaccggcagctctgttttgatcattatagtatgaccaacctgacaaaaaaattggtcaagcttgactgaaatcaaaagtgtccaaggcaatgaaaaggaaaggccattaaactttgtaaaacagcagaagtataatggaaatgtatgtgcacaaacaaatcacagcagcacgaccacaaaaataaggcacacaaacgcaaaatgggaggacaaatgggcgaattggggggggggggg

SEQ ID NO: 33227 - DNA, 1244 bp, Heterodera glycines
  unsure (1)..(1244): unsure at all n locations
aattatattgttctaaaatttaaattcaaaattttttattaaatttttaaacataaaaatatctcaaacaaaacaaacaataattaattaaaaatttatttaaaataaaaccaaaaataattaattaaaaatttatctcaataaaatgaaaaataataataaaaattttataaaaaaagaaaaaatcttaaacaatcccttaaacattattaaaacaattagaagcaattaaattatttttctaaatagtagaaaaacataattgatgatttatctgcaaaaggtacactatgaaatgaagtggaaaataagggggcagagactcagcggatgagagggggtggcaatgccaatgttgtgctgtgagggcaatgacgccaatggttcgatggatgcgcgtcgttttgtgtggattttctaacaaagaatgcagtgagagagtgataaatgagagtcagagagtctacgacgagcaaatataaagagatgaggagagagggaaagagagagaaacagagagagaagagaggggaagaagagagagagagaacgacggaagagggagagcgtgagatagaaagagaagagagggaaagtgatagataggcagtgagagatttcccgaaacttcagataaattacccgagcgctgaaacacgtagctcgaagctcaaaaacacgacgtttttgatgcagtaagtaaataaaaatttggtataaaagaccaaaaattataatttttgaatttttatttcaataaaaatgcaataacacgaaaattacacccgaaagaaacggtcctaaaaatttcaaaaaatacacccctaatatggacccataaattttcaattacaaccctaacaaatgaaaataaaaaaatcatctccaaaatttattattaattttcttaacaacttgcaatggtacggacgaaattgataaaaaaaaagtcaattttagaatttttataaataaagatacactgaattgttccaatttttaacaccaatttttgcacctattttgggcctttttagtaggaaaaacaatatgattaaaggaaaattggcggaaattttgacttttaaatttttacaaaagcgataaattgacaaatgttgcgcaattttttgcaaattgtgttggtggagaagccaataaaggattggaaaatgttttctcncccactaacccttcccttggaggggagattaaataaatcttttcaaataaaagggtttaaa

SEQ ID NO: 33228 - DNA, 1756 bp, Heterodera glycines
taatcaaatttctactttctttataaatgttagctaatcattcagcgtctatttattttctgtaaaaatttgcctctttatttaaaattaaattatatataatttcatgaaataagacactaaatgtatagagaatgaattaacgtggtcgattggaataaatggacaaaaaagcaaagtcaaagacaaaaccttaaagcaataggcgattggaataaatggacaaaaaagcaaagtcaagaacttatcctacctaatttcatggtggcaacgaggcatttgactcccttaagagagccttccttctcatgtacttgtacctaaaatgttgttggcacaaaaagtaaagggggaaaaagaagacaaatcatccgatcaagggctaagtctcaacagatcgcagtgtaaaagctgctctactgctaacaaccccctgaccagtagtcaagtcgtatacaagtgattttgcgccccgacgttcaaccatggcacacgagtgctacggctttggcaatgtgcgagcaattaagcacgcacatcgggccagatgctggggcatttgtgctgcaccgcaagcggcgcataagtagtgcctcccgacaccggggagcaagaatattgctatcttgcctaggcgggattctgacttagaggcgttcagtcataatccctcagatggtagcttcgcaccattggtctatcgaccaagcacatgaaccaaatgtctgaacctgcggttcctctcgtactaagcaggattactatcatagcaacaggtctttagtagggtaaaactaacctgtctcacgacggtctaaacccagctcacgttccctattggtgggtgaacatccaacgcttggcgaattctgcttcgcaatgataggaagagccgacatcgaaggatcaaaagcgacgtcgctatggacgcttggccgccacaagccagttatccctgtggtaacttttctgacacctcttgctggaaactttacacattcaaaaggatcgataagccacgctttcgcggtccgtattcgtactgaaaatcaggatcaagtaagcatttgcctttttgctctacgagaggtttccgtcctctctgagcttgccttaggacacctgcgttacgctttgacagatgtaccgccccagtcaaactccccgcctgacactgtcatcggcgcgggtcgccgggccaccgggtggcccgacttaacaccaaaatggacaccctttcgggcgcactcccgttttaccgattaagtaaggaatcgatgaaagtagtggtatttcactggcgccttgcggctcccacttatgctacacctctcatgattcttcacaaagtcagactagagtcaagctcaacagggtcttctttccccgctaaatttgccaagcccgttcccttggctgtggtttcgctagatagtagatagggacagtgggaatctcgttgatccattcgtgcgcgtcggtagttagccgacgaggcatttggctaccttaagagagtcatagttactcccgccgtttacccgcgcttaatcaagtttccttggcttaacattcagagcactgggcagaaatcagacacggtcaacgtccacaaggaccatccgtctcctctgttttaattagacagtcggattccccgagttcgtgccagttctaaactggtcgttcagcgccaaccgaagtgcataccctgacgagcatacacgcagctgaagcgctccacaagcagctctca

SEQ ID NO: 33229 - DNA, 164 bp, Heterodera glycines
atatcggaggctgtggggctaggtcatttcttcttgaattgcttcctgctgagtggggcattgtccctgcctagcctgggccctaaagtctcttcctgcctcgtctagtgagttataagccatgctttttgtagaaccaatgggtgagatgtgagatagctcat

SEQ ID NO: 33230 - DNA, 285 bp, Heterodera glycines
  unsure (1)..(285): unsure at all n locations
ctctagagtcacanatctttggtatcattagaaagctcttaacaagctctatcgtcttccccaaaaaccacaaagatataccgacatgtaaaaaagttataaattaaaatatgcaaaaattctgactttttggtagtattcatcttgcagcttttttataagttgttcaatcgcttagaaatacttagcaaaagcttataaacatatacggctttcgaatgatgccaaatttataatttgtcccccccccccacccgtagaaatgctattttgagccctctttct

SEQ ID NO: 33231 - DNA, 1244 bp, Heterodera glycines
  unsure (1)..(1244): unsure at all n locations
ttttaatgcgattgtttaacagaatttgtaaanaaagaccnaattgattaatttttgggtttntaggatgcttaaaatgaaagaaaaaaagttggaatatttttttaaattaaaatttcaattaaaataatggtaaagaaaatatgaagaatattctatcccagtggggaattgaacccaagcgagaaataataaaataagaagctttagccacttgaccacttatgcatatgaacaaatgctttaaatgaaaataaataatttaatttttttttctcaaaaaatttctccttcttcaccattccctactcttttctcacccagacccccattcttaccagtacaaatttttaccggcggtaccggtactagacaaaccggtaccggtaccggtaccggtaccaaaaaaaccggtaattaccggtcggtaccggtaccggtaccgctcaactctagttttgtgtgataaattagaatattgaaaaattgctttaatcctgaaaataaaaatttatcactgtaattgcgtcaattattgctcaattaatttgagtttttctttaacttgccaattttttaaaatcctttttgctcggttgattcaataaaaatggcaaaaaaccaatggtaaatgactgttaccgtttgccctgagggttgtcctactgtaattttcagtctttaaagaaatttaatcctttgtcctttgtccaactgatgatgagttgtccagacacggccagaaaagcccatttttaactttcaccttacgatcgttttccagcggttcacaattaaacaaattatttggtgttcagagtcaaaacatttgcatttttttcttttttttaattaattttcttttccttttttttgcacagaatgcaatagaattttcattgacattttgcaccataaaggcgaaattaattggaagaaagtggtggaagaaaatccgcatctgtgggataaacggaagaaaataaatgattgccatttcgaaggccatccaagggaacgcagcatttgttgaccgtcggtttgaagccaatttcaaagggatgaaaaaggcgagcatttcaacgcgtggcgcttatcattattttgagtaattagcaaacatttcacagtaatcattgacgcacttcataacaactttgcaattcaaaattcatttattttttaattactcagagggggagccaaatagtccaagcgccgaagcgcaagcggatcccttcatt

SEQ ID NO: 33232 - DNA, 191 bp, Heterodera glycines
aagggaaaggaagggaaaggaagggaaaggaagggaaaggaagggaagggcgaagcgaagcgaacggcggcggaagaaaaaaagggagagggagggagaagcattctgtgtcgaattcactcacttaaaaagacttttgaattaatatttggtccccttgccttgcccccctccctcccctcctccctttt

SEQ ID NO: 33233 - DNA, 783 bp, Heterodera glycines
ccaaataccgtaacgaacagtaggtcccggttaatacagtaccttcgcaatttggttattctcgcaatgcgcaacaacgacattcgtccggacgaaccctttgactgggagcaacaggaaacgatggcatccgaagaaacagcgacaaattcagaaacaacggcaccaaaagatgaaacgacgagggaaagggacgaacggaggacggaaaatgggccaatgccaaacggcggggggacggaacagaaacaacggaagacgaaccaaacgaacggcagaaacagcacaacacacgagcagaacaatggccaaaaagaagaggggaaaacggacaattttgacaggagataaaagggggagcagaagaaggacaagcaaaagcaatcgaagtgatctgatctgatcaatgaccgtggccaatgatttcaatcgctgcctttgaatggaaaaagggcgggtcaccgccccggtgctatgacgaagctaaaaaagtatgagtatgggcgaagctaaaaaagtatgagtgatgggtgatcggaaggggcgggtcatttcagtacggaataaatgattttattaattaaattaactagaattagcaattaattaataatctaataaataataaaatatatctggctctatttcagtttacacgaccacgaaataagacacgatcatgtaatattttgataaatttaatgcatcataattttttgtagaagcatccaaattaatcattcttggtaccatttggtagcctaaagtatcctctattttttt

SEQ ID NO: 33234 - DNA, 767 bp, Heterodera glycines
tgattaagcggtgcccatccccaccccatggcatcacacctcgttcatgaagttgatcagattgcgttccgcccgcgcaatttcgtcgtcgtcttcacgcatcactttggcgtccggcgcgaaatcgacgcccgccgattgcgcaatagtgaccaaatacctagagaaaaaattggaatttaaaaagcaaacaaaaatggcactgattaaaaaaatatttaagcaataaccgataaattgtcaaaaaagtcacaccccccaaataaatggtgacaaacttttcgacgagcaatttggacggtgcgctgacggacaatttctgcaccaatttgggcgacactcggctcggctccggcaattggttcatacgggcggcctccgcgaattgtttgccgtatttgtgggtcagttcgtcgttgatcacctacatttggacgatgcttttcagtttggtttaattaaattatttagttaagcgtgataatgtttaaggaatttttagggaaaatggaaaaattccattaaattctttaggattggaatcggccaatttataccacacaaaagtaattttggtggcaccaaattttatttcttgggtggacaaaagcttttcacaccacggcattgtttttctgattttgccattgcccaaagtatgccttgaattccgcaatttcgtgtccgatgcgaggcgccacccacaacaaactgctcactgcctcggcgatgccatcgtccaattccctaaaagagcaatgaaactt

SEQ ID NO: 33235 - DNA, 967 bp, Heterodera glycines
gaatagacgagaaagggggagagacgagaaaagggaagagacgagaaaggggaagaaacgagaaagagggagagacgagaattcacatgtgtcattaatctcttcactggtcaaagtttgtttatttggcaatgccggtttcttttgctctcgctctctctctcgtggatgcaaagggaagagaagagaaaggcactaagattacagcaattagttgtattttaagtaaattaaaaatatttatatgtgtgggttgtttaatgatatttattttgaattatcattttgaaatttggataatgaatattttcacgaagctgcaaatatccgaaaatggctcttaagaaatgggccgcaaatttggggtaagcttaaaattaaatgcaaatttacaagcaatgtattatttttccatgctcagatcactagtgatcgggagagataaatcatcccaaaggattccattctcaccattttttttatgcgtttattttatttatttttgcttagttttcaattgaatgaattcataatttataaattcttaagtttagaaaattaattttgagttaccgccattttggcgtggaacaatgccaaatgttttcttttgctgctgctgtttcggtttttccgctttgtctccaaggccaattctgctaatgatgttcattctttaaaatggactaattatgagcactaatctttgtattaaattattattttggccaaattcaatttgcattttttttttaattattttgtccatttctcacatttcggctggcaaaatgattcagttcggtctgaagccgcgcctccgcaaacagccgcaggcattgtgcccggctacacttgcgcacttggactcgtccacgcgaaggattgcgtccgctggcattagtccgggcgcgttgggcagccgagccgctctcgacctgttcaacacgcacacacaaaacgctaa

SEQ ID NO: 33236 - DNA, 919 bp, Heterodera glycines
  unsure (1)..(919): unsure at all n locations
gtatcactaactactcaaatgttttatcaaattacttttgttgacagtttttgttcacagattcaatttggataactttgataatcaaaaatatcattaaaaatattattagcaataatttaattttcttagcaaagggtaaaaacttatggaaataaatatatttgttaaataatataaattgttgacggaatttgcgaaattttagatgtttaagaattaattcttactaataaatgatgcaaatgagaatttattactttggattgattgcaaaaccaggaaaattaaaaaaaccataataattatcatattttcgtggtgacaaatggcagaaaaatttacattaaaaaattgggtataaatttttttatcctcaggacaaatgcgaaaaatcagtacaaattaaaaaaaagacattttattaaattaaagaaataatataaaaaaaaaatttaatcaaaaaaaggaaaaaaatacttctgcaaaaaaaaacgatttaaaaaattcaaataaaaccaaaatcaaaattatgccatttctccaaaatatttcgtcaaatgatttctgttgttgcaatttttcattagctaattcaatttgctcagttttggtgctcaaacattagataacattcaaaacgaataaaatgaataaattcattttcaattatttttaaggtttcgtaatttattcttttaataatatagaaacaataaaaagcgaaaaatcaaaaagctttaatgaaattcgatttttgcggaaattattttttaaatatattttttcttattgatttatggtttaacaaatttttaaggagcggtgtctttaattgattttaaagtttaaaaaataatgttttttcggcaaattntttctcacttacgaattagtatttttttgaaaaatgagcatc

SEQ ID NO: 33237 - DNA, 235 bp, Heterodera glycines
ttaggcattccgtcgtgcctgcaccaccacttcggcctgctacaatattgaaattttgttggacgcggcctcgtcaatggaccaatttgaattggtgaacgaaacgacccaagaaaagttgacattgcaaaaagaaggcgattgtggaaagaacaaatgtaaagaatgtgagaaaatgaatggttggctgttgaagaagcgatgtttatcgtcgaatgttgttgtttttggggag

SEQ ID NO: 33238 - DNA, 774 bp, Heterodera glycines
gggggaggaggggaggggggcccaatttgtgtgtccagtccaattttacgtaaaataataataattaaacaaaaaaagggggggtccaattttgtaattagaaaaggcattttcaaccggacgggacacagcaaaaaagcattttcatcagcacacattttgcaaattgtgcatgacgtatttccccccccccccaactttaagcattctcacaagaaaaccgcaaaaaaaggcaaaattttctaagtttttatgtctatctttttttttttacagttcgatattatctgtaattatttgtaggctaatagagccggtgaagagcattcgaatgatatcaagatttttgcattcgggcaacaatataaaaagttatgccgctcaaaacttggctgggacggagttggcgggacggagttggcccgttctgattcctccctcccttttggtggtacagtgccaaaagcaacacaaacagagaaaaaaaaaattttttttaatagacattgtttttttatgtaaatgcatattttttcctggattctccatagcctaattagtaggaaaacacttttttttgtgtttgcaaacaaaagttagacttttatttacatatttttcggatttttctacatattacatatgggctcccggacttttcgccaatgaccgtttcgacataaaattaaatatattttttaaataaaattcaaatttctgcaaaattatatggacggtggcggatttgggatcaatataaaaaagttttttttt

SEQ ID NO: 33239 - DNA, 924 bp, Heterodera glycines
attctgatgaggaatttagattatgtagcaaaatttttccttatgagactctggaaatttatttaccttaatcgaaaacgctacagctgaccaaattttggcaatcgttgaaatttgtgcaaatatattgagttttagttttaaactaacgaacaaacaaaaaagaaggttggcacaatacgccgatttttatagagaaattgccaaatctcgttcagagaaaacggcaagaaaaaggatacaacaggggagtggtatagccctgggagctgtcttggtcccggtactgagtgttttagctcaacatttattagaaaaaataacatcatgaaatttgcaaagaaaatgttaatgattcccgaggcggaatatttggctctacggagtgcgatgaatagtggtgattatctccaaaatgaaaaagcgagtttagacgcaaaaatttctcagaatttacaagaccccggcataagcgagtacctcaaggcgaagagacatgattggctctataaagaaagacgtacggtaaaggggatacttgaaaataggccacagaaggtcgtgattgagaatcatgtacccggtccaaatgttgcaccatatctgggcctcaataaccaatccaaaccacaggagaccgaagaaccacggaaaataattattcctaggaaaagacttaaagagcgaactcctgatcctgaatcaaataatgatacccttgaggagttaactccggaaccccaaacaacatccacacacaaaacacccgttccaatcaaaactattatacacccgacccttttaaacggtctttttaggtacgtgaaggaaaacaaagatttattaaaaattacggcggccggaaaggtacagtcgaacatgaatttgccgattgaaaacagtaattatagggatgttttgttg

SEQ ID NO: 33240 - DNA, 1240 bp, Heterodera glycines
  unsure (1)..(1240): unsure at all n locations
aagttaattgcctcagatctgatgtttgatcngggttcncaatagggattgctgtttccatttcaatgaaatttgggtgaaatgtggccagttattgtttggatntagtgtaatagccgttacataacttggtgtactttgaaaaatcaattgatcgaattccaaatttaaatgttttcgatccaataactcattctgttcacccaaaatgtccggttgtaccaatgcccacaatatgggatgtgatattcacacaaaccctatgactgagctctcaatttgcgatgaaccagctagcgatggtgcggtgtccgctaatattttatcaatttcccattgattagctaatttttcagaatccgtcaattccaaattttcaaacagactcatgaaatcatccgaattttcaacatttggctttgacttaggcgacttcttgcaggcaatgatgacgctactacattcgattctcacttcttcatatccggaccccgcagggttttcattggattcagtcccttcaataacgatttcaaccccaacattagtgtacccctcgaggtttgaagctacttttgagctatcaatgctcaacgcctcgaatgattcataaatggtccccgcaaggctttcaaaacttgctgaactctcatcacttgttaaaacttcgggattggaaagcttagaaggcagatttttggttctcatctgaatgagataaacttattttggaccattttataatattaacacatatataaataatggatgaataatttatgaacacatgactctatgaaagcacatggcatgaataagtgaatgaatgtggcaagcatgagtgaacatgcgtgcttttctacatgtatgaatgaattaatgcgtaattgaatgaatgtttgttgactaatgaatgaatggagaggccatacacgatagactcatgattgacaattggcatgggtacaaggagcatcaaaaaaaaatgtgtgccaattgactaaaaggagaatggcactgatcaaaagagaatgtgtgcctaatgatcaaagaaaaattggggaatggtattgatccaaagatagtatgtgccaattagattggggaatggcactgatcaacaaataatatgtngccattgatcaaaggnngaatggcactgatncatgatatgatgtgagacgtggcactgatcaaaagaatgtgcgcaatttgagcaatgaatcatggtacaaatgat

SEQ ID NO: 33241 - DNA, 985 bp, Heterodera glycines
ttttgtacctcttctaatcactgttcttcctcttttaatcactattgtacctcttttaatcacttttgtacctcttctaatcacttttgtatctgttctaaaatttaaaaaacggccgcgaagcggccgaaaagaacaacaaaaattagaaacgggcgtgaagcgcccgtctgagtcgatcaaaatttaataacggccgcgaagtggccgtcaaagcccaacaaagtttaaaaacgggcgcgaagcgcccgtccaaggccaacaaaatttgaaaaacgggcgcgaagcgcccgtccaaggccaacaaaaattgaaaaacgggcgcgaagcgcctaacaagctaaaaaacgggagctaagcgcccgtgtaagttcaacagatttaaaaaacgggcgcgaagcgcccgtcttgagcctcgatgtggactaaaagcctctaataattttttaaaaattcaaaaaaatctctccaaccaaatcgatcaatttgaatcgcttcacagtctaggtagcgaagctcccaaagcgcgaagcgctttttcccagctaaatagccgacggttcacgcacccgctagttatatatacgttatattgacaaggggtttcgtcttcaaaaacaaaatctcgggaacgggaatagctagggggctgaaattttgcacaggggggtagctcgagacggcgcatctgggaaaactataggtttttttctccgagggccaactgagtaccaggggccgatttcccgattttgctcgcagttcaaggcccgtaactttttttctgaaactctaatcgaaaaatgtccgctggtaagaaactaagttgaagtgttgactaaaaaacaaaaaaaaacccggcctctacccataataggaaggggctgcagaaaaagggagaaattcagtacccacttttttccagttcagccccgggggaataaccccgtcagggttttgaattggatcaggggggggccagcgg

SEQ ID NO: 33242 - DNA, 1270 bp, Heterodera glycines
ccctgggagaagggagtgggaaacatgatttcaaaatttttgttgaaatatttgtcgtgctctgaaggggcgtgggagggggggggcggagggccccaccagggggggcccggagaggccgagtgagtaccttcggtgcaggaaaattattaaattttaaaattttttaattgctttttaaatatgccaaaaaatgtaggcttaacttttttagtgaaaattcgatcactcatattttttgctaattgagcagaagcgtaccaaactatgcagggatactccccggtaaaggactaacttacactgaaatgagcgccgagctagctggctcaaaaaaaattttcgaaaatctgagtctttcgttttttatttattttttgcaaaattaattcataaatattttttcagaaagggttctgaaacgcaccaaattttatttacaagttaataaggctctctgatgctttttctatcaataatggaggtgaataaaattttaaaaattttttaattgctttttaaatatgccaaaaaatttaggcttaactttttagtgaaagtttgatcactcatattttttgctaattgagcagaagcataccaaactttgcagggatactccccggtaaaggactaacttacactgaaatgagcgccgagctagcttgctctaaaaaatttttcgaaaatctgagtctttcgtttttatttattttttgcaaaattaattcttaaatattttttcagaaagggttctgaaacgcaccaaattttatttacatgttagtttaggcactctgatgctttttctatcaaaaagggagatgaataaaatttttaaaaatttttaattcctttttaaacaggccaaaaagtttaggcttaacttttttttcagaaactgatcagaagcgcaccaaactttgcagggatactgaaaggaagagaaaaacctattttaaatattatctagtcagttcatttaaataatttttatccaaaaaatttttttttgggttttcggggcagtccccctgaaccgatgcgcccagatttatggggagaccgaatccttccggaatagcttcactatagcctgtactttaattctgcgttggatttttgctccccataattgtttgagtaccccaaacggacacttgaaaaaatcgatttatttttgttttcggggcagtccccccgaaccgatgcgcccagatttatggggagactcgaatccttcgggaatagcttcctctatagctctgta

SEQ ID NO: 33243 - DNA, 971 bp, Heterodera glycines
  unsure (1)..(971): unsure at all n locations
catattctatatgccatggcaataataaaagtctatagccacgaaataaatccactctatgccaattcttacgtattcgcatattctatatgccatggaaataataaaagtcaatagccacgaaataaatcccactctctgccaattcttacgtattcgcatattctatatgccatggaaataataaaagtcaatagccacgaaataaatcccactctctgccaattcttacgtattcgcatattctatatgccatggcaataataaaagtcaatagccacgaaataaatcccactctatgccaattcttacgtattcgcatattctatatgccatggaaataataaaagtcaatagccacgaaataaatcccactctctgccaattcttacgtattcgcatattctatatgccatggcaataataaaagtcaatagccacgaaataaatcccactctctgccaattcttacgtattcgcatattctatatgccatggaaataataaaagtcaatagccacgaaataaatcccactctctgccaattcttacgtattcgcatattctatatgccatggaaataataaaagtcaatagccacgaaataaatcccactctatgccaattcttacgtattcgcatattctatatgccatggaaataataaaagtcaatagccacgaaataaatcccactctctgccaattcttacgtattcgcatattctatatgccatggaaataataaaagtcaatagccacgaaataaatcccactctctgccaattcttacgtattcgcatattctatatgccatggaaataataaaagtcaatagccacgaaataaatcccactctctgccaattcttacgtattcgcatattctatatgccatggcaataataaaagtcaatagccacgaaataaatcccactctatngcgattcttacgtattcgcatattctatat

SEQ ID NO: 33244 - DNA, 949 bp, Heterodera glycines
ttgatattcaatcaaaaatcgcgaaataggggcgaaaaattataatatgtgcttgtttcaaaattaaaatcgatgtaaataactttttaacaattttaatgacaaaatacatacataaatttcatctttttttgaataaaaagcaaaaaatagtctgtttttcttacagaaaacataggagggggggggggggggggtttcgtgttaaaaatgtgtttctcttttctcattgaattaaaagccgcagaaaaaataactaaaaacctaaaaatccccaccctactcatcaatttcaattattttttgagccgcgtggcggtcaaatatccatgagtacgattaattcaaacagcgtcagactgtttagctgtaattcttcttcatttttcatatctctgatcaaacctaataaatgttaagatttttaatgattaaaaataaaaaaattaatgattatctttaagtaacgatctattaaaatttttcacttctatattttcgaccctggattttaataaacttattgatattagtgaaattgaaatgaaaaatattatttttgactgcgcgacgcaaatgtccattttttctaagcgcaacaaatgtcgcggcgcaaatggagcgtcgcaaatatccgatacgcaactgtctgaggcgcaaatggcgagacgcaagtgtctactttgctgaccgctgcaaatgtccatttttgctgtgagggcaaatggagcggcccaaatgtcgcatcacaaaaataataaccatataaatacaaagcaagcattggtttgtttaagtactttaaaataaaaaaaaagaatatacaaaatgtatttcacttgctaaaccaaattaatacttaaaacaataaaaacgaaaattataaaactaatccaatctatacatattaaaattctaataaatccctgaccaaataattgcctaaaaa

SEQ ID NO: 33245 - DNA, 1092 bp, Heterodera glycines
gggaaaaaaagcttttaaaaaatattcccctgggaaaagggaaggggaaacatgattccaaattttcaattttttttatttattctactcaaaacggttcagaattcaattaaaaataccattcccggttcgaaaaatggggtttgaaaagtttattggggaaaaaaagactttacaaaataatacccctgggagaagggagtgggaaacatgatttcaaaattttcaattttttctagtctaatctactcaaaacggttcagaattcaataaaaataacattcacggtgcgaaaaatggggtttgaaaagtttattggggaaaaaaagactttacaaaataatacccctgggagaagggagtgggaaacatgatttcaaaattttcaattttttctagtctaatctactcaaaacggttcagaattcaataaaaataacattcacggtgcgaaaaatggggtttgaaaagtttattgggggaaaaaagactttacaaaataatacccctgggagaagggagtgggaaacatgatttcaaaattttcaattttttctagtctaatctactcaaaacggttcaaaattcaataaaaataacattcacggtgcgaaaaatggggtttgacaagtttattggggaaaaaaagactttacaaaataatacccctgggagaagggagtgggaaacatgatttcaaaattttcaattttttctagtctaatctactcaaaacggttcagaattcaataaaaataacattcacggtgcgaaaaatggggtttgaaaagtttattgggggaaaaaagactttacaaaataatacccctgggagaagggagtgggaaacatgatttcaaaattttcaattttttctagtctaatctactcaaaacggttcagaattcaataaaaataacattcacggtgcgaaaaatggggtttgaaaagtttattggggaaaaaaagactttacaaaataatacccctgggagaagggagtgggaaacatgatttcaaaattttcaattttttctagtctaatctactcaaagcggttcaaaattcaataaaaataacattcacggtgcg

SEQ ID NO: 33246 - DNA, 1310 bp, Heterodera glycines
  unsure (1)..(1310): unsure at all n locations
gggggactgccccggaaaacaaaaaaaatcggattttttcaagtgtccgtttggggtactcaaacaattatggggagcaaaaatccaacgcagaattaaagtacaggctatagggaagctattcccgaaggattcggtctccccataaatctgggcgcatcggttcggggggactgcnccgaaaacaaaaataaatcgattttttcaagtgtccgtttggggggtactcaaacaattatggggagcaaaaatccaacgcagaattaaagtacaggctatagtgaagctattccggaaggattcggtctccccataaatctgggcgcatcggttcagggggactgccccgaaaacccaaaaaaaaattttttggataaaaattatttaaatgaactgactagataatatttaaaataggtttttctcttcctttcagtatccctgcaaagtttggtgcgcttctgatcagtttctgaaaaaaaagttaagcctaaactttttggcctgtttaaaaaggaattaaaaatttttaaaaatttgattcatctcccttattgatagaaaaagcatcagagtgcctaaactaacatgtaaataaaatttggtgcgtttcagaaccctttctgaaaaaatatttaagaattaattttgcaaaaaataaataaaaacgaaagactcagattttcgaaaaattttttagagcaagctagctcggcgctcatttcagtgtaagttagtcctttaccggggagtatccctgcaaagtttggtacgcttctgctcaattagcaaaaaatatgagtgatcaaactttcactaaaaaagttaagcctacattttttggcatatttaaaaagcaattaaaaagttttaaaatttaataactcttcctgcaccaaaagtactcacacagcctcttcgcggcctcgtggtgggccttcgccccccttcctcccacgcccttcagagcacgacaaatatttcaacaaaaattttgaaatcatgtttcccactcccttctcccaggggtattattttgtaaagtcttttttccccaataaacttgtcaaaccccatttttcgcaccgtgaatgttatttttattgaattctgaaccgttttgagtagattagactataaaaaattgaaaattttgaaatcatgtttcccactcccttctcccaggggtattattttgtaaagtctttttttcaaaataaacttttcaaaccccttttttcgcaccgtgaatgttatttttattgaattctgaaccggtttgagtagattagactagaaaaaatgaaaat

SEQ ID NO: 33247 - DNA, 967 bp, Heterodera glycines
  unsure (1)..(967): unsure at all n locations
ttaggaattatgagctgaaatctgtaattaaatgtacgttaactctaaaagactaaaactctccgacagcgtttgaataccatagcaaattgatcaggtcggaaactttaattgaaatcattgaatcacgtaaactgtctcccttctgatcagatcaggagcagaaggcggcctagaatgtttaaagacattcattggcaagggcacacatcattaaagcaatcaattaaaggggacggggggcatttcgctacttaaattgttttctcacgtgtcacaatctctgaacaacgaaaacaattttcattatatgtgtgtacgtattttctattttctcctacacaaaagatgcttatgatgatgatgactcatgtgaaaattaatacgaatgactaataggaggaaattaaattaaataaattaattatattaattattaattaattttagataaaaaaataaaacagtcggaaaatgtcttctgacaataatgggcttattcatctactaaacagccaatttgcttcagcgacagcatttaatgtgattttataaacaattttattaaaatactgaagtttattaattaaatacaaatattaaaacaaattaaaatagtttatatattataaattaaaatttacaaataaaaataatttatatcaattattactttattgaacttttatttattattttcgaactttaacaaataaaataatataacatttatttatatcttttcaattaaattcagtttagctaaaaataaaatattattgtgtgggaaaattattttttaatttttaaaccaattaaatacaattttatttatagtcttttttccacaacccaattccggccacaaatttgatggcccaaaatggacttccgnntcgtggtgtccctttcgtcgtgccccaatgtgtgccgatgccgaactcttccaactcctcctctgccctgc

SEQ ID NO: 33248 - DNA, 857 bp, Heterodera glycines
ctcttctctctctctcttcctctctcttctcttcctctctctcttctttctctctcttctctctctcttcctctctctcgctctctctctttctctctcttcctctctctcgctctctctctttctctctcttcccctctttctctaaaaacgagagaagaaccaataacacagagagtgcagagtgaaaacaaatctttttttttctcaaatttctctcttctttggcgtaatttactctcgtttctttggttcctttatttctgaattacatcgtagtgcgacatttgcggacctatcaatgcttttatttgggatttttataaaaataattaaagaggaaaaaaattaaatattgatggggaaatgtcaagaaacaataataattttaaaaaaaataataataaaatttaacaatttttatatgttttttgtgtttataattattattttctttttgtttatattcaccacaaaacgaaatcttttgcaaatttatgctcacagaagcagcaagcacacaatttgtttataattttagcagaaacaaaagtcattctgattaaatgtcattaattatttggaaaggggaattttggcagtcaaaatgccacaaattcctaaataacatttattttaaatttaatttatttaaaatgaatttttatttttgcaataagaatgtgattggtttgttatgttctttcatattttgttttattattattttacatttgtttttattatcgatatgaattccacaaattcgactaccgtaacccaatcggaaaacggttacgactacagtgtttggaacaatcagtggaaaaatgtgtgggtgtttaccgccaatgaac

SEQ ID NO: 33249 - DNA, 967 bp, Heterodera glycines
  unsure (1)..(967): unsure at all n locations
ctgccaaattataaattttaaatcatttcaatattntgctcatacacactaaactacaaaaaatggatttgaaccttataaaatgccaaatttttatcaacttctagcttcagaattgcaaacaaaagacatatcaagattatttagtaataatctcattctttgccagcgaaaatttacgaaagcgaacaaaatacttaaaaaattcccaaattccgaaattcttttaatttaaaaaaaattacataaaattaaatgcatgccaaatatggttgaaatttaatatgaggatttttatgagtataaattttataaaaacttttcaatgaactttttgtttgattccaaaattttgcgggattattttcaaaaataaataatatatatattttatcatttttcaaatctcactttgatttcttcactaccctcatttatgattcaaatttttgtttagacactttccgaatgcagcttgaatttgtcgcacttttggcacgccgattaaacatttcatcggatggcacacatttagcggtgattcaatttgctgaatcggctcaacttgaaatcacgcttaaccaatacgcatgtgaaagtcaagtaaatgttatggactaatttaattattccttaattaattactaattattaattcattacttttagttggaatgggccattcaacgcattcgctatttgggcggtgccacaaacaccggcaaagcactgaattttgcgctggagaatggctaccaaaatgcacgcggcggaattgtgccaaaaggtgaaataaaatttttaaaattattcatttaataaatttatttttaaaatattcatttaaaaatttacttttaaaattattccaattaaaatatttatttaagtggctattgtggtcacggatggacagtcgcaggatgaagtggaagaaactggtcatatttttttatttttcatataa

SEQ ID NO: 33250 - DNA, 985 bp, Heterodera glycines
  unsure (1)..(985): unsure at all n locations
aaaattcatttttttaaaatttntggtaaaaataaatgaaacattttaatgtgaccatggaaaaagacaaaaattgttggtttaaatttagaaaatcctatccttggattgccaaaaatcgaccctcattcagtttcagcagcggaactcacaaatttccgtggccaatttgcttggcaaaaggtcgcccaattcgttctccgttggcaatgcgtgcgaattgcccacaaaactttgcccctttcgcaaataattctcccaccgatctttgccttcgaagacagcatttttgaaaaggatacgaaatttgcacaataccaactgaaattggactatgaaattgcatatttattttctttctcttacacaaaatgggcactgttctttggcattaatgtgcacgggaaagtcgccacattcgtagccccacaaagtccatttgccaagcgtcaattggggagaaggacactttggcacggaaaggggcggcagaaggcttaaaggaaaacaaatgattgggattggattgcttaaaaacacacaattggtatcagtttcctacaatattcctttttatgttttgctaaaaagctcgacttatttgagttgcagtttattacattttcatttttgaattatatgaaggtattaaattgtttttaattattttttaaataattattttttttttgatttatttcggcacattttcatttatttgctcacccttttctcttctccatttcgttgttctccttttgcgtgtatttgtcaacaatttccttggtactttttgccatgatcaaacggagtcttanatttgtccagagaatgttaaaattgctttttgcttcttccattacctcgntccattgtaatttgctttggtgtattggncaaacgattgctcggaattcatggcactttttggtcaaaggcataaaatgtaatttttaataanttgtcccgggataattaaacctaa

SEQ ID NO: 33251 - DNA, 249 bp, Heterodera glycines
tttttttttttttttttttgttgggtggaaaaaaaaaaaaaaaaaaaaacaaaaaaaaaaaaaaaaaacccccccccccccccccccccccctcccccgcgcggggggggagagaaaaaaaaaaaaaaaaaaaaaaaaaaaaaaaggagtgggtggggtggggggggggggccgcccccccccccccccccccccccccccccccccccccccgcgccggggggaaaaaaaaaaaaaaaaaaaaaaaaa

SEQ ID NO: 33252 - DNA, 864 bp, Heterodera glycines
tacgcaacggaggaataaatgactcgtccctttgttttgccctcttgagccaataataacatttggttcattagcagagaatttaaaaagcaatttgaaattggcactttttgaaattttagcacttttaaaatggcccaattaatttattgaagagccattgattaagtgtgtgtgtggtcatttttggtttaattaatcagtcctttcctcgcctattgaataatgcgtttcagaaatgcctattggcatgaataaatgatgtcgatgggccacattttccattaattatgccaatgccaagaaataggaataatttacgcaaaataggctaaaaataatacaaaaaatggaaacaaatatgtatgggaatataatgagtttttaaatgtgacaaaatttaaatacaaacataagaaaataaaacaaaaaaatgtaaatatacacagacaaaaaggaaggaaggaaagattccaagcctgaacacagcaaaattgggaaaatcttgaaaataaaattaaaattttcgaaaaattccaagaaaaaaatcttattttttcttaaattttatgtttgcttttcgtctggcgcccaagtcaacggagggaccaatcggtccattagctcggccatcgtcgaactgccgggagtgccaaaggggaaggcgaactgccgttgctgctgctggtgttgttgtgccgcgttggcatcggcactgttcgtggccgtcgtcccttgctgttggttttgctgctgtgcctcgacccctcgctgcaacattgtggccaagttctgcttggtcttctccgtctcgcatagcatggccaaatgggcggacaaacactgcttggactgctcgctgag

SEQ ID NO: 33253 - DNA, 1094 bp, Heterodera glycines
  unsure (1)..(1094): unsure at all n locations
tcctcgttcgaatgtcatttaaaaagtaattaaaaaaataaaacatttgatagaaacccagaaaagaaaatttgaaaggcttttttctcttctaaattggattttccctgctgcatacatattattaaataataatggataagtgagaatggcactggcggtgccgggtggtgggacacataattttntaatcagatttattaactacagattttgacaaataattgtctgttttaagggcatttggaacacgcggtgtcgaaatttttaatgagattgttaagaaaaatagaaaactttcatccttttctgctaacaatttgacctgaaccaacgaaaaaaaaactaaaacctagagcacaagacatttgaagcccactaaaaagcaacaactattataaatacattaatttcgaaaagaaattatatttttaaattttagagaaaccaaaactaggaattaaaaaagtttctgtcttcacgataacccgtgaccgggacgaaaaaactaagaattttctcgcgttgtgaccatgacccgtgattaccagctgtaccgacttttgcgccgcagaacttgcgcctcgacacttgtgccgccctacaaaacccatttcaccgttcattcagattttaaataatccaaatatttttaataaaataaatctacatatattaatgtggcttattaatagggctgccaaaaatatgtacaaaaagtggtggtcaaaatatgtacataaatatgtaaaaaaatcccaaaatatgtgcaaaaaccgcaaatatgtaaataaaattaaaaaaaaagttattttttggaaaaaaattcttcgtaagtgctgaaataggcataaaatgccataaaaatgaattaaattggcttagatcatcttttaatatttaaaaattaccttttggtcttttcaggggtatatattcaaaaaaaattttattctataattttcaaaaaatttgaaaaatatgtaaaaaaggaaaaaatgtacaaaaaatttgccgaaattttggatttatttttaggatttccaaaaatttccgtaaaaatcctcaaaatatgtaaaaaatgaaaaaatata

SEQ ID NO: 33254 - DNA, 993 bp, Heterodera glycines
  unsure (1)..(993): unsure at all n locations
ctgcannggtcttgctcacattggcttttataaacttcccatttcaggttttgggtttaatgttgctggaggaatcgataagccctatatccctggattcacggggatattcatcaccaaaattcgaagttttgacttgaacggtatcaatgaaggggaccaaattctctcggtgagacactaatatttacataatcatttttctgcgtattgttaggtgaatggcgttcagttggcaaacagaacacacgaagaagtcggccataattcaacaaaacaattcactcataattatttaatttaggccttgaaaattttaaacgaggcagcaaataattcaacatttctaattgaaacgaattccgagatgagaatagcatcggtcggcccattattttataatttacaatgaaagtatttctttagcgagcttccgaacccaatggcccttctgcctcattgttcgtgcgggacggcgacgacgacactttcgttgaggggtcccttccatcgagcaatttgtccaatttgagtgggcgcagtggagttcggacgagagaatcgtcgacgtcgacaataaaccaatccgtgttacgtgaagaaaatgcccacataccgcagcactgggcaatcgacgaagatgaaacaacaatcgacaaatcgcgcagcccatcgcccccaaatgaaactgacagtgagggggaacaacaatccgaatcagaaacaaagtaaaaaacaaaagccatttggagtgagaaaatttccctttcagttcttcacttggcaatgaattgctttatgtctcaattggagttgttgcgcttggcactatcttatactttggctaccgtcatttcctgaagaagtgaatagaanattagattaacttttgttnctatgaaatctgtttttatgcatttgctcaggtggtcacaaaaatttaatgaatataaataaaaaaattttgaaatcattaaatgaaagtcccgcatg

SEQ ID NO: 33255 - DNA, 819 bp, Heterodera glycines
tgcaggaaatacatgttttaatttattttttgtttttattttgttcggattccgctaaaagaattcagaattggtcgacatggatgggtcagattcacgatccgatccctctaaaacccccaggctttctgctaatgaatgtaatcaaaaaacaaatgtgattgggaaaggggcaaattgtaatttgttgttgattctcattatttgtaagtgtaccaatatgagaaaagagaagacaaaatgaaaatgaaaccagtttttcttgatcagcaattaacagcaaaattgaagaaaattgaggggagggcgggggggggggggcgaaggttggggacaaagaacaaatgaacgaacgaaatgtgcagcacaggctctcaactcagtacagtccgccgcgccgcgttccagcagaaaataaaaaacagaaatttcttggcaaaatgttgttgtttttttttcaaggttaagggtgtcaggggaggggtggcgacaggtcgattcggtggcccacgcgaaaaaaggattcccttttttgttcagcttttgtacagtttgtacaggagggattcgcgatttttgcctagaaagcatgggatttgccgaatttttgaggggcctgtgacgggtttttgaccgggttttggttttgtgccggatttaaagctcgaatgtctgtctggctgggtttttggcgttttacgcgcatccctgagtttgtatgattataaaaatagcataatttttttttaaaaatatatttaaataaattttggttttgtaaataaaaaacaattttaaaaattatttgccatttttttc

SEQ ID NO: 33256 - DNA, 879 bp, Heterodera glycines
cctctgctcccgtgccattccccttgtcccccatttaaccctcctctgttcccgtgccattccccattggttgtcccccatttaaccctcctctgctcccgtgccattccccattggttgtcccccatttaaccctcctctgttcccctttctgttcctcttccgctttctctttctgttcctcttccatttctcttccactttctgttcccctttctgttcctcttccgctttctctttctgttcctcttccatttctcttccactttctcttccatttctcttccactttctgttcccctttctgttcctcttccgctttctctttctgttcctcttccatttctcttccactttctcttccactttctcttccactttctcttccatttctcttcctctttctgttcctcttcctgttcccctttctgttcctcttccacttcctcttcccctttctgttcctcttccgctttctctttctgttcctcttccatttctcttccactttctgttcccctttctgttcctcttccgctttctctttctgttcctcttccatttctcttccactttctcttccactttctcttccatttctcttccactttctgttcccctttctgttcctcttccgctttctctttctgttcctcttccatttctcttccactttctgttcccctttctgttcctcttccgctttctctttctgttcctcttccatttctcttccactttctcttccactttctggtcctcatccactttctggtcctcttccacttcctcttcccctttctgttccttttccgctttctctttctgttcctcttccactttctcttccactttctgttcccctttctgatcctcttc

SEQ ID NO: 33257 - DNA, 1601 bp, Heterodera glycines
aatttggggcatgaacctcaagcccaattactgcttcccaatttcttgtaaccataaattttatacggcacttccatgtgtgccatcatttttgaaccaaaatccaatctctgggatattgttttggtggcatttcatcaaaaatcccgtctcaattctttctctctctctctctcacattggcacatttattttcttgttatttccccctatgtacgagttccccctaccgcaagtccgtcctctctccccccccccccacccgccaatcataatcacccgtcccagccttgatcagatcagtttcatccgccgatcagttattcattattttattcccttatatccgctcctagcgcagtatcccatccatcgtcattatcatttgaccatattttttgaccaaaatccattataccacattatccttacttattttatacttttgtcttcattttttgttcgttcttctgagtgagtctgatgaggccaaaaaggcatgtgcatcgtcgttgtcatcatttgtttagatttttttttgtggaaaattgctgataaatttgtatcattacttttaaatttaaataaaacgaaaaatatattgaaaaatttttataacaaaattttgaaaaaaaaatttaaatgcgcgaattacacaatgtgaaaagggagagggagcgaaagatggaggaaaaaacggagagcattttcgttagaatttcctagtgatgttcgagactggaaaatttctcgagacactgagacttgatcgagtcgaaactcgagatcgagacgcccgaaaaaatccgagacttttcttggatcgaaaattgccgagactctcgatgcatcactagaatttaaaaaataaaatgcgttgacggatgaaaaaattggcggtgtgaattctcggtaacggaaggagttaaaaatttggaaaaaaattgtgaaaatttcatgaaattttaaccccctccgaccgacgcaggcacagcagcgggacacacaacagacacagaagaagagactagcaaatttgagtggaggagaaatgatgaagaggcaaaaaagaaagaaaaaaagccaattgaaatatatgcaattaatttgaagtggtgggatttattttggtttaattacgcgtcctaaaattttcgaaactaattgggtaattaattaattatttaaaataatatttgttgacggggaaatagggagaaaaatgcacaggcaccttttagcactgatgaggcggaagagttggggacagacggcaccgcattttggcgcaattttttggatttaaatttttccgaaaaaaccaacaaattttccaccccctcgttttccgtgcaaaaatacggtctaaaataatatattgctgatgaatgaattttatgcgttttaatcattctttttttgccattttgatcagtagttggaccacatgggcttgcgaatccatcgcagacggaggccaccttaaatcaattttgaaaatttaaatttgagaaaaaaacttagaatttcaatgaaaaaaatagtgtaaattaaataaattaaaataaatacggatttaatttaactaattaatacgaatt

SEQ ID NO: 33258 - DNA, 1467 bp, Heterodera glycines
  unsure (1)..(1467): unsure at all n locations
aatatattggagctctaatcattaatatgctttttattttgatcatttttgatttgtttttgtcatgtcttctcaaatgcctaaaaaatcaaaaacatttgaaaaatgaaatttatttgctaaaaattttgtaggttctgtcaaaaaaatgtttaaattggttttctgagaaaaaacttcctttagttatggcgcaaattacaaaaaaaaaaactaatatgccgaaatttctaaaaaaaaaattacaattctctaaaaaaacttttttttttcttttttttccagagttataattagaaatagttggaaaattttgagtttaaggaaattttcataaataaataaattggataaaaagggataattcagccaaggaaaatgcctttaatgatcctacataattggtaataaatgcctaatgaatctgcctattggagccatccaactttttcttagaatttttttttaatttttgagtcatttaaatgatttggtagggtgattaggggccaaaaaatatttatttgttcttattcaaaaaattagaaaattttatttatgtaattttttatttaattttttaatttttttatatgttttattctacaagtctataaagaaaatgcaccgaaatgtctttgagtttggcaaatgtgaatttttgtttaatgataatttttgcttgggcccaggccctatttatgcagtccatcattcattgtttgacattaattgacgtggattatgttggcatggcattatgctgacgtgaattaggccttagcaatgaaaaatttatgcatatgcattttaaatgcgtagaagcctatgaatatgttaatgcatgaatatacacatacatatgcatattgctctctatgaaaatactctttttcttttccttctccttatacaatatttctttcttttttttctataatttttttataaatagtttattttcattatagttttcttataacaattggccatctattttacgtttattgattgttttaataaatatatttatattttattttaaaataattaaaatttccgtagccaaaatgttaaaaatatatttttttgctagaaaatagaaaacatacccgaatttattggggtgtttaaactgaattttctacgactggaaactaatgctggattcaaatgatgagtgatgatgtaaacatttttcgggatttcatttatccttttcttatcacatttcttgtgctgcatacatttgttgttgatgggcataaaattgggtaaaaaaagaaattaaaaaaaaaatttcagtgcttaaagataaaaaggggccgctttaatagaggggcggcccattttaatagaggaattcttgnaaaaatgcccanatttgcatataaattgcgaaatatgtacaaatatgcanaatatgcatatggaaagtcgtcttaaaaaaagcttcaaaataagcta

SEQ ID NO: 33259 - DNA, 897 bp, Heterodera glycines
  unsure (1)..(897): unsure at all n locations
ctggtgctccgccattttgtgctcaacacttgctcacatcaaacgattcaccggccgctgaatgaacaaaaatttaaacaaaaaacgaatttaggccccaataattgccgggatttgaatcactgcaccggaattcaaatcgggattttgtcggaatcccgatccaggccctttttcaaaaaggaccgtgatcggaaacgggaaaatgccggcgggatccccgatccggtcaaggctctgatatttgctacggaatttggccagcgacgagttggatacgtttttcccacatataaagaactaattgaggatattttaaaattttacgcgaagtgatgagtcggaagaacagcaaagaattgggcaacagaacggccaacacattctcctcaaatgttgagggcaaaaaagtgccggccaacagctgaaggacgggcccagccaagtgcaactcggccaaattggcaacctcctcccgcttctctggctccttgccggggtcgagcactgaatgagggcagggattttgttggattgtatggaaattgggcaccaagacattgttggttttgggactcaacactgtgccaatgtgtgtgtgccactttcaaaaatgctttaatcccggcatgtgttggcgattttgggagtttaattctcagcctcgatttattgggttaatatttttaaagaaaagattagctatttttgaaaaattttactcaattttataacaaattcaataaaaatttccaaaattttccagccgcgcctatctcggcactgctaaaactcaagcattgngcaaggcttttaattacccggtgagtgtngccgttgagagtgccaacgatgacctggtcttnaattttgaattgtaaaatcaaatcaaataat

SEQ ID NO: 33260 - DNA, 957 bp, Heterodera glycines
  unsure (1)..(957): unsure at all n locations
tgatgagaaacctgttaataaattgggtgcaaatttttaaatattcccgtcggcgtctatctgcaccggcgaatccaaaactcctaagcgtgccacaagaaatggcaaaagtcaacagaaaattttgttattttttctatttcataaaaaatgtttcctctggggaagaacaaataatctgattgtaagctaaaaataatcctaaaaaggaattcccgagaagcgaattgcctatccaagccttataaaaacaaaacatacgcttataacggactccatctttcttctgagtgttgaggtggagaaggcatcaaccaaaaagagacatccgccgattggaatttccacgtgctcagtgaaaagaactcttaatttaacaaaaaaaaaatattgaaatgctaatattgtttttgatttttaaaaaacatttcaagacgggaatgaaaactcactctttccaagcagaaagttggctgattgaaacttggaaactcctcgtttctgtaaagcggtgatgaaacttggcgtgttgttcaacatccttcgggtcattcaaactgtacaccatgccgcactgaaacaattcaaaaactcatattcaaatatgattattaatcacttttatgcattgttctagaccaattttcttttgtcctgcatcaattatcatttgtcgagattgtgcacaattgccatttccgatgactttaaatcgaggccgtcttcttggcgttgattttgatcgaactttgttcgctttattggatgtgccgatggatgaagccctcggngttatgaagaagtctttaagaaaagattgcattagcaaattaggatttatcccattttcccaggtcctaaaatttttcatatgttttagggaacattcccagaaaaaaaatggatttccatatgattttaagctctatcgatgaaatttatgtaattccaaaatga

SEQ ID NO: 33261 - DNA, 738 bp, Heterodera glycines
agaatttgtcactaattaattatgctgtacgatttaaggagaccactcccaacgtaatgtgcctggcacgaacagtgtgatttccatgcccggattgaccggctcacacaaacactgaatgatgagttgatgagtgactgaatagaatgaaatgattgtggtgagttcgttttgtagtttgtacagcaattagctgttgtatttctgtatttagaataaaataaataataaattgcaattgcaattgaatttttctaaatgttgaatatgaattttcttttattagagtctttgtactttattccaattttggcacatttttgtcctcgttttctgtcctaaaattcaaccctttcatgacaagcacatcctgacaacaaaagaagccgtcccccccccgttcatgttctttcttcccaatcgcatcatttttattctccacccaattcattcgcaattcattcttctgttatggctccataaagtcgcctgggaaagtgctaaaaacgcgatgaaaattggaagacgaagttgatgtgatgatgatgatgtgatgatcaaattcagcgatcggagcaatgagcggacgaatgaatgaatgacccgcgcgacacgccgaagagagtcaataaaaagggcggcgatggcaaaacaaacgaaggcattctcaggagaagaagcagcggaaaggacaattcaccagcaaagactcatttcagacaatcggacaatatgtat

SEQ ID NO: 33262 - DNA, 706 bp, Heterodera glycines
tttctcggcactctcagaaagcaatctttgatccgtacattgttcttagtgattacctaagttgctcattgcctcgctttttgacttatcccctgtgttttatttattattgtctaaataaattatagagcgaaaaatggaaaagaaaaatgaacaaatggcggataaaaatgacactaaagattcgatcccacgcaagcgttactcaagtgcagtggacacaaatcgtttgctgaagaacgtcaaaaatgtattgaagaatgagaaaaccaacgaaacaatttccattgcaccgatcagagagccgatcattttgggtttttgaaattcaagtaaaaccatcaaattttgcttttttttaaggttcggactcgaggtcttttttctacgggaatccgttcgtggaaaagcataacggagtgctcagattcagcaagtgctcacactttcatttggcattacaaaatgatatccaatttaggaattgcacgccaacgggggactgtgccatgctgtgtatggtggatgttcccgcttttttcacatgcagagaattggttaattttgtacgaccaatggcagcagaaattgcactgatgaaaatcatccgagacgatacgccaaataagtaggcaatgctttttaacttaagaattaacaatttttaaattttcacggtacgaaaccttaaaaaaccatttttcag

SEQ ID NO: 33263 - DNA, 639 bp, Heterodera glycines
cccccccccccgaaatgaaaaatcaaaaatttttcaagcaaaaatgggcaaattttctgaaatttttgcacattttcttatcatattgcattaaattttccaaaaaattttcccggcagcgcctattactaattctgctttttggctccggcgttaaagattttgaaaataacactggtgttaaaaaaatttttgacccgaagagcaaaaaaaaaaaaaaactcttcgggtgcccgccaaaaacataagcaattcagcagacactcatttttgagaaaaaaaagatatgacaaaaaaagaggaaaaggaggagaagaagcttggcacaacgaacggttggggcttaaaaggacaaaaaataaaactccgaaaggaattggtaatattttaaaaaaaaattagggaattccactaattgttggaaaaactgtagtaaaaacgggaacagaaaaaacagaaaattttgtttctgatcaaaaacaaccggaaattgagtttatgttttgtaattcgaaaaaaacgcatcaaaaaagatactcgaaaagctaaaatatggcccacttaacttaagtgctaccgaaaaacaacaaaaatactaagacaaaaaatatgcacgcgcggacggagggcgccgggggg

SEQ ID NO: 33264 - DNA, 925 bp, Heterodera glycines
tacagaatttttttaataatttctttaaattattttcaattgaaattttaattaataaaaaatattcaatttaaaaattattattttttctttttttaaacagcctaaaactgcaaatttaaccaaaactttgatcattttttgacaagttctgttaatatattacactcaaaattttagaatttttccggcggcgcctatcggcggtgccgattcggtaccgccggaccccgcacccaatgttccaaaaaaatttttttttggaaaaacagcgccacaaaaaaagcgacttaaaaacaaaaaatttaaaaaacaagttttggtcattttttgaataaaatctgttaacaaatccgaagacaattttcaaaattttttcggcggcgcctaccggcaccgcccgaccccaactgtccccgaagttttaaaaaacgcaccgcaaaaaaaaggtggaaaaatggaaaaataataaagtttgtttctaaaataaatatatttcatgaaaatattttttaattttcatgaaaaaattttaaagatttttgtttggatttttcatgacttggactcggtttaaaaactaggactctgacccggctttctgtacccggcaataccctgacccggtatttgcccaaatacccaggcccgtacccctaatttaatatacgattttgaagttttttaaattaaaaataaggctacagaaaaaattgaaaaactctcgcctctcgtcctctcgcctctcgccaactctcgtgtttttggggactctcgcctctcgccaaactctcgctctcgtctttttggggactctcgcctctcgccaaactctcgctctcgtctttttggggactctcgcctctcgccaaactatcgctctcgtctttttggggactctcgcctctcgccaaacgactctaga

SEQ ID NO: 33265 - DNA, 1223 bp, Heterodera glycines
  unsure (1)..(1223): unsure at all n locations
ccgagcttccagtcccatacaatctcatccctgaagatcaatcagcaatgttttattgaattggaccaaaataagataatccgatccctaatcaaagcacggatccaataggctttgtcaatcctatcactaattaaatggctttgtccaacttcttttttcaaattcctattaaaaatatttgatatttttgaaaaaattagggttaaaaatattgttttttaaataataaaaataattattgcacgtgttgccattgacccatgtgttctgaatcaatttatttgatcatttacatttaccatttccttttaaaacaattcctgatcaataattcttcccacaagaaatttgccaaaatgcaattaattatcgctaattacctgaacccatgccactgaaatgccattgcttttcaagtagtttaatatgccataagtgtgctcgtacacatcagtgttaagttgtgccaatgaatggcttttccatgccgctggaatgttctgttggcccgggtcggcccacgagtcgctgtagtggaaatcgatcattatggccataccctgggccttggcgcgctgggccttgtgcaatgtatcggcaccgtcacaccatccaccggacgggttcacctaaagacgaatttattttatttttcttttcaatttttcaaaatttttttgcttgattttcttataaaaaaaatttctaagaattttttttagtaaaatctaggtttgaagatgcggacgcggggaaggatctgctacggtaggtgcttcggatcggagagctcggattcggggtcctatttttgtttaatctcttctgtcattatgtccttaaaactattaatgctttacatacaatctcgatttaataacccattccaattgggtttacggccattaatgtcattaaaaatacaatgataaatattccttaaagccatcttcaaaaactttcggtttaattcattaggaatatttggtaaactaattactgtcctttaatgtttttaaattatttgcatcaaaaaactttaaaagtgttggtgcttatctcagcccttcagaggatttgtccttgaatgttgcgtggattctgtgacaaacccattaacatatagctcccattaatgtctttaaattgtcgacaacctcaaagcaattttgattttgtcgcttatttccccttacgctttgattgantttttgatcaag

SEQ ID NO: 33266 - DNA, 1016 bp, Heterodera glycines
gttggataacccataaaaaaaacaattaaaatatttaatgggtacttaaatgactcgctgattaattttgtcagcattttactgccaaatgtttggactatgcacaaatgaaaagcaatttaagaactatgcagtacaaaaatttttccaaatacaataaatgaaaaagggaaataaatctggcacatataaatattacggatgataaggtagtgaaattgcaaaagcacagggaaaaacagctaacagattttgggcaggattaagcgatttcgtaagccaaatttacgcggcggggaaacgacgaaaagcatggtaattaatcaaatggaaatgttaattatgccaccggaagaattaaaattgaaggtcatggggtaaaatccttggaaatctcgcccctctcttcaaaatggctaagaatcgaaatcgcttaacccaaatttaatggccgatagttcggctgggataacagatcttttcttctgtgcttttatgccttcgttctcctcaaccaaaacagtgaatcggcggcgccattccctccggcgccatttgcccaaaaggcgtaaaacaacacggcaacggtcgaagcgagaagcaatccgctgagaccgatgaacatggaaaagccaaaaatgctcatgcaaatgccctcctgaagggcggtgaacagaaagtgacggcgacggttggccgacgaaaggcgcgaggacagcgaatcgggaaactgaaaaaggcggaaaatgccaatgtaaaaaggggaaaatgccaatgaaaaggggggaaatgccaatggcaaagggtgggacttatttttagaacctccaacaaccaacattttgcgagatgtccaacgcattcagctctgctctgacgtccaaaatgttttctcccgccgcggcacgtcgccgccgcaacagtcgaagttgggagagggcggcggacggacggcggccgccgggcgatggagcggcaggcggaggcggtcgaccagtggcgggcgcagcagagcc

SEQ ID NO: 33267 - DNA, 965 bp, Heterodera glycines
ttgagtaccccaaacggacacttgaaaaaatcgatttatttttgttttcggggcagtccccccgaaccgatgcgcccagatttatggggagaccgaatccttcgggaatagcttccctatagcctgtactttaattctgcgttggatttttgctccccataattgtttgagtaccccaaacggacacttgaaaaaatcgatttttttgttttcggggcagtccccccgaaccgatgcgcccagatttatggggagaccgaatccttcgggaatagcttccctatagcctgtactttaattctgcgttggatttttgctccccataattgtttgagtaccccaaacggacacttgaaaaaatcgatttttttgttttcggggcagtccccccgagccgatgcgcccagatttatggggagaccgaatccttccggaatagcttccctatagcctgtactttaattctgcgttggatttttgctccccataattgtttgagtaccccaaacggacacttgaaaaaatcgatttttttgttttcggggcagtccccccgaaccgatgcgcccagatttatggggagaccgaatccttccggaatagcttccctatagcctgtactttaattctgcgttggatttttgctccccataattgtttgagtaccccaaacggacacttgaaaaaatcgatttttttgttttcggggcagtccccccgaaccgatgcgcccagatttatggggagaccgaatccttcgggaatagcttccctatagcctgtactttaattctgcgttggatttttgctccccataaatgtttgagtaccccaaacggacacttgaaaaaatcgatttttttgtttcataaatatttttttcagaaagtcatgcgcacccgtccgatctggcaagtaagcaacgattgctgactagcaaaaaggttcggtgccgtgatgaaacg

SEQ ID NO: 33268 - DNA, 838 bp, Heterodera glycines
acttctctagggtttgaggtgttttgagtcagaagtttcgcttttcaaaaagctcgttaggatcgtacgttttcggcaaaagagcgcaccatagcaaaaatggcgtagtttgaacgacacttctctagggtttgaggtgttttgagtcagaagtttcgcttttcaaaaagctcgttaggatcgtacgttttcggcaaaagagcgcaccatagcaaaaagggcgtagtttgaacgacacttctctagggtttgaggtgttttgagtcaaaagtttcgcttttcaaaaagctcgttgggatcgtcctttttcggcaaaagagcgcaccatagcaaaaatggcggagtttgaacgacacttctctagggtttgaggtgttttgagtcagaagtttcgcttttcaaaaagctcgttaggatcgtacgttttcggcaacagagcgcaccatagcaaaaatggcgtagtttgaacgacacttctctagggtttgaggtgttttgagtcagaagtttcgcttttcaaaaagatagttgggatcgtcctttttcggtaaaatagtgcaccacagcaaaaagggcggaggttgaacgacacttctctagggtttgaggtgttttgagtcagaagtttcgcttttctacaagctcgttgggatcgtcctttttcagaaaaagagtgcaccacagcaaaaatggcgtagtttgaacgacacttctctagggcttgaggtgttctgagtcagaagactcgcttatcacaaagatcattgtgatcgtactatttcggcgaaagagtgcaccatagcaaaaatggcgcagtgtgaacgacacttctctaggg

SEQ ID NO: 33269 - DNA, 409 bp, Heterodera glycines
ccccaagaaaacattaaatggaaaattctcaaaaaaataaacaaacatttaatggaaaaatgcgagattacagattataaatggaaattaaacgatagcttatgcttttcaaattagagaatacagacacaaaacattgtgtgaaatttataggaaaggtcagaggttgtgaaaagagccgtgccggcgccggaggcgaaaatgatttttcaacagtgatcagaacgatggcacccaggaaaagccctgaattttgtcgggattaagctgacggtaatagcgacgagcacggcgaaagctggtcttccagtcaaagggcggcacgaagcggaaaaagctaaaattgaaaaacacttttctcagcgggcagggacggtcccagggggggggggggtacgcggggtacgta

SEQ ID NO: 33270 - DNA, 910 bp, Heterodera glycines
  unsure (1)..(910): unsure at all n locations
taaaagcctaaatttattctcgctaaacaaaatgtcgatgtctaaatcgtcctacacctacaatcggaagacatttgaggatgcggtgagatggccttaaacatttccgcctcaaaatttatttctaatatttaaggaattccctattttgtgtgagacatgcctcggcccgaacccgtacctacgcatggtataacaatgggaggggtggtcttacatcacacaatttcccgtaaaactgtttttagagcaaagacacacatggaggcgaatgcaaaatttgtgagcgtccattcacaacatttcgttggatgccgggcagaggggcgcgctacaaaaagaccgagatttgtcagacatgtgccaagttgaagaatgtgtgccagacctgtctgttggacttggaatacggttcttatgaattcgccgagcaaaattaacggatataatgaaatttaggccttcccgtccaagtgcgtgacacggcactccaagtcaaggagaccatcccaaaagtgggggccaatcgcgactatttcatccaggttttttggtggcatattttttcctattatttacgaattaaacaaaaatcccgctgggtttcagaatgttgaccgtgctttggaacaaacggatggcacagtgccgtacggcgagttggccaaactgaccgatgcgggcaccaacgaaatgttgcgcaagctggcccgaaatcagccatactacaaccgaaatttgccacacatttgctcattctttgtgaagggcgaatgcacccgtggtgaagagtgtccgtacaggtgagtaattggaatttttggatggaaaattgcgaacaaattgntcatggattttgagaggttgtgggatttgatgaattaaaatgtgcaaatataccaaattctac

SEQ ID NO: 33271 - DNA, 831 bp, Heterodera glycines
  unsure (1)..(831): unsure at all n locations
gttgactgttaccatcatcacttgtcgagcaactttttgccacaaatcgcataaatgtaaaaaatgtggggtgatatggaacgtgagaaataacaaagggaagggacgagctgggcatgtgtgcgacgagcgcttttgcagaacatgtggtgcctttcataaccgtgaacgtggatgctttattcggcaactcaaaccgcggcgcccgaaaacttatcgattggtagtatacgattgtgagacaacgcagaattgtcatgtaatcggtgcgccagaggctcagcaacggcgggtacacatagtgaactttgtgtccgcattcgttacttgtacaaaatgcattcaaattggcgcaactccctgctgaatgtagtttcctcgtgtgaaatatgtggcccatatcgcaccctaactttctctcatcgacccttcacaggaacagaagtggattgtcaacatgtatgcgacgatcctatgtcggcgttcactgactggttgctcttaggatcgcataacaacagaaacaacaacaccatcaataacaacaatgaaagcaacagtaaaataaaaccacacattaaatatcctattaatgtattcgcacattttggtggtcggttcgacaatgtgattctgttccgacaatttttcaacaggngactgtgtccgaaaatgatcagacggggtaataaactttatgagatgaaggtgctgcgcgctanagacaatccggagattaagtgcgcgacagttggaactaatgcctgttccgntaggagcgcttcccggtgcattcngacacagagtgcaggacaanngatttttccctca

SEQ ID NO: 33272 - DNA, 923 bp, Heterodera glycines
cttcctttttgatcatatcccatcattattgattcgaaatgcccttaccgtcgatgacagtgatgaggtggactcgtcgttgaagtaactgcgcaagaattgcggcgcctgtggcacctgcgcttggtccatccgatgaggccgtggcgacggcgttctgcgcaatctgtcgatgatccgctgcagattttcctcctcatgcggcgtcaactctcgctgcggtgcttctccggcttcttgctcctctaacttttctggctcatgccgttctctttgcttctcggcttccttcggtggcacttcgtcttcaccatcagtgacaatgacccgttgatgctcctccgagaattgttcctcgtccaccaaattcagcgagtccgcctggctgagttggtccggcggaacttccaacgactgaatctccggcgcatacgtcacgtccttgtcgtcaatgtcctcgaaaagcagtgctgcgtccgctggcctgtcaaatgcttcgttagtgccaatttgtcggctcgtcgccattgtagctgagctgccgccaccgccctccgccggctcgggactcttgagcaacactaagtgctgctgctgcacttcctcttttccactggtttcccccgtgaattccacgtgtccctctttgcccgccatttcgtccgccacactttccagcatttcctcctccactataaatgacgatggctgcgccgttccgtccatttttccctcctttcttcgcatttgctgtttctccaattcgtccgaaatgcccttctgttgttctgcttctctcttttgcttttcctcttcttcctttcttcttggcgttgttttctccttgccaaagatcgtttgcttctgttgttgctgctgctcaattttttccgttgactcggcatgttcaactgaatgagtga

SEQ ID NO: 33273 - DNA, 240 bp, Heterodera glycines
agcttaggcctaggcttaggcttcagcttgcttagttgaatcctatttagagatagatgcaaatgtctggacacggatagctcaattattacagaaatctgctttacaacgaacatttataaaacagaagataataacaaaaaaaaacatggaaatcttcttatttgctttatcaagccgtcctcttctgttcattttttctttgccttcttctcttcttcttcgcgaattttttgctct

SEQ ID NO: 33274 - DNA, 824 bp, Heterodera glycines
  unsure (1)..(824): unsure at all n locations
ttaaaatatttgggtgaactgtagtgaacgccccgtgaaaaaagggtcaaatgatataccaatcgtttcgtctcaaggagctaagcatggaaaaatatgtctcgagttgcttgaaatgccaaaaaaccggtttttgaaccggttcaaaactcgaaaaattgagatttcgcactctaactttttttaaacgatcgaatcccgacaaatttggtaccatttgaaagctcttgaagagcttaatctaaaaatcagggaatgaagtcgaaccgcgccatctaaaaaccgacaagtataaatcggtttttgaaccgattcaaatcttatagtgccaattcagtaccaaacgtaatttataattgttttaattggtaccgtagggaaactggtgcaaataggtcattttgtttattgcgctaaaaaaccgccgcacactcgactacggcggccagtattcctccgccctccgtaaaatttatcaatcataggattgatattttttttgttgggaataaataacataattaatttatttttaacggctaccaatttttcaatcaatcaatttatacgcaaaagcgtgacaccgacataaataacaatataaataaatttggtcaatgaatgagatgaggtggtttcaaaattaaagcatctacatcataggtgtcaagaagtttagcaaagtcaatggaattaagtaacctcgcctctttaggcaaacacctatagaggcgagaggtacgaataanaaacgaatgataccgaacattgnngtgacataaagcgntttataatanatcatttttcagtctgaatatgttttt

SEQ ID NO: 33275 - DNA, 914 bp, Heterodera glycines
  unsure (1)..(914): unsure at all n locations
gttttcgacggcagccaacaaatgcaatgccatggtggccatctgttgggcatggtaaatgccatgctgccactcgggtacaccggacacgaccatgtaactgtagtagtatacggtttgtgttgggtacggtaccatacaaattagtcaaataaattttgcaaaaattgattaagtccttgattagttttattggaaaaaaagccttacgcatcgccaatagtttccactttgtacacgtcatactgtttgatgatctgttaattaacaatatttttaaacgaattataaattttacaatattatttattttacacagggttcgtattcgtccttgtaagaaagtttattattctatgagcatttgaaatgaaaaacactttacattaaagttggcattgtaaaacttattctatatataaaaaaacacattttaattgtaaaaaagtttattattctatgcatatttgaaatgaaaaacactttacattaaagttggcattgtaaaacttaaatacattttaattgtaaaaaagtttattattctatgagcatttgaaatgaaaaacactttacattaaagttggcattgtaaaacttattctgtatataaaaaaacacattttaattgtaaaaaagtttattattctatgcatatttgaaatgaaaaacactttacattaaagttggcattgtaaaacttattctatatataaaaaaaacacattttaattgtaagaaagtttattattctatgagcatttgaaatgaaaaacactttacattaaagttggcattgtaaaacttattctatatataaaaaaaacacattttaattgtaagaaagtttattattctatgagcatttgaaaatgaaaacactttacattanagttggcattgtaaaacttatt

SEQ ID NO: 33276 - DNA, 910 bp, Heterodera glycines
atttttaatgggctgacagtgccaaaaaaattgagacaccgaaaaaggcccggggtccagatcctgactcttggtaatttttggaaaatacatccaatcaggatctctaaacagaatttattcccataaatcggtccagaccaagttctgaatccataatcctgattcggaatttgtcaaaattacgatccacaaaacaggcgactccggttagacaaaaaaatttttgttacggatttgttaagaaaagaggaagcagctaatttaaaatttctaccattttaaattccaattgggaactgccattattaaacctataattaacaaaaaaaaaaaaaaaaaattttttttcaaaatcatgaaaaatttcatttttttaaaaatttcaaggattttgacaaaaaaaatctggcatgaaataaagtggcaaagacattccccttttttgttgttgttcagcgggccaccggaccacgcccattgagctggtgatgtgcggtcgttgtggcgctggcgatgacgaggcgcgcctgttgctgtgcgagacgtgcgacgcgtccatgcacacgtattgtgccacaccaccgttggcggttgtgccaaagggcgaatggcgttgtgcccaatgcgtggcgagcgcggtgcgcagtgtgtccatggattttggcttcaccgactccaatcagtgcttcacactggacacgttcggcgagtgggccaacctgtgagtcttttttttttgcattggcattttgttgggtcgaattggcacgaaaaaatgccgaattataatggcgagatggaaaatgtgcccaaattttaaacgagagagggtcaagtgatttatttggtcattgatttcatgggcacgggattaatgccaaatttttttgagcgaaaaattttgatc

SEQ ID NO: 33277 - DNA, 1133 bp, Heterodera glycines
  unsure (1)..(1133): unsure at all n locations
cgatggtcacaatggaggccaaatntagtcggattttgcgcaggtgttgtgagtaggtgagccatccgaggaatgccctcgccaaaatttgactttgcatcgctttggtcgcattgctcaacgattcactgaagttaaatggataataccacaatcaaaatttattaaaggcaaaagaaaatccaattaaatgttcggcaaccgtaaagaaatcttcggttgttgtccttcgcattttgccgattcttgcgttgaagaacgcgaaaatgaacgactaaaacattttaaaatggtcgaattttatgaactttccattggcacttgcttttctaacggcattttctggtcaaaactcggagaagcgaaggaaataatgcgaaataccaactcagaaccgggcttttcaacgagaggtcctttttggtgagaacaatcagtcgatttaaacaaagttgaaggtttaatggtcgaatcaacagcaaatgggcataaaagaacaaattgaaaataaaatcgaattcccattagtggacgacctgtggcaccgcattcgattttaatggaatttaatggggggtcgattttgaaaagtgggaaaagtgcgccttccaacgtcttcagaaaggagaaacaatgttgctcaagagagaacgaaaagcaaaactgttgaacaccatcagaatcgataaggacaattgaagatgaaagagtgccctctgaaagggagggacaattaattgacaaacatttttggcatagacacggaccatttttatgcaagtgcaaatgtgaaacggtctcgaatttaatcgacaccggcacacaatgcgatgagtgacttggacttttgacagcatttgttgttgaacccccgggtctaaaaggaagcgaaaatgggttaaagtgaatcattaagcaacaaatcgcttaaatgaatatatcatacttcgaaaggagaagcgaattcggaatccatttgagaataagcatccgattttggtcatgatgaagcgacaaataacctgcaaagcaatcaatgctcgagtttgaatttttctccttaccaggggcttctctgtcgccagaaaatgcgaggacattgtttttgccgaacagaaaggctgtccttacgt

SEQ ID NO: 33278 - DNA, 1004 bp, Heterodera glycines
aaaaaaggccgtcaaattgcatggctagaccccttcgcaaaattggccgctgcccccccccccctttccatgtatgatagagaacgaacagtggtgagtgcctccattaaaatggtcgttttggtccccttttcgtccgttatgtcattggggtcgccgagcaatgcaacaagatcgacatgagagatgttttcgagaagagggcgtacactgatgtccaaggctttgaacagggagtgaagcaagcttctaaaagactaattaatgcataaacgaattaagcgaagtcaaaagagactcacccgggcattatgtctcttctgctgatgtgcaccactttaattgtgccgtgcgtgcttttgtattcaatggtttccgtttgattctcccggtaatccaacacgagtgcggtcattccattctcaacaaaccgcacaatctcagccggtttagcgtattttttgaattgcatagcgtctgaaatcaaattatgtgaacattacagttagttatattgttaaatgatgggcattttatttgcataaaaacactttctaaaaactatttgaaataaaatatagaacaaaaagtttttcatttttttccaaaattttgagcgccgggtgaaaagcatgaatttggagtttttgcaccaaaaaatggtaatttttggcattggggtctaattttcaaaaaataatggtacatgggtccggcggtggcgataggtaacgccgggaattttaatgatatgaaaattgtgtaaatttttcaaaagatttatccatttattctattagatatttttcatttcggagggggggggcacgtgcctcctcccccctgaataaggaactattgcgttgatgcaaggactatattaactataatattagggtgggtggatgaagtgagtatcaaagttgcggacacacgaaaaatggaaacaattgattactggtcggtgaaatcccaccgcctcacattttgaggagactcaactt

SEQ ID NO: 33279 - DNA, 699 bp, Heterodera glycines
ataaattctaaaatcttaaaatatgtaaaaaaataattatgtatgaaaaattgtgataattttttttggacatttaagaaaatttatgtaaaaaacatttaaataaaaatcccatcccaatcttaaaaattgttaattcaaatagttacttggcccattttcaccttataagagtgggatggagaagaccgacgattattacgcggcacatgccgatgataattgtgcgcaaattggtattggtcgcccggttcattgccaatgactgtcggacgatgttgttctgtcatcattggatgtttttaaatttttaaagatcgtcagaattcaaagaatgtaccattattttgtgaaaatgtgaccccaaaatggcaaaattttggcgcaaaaaaccgccagaaatttttttttatttattttttattttaaaattcttctcaaccgtcagaaatttgtttgttcatttttccaaaacccataaaattgttttttgtgtaaatctttataaatgtggccaaaattctcatttttcccctggcggcgtcttagatattcatttcatttttttaataactcaacgcttctgtttacaaaataaataaatttctttttattaaataaaaatatatttttggaatttgtattgaatacaattcatgacgaatcccccccccccccccccacataaacggtgctatg

SEQ ID NO: 33280 - DNA, 915 bp, Heterodera glycines
  unsure (1)..(915): unsure at all n locations
caaacaatccctcggtcagccaaaaccattgccccggccttttagcggcgttcccccgtgtcggagtcgtggacaacggcagcagtcagtccaacccccgaggagccacggccagtggtggcaattacccgtggggcagtgtgaattacgtatctgttaaagggggagtataaaacaattatctaatgactgtcagagacacctcaacatttgacttttggccaccgatgggtcgccaattagcaaaacgtttatgtcgccccgaagtcgcgtcccattttccaatattttttcacagccgcccaacagaagacagagaatcgcctttttcacttcttcatggccgtaaatggacggggccaatgagcgggcgagaagttcaaaaatgtttttgtgccgactcattttacgcatttctttgatgtcttcgggctcaaaactcggctccatctctttgctcaacaattggatgttattggcaatcagaacggaccttaattagcagttagaaaagcatttatttgcattaatagacaaaataaggaaaaatgtcattagtatagaaaacgcacaaaaaaaggaaaagacggacctgaaattgccagtggacatgccagcttgtttgttgggcaaaacgcggaagagagcaatgactcgaatacgatctccaggcttacaacagtcggccaagtcatcgtcagcttaaagaaaaatttaattgcaccaaaaaggcaaaagataaatgttaaaagtgccaccaatgacatcgatattccgtggcaaatgtccgggaggcgccgcttcgggcaactcctaaaggtggaaaatgctcaaagcgacacttagatggtaaatgcttcgacctgnatggagaacacttggtggtctttgtacacgcatttgccanattccgtc

SEQ ID NO: 33281 - DNA, 1075 bp, Heterodera glycines
  unsure (1)..(1075): unsure at all n locations
ccctccgccccttttgttgcccgtgccgaaaacagtcccacgaatacgacgattaacaacaacaaccccgtccacgtcgactccgccaacggtcgtccgacacactttggacagccgaagcgcatttcaacaacaacagattntggacagacggaagacattccgatgccgcgggtcattggtaaggcacaaaaacaccattacggccggcaaaagagacagattatacgtatcatgagttcagaggggcttatcccatgccgactgactgagtgaaacggcatgggttcgattcccacccgcggcgctttgttcattttcaagtcgccctccccctttaaatagggtcccacggttgtctcggcaccgtccgtcgaacacgaggactaccgcaccccaaagccgtcggtgttttcaattggcaaaagcgggaagagtttcgatttgggaggggagacgggcgaatgttcggacaacaacggactggtgaaggtgagcgaacggaggacaaaatggcgcaacttttgagcgatttggggagttacgcaaatggtcataatttaaaaggcatttgagatttttaacgagggatttattggtgggggatttgttcaattttacgagtgaatggcattggataaaatggaattatgatgactcgtcggtagccgtttttggcactttgggccaattgaacggattttggcacttttggaaaagggtcccttcggactttacccttctcccttttctcttcccttctcctttaccatgcctttttttgattatttttccttcactcattctttttttcattttctctctttttcaatttgactttgtccaatgtcttttcccttcttcaaatcaaatgccatttgctcacaatttatttacattttatgccattattcatcactttttgtcgtcattttcgcttttattgcccactccaccggaggtgctttaaaaatggattttcttttaacgaagaagtcatcttcagcaaaaatggnggcgggaggcgagcgaatgaatgaatggcattttgggggaatcaacacagcgaaaaacg

SEQ ID NO: 33282 - DNA, 838 bp, Heterodera glycines
ttttgagtaaagagtgatcaaacgactcatgctcaaatgagtggatcaaaataattatgtggtgcataaaaagcacatgaataggggtaaataaaaacacataaacaaaaaataatcaattaaattttctagtcgaaattttaattttttcaaatttgatcgacttgagtaaagacttttttccaccagtgtataaacacatgatcatgagtcatgactataaaaaaagtttaaaaaaaaagaaaacttttggcaattgaccttttctcatgttactttctttgttggcttgcgttcgtttaaatatattttttggctgcctgctgctgctgtcacctgttatttatcgcttttaaggcctttgatgtgtttaattgtgagcctaaccaaacaatcattgtgatatgtatgtgataagttaaacaaacaattttgatagtctgtctaatctgctttactcacatgtttaatggttaataggcgctattatgcaatacacaaacattgtttgttaggcattaaattgttagattattttacatttacatacatatatgtcaattttttcttttaaatttatttattttaaaatctttattacgtcaagaattaggttatacattacgtacctcttttagttggaaaacctaaattctttacattctttgaatgtaataaaaatgatgtaacattcccattcctttcaaaacttaacctttttgtttaacgatgcgacatgaatgttatgggggtgggggggggggacgtttataaaaaaaccatcaaaatgtgggttagcccaaaaaacatcaaatgaataatttttgacagaaaatta

SEQ ID NO: 33283 - DNA, 939 bp, Heterodera glycines
  unsure (1)..(939): unsure at all n locations
aattaatttcggaaatttttttaatttttaaagctgttcataaaatgtaataatacccatttatctgccaatttcatttcatttattataaatacaatattgtataatgttaaattttgtttctaataaaattttgtcccctggccttaagctaacaaactttattcatttgctatttattttacaatgcaattcgaactgcattgttatgtgaatcctgccgttgaaatggtaaaatattctaacagctttataattttttaaattcttattttcataattcgtcaaattattgttttttctcatttgctcaacataggtaaataatgtaattagaagtaaatgaaatccgtacaaaaggcaactcgtctaataaaaatttttacaaaataagccttagcttaagccaaaggctaggcttagccgaaagcttaggcctaagcttaatccaaaaattttggcttagcctaagccattgtacggttcctttcgtatgaattgttatacaccgtaattagtagtttatatgtgttttaaaccctcaaaatatgtgcaaaaactttgccaaaaaggtcaaaattgttttaagttcattatttcattttccaccatataaaaattgtttaaattctttttatggtcccataaattgaatttttcctccaacgaatctttcttttatattatttttactaaacaaggctaatacaaatccttaaatttttcgctttttcatttagcgtggtcctttccgagttttattgtcccctaaaatgccggtgccgtcgtcgtcccctccctgtcgaacttgtcaatgaatttgtgtcctttgtccctggtcccatttgtcgcaaattcgttctcccccacaaatttctcattcttccatntattactcagntcgaaacgtttcaaaatttggaaaagcaaagttagaaa

SEQ ID NO: 33284 - DNA, 1087 bp, Heterodera glycines
  unsure (1)..(1087): unsure at all n locations
ttaatcacaatcgggccaacactgtcccggcaagctttgttcaggcaaatttaataaggcacaacttttatttcaattaaatgaaattttataaaattgtcaccattcaaaaactcttatcaagttttaatagctttccaataatcgcaaaaatttgcaggcacaaaatataaataaaatgctaaaattaaactttttttacggtattcatgttgcaacctttttataaattctttaattgcttgttagcaatagctctacttgccttacttatcctgatcatttattttaaatgaaataccatatttgctctttttatgtgccatggtatattatttttcaacctcctcagaaaggggtagataattagagaccggcagtttaatggagactggcacataaaaagagcaaatatggtaaattattttcgtaacatttttttatccttttttaataaaatatacttttcccccttttctcctacaaattggcgtgaccgttttccatttttgctctttttaagcaacaaaaaaagcatgaagtttatagcagctaaattgtgcagcagcagaggtggcaaggatttatcatcgtcattttgcggaaacggcgcatttcaccggggggggggggggcgggggaaatccggtcgttttgcgcacccaaaatggcgccacattcaaatgacggcgcggcgcggcggctaaattgcgcgcaaaatgctctcggcttttgcgaggcggaaaactgtgcagcgccgccagcagttcgccacacaaatccgaacaanacacaacgccaatacataaatcgttcattcattcattccattcattcacccattgtgtaattgtgatgccattttggaagttctgctgctggcattgcgaattttgcatggggtcataaaaatttgaaggaaatattctgtgaaattgtttataactgtgttaaccaagtttttttcctgttatactttttattataagttgaaaaagtaataaaattgttctttaattaaatttgaaataaaaattttttggtttaatctttttttaaaatttaaatttggaaattttttttaaaa

SEQ ID NO: 33285 - DNA, 499 bp, Heterodera glycines
ctgtcacgaaagcgacgagagaaaaaggatgggctttggatggccgggattgttcccggcggactgaaggaagcagggggctcgatgccaaacagtgattaatttatgatcacccccaccatttttgcttccttttacttcaactatttgcccacctcccccccccccccctctttttccgtcttatccaatttgtttaccatttcccttccttttgcttctcagcatttctcatttgcatttttgtccccccgctcacttgcatttcaaatgttttcctttgttgctccgccgcggggcatctgctctccgatcgcttctttgtcccaattttgcccgtttttttctccccattcatttcaattcattttgtaccttgagccccaatgtcatcgggcaagttttcttcccaactttgtccccgtccgaaatgaccattcacgtgatttgcatttctcattgcccggcctatttaaccccagccggtaatctctccggg

SEQ ID NO: 33286 - DNA, 935 bp, Heterodera glycines
ttgctgtttcttaattcgtatttcttttttccattcactctaattattccctaattgaccttaccccctccccctcaatttgtccacctttgatgaatttgttgcagtgccaaagtgcggtgacgtgcatttcgtttttggtcagtgtgcccgttttgtcagatgcgattatggccacttggcctagcgcctcgcaaatgtccaaacgtttaacgtacacatttctgctggccaagcgacgcgcgatgaccgtcagaatggaagtgaccgttgcaggcaatccgcagggcacctgccgacgaaaggaacggaaagaatgactggcggtgccgtgccaccaaagccgtgccgtggaccgaccattccgatggcacagacgagaaagccattggacagcaattggacaacattcgcccatcgacgcacaaatccgcccgcgacaaacacaacgaaggcggtgccacaggccaagacgatcagaaatttgacgtatttgcggatttgcatttccagccgactttcgttggactgctggcccgtggtcaaatgcgcaatttggccgatcaccgtttgggccgcgacgcgaatcactgcaaaaaatggaaaacgcaaaataactgagttttaattaaatgccagcaccaattgcaattgcgtcgccctccacgcaaagtgagccgttaaacgccacattccgtgcctcgaacaccgacacggactcggccacttcctcagcttggtactcaattggctcagattcgccggtgattgaggaggattccaacttcagctccgaacagtgcaaaatgcttaattcaattatttacttacgtctaattgtaatttaatatatgtaattgaatatttgaatatttaaattaattaattagtttaatttgcgtctcaccgacagtccgctggcacgcgattccctg

SEQ ID NO: 33287 - DNA, 979 bp, Heterodera glycines
aaatattttttattaggaacttcttaacttttgagtttgagcacagaaaataataattgagcatagaataatgcagaatttttttctctatcgatttgcaaaatttggtgtggatttaataagcaggaaaaaagttaaacaggatgaagtgaatgttgtttttcctaataataaaaatattagatagtacgccaaaaggagacaaaaaattagagaaaaaaagatattgtttttctctggcactctctatttattggtacacatctcgttttttcggacggtgtgaatagacaatggacgaatttgtacatttatataaatagacaatggacgaatttgtacatttccataaatagacaatggacgaatttgtacatttccataaatagacaatggacgaatttgtacatttccataaatagacaatggacgaatttgtacatttccataaatagacaatggacgaatttgtacatttccataaatagacaatggacgaatttgtacatttccataaatagacaatggacgaatttgtacatttccataaatagacaatggacgaatttgtacatttccataaatagacaatggacgaatttgtacatttccataaatagacaatggacgaatttgtacatttctataaatagacaatggacgaatttgtacatttccataaatagacaatggacgaatttgtacatttctataaatagacaatggacgaatttgtacatttccataaatagacaatggacgaatttgtacatttccataaatagacaatggacgaatttgtacatttccataaatagacaatggacgaatttgtacatttccataaatagacaatggacgaatttgtacatttccataaatagacaatggacgaatttgtacatttccataaatagacaatggacgaatttgtacatttccataaatagacaatggacgaatttgtacatttccataa

SEQ ID NO: 33288 - DNA, 98 bp, Heterodera glycines
cccgtgaatcctgaccgtgaattaaccccgtgaatcctgaccgtgaattgaccccgtgaaccgtgaatcctgaccgtgaattgaccccgtgaatcctg

SEQ ID NO: 33289 - DNA, 1391 bp, Heterodera glycines
ttttccaagcattcccaattcatactgaaaatgccaaaattctctattcagctttttatataatgctacaattctcaatttagctttttatataatttaaacattaacaaaaatttcttgggagcttttgcccccacatttcttccacgaagacggggagaaagaaactctaatcaattaaatttttaatggggatttttggtccaaattaggctgtattttttgcctgtcaaattaattttttgaaaattccttctgctaaccctccttttgctgctgctgcctatttgttttttgtcctttttttgcaaaatttgggaatttaatttgctgttaaaatattgctccatgaaagtgtaaagttcgggcggctgttctccattattgtcagcagatgatttctccgtgtttgaccatcgcattaaaattgcttccaacactttgtacacctcgtaatatgacaatgtgaattcaccgagtttgagcagaaagttgaaattttctgaaatatttatggaaaggcaattgttagggctgtcaaaaatatgtacataaaatatataagaaaaataccaaaattgtacgaaatatgtaaattaaatgttaaaatcgttatttttggaaaaaaaaattctataaacattgaaataggcacaaaatgccataaaaatgatataaatagggcttaggattatgtagggtttccagtagggtgttgacgggtccgagtccaacttgacgctttggcaccctgtcaaggacccgcggtccccggtattcttaacacaggatttctcgaggcttacaaaaaaacagattttatggtaattttaaagttattaagaaaaaacttaaaaatcccgatttttggcaattttgatgctagaactttttttttaataattgccaaatcaccaagggaaagcttagaattcgaatgctattaaaattgttgaattttgtcgaaaagaaaaataaaataattaaaacgattaaaaatctttttttgtacaaaaattaaattattgaaagcagcttcataaacctttttaataaattaattataattttattttatttactcgctttgttcacccaccaataaattgcggttctctcgcgctgttcgctttaatttcatcccaaaaatgttttttggtttgcgcgtcaatgcgaatgatttgaaaaggaaatattctgtaaattaaattaaattctttaaaaaagtcattaatagcaaatcacaaaattaaaaacggaagaaaaatattttacccattttcgttggtgccgcctctttgtgccgatataatttgaaaagcggacaaaagttgttccaattgccacccgcccgacatccataataatgcgagaaataattctcataacta

SEQ ID NO: 33290 - DNA, 866 bp, Heterodera glycines
  unsure (1)..(866): unsure at all n locations
tattaaatttttgggtgggtggtcggcacnaggacggatggcgtgtacacggagcaaatggtggaggacaaatctttggttggaactgtgaaatatgacggggcgaagcagtgcttttacgacaggtgaagcagaaaaaaggccggacggtggtgcaaaaggtggtggaccaattgaattggccacttcctgcgttttagcagatgatttaccctaaaaaagcgcaaattaccgtttttaaaaatcaatgaccggaaattcctttttttggcaaaattgggtaaaaggttttcacattgaaaagtgccaattttttaactctttcaaaacatcgtcggaagagtttttgtttttttcatccccaatcatagtaaacattctaggtactgttcaaaagtgcttgacaaacattaatttacaaaaaatttaaacgaacaaaatgttaaggtctaaaagcgtcattttgggtgcgcccccattctctttttgatgtttatgtgttccacaatcacattcagtttattggtgccgaccaatttggtgggaatgatacgcggacgaaatagcagcaacatgaagccaattcaagaggaaaatcggtgtcaaattgaatttccgaaaacaccaaaagcgtctggtacggaaactgaaatcagtgagttgggacgggaaaagaaaaatcagccagccaatttttgaatgaatgacaatacattatggatttttgtgccaatgtttttttcattggtctttcccccaatagagttttcctccggcgaaagtgccctccatgtgcagaagtgtggcgaagcgttgaaaaaagaattggcaaaagcgaggaataaggcggcgccgacgcatttcag

SEQ ID NO: 33291 - DNA, 683 bp, Heterodera glycines
tgctttttcattttttaatgccttagaaattttaaatttatgaaaagcattttctcaattcatttttgaatatttatttattattttaagttttattaaattagaaaaaataattttattttaataaaagaaatattaaaattttaatttttttaaaaataaaataatgcaccgtaaggacagagaaattcactgagctcataaatcggtgacattttcatcaaaaattgacattgtaagctccgccgatggggttaaagtcggacccatttcttcttccgacatccaatcacaatgtgtaaatgtgaaataggccccggagggggcaaattcctccccgtgtcagtgtcatgtccacttttgtcttatttcacccgtcaaaaaagcgctattggcaagaaaaataaatttttggcgacattaaaaaaaaagaatttttaatccactaagatttgtttattatttagcctgccaaattacaaaatttcgttaaatttcaaagttttggccaacaaattttgaaacttggtttttgggtttctatagtttttttttgaaattttaatatattttttaaattttacatggtaatagagaacacttaggctatctgcaaaacaaaaaatttttatttctatcctatatgcccgtcaaacccaggacaggttcattatcctaaaccg

SEQ ID NO: 33292 - DNA, 905 bp, Heterodera glycines
gcgcagaatatctggagagacttagtgttagcgcatcaattatttttttcagaatgtgatgggtacaaaaaatacgggtccaaaaatgggtgtaactccgcttggagatgcgttagaaaagaaagaaaaatatgttcggacagcttttgaagagctgcattgaatgctgcagtcgccgctgctgtacgcccacgcgttgctgagttagggtcgagagcggcatgaaaaaagacaaaaaggaggaaaatgaaacaaattcgcggctttgccctcgcgttggagaaaacaatgcgcagaataactggggagacttagggttagcgcatcaattatttttttcagaatgtgatgggtacaaaaaatacgggtccaaaaatgggtgcaactccgcttggagatgcgttagaaaagaaagaaaaatatgttcggacagcttttgaagagctgcattgaatgctgcagtcgccgctgctgtacgcccacgcgttgctgagttagggtcgagagcggcatgaaaaaagacaaaaaggaggaaaatgaaacaaattcgcggctttgccctcgcgttggagaaagcaatgcgcagaataactggggagacttagggttagcgcatcaattatttttttcagaatgtgatcggggtacaaaaaatacgggtccaaaaatgggtgtaactccgcttggagatgcgttagaaaagaaagaaaaatatgttcggacagcttttgaagagctgcattgaatgctgcagtcgccgctgctgtacgcccacgcgttgctgagttagggtcgagagcggcatgaaaaaagacaaaaaggaggaaaatgaaacaaattcgcggctttgccctcgcgttggagaaagcaatgcgcagaataactggggagacttagggttagcg

SEQ ID NO: 33293 - DNA, 774 bp, Heterodera glycines
ttttaacaaattaaataacgaatggttcttattgtcctccaatttcaatgcttttatttttattttaattattatttttagtcctcaccttaatgattttgtcataaaatggagaagattgcagataatttgaatcgtttgtataaccttcttcgatctctctttcatttttgaacattattttcaatttttcgtcaaatctcttgcgaatagcattcaaattgccaaagtttgctttataattgcttaatttgtcctcatttagcaaatttaattgataaaagtagtatttatttgtaagtctttcagaaagttccattgaaatatggttaaaaatgcgcacgacttcaattagttttgttgcatttgaaattgttcgagttgaaacatatggaagaaaccatggcttgacaatgggcatttcttttgccaatttcgggttttcagctttaaaattgaaaaaaaattgtatatagagaaaaattccaagcaaaaaaataataatattaatttttatttactataacagaatggtaattaataaaatcaattccctactttttgcgtatactgtgaacaaatactcatacaaaatgttcaaataattgccaactttttcacataatttccgctcctcatttcttgccgcaacaattttggcacaattccaattctttttcattaaatacaaaaggccaagaactatttcatatcttcttggcaacgtgaagtctaagactgtattgatccgtcgcacttcgtcatcattcttca

SEQ ID NO: 33294 - DNA, 60 bp, Heterodera glycines
ggcgtccagcacgccttcgaacagcgaggtgttcggggtgtggccgatggcgatgaacac

SEQ ID NO: 33295 - DNA, 305 bp, Heterodera glycines
aaattttatcttccgttgcttaattctgcatgcatggtaatgtccttaattatgcacttttctacctaaaaatgacaagttggcgcacataataaaaattgtatcttccactccttaataatttacgaattgaaccttctttctcttaattctggatttttctacctaaaactgacattcccaattgcttaataatttacaaattgagtcttccattgattaactatgcatgaattttaattaaaaacgtaaataaaatgaccaaattacacaatttcgaggtataaaatagagaaaataaagtg

SEQ ID NO: 33296 - DNA, 868 bp, Heterodera glycines
  unsure (1)..(868): unsure at all n locations
ttagtccattaattgtcctctacgaattaatgtgtctgaaaatgaaccgttttcactttttgtcgaccaatttaaaggcactgaaagagacaatttaatggtatgaatttatttttatcccaattttattttttcgaatatttagttctttaacattgatgagcaaagaacgaacaatggacgcttaattggaaggcaattctttaattttaattattattatctaattattaattattattttataatttagcggtcaaatgtttcgttctcattcacatagcgttttgctgaacattttgctcaattacacttcaagcatcgaagcaaaaattgcatattcgcttggttttatttatgaaatttatattaaattaaatattttttgccattttttgctgtttcggccatttcgaattgtttagtgccaattttcttttatatttttagactgccgaaagccgttcctttggcattctgttttcccacaaaaaatattgccaaattcgactttggatggtcatcattttccttttcgttaccgttttccatccgtgccatgccccgtgggcaacaaaagtgccgaattaatttgtgtcgatggaggaaaatggcgagccatcggatgccaagaagaaggagatgagaatgaaaattatggtaaaaccgtaaaacattaataatcattaatttgttattacattagcaaaaattttaatcttcgcacatttaaaaaataataatatttanattaaaaaataattctaatcactttttttgacggaatgccttctcgcccgtgtgttgtgccccgcatcagaaatggcctcgtgctcgatttgaatcgtaagcttggcattttgcgctt

SEQ ID NO: 33297 - DNA, 307 bp, Heterodera glycines
tttttcagtcgatttttaggtgtgtatttttcgtttttaagtcgatttttagggggtgtatttttcgtttttttgaaatcccgaattatggggtgtattttacaaaatttttcgccaaaaaattaatattttttgccattttggcctccatttttcaaaaatatggtaaaatgggggtccggcggtgccgataggcgccgctgggaaaatttttgagtattttaatgcaattttgttaagaaaattgcttaaaatttcaaaaaaaatttactgaaaatttttatttttttgggtttcgggggggggg

SEQ ID NO: 33298 - DNA, 418 bp, Heterodera glycines
taaaaaatgctaccaaaaactcacaattttcaattttctttttccggcacctatcggcaccgtcagtccgcaaaattgtgcttaaaaaattttgactaaaatttccaaagtgctgattttgaccccaaatgatgattcttgttggctaaatgctggttttgaaaattttcagttagcagccctgtttttaaagccgtttttttaatcttatttttggggccaaaatcttcgttttaacctcgttttgtccttagtttatattttgatcaaataaattgtaaaaatttactgatttgaaaaaatgttgctaatattattatttttgaccctaaaatcttatttttcggccttggtgttcatattttgaaaaattactgatcggaaccatggttttgtggggccggcgggtgccgatagg

SEQ ID NO: 33299 - DNA, 586 bp, Heterodera glycines
  unsure (1)..(586): unsure at all n locations
tggtcatttttaagtaaaatttntggattagataccatttgcttttcgtttcccatgtttaggcatttctccgtgccaccatttcttcggccggctaccggaccggctcagttcggccccgcacggttcggccccagcccagttttcgatctataacttttttctttgtcaactgacggaaatgtgcatgtagaatacgaatggaaagagcgatgggtaatgaaacgatgccaaattggggcgatgattcaatgggaggacaaaaagacggataatttgaacaatgtcgactttacgttgaatgaatttggatgattggaaacaccattttcttttgtttaaagtaatttaaaaaacttaattcaggccattgtctccaccagagacgggtcaaatgaacgcaaaaagtcgtatgaaaatgaatcccgggcccagcggacagcggaagaaaaagtgaaggaattagtgataaatgagaaattctgatcaataattatggatgtaaattgatctgttgattgcatttcacatttatttgttgcttctttcgtttgaatacatttatgtaagtgattgtttggatttt

SEQ ID NO: 33300 - DNA, 943 bp, Heterodera glycines
ccatatatttgatcaattgttttacttttttatatttttcatcatccgtataataatgctttttgatcattccaaattctgttttccattcgtaaattttcttttgatttgtacccaatttttttgcaatttttcgttcaattttttgccattctttcgttgaatatttcttttccatttgcttaactttctccttaattttctgaaacttttcaacaatttctcttttctttttatcaattgcttttgaaaaatcctcacaaatttgtccaatatttgttgacattggcaattggccgcccaattcatcacaatctgtggacatttcttcactctgctcttctttcacttccaaactttcatcaacaatttgatcaatatgttgatcattttgtccaaattggttattctgatcagcattttcttcataaattattggaccaattcgatacatattttcttcagttctttcgtcccatctttggccaaatatttcagcaaaacttttttcttgatttattttgccagcctcaatttggttaattgtattttcgaatattaatgcgcataataatattaataatattttcatgattttttataaaaatttaatgaattatttttattaaaaaaaatattttacgcaatgaattttgtaattattaattttatagcctggctaaattattcaatcaattcttaacaattttaatcattatatgatcaataagatacaccatttttttatataattcatttattatattttcattttctcagcgaattggggagcaataaatatgagctaacaataattattgttgggccccaaatgtcagggtcctcaatataaatattggcctctaaaattgggttagttcttgaaaagaaaaataaaatttttgaaatttatcatcaaaagaaattcattgaaatattaaaa

SEQ ID NO: 33301 - DNA, 724 bp, Heterodera glycines
aaagggaccgaatgccgaatgttcttacggtaatggcgataccgtaggcattggcctcaattcggccactcgacagatcattttcaccaaaaatggacttcgtttgggttggtaattaattaattattatttttttcataaacttttcacagattcctccgatttgttcattcctcaatcttttgctggtggccctgtgttctttccatttgtttctttatgggaatcgggtgacaaaatcgaggcgaactttggacccaatttcaaattcgatttgaccaccttttaaaggaagaaacaaaggttctagtcggttttacgcgtcccaaaaacggtaatacttgagaatctgggctccactcaaaaaaaaaaaattttttctgttatgaaaaggccaacctgggggtttaggggcctctgatcacgaatatgaatcagatttgcaaaaatcattggtcctatccttgtttttgaaaatcatagagatcaaatgtttcataggcaactcgaacaattgcttagactaggcctaagctttaggcttatgcctagacttaggcctaagcttaaggtttttttggaaattttttattgccacatttcagtatattttaggggtactttttgcaatttccgatatcacaaatatacaaacaacaaacaattgggacgaccttaaatgcttaaagtttcccaatggacggtccaaaaaaccccttttttt

SEQ ID NO: 33302 - DNA, 754 bp, Heterodera glycines
  unsure (1)..(754): unsure at all n locations
tgaatcaaccaaaaaccaacgatgaatttagtcaaggagattctgtccaaattggccaaatttataaagaaatttttggcaaaattctcaaatattttcagccaaattttgttgaatttatgaaagaccgaccggatttgcttcacaaatggcacacaatggagaactttatgaaagaatgcattaagcaatttgaagaaaattaaattcgtggcatttcggcaaatttgaaattgtcattttaggtttggcttttaaaacaaaattttgggaaaatttttatatgttgcacaactgaattttttttttattgtaatttgaaattttgagactctttatgtaacagattttaatttggataaattcattggattaagtaataaattattttattaaagctcttcaaaagctctatttgttattaaaaaattaataaattgatgcatccaacaaaaaaaaaacaaattttaaatcatgtgaaaaagaagtttttattctttttttttgttacaaaaccctgccattttcgaaatcttactcggggcgctgacatttttttcaaaatgattaagtaatattaatttttttgaagatttttattctttattttctcttaaaattttcaaaaaatttttaataaattttcgcttttttaaatttattgnaaataattaaaatttgtttttttcatttctttcacaaatttttttttttttttgctattatcctcccatattaatcatcataattatca

SEQ ID NO: 33303 - DNA, 989 bp, Heterodera glycines
ccccgaaaacaaaaaaatcgattttttcaagtgtccgttttggggtactcaaacaattatgggggagcaaaaatccaacgcagaattaaagtacaggctatagggaagctattcccgaaggattcggtctccccataaatctgggcgcatcggttcggggggactgccccgaaaacaaaaaaatcgattttttcaagtgtccgtttggggtactcaaacaattatggggagcaaaaatccaacgcagaattaaagtacaggctatagggaagctattccggaaggattcggtctccccataaatctgggcgcatcggttcggggggactgccccgaaaacaaaaaaatcgattttttcaagtgtccgtttggggtactcaaacaattatggggagcaaaaatccaacgcagaattaaagtacaggctatagggaagctattccggaaggattcggtctccccataaatctgggcgcatcggttcggggggactgccccgaaaacaaaaaaatcgattttttcaagtgtccgtttggggtactcaaacaattatggggagcaaaaatccaacgcagaattaaagtacaggctatagtgaagctattccggaaggattcggtctccccataaatctgggcgcatcggttcagggggactgccccgaaaacccaaaaaaaaattttttggataaaaattatttaaatgaactgactagataatatttaaaataggtttttctcttcctttcagtatccctgcaaagtttggtgcgcttctgatcagtttctgaaaaaaaagttaagcctaaactttttggcctgtttaaaaaggaattaaaaatttttaaaaattttattcatctccctttttgatagaaaaagcatcagagtgcctaaactaacatgtaaataaaatttggtgcgtttcagaaccctttctgaaaaaatatttaagaattaattttgcaaaaaataaataaaaacgaaaga

SEQ ID NO: 33304 - DNA, 171 bp, Heterodera glycines
acaaatttggtatcatttgaaagctcttgatgtgccaagtctaaaaacaaggtatatattcgaaccgatgccatctaaacacagggacaactgagtcccagtgaaaatcgacacttcagtaccaaaaaaagacggtacgaaataacaattaaaggcaacaaaaacgcaaaa

SEQ ID NO: 33305 - DNA, 1164 bp, Heterodera glycines
tagggttataatttatatgattttgcatatttttcctgcgtgtatgccatatgaagaaaggggctcaaaaatagcatttctacattaaaatttttttgatttgctgcaggtttttagtgcatataaatccatattttgggggttttcgagaataaatgcatattttgccattttgcatttttacagcatatttcggccattttttggaaattttcgtaagaaaaatggaaaaaaaagcgaaaaatacactcctaaggatggactttttaagaatttttataaaaaataactttttggcatttttttgagggttaaaaaccatttttggcagtttttaaggcgtattttagtgcatatttaggcatttttcgggtttttagggcatatttgagggatttttagtgcatattttatgcgcatatttgccattttttagtgcatacaatttataaccctagtcattatcggccacacagaaatcactattttggcacttcgtcactaaaataatgaaaattcattattttagcattttgtcactatttttttcactattttgatattttttggaaaatttctcaacaaaaatgcaatgaaaactaaaattactctctaagaattgacttaaaaaatttcagaaaaattacccctaaaaatcgacccaaaaattttcaaaaatatactcctatgaaattaaaaaacttcattggtaaaaatttttaattttaaaaattattttttagctaactattttgggttttttgctcttaaaactcccagtcctactcatttgcaactgcaactagtgaataaaaattatttttgctcaatttttggctaaaaatgatgtcactcttcgtcactatttcgcactttttgccactattttggcatttttactcactattttagttaattattttgagatttttcgtcacgaaaagtcgcggccctaattattacctttttttgcataaatttcaaagaaatattcgtaaataatgtgcacataattcttatatttttcacagcactttccatcgtaaaatgagcggtgtttatattgtttggtgattttcttacaattccaattttctttcatcaaaaaaataacgccaaaatacgcctcgagcattttcttattgtgttgatcaacagcagaag

SEQ ID NO: 33306 - DNA, 814 bp, Heterodera glycines
gcccatttctccctcttctcctctccatcttccctgatctcttcccctctccatcttcctctctccatctttctcttccctcttccctcttccctcttcctcgcccatttctctctcttcccctctccatcttcctctctccatctttctcttccctcttcctcgcccatttctctctctttccctctccatctttctcttccctcttcctcgcccatttctctctctttccctctccatctttctcttccctcttcctcgcccatttctctctctttccctctccatctttctcttccctcttcctcgcccatttctctctctttccctctccatctttctcttccctcttccctcttcctcgcccatttctctctctttccctctccatctttctcttccctcttccctcttcctcgcccatttctctctctttccctctccatctttctcttccctcttccctcttcctcgcccatttctctctctttccctctccatctttctctcttcacctttctcttccctcttcctgggacatttctgtcccttccgctctccagcgtcgtcactccacccttctcttcgctctttgccgcacacttatgtgtaggcaaaacaaaatggtgccgcggcattttatgaaggtcgcgcggaaattcccccaaggtcccttttcaaatgttggcacagaacaaatgtgataaaacaaaaattggactaattttaaagctctttactaatatctcttaatcaattaaagattcgctgaattcttatttgcgcaaaaaaacaaaagcaactagcaattcct

SEQ ID NO: 33307 - DNA, 83 bp, Heterodera glycines
gctgtcctatggtttgcccgtcgatctgctcgcggcgttgagcgatggctgcaatgtcatcgccaatggctcgcgcaaaatga

SEQ ID NO: 33308 - DNA, 1506 bp, Heterodera glycines
  unsure (1)..(1506): unsure at all n locations
agaagaanatttggagaagaaattnttgaaggatcaaaaacatagaaatctatgaaaaaaaggatacatttctaagaaaataattatttacgatagaaaaaccaattaatttcttatatttttattaaatcattgtcatgataactggcataaaatccgtttattttttcaattggattcgatgaatttgtttcgctttaaccacttttattaaatattaaaaaaaaatttatttatcaaatacaaatacaatatttttgaaaatttatataacaaatctattttttagagcgcagataattttttaaataaatttatccaaattttcgtaaatttttccgttttttcaatccttcaaaatttcttcgccaaaatgtttcttccattctgaaattctctgttgatgaattttcaaaatttttccaatttccgtgtcctcatttttggattttctttttttatttgccaatacattttcattttttccattttttcttttttgataatacttttcttgtgtatgccattgccaaattgtttcttccatttctcaattattctttgactaactccaattttcttacaaatttcgttataattttggttccattctttttttgaaaattttctttattttcgcattgattttactccattcttttgctgaatatttcttcctttttccttgattttctcttttattttataaaattttccaattatttctcttttttcttcttctttttcttcccatttttctccaaatatttcgtcaaatgacttttgttgcaattttttcctttctgaaaaaatgaaattttagcgacgaaaattacccaaaatagccttttgaaaattcctattaaaaatttctgatttcggttatggaaacccacaggtgttcaaagcattcaaatattcaagtttctattattttcgtgaacagcaacatttttctgcgcaaaatttcatttttggccattttacaccaattttctgaaataatgaaatttcataaaatctctttaatttttctaaaatctctttacattgtgaatttattttatttttattgaaaatatgtttattattttcgaatgagctccagtagaaagtaataaaattttatttaatcattaatttaccaattggcaattatttggtcaataggataaaattattattattatttctttgcaattaaacaggatttccttattttattaagtaaaataatgatttattcagttttttaatcagaaaaaaatcatttaaatgcctcaaaaaatgaattgccatttaattgaagaaaaaataaaatcattttaagacgacaaaataattaaatgcattaaataaatgctagaaaattttgaaaaattatccaacataaatatatataaagttaacatttgattaaatagaattctaaatttataaattttaatttttaattattatttaaaaataagcgcttgaaatttaaaaatcatgaaaacaaggacg

SEQ ID NO: 33309 - DNA, 903 bp, Heterodera glycines
  unsure (1)..(903): unsure at all n locations
cgacggaggtgtacaccncttcggccaagtgcgacgagtacatggactatccctacaaaaattcataaattttctgtaatttcacaaaataatacgtgtacaaaaagctaccaagtagacactcgaaaaatgatggcatcgagctctctctctctttccccgttcactttctttctctgcgctctctctctctctctctttccccgttcactttctttctctgcgctctctctctctctctttccccgttcactttctttctctgcgctctctctctctctctttccccgttcactttctttctctgctttctctctctctctctctttccccgttcactttctttctctgctttctctctctctctctctctgctgggttagccgagcagagattttgccagccattttttaatttaatcgatattatctgaatgcattttttaaatgctaattttttcagttggcccaaaaagcgtacgacgactttgaccaattgtataaaaatgcgttttccttgcgcacattggaacaattggagcatgtaagcttttgccctcaatcaatttccttgtcgcttttggatcatgtgacttttcctatttttttgtagaattttgcccaatcgctttttgaacgggacggacaacggcacgccaaactcaaagggtggctggacgggctgcaatgttttgtcgcacggattaggacaattttccaaaaaactgtctcctactacacactgttcgacattgtggccggacgaaggtgttgtttgttgctatggggataagaaattttggcaaaaattgaatttttaatactttttttcagcgatttgccggcactgattgagggcgagtcgatgccgttggcactgttcacatccgccaaatattctgac

SEQ ID NO: 33310 - DNA, 903 bp, Heterodera glycines
  unsure (1)..(903): unsure at all n locations
ataaataattattaaaataattgaaagccatgatttttcatagcaattttacctttggttagttaatgacgaaaaactccgaataacaaattaaaaaagataggctaccaccatattttaataaaacatcaatttgattaattttgagcaaaatttcaaaaaaattttcaactttaatgcctattcatttaaactctaaaaaatgattcattacatcggcatcatattcgaggatgtcccatgcaataattatttcggtttcgggagttaacgaagggctgtaggacattgtgaaattttaataaaaatttgaacggaaattcaaataaaacatgaaaaatggattcaataatgattaatgatgggtgacccacctttaaacaacctgtccctttgatgtaccgaccgattgcgcctgcttaatcaaattaaacattcataaagttgaaatcgcgcgattcaaattcaaaattttgcaaaaaacattatcgctactattaccctaattacctattcacatacaatggtaaagcggtaacgggattcccgcgtcaaaacttgggattcttgttcccgttccctgtcataggcataaaaatcatcaaaattaaccatttttaacgcgaaatttgttaataaattcaggcataaatcagccaattttaccgccagaccaatctttttagtttgttaaaacgttaaaaaatgacatacaaaatgccaaatgtatcgtcaaaatttggacattttatatgaatatttatttccagttatatgctgaaggtttgtaaaattttactttatttgaaatttttttcattattaaaataatattaactagggattcccattttagtcacaagaaatcgcgaattatgcattanatagacgccaaaaattgaa

SEQ ID NO: 33311 - DNA, 999 bp, Heterodera glycines
cctggggttcagagtcaagcaaccctgggcttcatacccatttagagtttgagaataggttaaggacatttcgtccccaagtcctctaatcattcgctttaccgagtataactgcttaacgagctccagctatcctgggggaaacttcggagggaaccagctactagatggttcgattagtctttcgcccctatacccaagtcagacgatcgatttgcacgtcagaatcgcttcggacttccaccagagtttcctctggcttcatcctgctcaggaatagttcaccatctttcgggtctcagcgcatacgctctgtctccgccccatcgcatgcgatcgagacgggactatgttgcgccccaacaccgcagtgccagggatcacacatcagctccgtaagaagccttcactttcattgcgcctttgggttttgaacacccaatgacttgcgcatacgctaaactccttggtccgtgtttcaagacgggtcgaacagatgaccggcttttacaccgagaacgcacaactgagagcccgagctggaccgaactggttgctggtacgtgtcgcacgcgaccgccaccgacccccagctcgagtcaacacggacccgaaaccattgcacaattcacccagagtaaacagcactcccccgatccgggtaccagaccccgaaaggctggcctcaagaccgagctcacgcagctactccgagcatctcagcgcactccgcctgcaaatgccccattcgccactgaacagaaggacagcaaaccccagtctggaggctagcagtacaacgtacagcaacaaacgggtgaatgcagaccagatacgccagctctgtccgtttccacctcatcggtttcacgtcctctttaactctctcttcaaagtgctttgcaactttccctcacggtacttgttcgctatcggactcgtggccgaattagtcttagatgaagttaccacctgatttgggctgcgatcccaacaacc

SEQ ID NO: 33312 - DNA, 873 bp, Heterodera glycines
tcagttcatttaaataatttttatccaaaaaattttttttcgtgttttcggggcagtccccctgaaccgatgcgcccagatttatcggggagaccgaatccttcgggaatagcttccctatagtctgtactttaattctgcgttggagttttgctccccataaatgtttgagtaccccaaacggacacttgaaaaaatcgatttttttgttttcggggcagtccccccgaaccgatgcgcccagatttatggggagaccgaatccttcgggaatagcttccctatagcctgtactttaattctgcgttggatttttgctccccataattgtttgagtaccccaaacggacacttgaaaaaatcgatttttttgttttcggggcagtccccccgaaccgatgcgcccagatttatggggagaccgaatccttcgggaatagcttccctatagtctgtactttaattctgcgttggatttttgctccccataattgtttgagtaccccaaacggacacttgaaaaaatcgatttttttatttcataaatattttttcagaaaatgctctgaaacgcaccaaattttatttacatgttagtttaggcactctgatgctttttctatcgaaaagggagatgaataaaatttttaaaaatttttaattcctttttaaacaggccaaaaagtttaggcttaacttttttttcagaaactgatcagaagcgccccaaactttgcagggatactgaaaggaaaagaattaacctgttttatcacattagcttgtcatcagtttttataaaaaattttcaaaattctgagtctcctattattttatttttttttcaaattttgaaggggggggggggggggg

SEQ ID NO: 33313 - DNA, 1589 bp, Heterodera glycines
  unsure (1)..(1589): unsure at all n locations
aacaaatcgcacttaaaaattacaaatttttcgcaggctttgaaaattaaattaaattttcgtaaacaattttcgaggggggcgcgacgaactgtgccctgatttataggaattttttggtagccggcgcccacccaaaaaaaggaatgttttgtctcttttattgcactgttttgtgcaggcgaatgcgtgtgtccgatcactgatcagacgaccatttatctgcgcctttgccccgcctttctgtgccgtgagccgcccccgcatccgttgtccccgttccttgtgccgatctttacgcgtttgccaccaccgatcacccgggcggcactcaaccgcatggacgtactttcgcaaaaagttatataaacggggaaatcgaaaataattttaatattttttaattaataaagatttgccccgaaattgacggcgtccgctgcatcaaagacattgcgtgtgctgtccaaattgacagtaaatgaacattattactttttatatatttttattttgattcggctttgttattttattttggttttaatgaattaattattttttaattataataactttcttttcataactattgtatatttatttattgataaaatcccttccaaaaaatttttttttttaattaattatttaagaaaatttaaaaaataaatagtttttatttaaaaaaaactaattagtcgattaattaattgctaatcacatcttcaccaatttagctgatctcgtcggccgttgtgttcgcaatctgtgcttccacggctgtgttgcgttgttgccccaatttttgtactccaactgttacgtgcccactgaacgtcttcgccacttctttgacagtccccacattgtggaggtgggttcaaatcaatattttcgaaaaaaacagaaaaattctaccagaaaattgcttgcgtctctttaaacttcattaattcaattaattatttttgccagaaatgcctcgactttgtgcgcttacgccccttttctgaggacccgtcgccggtgcttttcgatgacgtcgctcgcctttatttgggccttaaagtgtgattgattatacatttttgcaaatcaatttacaaaatgcctccacgaattttaatcaaaattttggttttttaaatacgggaggtggtgggaggtgaacctaccaaaaaaagaagggccatgtcaaaaaagcgactaaacatgagaggaccccatccccgctcagttcgaaaaaatcggctgtgaaaagtgcatttcttcgctctcgtcacgaattttattaaagttcggtgctgtcgtgatcacccccgtgaaaatttttaataatttcggcgatttttgttgatttttttctcttgaaattgtcattntgttgtttcattctcgactctcggncttctcgagagtctgatcagctgacaaaaaattaaaatcgtcgtctacattanattctcctcccccctccagaccggctccccgctcagcgaatggctgctccgaatgcgntcccggcagctgcacgtggacgagcgcaagctgatccaattcggcctctttctacgcattctgcgcaa

SEQ ID NO: 33314 - DNA, 693 bp, Heterodera glycines
accggggcacctctagagctaagccaaataagaaggaacacgagcaggaggaggacccctaggagaaggagacgtactatcaagtaccaaaagtcaagcctttgaagacgaagctgaaccaacagtcaggagaaggaaagagacaccgaaacaccgccccacccggagaaggaacggaacccggtaaagccaaatgacggagagaaggagcaggaagacgactccgaaaagccaattgagccaagaaagaaaccagcggaaggacccgaacagcaaacgcctgtgttttctttaggaaaagccggacgaatttgaggagccatcgaatggggagaagaagccaaaggggggagcggaagaccaagctgacccaaagaagaagccggacggagtggaagaggagccaaagtcggagaataagccaaatgaagcggtgtcgaaggaagaggaaaaccaggcggaggagcccaaaaaggcaccagagctaaagacagcggaaaactcggaaaagccaccggtgtcacaggaaaaggcaccgccaaatggcacagccgaagatgatgtacaagttggcaagcaaggggaggaacaccaaaaacaagagcaaatgcaacaggcaggtgaccaacagccccaatcagacgaagtggcgcccgcgcgtgggaaccgacgccgacgaggtgcaaaagtcag

SEQ ID NO: 33315 - DNA, 873 bp, Heterodera glycines
cgcacgcagtcaaatgctgtcactgtggcatcaactttttgtgtgatgcaagagtgccacgactggatttggacgcagccactgatcaatggacatcctgtcaaacttgcggctgactcgtgctcgcatctgacaattattcaggagccactttggataagtttggggagtccaaaattgagaaaacaaggtaaaaaggttggcagtttttccggtcacaaattgagtttgttgggcgaattcgattgtttggtgcaatttaaaggtgttgatttaaagcttaaatgttcagttgcgaacaccgatgctccaaacatcatgggactagattggatcgtgccgtttgagcaggccacacagtctccaatcgcgaccacattggatttgtcaattgccacaacaaaagtcaacgcaattgaaccgaccgatgaaccaacaaatttggctgaacaaatgaaaaattcttttccacaggtttttcggccaggtttgggcgtgtgcacgaagatggaagcaacgcttcatttgaaacctggtgctcagcccgttttttgtcgagctaggccagttccgcatggagtttcggaggccgtcaacagcgaattggaccgtcttgttgaaattggagcgatccaccccgtcgatttttcgcgttgggcggcacctgtcctcgctgtgcgtaaaaagtctggtgaaattcgtgtttgcgtcgacttcacgaccggactaaatgatgcgttggaactcaaccgtcatccattgccacgaaccgacgacattttccatgcacttcgtgggtcaaaagttttctcacaacttgatctgcgcgatgcatatctccaattggaattggatgaaaagtcaaatcgttag

SEQ ID NO: 33316 - DNA, 1050 bp, Heterodera glycines
gaaaaggaaaaattcgaaccaaggaggggggaaagaggaggaaaaggatgaaaataacatcggggaaggaggagagacggaggagaaagagagaaaaaggaaaaattcgaagcaaggagggggagaaagaagaggaaaaggatgaaaatatcatcggggaaggaggagagacggaagagaaagagagaaaaaggaaaaattcgaagcaaggagggggagaaagaagaggaaaaggatgaaaatagcagtggggaaggaggagagacggaagagaaagagaggaaaaggaaaaattcgacggaagaaggagggggagaaagaggaggaaaaggatgaaaatagcagtggggaaggaggagagacggaagagaaagagaggaaaaggaaaaattcgaagcaaggagggggagaaagaggaggaaaaggatgaaaatagcattggggaaggaggagagacggaagagaaagagaggaaaaggaaaaattcgaagcaaggagggggagaaagaagaggaaaaggatgaaaatagcagtggggaaggaggagagacggaagagaaagagaggaaaaggaaaaattcgaagcaaggagggggaaaagaggaggaaaaggatgaaaatagcattggggaaggaggagagacggaagagaaagagagaaaaaggaaaaattcgaagcaaggagggggagaaagaagaggaaaaggatgaaaatagcagtggggaaggaggagagacggaagagaaagagaggaaaaggaaaaattcgacggaagaaggagggggagaaagaggaggaaaaggatgaaaatagcattggggaaggaggagagacggaagagaaagagagaaaaaggaaaaattcgaagcaaggagggggagaaagaagaggaaaaggatgaaaatagcagtggggaaggaggagagacggaagagaaagagaggaaaaggaaaaattcgacggaagaaggagggggagaaagaggaggaaaaggatgaaaatagcattggggaaggaggagagacggaagagaaagagagaaaaaggaa

SEQ ID NO: 33317 - DNA, 954 bp, Heterodera glycines
  unsure (1)..(954): unsure at all n locations
ctcgaataaaaatcggaattttgaatttttcaaattatgattttttgttcaaatttagattaggaaatcggaattgatcaaaataattgaaggattcgtgatcggggaccccaaaaaccccagagaataaatttttatgactatcacaaaaaaaactttgcaaaacaaaagggtccccccttttgaaaaaattttcaaaaagggccacttttaatatagcgcctataactgttaactatgtagggattttttgtcactaaaattcacagccctagtcattaggagccacattgtaagacggatgtcgtatcatttcccttcaagctcttggaattccatttgatcaattgtacgatgggtatggccaaaagtacatcaagcaaccaggtttacaaacattggccataacttttttgaaactcaacgaaattttttgaaattttgcagattattagaaaacacttgtgttagggctatcgaatgatatcaaaaattaaaattttagaaggtgcgtaaaatgccgtttttctcgactgggttccatatttaaacaatcaatgtctttgatcataataatctttttctgattcaaagtgcattttcgatagagaaaagaaagggcttcaaaatgatatacaaaaatcaatcaatcggtaagatatttaatacgtttagagctttccaacaaaaacgaatggatttatgttaacaattcattggacaattacccgaaatcgacaatgacaagttgaaaataagtgagggggggggggacaattaacgaaggcccgcgtgatggcattggagcattgtctgaatggcattttggcagatcaaatgctgaatgccgagcagtccgaagccggaagaagggttacagaatacttcgcattgngcaccagtccgtttaacaatctcgtgatgccgacagcactgaacgttgttctgtccctg

SEQ ID NO: 33318 - DNA, 649 bp, Heterodera glycines
attttatttaaattttgaatattcaaaaaaaacatcgcttcaaaaaattttctttataaaaattttacaaccaaaaaatgcgcggcacgccgcgcaaaaaaaaatcccgcggccgcgcaccgcgcattcaaattgccgcggtcgcgaccgcggatcgcgcaaaaaaaaatgccgcgaatcgcggatcgcggtcgcgctccagccctgttgcaaatgtgcgggcgaaaaaaaacacttgatttttccaatttgagaacatgcatattcgcacttattttggcttttttttttttggtttttagcatattcaacctttttagcacatattttattaccaaattaaactatgactccacccaaaaagaaatagttttttgaaaaaatttgatagaaacttgaattattgaaacgtgggacagaggtaaaatccctcgaatccccagtctccgtttgacctgctgaagatatttcatccaaatcatccgtatcgtaattctgagcatcattttccatccaagcagctctcacagaatcactaagcagtgcacacacaaaaatattttccacatagctaagaaattaaaattgaattttttgcatcaaatatgatttttgagatcattttttaactcatcatgcattttatttg

SEQ ID NO: 33319 - DNA, 926 bp, Heterodera glycines
acaacctaacttaaaatcacaaaaatttgaaaacgtaatggttgagtattttatttaatcaattttttaggaaatttttttttaaataatttaaaaaaacattaaagaatagtaaattatataatttgcaaataattattatacatttattaatgagaaaaggcggacgacccaaacgcgcctgtaagtatcgaaccgaacatggaaataaaattaaataatagtttaaataattataacaattttattgataaataataaaattaatgaaaagtttcatagattttcaatgaaagtaaaaaagaaattaacaaaaattatttttttatattaatcttcataaatagatcatcttaaaaaataaattaaaattatatatgtatataattaaatagaaaatggttctaattttgaataaactcctacctaatcaataattaatttcatctcagatctaaataattagaaaaaaaattaaatagtaaaatctgttttttaagttaaataaattcacatttatggtgccaagcgctgcgattgattttggtaaaaatgaatatgtaattcaaattgtataatttccaacacattaagtgataaaaaaatgaccaaatgttttgttttttaattatgtctgtaaatattgaaaataatcaataaactgatgccaattaaaaatattaagtactataaatgaaaattaaagtttaaattgaacaaccaaagaaagtaaattaaacattaagaagaaaattaatacgaaagttatcgaaataatcgatgtcatattttaaatagttttaataaagagaagtgaagttaaaacgataatatttttatgatttaattgtatttgaaatagtgttaaaatgtttttttttctttaaaaatttcaataaaataatccaaatttatttttttaattt

SEQ ID NO: 33320 - DNA, 984 bp, Heterodera glycines
ttaatgttggacgatgccagcacaaatacttatattttcgctaaaggaagctaattcgatgaatttgccgcttactccaaatttagtcgaaattggtgtatttaacaaccccaaaagcaaaccactcacatccttccaaactaaatttggcattgagttaattaatggacagacaattattgtaacggctaacaccgttgaccatttaacccaacctacaccatatataccgttttctcccgaactactcactgatgccgatttagtatttcttgattccacggtacgccctattattcttttgggttctgattattattatgaagttgaaccgacccccgtctcccgccttccctccggttatcatttaatccaaacacttttgggtcccattgtagctgggaaacattttggaactgccatccctccccctctccttcaacaatccaatttttgcgttcaatctccaaatccgtccatccccgcagattactttactctagaaggtattggtataaaggaccaacccgatgataccagtgtaaacgatgccatcatttcccaatttaattcggacatccaatttatcagtaatcgataccaagtcaaattaccctttcgcgcgaatccttcaactctctcactaccttccaattttggattatgttatggacgattacgtaatgtattgaattccttatccaaaaacccttcccaacttaaacaatataacgaaataattaccgagcaagtgaagctcggaattatcgagtcagttccctccccatattctttttcaagtcctttacattatttggctcatcatcccgtaattcacccttcgaaacaaaaatacggattgtatatgatggctctgctcactgtgggaaggccccatcattaaatgattgtctttatcccggaccctcaattcttctgatttaataggactgcttatccgtttccgcctccccaaaattgcta

SEQ ID NO: 33321 - DNA, 1032 bp, Heterodera glycines
ctgactcttatattatcaaaaagggagatgaataaatactttaaaaatttctaattcctttttaaacaggccgaaaaagtttaggcttaactttttcagcgggtttaaaaaatctagaaaaattagtaagcatttgtagtgctccgatacgtatctctgcaaaatttggtgagccgctgatcaattacaaattatttatggacgatcttatttccagaaaatctcgcatgaattctcatttttaaattttttatagatttttaaatatttggatatttttttggcttaccaaaacttcatcgaacctggctctttctattctcattcaaatcgctccaaattttttttacagcttaactaggcccaattaagcttatttccagaaaatctcgcatgaattctcatttttaaattttttatagatttttaaatgtttggatttttttttggcttaacaaaacttcatcgaacctggttctttctattctctttcaaatcgccccaaattttttttacagcttaactaggcccaattaagaaattttttatagatttttaaatgtttggattttttttggcttaccaaaacttcatcgaacctggttctttctattctctttcaaatcgccccaaattttttttacagcttaactaggcccaattaagcttatttccagaaaatctcgcatgaattctcatttttaaattttttatagatttttaaatgtttggattttttttggcttaccaaaacttcatcgaacctggttctttctattctctttcaaatcgcccaaattttttttacagcttaactaggccctattaagcttcagaaaatctcgcatgaattctcatttttaaattttttatagatttttaaatatttggattttttttggcttaccaaaacttcatcgaaactggttctttctattctctttcaaatcgccccaaatttttttacagcttaactaggccctattaagctaatttcagaaaatctcgcatgaatctcatttttaatttttt

SEQ ID NO: 33322 - DNA, 807 bp, Heterodera glycines
ccaccgtagtgattccgaagttttgccaccatctggaggtgccggattgtgtcgaatatcaattttagtctccgcatttcagcgcttcagcaatctattcccattgatgtgcataagaatgtgccgcccagtgatttgcataaccgtgtgccgactgtggtgccgactgtgccagtcatagaccgatcgaagaagccgttaaatggatgtaacgtccgtgatcagcaaccccgaagacccccacccccgcaaaggtgattttttccgactaataaaaaaacgaaaagcacagttacctatgatttacaacctttggtgtttaataatgcctctttaggactgacgatggcaccggcaattactttttaagtgcgtattcaatgtctgcgcagagaattggcaatgattcggagtggaagaaaacggtgcgttaacttggcgggggacgcgacaaaatatcaccgcagaatttaaaaattttttaaacagaaatttttaaagaaaaaattcttagaaaattttttatagaaaaaaattaaattaaaattgaaaaattttatgcgattttttttgaaatttaattgtttttttcaaaaaaattttttcaatgcattttttcttgaaattttcttataaaaaatttctgcgcgatattttggggtgcacccaacttggcgaacgtttcttttcacattttagccgcttggtcggaccggtctcttcaacatggggaacacgtgctttatgaatgctactcttcacccgctgttccatacgcccggattttctcaactgttccaacaaaaa

SEQ ID NO: 33323 - DNA, 893 bp, Heterodera glycines
ccacagcatacgccgatgccaccgccgccggtcagcagtggaggggtgttctacggacagaatccgttcagtcgtcagaatcgttagaaagtgataaatagaaaaggagggagataatcgagagaaggaaaggaataaagtgcatcgaatggcgattaaattatttaatttgtttgttctttttgcgttgactcgtccgataaatgtgatccttttgtaacttatccaaaccaataaatcgttgaagattatgaaaaaattacttgtaatcctgtcattttatgagaccaataaagtgttgagaatgaaaaatcatccattatttcttgcttttattgatcgaattaaatcaaattgaaggatttaaaaatgtaagcaactgaaaaataatttgtttagaattagcagttagtacactatttgtcacaccacctcccttttgtgttcgttttttctcccttctctgttaatcaatcactgtctctaatttccctcactgtctcaaactccgccttctttccttttctgcctatgatatttcctcgtcccattcaaagtttgtgcacaatacgcaatgtgaaaatgaatggtcaaaaccaaaatcgaacgaacagcacaaaaatgacaaaggctgatgggtccgaagaactcaacggaattgacaggaacggaacggaccattcggaatttggtgggtcatttaaaaagtaaacatttgattggtgtgctcccctcacccctttaggttctgatgccggattctccgcggccgaccgggcaaagtctgccgcggcacgcgcgtgtggtgaggcggaagtgtgcagcggaatgaaactgggcgttggcagtgggacgacgatgaaattttttcatcggttggttaagggcacagc

SEQ ID NO: 33324 - DNA, 1043 bp, Heterodera glycines
  unsure (1)..(1043): unsure at all n locations
ctaattaccaaatttaattataaaaatatgcaaaaaaaaactttttttttcatttcaattttaattttttcttacagaaaatatttttttatttcaattcaattttttctaagtggttaagtgctgattgttggattggagaaatgacaatcgtatacattatgcattcacattcatctttttcacagctcatcctcatcccgcgattcgtatctctccgatcagcagcagaaaatgctcacaatcacagctcatctccctccctattcccatcatccccccccccccttttacgatcggagcacagcaaaaagaaataaataaataaatgttcgccctttcatcttaatcggatttcgagatggtgtaattaatacgaaatgagtgccatcatcataatccatccatgacttgttccaagatcccgccagaacagaatttcgggtccaaaaaattttcggaataagtcaaaagtcggaggtcctatccccaaaaatgtcgcgagttaggcaactattttctaaaggacggtaaaacaaacgttcaaggatactttttgcggcccggatagggcacatgtaaaaaataattgttgaaaatctattttttccgcgggaaccccctagacatcgaaaaccctaatttcctaggcccgtcgctggcttttcccgtaaacatttctattttcattcggcataagcagtaatagccggcttttcttgcctctgccgtgtcccttcccccaacaaatatttgcccatatgatttggncccgcggggggcggtccctgtctcggtccgcttttccttgtcctccctcgcctaaatgaggcgaggacattaatcaaaggtgcgcgtttcctttgttaaccaaaagcctcagaaatgacaatataaatgggggcgtaattattgtagcttaattaagcaattcgaataacagtgaaaatgggaaattgaattaaaaagaaattatttttttgttgaatttttttgtgaaaaattttcaattatcattttattttttttgtttaatttgactt

SEQ ID NO: 33325 - DNA, 655 bp, Heterodera glycines
  unsure (1)..(655): unsure at all n locations
ttcgtttttagtgccactattcatcactagatgctcaggtttnagttggagatggctgcgaattantggatgatcaaaacaaccaatgcaaaaagggcagtgatcactgatcagtattttttttttttgaattagggcctaaattatgctatttggcattatgaatcattttttctaacactggatttgatttgtctaacattgatttaaccaatagttataccatctacctttttaagattacgaattagaaaataacaggaaaatttattataaatatgtactaacattttcaaattttccatattactttctaaaaaattctctatagtgtcgaatttactcaatgtcgatatggtccagtgccgaaaatgcaggaaaacagtgaaagtttttgaaatagttcagtgtcgaaatttctctatgtcgaaaacgtagtgtcgaaattacttagtgtcgaaaatactcagtgtcgaatttacccagtgtcgaaattaccagccacggtatcctctgcatctcccaatgtcctcagaattcaacatataaaaacatcttacagtatacctaataaggtaatactggagaattggtgtcccgacgaaaaataacgttaagaattttctttacattttttctagggtaaaaaatacac

SEQ ID NO: 33326 - DNA, 954 bp, Heterodera glycines
taaaactccattttttcataggccagcgtgtttaaagcaaactcgaaactgataggaaatttaaattgatcataatagaagtttaatttttatttgtcccatgcattttctgggaaatcttttcgcgaaaagttgaaaaatttcaaaacggcagacaacagatgcatttcaaacaattcaacaatataatataaaatttaggcaaaaatttttgttccttcctctttggaaatggtcttaaattttgcttgtaaatattcagataacaagttttttttactgaaaattttttacacactacaggatgaaacgcaataaataatgtttgtagacaaaagaaattggcgaaaaaaattgcctcaacaatcagtggtgaaactgaaagaaaaaaacttccccaaaaaatcggagcttttccgacggcatcagctgcatttccaacagttcaacagtataaataaatattaggcaaatgaaaaatttttttccttcctctttagaaagtgtctaaaaatttttgttgttaatattcagaaaacgtgttttttttactgacaatttttttcaagagaaggatatgaacaatcacttataaggctcatgcttggagataaaggaatcggaaaaaaaaattatctcaacaatcagtcgtgaaacagttcaataattcggaagcagtgccatattgggaaaagatgcacaagtagagtaggctcgaaataaaggcaactgccgaagattaacaaaaattcaaatttattggccccgttctgctttgacaggccatatctcgccagggagtggcggtagaccctttgttgatacatttgaaaatgtagagcgcgtctagctcattcgaataacatcaaactggtttgtttttgtcacgaaacaacccgctgatggccacgtcgaagaaaagtcccaaatttgacatcccataaactccatttt

SEQ ID NO: 33327 - DNA, 912 bp, Heterodera glycines
ctttttggttgctgttttttcttcattgctctgtgagcttagcaaaagaaatgaaaatttaaaggctttattaaaatttgggaattaaaataatttaattgtaaattagccccttttaaagactgaaattgttgaaaataatacaattatttatttgtaataattgcaacaatggccatattttttccaattgattagaaatttaagaatttcaagggattttaggggaagacagtccaagaggtgccaagcaaagtgatggaaattgagtcgaatacgccggcaaaaaatctaaaaatgccgtaactgaaaagcgcgccatgagacaaaacgcagcaaattacgcatttcccaggcaaaaacgcatctccccgccacgaacaaaaaaaaggttcatcgggggggggggggggggatttggatttttggctggtttttcggatttatttcgcccctacatttgcaaatatattaaatgtgactttaatataatggtgaaaaacaattttttaacagaagagtgaatgcattttaacgacaaaatggatggatacggtatggaggggagagaattacggtaagtgctgcttcattaaatatatttttttataaaaaatgaatattaattaaattttgtcttctttaaatagaggatttttggaaaacacagatgacagatgcataactcagaagagcgagcgcgaattaaatatataaatttggcaaatgaattattattgggctaaattattttggggttcacattttgaaagggattaaatattgtcggcaccctttgatggaaaaaaattcagtcttctttgatgtgaaaattaatccagcagttaaatgcattcaatttgaaggtggaattttccaaaacgaaattaatccgctttaacaaaaattatt

SEQ ID NO: 33328 - DNA, 738 bp, Heterodera glycines
atccgtgaaattccggacattccggatgaatttgcaattcgtaacggattgtaaaccgggaaggcgaaaacacaaaaaaaatcttcttttttcgacctttgccggggtataactttgttcgaatttgtcgcagagctacgaaatttttttctcacccttcctctcgacgagctctacaaattgttcgcttaccgcaaaagcgtagctcttacggttcctgagaaataaggtgaaaacacacattttacaacccatttttggccaattgtaaaaagccgggttttttttctttaacccaattttacaaaaaatttttgctggtgcgaattttttccacacgggccattttgtagagaaaaccgagctctttcgattggtaccggtcccgtggcgatccgttgagcccttaaggagagggaaatcgtttagtggttagcccccccgttatttttatatacagataactaggcgtcccggtagatggctgcgctttatagaaagccgagcctatcccgtcgaggtgtagatgcgtaaggtgtgcaccgtcgcggttgttagtgcagtagcagctcaggcgcagatgcgtgtctggatgttcgtgcagtagcagctaccggtaacagcctagcctagccgttcacccccaccccaccctacgcggcatgcaaaagaattgatcaggttcgtattgactcggtacactccgctcgtcgctccgcttcgctccgctcctcgctc

SEQ ID NO: 33329 - DNA, 935 bp, Heterodera glycines
aacgaatacaaaatatattctacagagaatataaaacgttaagtatatattaattttttattcgacaaaaatcaagcattcacgcttttttatattttgcaggtaaacgtacgcagctatcaaatttacaacgaatacaaaatatattctacagagaatataaaacgttaagtatatattaattttttattcgacaaaaatcaagcattcatcgcttttttatattttgcaggtaaatgtatgcagctataaatttacaatcgaatacaaaatatattctacagagaatataaaatgttaagtaatattaattttttattcgacaaaaatcaagcattcatgcttttttatattttgcaggtaaatgtatgcagctataaatttacaacgaatacaaaatatattctacagagaatataaaatgttaagtatatattaattttttattcgacaaaaatcaagcattcatgcttttttatattttgcaggtaaatgtatgcagctataaatttataacgaatacaaaatatattctacagagaatataaaatgttaaatatatattaattttttattcgacaaaaatcaagcattcatgcttttttatattttgcaggtaaatgtatgcagctataaatttataacgaatacaaaatatattctacagagaatataaaatgttatgtatatattaattttttattcgacaaaaatcaagcattcatgcttttttatattttgcaggtaaatgtatgcagctataaatttacaacgaatacaaaatatattctacagagaatataaaatgttaagtatatattaattttttattcgactaaaaatcaagcattcatgcttttttatatttcgcaggtaaatgtatgcagctataaatttacaacgaatacaataatatattctacagatgaatataa

SEQ ID NO: 33330 - DNA, 869 bp, Heterodera glycines
ggtataaaaattctcaaaaaaagaaatagccctttttttggattaacgtataaatataaaaatccccccagaaataaaatgtgtattgcgcacaacccgccctctcatgctcaagtgcttttgtggggtatataaattttctaaaaaaagagatagccctttttttggggtagagcataaaattaaaaattccctcaaaaatataaaggtgtagttcgcccccaccttcctttcaatctcgaaagcatttggatgtgtataaaatttatcaaaaaaagagatagccatttttctgggataacctataaatataaaaatcctctgtgaaataaaatggcgattgtgcacagccctccgtctcatacgcaagcgcttttgtgaggtataaaatttctcaaaaaaagagatagccctttttttgggatagagtataaatttaaaaattccctcaaaaataaaaggtctattgcgccccaccctccctatcatgctcgagagcatttgtatgggtataaaatttatcaaaaaaagagatagccatttttctgggatagagtataaatttaaaaattccctcaaaaataaaaggtctattgcgcaccgccctccctatcatgctcgagagcatttgtatgtgtataaaatttatcaaaaaaagagatagccatttttctgggataacctctaaatataaaaatcctctgtgaaataaaatggcgattgtgcacagccctccgtctcatacgcaagcgcttttgtgaggtataaaatttctcaaaaaaagagatagacatttttctgggatagagtataaatttaaaaattccctcgaaaaataaaaggtctattgcgcaccgccctccctatca

SEQ ID NO: 33331 - DNA, 668 bp, Heterodera glycines
  unsure (1)..(668): unsure at all n locations
ggattgagtaattttaattttagatatttatgtgtattaaaggattttatttttgttcaggtacattgactattccgtgatcacatttcttcgttccaaccagcaaatttgggacagaggcaccaaattggatttggatgtgggttcagaaaaaactaaggatgtccagccgatttgggatgtgtttgtccgtgaaatttggcccatttttacgatgaagaatttgaagattttgtatttttgttatgggtatgatttggagaatttgatgaggnanaatttgagaaaaattgtgtgggatataaaaattaattaaattaaatgtggtagtgtgtgtaattttgaggggaaagggttgatgaagtggttataaagttgaaggaaagatggagaaaaaaagtgattgtattgttgtgaattgagtgaagtgaatttattaattttgaatgggtaaaaaattttaaggaggtgtgagtgtanatattttgataaattttttgttttgaaattgtattttgattttgtatagggtttttgttagtgatggtatttttgtgggttatagtattgaattgaatttttaagttttaaaggaaaaaaagagattaaggggaatgaatgaatggattattatttgagaaaatgattgatttattcttttttggatt

SEQ ID NO: 33332 - DNA, 780 bp, Heterodera glycines
ataacaaataaaaatttgaatttcttaattgttttctaccctattgatttgccattttaagcactttaaaagggatttcaaaaattaagatttaaattgaactaacattccgactcactttggccttctcctcgtagaaacaacaattttcaaattggtccgatcacaaattccaccgtcagatcaacccaaatctcgagaaaatccatgggtcccgaattcgagaagctcgacgccggctgcggcgcgcgtttcggtcacattcccgggggcaccaggtgccggaaatgttgggctggcaggagttctcatcggacgaatcggtggattgggacccgtacgacggcttacacgccgagaaacaggtggagagattaggggaaaatcgagaaaaaatgagaaaaactgagaaacatgggaaacaccagagtttaaaaaaataagccttacaagggaaccacccgaactgtaagtcggaaaatgcatatgtattatataccattcgatagagcagggtcgacttctattgtgaattttgaatattacgcccccataggaagaaattaaaaagttatggggcctcaaaaatcgaaattttggcttgtattttcccttcacatttggtggtcaagtggcgcgaactgctgtcgggttgctggtggttcgagtccgcgtgggtttaacaatttttttatatgtttttggggccgtagaatccaaatatgatattcatttcggacccccaaacccgaattcgaacaaataatttttattaataac

SEQ ID NO: 33333 - DNA, 979 bp, Heterodera glycines
  unsure (1)..(979): unsure at all n locations
ttcgtcgagttcgtcatgcagcacatctagggaccncggagcgcaacaaccgatactccatgggcgcggtgtacgactggctgaagcgacaggcgaaaggatcgcagaactagtgcaacatgtcatcagcagcagaagagccagcccgaagaacgatgcgtgtgcagaaatcggatcgtctgccccccaattgttgtattgtattgtaaacccccattcacatgatcaatcccccaaaaactgttgtcatttcaattaattgcatgtttgaatgtatgtatttgtatgtcgatgtgtgtgtgtgtgggtgaataaacaatgtaagactaatggttttcgtttttcaatgtgtacagagagagctctcctgaaattttgtgacttttttgttcaaaatatgtaggaatcagttcttcggatagcgaaaatttgagtttggagtcgtaaattagcatcagtagggccccagaaataaacaaattcgagttttttttcaaaaatgttaaatagttggccgcttttcgcggcgtccccgtggacgtgatgcgaaagccgcgactggtaagaacggcacacattctgacaccatactattgattagagccgacatttcctagtcattttaatcattgccgaagtcgtgactcttgattttgccttattaaaacttgaatttcccggttttcttggcccgattcaattcgatttcactctcagtcactcactttaaaataccaattatcatcaatatnggcccggatttgtttaaccgaaagaagacaaacgaaattcgattttttcaaaaatgtaaaaccaaaaatgcatgaaaacatttgcgattttggtggtggtcgaagaatgggccaataatctgctgctgatttgataatggagatgctgactcattattccnattgggcatttttcttatgatcttttctccgtgataaattaatgcagggctgccatcgtccatgct

SEQ ID NO: 33334 - DNA, 953 bp, Heterodera glycines
  unsure (1)..(953): unsure at all n locations
atagccatttttttggaccgtccataccccacatatactcattcggcccgaaaatcatttttagagcataacaactgatgacagccactgtcattgtttccaaagagatttctattaccagattgccaaaaaaagagatagccatttttttggaccgtccatacctcacatatactcaaacggcccgaaaatcatttttagagcataacaactgatgacagccactgtcattgtttccaaagagatttctattaccagattgccaaaaaaagagatagccatttttttggaccgtccatacctcacatatactcaaacggcccgaaaatcatttttagagcataacaactgatgacagccactgtcattgtttccaaagagatttctattaccagattgccaaaaaaagagatagccatttttttggaccgtccatacctcacatatactcaaacggcccgaaaatcatttttagagcataacaactgatgacagccactgtcattgtttccaaagagatttctattaccagattgccaaaaaaagagatagccatttttttggaccgtccatacctcacatatactcaaacggcccgaaaatcatttttagagcataacaactgatgacagccactgtcattgtttccaaagagatttctattaccagattgccaaaaaaagagatagccatttttttggaccgtccatacctcacatatactcaaacggcccgaaaatcatttttagagcataacaactgatgacagccactgtcattgtttccaaagagatttctattaccagattgccaaaaaaagagatagccatttttttggaccgtccatacctcacatatactcnaacggcccgaaaatcatttttagagcataacaactgatgacagccactgtcattgtttccaagagatttctattaccagattgccaaaaa

SEQ ID NO: 33335 - DNA, 927 bp, Heterodera glycines
  unsure (1)..(927): unsure at all n locations
ttctgtgcccgagattaattctcgggctccgtatgggacggtgtgatataacaggtattccaacaggtagagtctgtgtgcgtcagtgtaatgaagcgaaattggataatcgctacagcattctaatcccttaatatgaaattttatttttgacctacagtatgatgagtgaaagcttttagcatgaatgagttacagctcaaattaattaaaaactttatagtatgctaatttgtattattgacctgtgaaatgggataaaacgataaatttcttattagttgattcacgtaatcatgtgttgctacaggccataaaagctgcaatatttggccaccaaaaaatcggtgtcttccttgagaatcgcgcgagtcgccaactttcactcccaaattgcccatgcatatgccaagaatctggaaagatgtttctgtttttaatacagttctcagggctccaaaatgtaattttacaaaaaatttcttagcaagccaaaaaactcttatttttttagaatttcactcaacatgtaacaaacaaacttagtaaaattgtcaaaatgttgtgatgttttcatgtcaggatcacctcacttttttacccgaactttttgggattttatggtcagtgtcccaaaaatcaaaagtttattttcaaatgtaagttcatcggccaccaacaaatttaaaagattctgttttagtgtgtaataaacagggatgggatttttaggtgctaaaaatcgggaattaggtactaaaatagttgctagaaaattgaaaaatgccaaaatagttgatacaaagttccttttgaaaattcgattctcaaggagtgcattttattttttattgcattttcagaacaaatttttttccacaatcncaaaggggtgaaaatangtgctgaaaagccgctctaatcaaa

SEQ ID NO: 33336 - DNA, 1182 bp, Heterodera glycines
ttaactcattaacaaacaattaccgtttaaattattggatgaagcccctctcttatgatttcttaattaggtatgctttttttaccattttgaatgggttgaaaagcgatgttccgcaaaattcgattccgtcggaccaccgcaagccaatggtcggcgaaccgtctcaaccaccttcaaaaacaggatttattctaaatttgcattgctttttgctctcgccttttcttcctctcattttccatttgttgcattttcttcgttgccatttgtttcattctttccggcgtcattttcttcgcgttcggcctgaacaaaggttgtgatggtgaaagtgtgagagtgccatttcctgaaagtgcctttctttgcatccataatttgaccaattaggtataccattttgatttgtcaggaaagtgatgttccgcaaaattcgattccgtcggaccaccgcaagccaatggtcgacgaattgtctcaaccacgcgcggtgcaaattctcacgaatgttgtgcattttctcatttatatgacgggctttgttggctcgaattcggtggacagttgagtgtagcagtttgggcacaatttggtcaagaagtgactccgactgagaaactgccatttcgagtgccatccgttgggaaaaaattttgttggcacacaaatggaattgacgagaaacgacgcgttcaatgagttcggatgccaatgcattggccattctttgctgctttttcttcgcaacgaatgaaatccatcgacgaatcacctttcgagtgcttaaacaatttaccagtgacctcgaaaaaatccgatttttaattttttgactaaccgcaaattgttgcgaattgtattttcaagtgcaatgccggcaattgctgtcagttccgtcaaaacgactttctcaagcaaatgctcccgcatggacagcagctgctgctccgtgttgttattagcgtccagcacggcgggaactcctatttggcgaaacggtttaaagaccgattggaatggttgaatggctctaaaatacgatgagaaaagtgccaatgtttagcaaaaaataaataaataaggctctaattgatccaccgaaagacctgacgaatgaaaagctcggcggcgcttcaactcgcatatttttgcgcgcagtgcaaaagacgagccgtgcaa

SEQ ID NO: 33337 - DNA, 1073 bp, Heterodera glycines
tttccaacagttcaacagtataaataaatattaggcaaatgaaaaatttttttccttcctctttagaaagtgtctaaaaatttttgttgttaatattcagaaaacgtgttttttttactgacaatttttttcaagagaaggatatgaacaatcacttataaggctcatgcttggagataaaggaatcggaaaaaaaaattatctcaacaatcagtcgtgaaacagttcaataattcggaagcagtgccatattgggaaaagatgcacaagtagagtaggctcgaaataaaggcaactgccgaagattaacaaaaattcaaatttacgggccccgttctgctttgacaggccatatctcgccagggagtggcggtagaccctttgttgatacatttgaaaatgtagagcgcgtctagctcattcgaataacatcaaactggtttgtttttgtcacgaaacaacccgctgatggccacgtcgaagaaaagtcccaaaatttgacatccataaaactccattttttcataggccagcgtgtttaaagcaaacccgaaactgataggaaatttaaattgatcataatagaagtttaatttttatttgtcccatgcattttctgggaaatcttttcgcgaaaagttgaaaaatttcaaaacggcagacaacagatgcatttcaaacaattcaacaatataatataaaatttaggcaaaaatttttgttccttcctctttggaaatggtcttaaattttgcttgtaaatattcagataacaagttttttttactgaaaattttttacacactacaggatgaaacgcaataaatcatgtttgtagacaaaagaaattggcgaaaaaaattgcctcaacaatcagtggtgaaactgaaagaaaaaaacttccccaaaaaatcggagcttttccgacggcatcagctgcatttccacagttcaacagtataaataaatattaggcaaatgaaaaatttttttccttcctcttttagaaatggctaaaaaattttttgtggtaatattcagaaaaacgtggtttttttttactgaaaattttt

SEQ ID NO: 33338 - DNA, 1128 bp, Heterodera glycines
  unsure (1)..(1128): unsure at all n locations
tcttttgaaaattactgaaaatttctgccgatttcactttcctgggcaccgancggaccnnnannnnncggcannnncttttcaggaanncaaannnnnccnnaaaaagngaaaaaaagncanaaaaancccaaaaagtagaaaaaaaagtcaaattaaaaatgcatgttagaagcttcaaacaaagtgtagaacactcttgaactcattttaagggtcatttaaagtcagcaaaaaaaagtcatttgacataaattcccatccctaatgatgatgtgaaaataggtatgaccataacatttttttaaatttacatgtgattttgtgtaaatttttcagtttgtaaagcgcagaaaatttgaaatatgaatataaatattagtatttattattatttacatggagagaccagatgtttttttgggaagaaaaatttatagtcaaaatttttaaagttttttttttaattttaattcaatcatttgaatgaattttaatcaaaattcagtaaacgaaaaaaaacaattgtatttttagtgctatttgttagtggtctcatggcaaatcatattttttagaaacaaaaaattgtgatcatacattttgatttggtattgttaaaaatatgaatcattgatctaggatcggatggcttccctgtcaggatttcccagatggacccggaagagtcatttttaactaaacttggccttaattttttttacttcacttgttcttttgcaatttcatacgcaacttggcccatccattcctgcacttacacactttgtccatggctaattcaactaatttttgaccggcgggttcatcaccaccagtttagatatgtggttatgagaacacttcgaaagatgcttatttacaaatttacctaattaaaaaacccatctcgggttttttgactattaaatgttaatatttcaaaacctaattttgagttgacgaatatatgggaatatcatctctgatacatatgaataattagagaggtgaaatgctgtaaaatcgccatttttaacaaaactgggccaatcaattgttgaaattattctgatcaaaagaatgaaaaaagtttttaaatatttttttagtctcattttaggattt

SEQ ID NO: 33339 - DNA, 1314 bp, Heterodera glycines
  unsure (1)..(1314): unsure at all n locations
gacaaaccctgcgggtgctcgactgcttcaggcagttttttgccggggattgggctgttcggatgattccgaagcaatttaagaccgggacgcttcattttgacactttttgctaatgaacattcaaatggagcaattgaagtgcagcagagattgtgggcggaggatttcccgggctatcggcgactgagcgttcaaatgcttcgccttcaggcaaattgggggggggagggggagaaatcatttaattagtcgaataaaatgccaaagtcatttcagagtgacactttgctgttcgctctttacgaccgtaaagatgaaaaatgaacggccgattcaaagcattgggaaggaataggtggagaagaaaaggaaaaaataggcaaatgccccccccccaattcgtaatttgagtgtaacgttatttattgtatttgaagcaaattatgacagttcggagtttttgatagttaaatcgtcataagtatgatgcccaatttggccatcatcagaatttacaataaaatatattaaaatttttatgttagaaaaatcgctaaagatgcaaataaacatttattaaaatggcaaaaacgactcaaaatataacaaaaattaaaatgggtaccaaaaagtccaaaatatgttgaaaatatacatggtacatatttcctcacgtttagacaacattactctgatcatttaaacctcgtaaaaataaatgttcattacggctcaacccccaaaaaattactctttcgctttgccccccccccattttcatttgtccgttatcttcgatcgccatctttcacttggggcaaattttgagaaacaatcggcggacaataaaaatgtttatttgggaattgaggggggggggggaaatccaaacgatttgcatttgggcatttcgaataataataatttggagaaagtgtccgagtggaattggtgcccttttctctccgccgtctgtccgtcaatcatcgcaaaatccgtcgccaaatggcaaatttcgagcagagattaagcgataagtaactcatcagttatctttcatcagaagctctcaactttcgggggatgccaattttgcccggcatttcttataaccaaacgaagtgccaaaaacatttgaggacagacactgactgtaccagcccaaattcgttttctcatcttcgtttaaatgcatttattaatcgggtcacaacaatcaaaaaaaaaaaagacaatttaattttctactanaagaacgaaactttcggaactgccctaatgagacgccatcatttgctttggtagtgcatc

SEQ ID NO: 33340 - DNA, 913 bp, Heterodera glycines
  unsure (1)..(913): unsure at all n locations
tctaattttttgtttttttatgttacacgggctgatctccttagagagagaganagaagagaccngnnnncaattgcagttttgccacttgngaaaaatgccaatgccacctcgtaaagaacacgttgaaaaagtgtaaccaatggcagaacactgacgagaacaatgctcttgggagagggatatggcagaatattgtgattgataaaaaaaaaacaattactttctgaaaatagcctctgggcaacatcgggtcgcgttgacgtcggaaaaaggaaaagccgtggaaataccgtgggtcaggccatagcgaggcgggcacaatttcttccaatttggaaaggctgtcaaagcaacaaatgttttattgttttttccctttttaaaaatgcattttacttggtttgctcattaaaagatgctctccgaatacgaaaatggtgcatagaatcggaagagtcagaactgaacgaatacacatttattggacaacaaaaaacaatggaattcaaacatagggtgccaagaaccggaaaaccaataaacgaatgaataaataggttaaaaacaatatttgcaaacatttttttacctaataaggacaaaaaagactaaaaatttagggtttctttatggaaaaaaaatttattttttggcaaattatataccataatctcctgaaaataataaaacctcataaatcagctgtgtgaggatttttaaaagttgtgtttaattaaattgtaatattataaattttaatacaaagaacaactttttcccggatagctcaattttctcatttaccctggttaagccccgtgtgattctattccgcaaaggactgtgaccataagttgacggtgccgacgaatttgagtccggaatgccgcgtagcacaggtctgaacgct

SEQ ID NO: 33341 - DNA, 470 bp, Heterodera glycines
tttacgcgtccaatcacagtttgcgcgtccaatcgacttttacgcgtccaatcacagtttacgcgtccaatcaaaagtttacgcgtccaatcaaaaatttatgtgtccaatcaaaattttcctaattcgaacatccttttgacataaggtaccaaccattgcaaaaataaataataatttaaatattaaaaacgtaatccgtcattgatcacttattatcaaagtatcgataggtatatacgcattcaatcaattgttataaaatttaataatagagagactaatttgtgcgtgcttattttggtttcgataacctctgatatcaaaattttttgtgattttttattaacaatttggccacacaattgaaaacactgcgtgggatctaacgaaaaaatttttcagcaaattctcgaagagatacgtattcaataccctgtctaatcatcttgtcgatgtatcaatcaaag

SEQ ID NO: 33342 - DNA, 1606 bp, Heterodera glycines
  unsure (1)..(1606): unsure at all n locations
tgcaggtcgaagaatacantcgaggaaataagatgaaatttgcaaatacttttaaataaaaaaaaaccaaaattagccctaaaattaggaaacaaattgtcgattgtgccggcagattcattcataatttttttttgattgaataacaactaaaaaatttagtagctataagaaaaaaaaacaatttttttttgaattattcatacttaacagattaaaaattacaaattaatcacattgagaattaaatttttggttggccagcaaaggaataatactcttccataaatagataagataaaagacatttacgagttttgttccataaaatttgaatccaataaatgcaatttagtgaaatcaaaagagattatcataatcaatgggcgctgagaaaattatagaaatatgtaaattactattttatgtccgagtgctgcaattttcatgagaaatatataatttgtggaaaaaaggttagcagggattattttggcaattttaaattgttttattttatgtatagaataaaaatgattagattgaattaaattgaatttaaaattttttaattattatgaatacaaaataaataagttttataattaaaaatcttaatgatatttttcatttaatggatattctaagtttttttcaatcacacattcgaactgcatcaattctttatgggatggcaaattagtcagtccatttgattggttttttgataataacaactgtttcttgaatttttggaagcgaacctgtaaatttgttttaaattcaatcaaatctgaaaattctaagtcactgttagctaaattaaattaaatttgcatttctaaatccttttaagctaaatgcaatcagtttagaaaactcgaagacactgttttttttaaatttaatcaaatatgaaaattcaaaataactgttagctaacttcaaatattttaaaaattcgaaatcactattaggtaaaatcaattaaattagaaatttaaaaaagtcacaattagcctacattaggcagctgcaaatagaattctttgtccaacattgccagttgctcctctcggctgtcgaattgtgtacgattgtaaagagactcatacctaattagttaatagggatggttgaaaaatgtatgtaagaaaatcgcaaaaaatataaaataatttttttcgacaataatttattggaaaatgtgaaatagcataatttccacaaaaaagacccgcgaatttttgtaaaaaaaaatttccaaaaatttcaaaagaagaaatcccgggctttaaacacgatgtcggcttcgttcttgacactttcttaccaacaaacggttgcgcctaagtcaaactcgggaagaaatttattggcgtaaatatgtggccatcggatgaaatttgtgcctaaatcctccatgccaaacacacaaatgccgtgccgcataaaatgtgaagcgcattcatctgctgagtaatttatccaaacaacagccctaaatttttcatttatattttatgataattttgaaaaaatttaaaattagtcaggattttaggaatagattgatcaatttttcttaaatttatttcttattttt

SEQ ID NO: 33343 - DNA, 981 bp, Heterodera glycines
acagatatgaagttttatcctcattttgtggtttttggctattgtcaatgagaatttttttttcttgaaaagggatttgtggctttttgagaaattttaagggtttttgaggcttttggggaaaatcgtcagaaggcacaaccgttttattggtggttcctgaatttcaaatattagtaaaatataaaaaatataaccaagtgaaaatgttcaccattttgatgacgagcacggacaatgtgtatcaattaaaaacgaaaatcttcgagaaaattaaaaatgattttccaaggattaattccatgacaataaacgacagcccaagttcggaatataatgagctgcttaatgatcccgaaaattacaaaaaaacattgaaattcccggtcgccctaccgggaccgggacctgagcttttcaaaatccgggaccgggaaccgggacctcggatgaccgggaattcccggcccggtcccgctcaactctacttttattgatcaattgatttaaaaaaagcattttcatatattgcagagaaagaattttacatacactacacattacattttatgactagaaaaatggtgaataaaagtgatcacttaattattaatagaattaatttttgagttgaattctgcccataaaataggtcatcgaacagttttcacattcattcattcctaattacccctccaaatcctacaatttccatccaaattcctcacttcctcccatcccatcaaattgccaacagatttcccgcataattaatcattttggcatttctgctgggattctcatggcaatgcttattatgctaatgctgatgccatcatctacggatggctttaaatttatgtgtctttgcccgtggaagtggaggacaccgacactgtggccacattgaagcagaaaatctcagaaatcactacaatcccgccccgacaacaaacaatcgatgacgaggacaatccaaat

SEQ ID NO: 33344 - DNA, 1036 bp, Heterodera glycines
tagggacgtgaattttagtgaagaaaaatcccgaaatagttaactaaaatagtgagtaaaaatgccaaaatagtgacaaaatagtgtcaaaaagtccgaaatagtgacgaatagtgacataattttcagccaaaaattgagcaaaaataatttttattcactgattgcattgcaaatgagtagggctgggatttttaagggcaaaaaaacaaaataggtacataaaaaataattttttaaattaaaattcttgccacgaaaatacctttttgagaatttttttttcatttcttaggagtgctttttgaaattttttttgtcgattcttaggggtgtattttttgaaaaaatttttaggtcgattcttaggggtgtattttttggttttattgcatttttgttaaggaattttgcccaaaaatgtcaaaatagtgaaaaaatagtgacaaaactccaaaatagtgaattttcactattttagtgacaaaatcccaaaatagtgatttctagtgaccgataatggcatcagaatcgaaaaatttttatgcggaaatgcgttttttgagctcctttcttcaaatcaattgagcaaaaaaaaatagttaaaacctaaaattcacgtccatagttattagtgattatttatagcctttttctgttaaggtgctcccatttgctttccaaaatgcgggaaagaatggcgtgcaatttaataaattaattgataaaatgaactttaattcacacacttaattgaatttgcttaaataaatcgtaccaatttgttggaaaataagtgatcaaataaattaatttaaaaaatatttgcttagaagaataaggcaattttcatgggtaaaaaggacaattttatgtaaaaaattagaatttttttagctttcgaaattaaaaataaaaataaaattctcttacttttataattacttaacccattttgtaccaaattggagacaaaataattgccaagaaattgggaattggaagtgcaactctgaaaagatggaaaaggaatttg

SEQ ID NO: 33345 - DNA, 978 bp, Heterodera glycines
ttttattgaaaagtgccataaagagttttaaaattaaattctcgtgctgtcaattcaattgtatgaaattctcttacaatttaaagattttgagagtttgtattttaagaatgattatatattaaaatggatcaacgttcaaaaaattaagcactccttcctcacattgatcaccgcgttgctgtacggcagtgacactttgtccgccaaagtgatcattctgtccgactcaaccacggcgtcgagctcctcgtgcagcttctgctgcacccgtggggctgtggatcaagtgaatgatgccccagttcagcgtgtccgtggttgtctcctggtcggaaaaagaagctattatggtcaaatatgtttttgtgatgacaacgttctgatcaccaccaataaacacagctatagtaaaaacattcattccatcgaatccaatttaattattactacgctttacaataattatttggcttaattttcattgaattcatttatttactttttcaccatttctcagttttaatcaatcttccttcataatttgatgagggatttacataaaatttgttactgacctgtcccgctatccaaaagcccaacaaatgcgcgtacgaattaactctggctaaaacagacgtaatttgtcaaattttgagcataaaattaaatttttaaatttttttttttttgttttattaaaatcccaaaatgtcgggtccccaagttgcaaattcccaaaagtcgcatcacgaattaaacaatctgttcgggaaggaataaccctttccactaacatttatttcatatggttttaaaacaaacaggcagggatttttgtacaatccgcagaagtattattttacaaacagtttggtcccatagaagttttacaaacaggggggattttgtacaatcccgcaaagtattattttaacacagtttggccattcaagtttacaaacagggggatttttg

SEQ ID NO: 33346 - DNA, 1076 bp, Heterodera glycines
  unsure (1)..(1076): unsure at all n locations
atcagtttaaacaataccgactttcgaaccttaaataaattttgcacatcaccagagtcccnccttagggttttaaaaaaattcgaaatctacgattttattaacatagcgctcattattcaaatatgaattcgaaaaagaatttaaaaaaagtaaataatttaaattttgtataaaattaaataaaattgtgtaaaaataaaatattgaaataaggaaatgaatattgaatttgcaaaaacaaaaaaaaatcaatcaaattttgttggcattaattttgtcattaaattaatacaatgaataaaaataatgctactttaaatcacaatgattcaattatttttatttgttatattaaaatttttcatttcattcgaaattattttttttacaataaaaaaatttaataaatcattttactttatataattttaattttttagataatttcgttgcaataattgtaatttcagagacataaaaatgatttatttaaaaataaattttttatttacttttttatttgtcaatttttgttttgtcattgccatggataacgacgaactcacaaaaatagtgaaatcttcgaacaaagcgacaaagaataaacaaaaagtggtaaaaaaaattaacaaaaatttttgaaaatttaattttttaaattaaattttattaattagacaacacctagtcaatcaaatgacagtgattcttccaaaagatcatcgcagaacattgatcaactgacgacggctatttgtcttgaatttttttattaaaatattaattataaaaacaaaccgaaaaatgataaatttaattaaaaaataaataaatttaggaaaaagagaataattaaaataaaattattctcttaaagtaatttccagaaccatgtgatcctttaagagtaccatgaaaaaatttttttttaagattgttaaaataataattttataaaaatataatttaataaatttaggaaaatacaatcactaaaataaaattattctattgatgtaattttgcagaacgtggtggtcccttgttgagtaccatcaaaagaattttcttta

SEQ ID NO: 33347 - DNA, 1025 bp, Heterodera glycines
ttcccatatggcactgcttccgaattattgaactgtttctcgactgattgttgagataatttttttttccgattcctttatctccaagcatgagccttataagtgattgttcatatccttctcttgaaaaaaattgtcactaaaaaaaacacgttttctgaatattaacaacaaaaatttttagacagtttataaagaggaaggaaaaaaatttttcatttgcctaatatttatttatactgttgaactgttggaaatgcagctgatgccgtcggaaaagctccgattttttggggaagtttttttctttcagtttcaccactgattgttgaggcaatttttttcgccaatttcttttgtctacaaacattagttattgcgtttcatcctgtagtgtgtaaaaaattttcagtaaaaaaaacttgttatctgaatatttacaagcaaaatttaagaccatttccaaagaggaaggaacaaaaatttttgcctaaattttatattatattgttgaattgtttgaaatgcatctgttgtctgccgttttgaaatttttcaacttttcgcgaaaagatttcccagaaaatgcatgggacaaataaaaattaaacttctattatgatcaatttaaatttcctatcagtttcgggtttgctttaaacacgctggcctatgaaaaaatggagttttatggatgtcaaattttgggacttttcttcgacgtggccatcagcgggttgtttcgtgacaaaaacaaaccagtttgatgttattcgaatgagctagacgcgctctacattttcaaatgtatcaacaaagggtctaccgccactccctggcgagatatggcctgtcaaagcagaacggggccaataaatttgaatttttgttaaatcttcggcagttgcctttatttcgagcctactctacttgtgcatcttttcccatatggcactgcttcccgaattattgaaactgttcaccgactgatttgttgagataattttttttttccgattccttta

SEQ ID NO: 33348 - DNA, 1016 bp, Heterodera glycines
ttccgattgtccccgaatgcaatggtctttggcattgttgacgaagcccccgtcagtgctgtttctgcttcgtcttcggctgcccaccatcgtttgcttttcgttgcgggaaaaggcggcgtttttgtgctggacagtgacagttgggagcagcggacactgctcacccacgccgaattggcttatgtcagagcgaatttctaaacagatgcatttaaattaaaacgaaatgctgcaatatattgccaaattaggccagaatcaacccaaatgattttggttttccgtatttaggacactttttccgtcttggctatttgtccttcttccgccggtcattctctgctcgctgccgccactcttggcggtgcgttggccctttggcgactccccgccgacggctgtcgcagtgccgcccaatttttggccattcactcgcaaatctcagccaatttgggcacaatcacttccattttgtttaggccaaagtcagaattaggcagtaattttgatcgacaaataatactaaattcgaaccgtcctccgacttttccctcgtttagtccggaagggaattgcgtcgatgaggaaaatgctgtaattttagccgccttctccgaggtattactggtatttccgattaattttttggattttttttcaatttttagggttacatttgctccgtcaccgatgtcgcgcagtcggccgattcggcacattcatcagcaaaaaacaaaacgtcggcagcttttgttgttgacgacgaagcgatcgaaattgacgaagaggcgacagcggtgagggcgccgccaaaaattgtgttaagcgacgacgaaggcgacggtgctggtgccgattcggtgatagccgaaaacgacggtgggaaaatggcaatttgcttcaacaatgaactgaatttcagacctggacacggatcttgggttgatcaaagtctctaaattgaaattagtcctaatttctccatcaacctccgttcagtctcaatgcggttt

SEQ ID NO: 33349 - DNA, 739 bp, Heterodera glycines
ttacatactagccattttttattttattgtgaccaagcatatctttcctcgtatttctgggatttttttcagaatgtggtcatagaattgaattatcaacttcattcttttcttgtcctgcccaattgtctcaaatgtatacctaaaaatgcgctaaaaatgatcaaacccgtttttagccgaatatcctgtcaatatttccctattagaaacgatactgtgaattctttcgcctctttaattcattcgtgctttgcttcggattagtctaaaaatttctggacgccaattttacatattagccattttttattttatttgtgaccgcaaatttttacatactagccattttttattttattgtgaccaagcatatctttcctcgtatttctgggatttttttcagaatgtggtcatagaattgaattatttgtattttttttatgagtattatgtaaggatattttcgacaaaacataaccaattccgagtttcatgaggcatcaacttcattcttttcttgtcctgcccaattgtctcaaatgtatacctaaaaatgcgctaaaaatgatcaaacccgtttttagcggaatatcctgtcaatatttccctattagaaacgatactgtgaattctttcgcctctttaattcattcgtgctttgcttcggattagtctaaaaatttctggacgccaattttacatattagccattttttattttatttgtgaccgcaaa

SEQ ID NO: 33350 - DNA, 800 bp, Heterodera glycines
cttcttcggttcgtctgcttcttccgccgattgctcttctaatgcgtcgctgtaaattgacaattcgtcttcatcccccgcttttgctgttccgttttgttccttttgccattttccgcctttctcttaaattgtggttggcttttgttgaataaattgtttaagcaattgctaatccgtccacctgctgctcttttgatgcatgtttgtgctgtgtacaccgccaggtactgcttgggttccatttgctctttttgctgctgttgctgctcttttttgccatttttatgcatttcggtcccttcccttcctccgactcctttctgctcttctaattgctcttcctcttcctttcctctcactcctttctgctcttctaattgctcttcctcttccttttcctcctccttttccccttcccttcctcccactcctttctgctctcccttttccttttcctcctcctcttctccttttagtccgttttggcccatccattggtcctcctcaagcttcacacgaatcacttccactttggtcgtcctcattattgtggcgatcactgcttccaccgcccctccgattatcgtcttcaccccggcggccattgtccacttcgatggtaatacgacccctccgtcttaaaatttaaacacggaaatgagtctaattaatgctaattaatgagttgagggggaggggagggaaagcaaaagccaacccttttgctttgcagggatttctttcttttctgttgcacgatgcttaagcctttttttaagggtttttttctccccgcg

SEQ ID NO: 33351 - DNA, 864 bp, Heterodera glycines
atttgctccgctcaagatgctcttttctctgcacgggttggccaccgcctcggcggatctgttgatgaacatgttcaacatttacctgtacttaattggaactgtgttcgtctgtggcgtggcattgattttatgcgacagggactggcaaatggtggaggagctgtacttgaacatggtcaaatgggtgcaggaccaactcatcaaggcaggcacaccatttgttgtaaaaaaaaagtgaaaattgtaactttcttgtgaaatttttttgaaattttggcttattgcaatttgatgaaatattatttttaactaaattttgcagtgatttgggcagcaaaaggagcataatttttgtgacttatgcaattcgctaaaaagatattgttaatttaaatcgaactttttttaggtggcacggtttttcgaaaaaaaacagaaagaggccctacgctttggtccggccccaaacagctatttttgctttttcagttgcacgaaatgcacctcaccggccactcatttcgacggagtaataacagcagcaattactcggctgatgccgacccattctgtgctctcggggactgtaatccgcagcagcggacatggccggtgagaaatgggcacattgttgccactttttggcaatttatttgccaatccaaattcacagccatttttttgtctttttgttactcattcggtccattgttttttgtgtggttatttaattacaactaaatcaaattcagttattttatacaatttaaaaaaaagaattatcacgggaaatgtaaaaaaatgttgcactattcctaactcccgaataatttaatcattattttgtaggaaaatgcccgt

SEQ ID NO: 33352 - DNA, 942 bp, Heterodera glycines
ttttgagaaattttatacgttacaaaagcgctcgagcgtgagagggagggcggtgcgcaatcgccatttaatttcacagagaatttttaaatttatcttatatccaagaaaaatgactatctcttattttgagaaattttatacgttacaaaagcgctcgagcgtgagagggagggcggtgcgcaatcgccatttaatttctcagagaatttttaaatttatcttatatccaagaaaaatgactatctcttattttgagaaattttatacgttacaaatgctctcgagcatgataggaagtgcggtgcgcaatcgccatttaatttcacagagaatttttaaatttatcttatatccaagaaaaatgactatctcttattttgagaaattttatacgttacaaaagcgctcgagcgtgagagggagggcggtgcgcaatcgccatttaatttctcagagaatttttaaatttatcttatatccaagaaaaatgactatctcttattttgagaaattttatacgttacaaatgctctcgagcatgataggaagtgcggtgcgcaatcgccatttaatttctcagagaatttttaaatttatcttatatccaagaaaaatgactatctcttattttgagaaattttatacgttacaaaagctctcgagcatgataggaagggcggtgcgcaatcgccatttaatttctcagagaatttttaaatttatcttatatccaagaaaaatgactatctcttattttgagaaattttatacgttacaaaagcgctccagcgtgagagggagggcgggggggcaatcgccattttaattttctcagaaaaattttttaattttttctatatccaagaagaaagactatctcttattttgagaaattttattcggtaccaaaagcgctccagcgtgagagggagggcgggg

SEQ ID NO: 33353 - DNA, 152 bp, Heterodera glycines
cggaacccttgatgacttcgatctgttccaggttgaagacttcacgcgaggtcgcgccgatgtcgcgcatgccgtcgacataggtgctggcctgggcgtcgtagccacggatgatcggacggtcgcccagcgggttgccgccttcaccggcg

SEQ ID NO: 33354 - DNA, 942 bp, Heterodera glycines
agggccgactcagtccacaaggatagaaaaaagaaatagggatttttggaaatattttcaaattttcacggacaaacccgtactggaaaattccaaggaagtattgggttccctgatatataatttcaagggccgactcagtccacaaggatagaaaaaagaaatagggatttttggaaatatttttcaaattttcacggacaaaccgtactggaaaattccaagaaagtattgggttccctaatatataatttcaagggacgactcagtccacaaggatagaaaaaagaaatagggatttttggaaatatttttcaaattttcacggacaaacccgttatggaaaattccaaggaagtattgggttcactgctatataatttcaagggccgactcagtccacaaggatagaaaaaagaaatagggatttttggaaatatttttcaaattttcacggacaaacccgtactggaaaattccaaggaagtatttggttccctgatatataatttcaagggccgactcagtccacaaggatagaaaaaagaaaatgggatttttggaaatatttttcaaattttcacggacaaacccgtactggaaaattccaaggaagtattgggttcactgctatataatttcaagggccgactcagtccacaaggatagaaaaaagaaatagggatttttggaaatatttttcaaattttcacggacaaacccgtactggaaaattccaagaaagtgttgggttccctgatatataatttcaagggccgactcagtccacaaggatagaaaaaagaaaatgggatttttggaaatatttttcaaattttcacggacaaacccgtactggaaaattccaaggaagtattgggttcactgctatataatttcaagggccgactcagtccacaaggatagaaaaaagaaataggg

SEQ ID NO: 33355 - DNA, 941 bp, Heterodera glycines
aattaaagtacaggctatagtggaagctactcccgaaggattcggtctccccataaatctgggcgcatcggttcggggggactgccccgaaaacaaaaaaatcgattttttcaagtgtccgtttggggtactcaaacatttatggggagcaaaaatccaacgcagaattaaagtacagactatagggaagctattcccgaaggattcggtctccccataaatctgggcgcatcggttcggggggactgccccgaaaacaaaaaaatcgattttttcaagtgtccgtttggggtactcaaacatttatggggagcaaaaatccaacgcagaattaaagtacagactatagggaagctattcccgaaggattcggtctccccataaatctgggcgcatcggttcagggggactgccccgaaaacccaaaaaaaaattttttggataaaaattatttaaatgaactgactagataatatttaaaataggttatttctcttcctttcagtatccctgcaaagtttggtgcgcttctgatcagtttctgaaaaaaaagttaagcctaaactttttggcctgtttaaaaaggaattaaaaatttttaaaaattttattcatctccctttttgatagaaaaagcatcagagtgcctaaactaacatgtaaataaaatttggtgcgtttcagaaccctttctgaaaaaatatttaagaattaattttgcaaaaaataaataaaaacgaaagactcagattttcgaaaatttttttgagccagctagctcggcgctcatttcagtgtaagttagtcctttaccggggagtatccctgcaaagtttggtacgcttctgctcaattagcaaaaaatatgagtgatcgaattttcactaaaaaagtaagcctacattttttggcatatttaaaaagaattaaaaaatttttaa

SEQ ID NO: 33356 - DNA, 813 bp, Heterodera glycines
  unsure (1)..(813): unsure at all n locations
ctacattggtgtttttgccaaattatttgatttgggtttccgagcccggcaaatggttgaaatgtgcccggtcttaccacaaatgtgacacttaaccgaaatcggataccggcagtccgaattccaatgttgacaatttttacgaataaatattaaatcataaaaatgatgacattaatgaagaatttaaaaaggtatgtgcggtctgttcctcaataattaattaaattttcaagaagattggtgaactgcttgaaaaagatgaaaaagaacaaatgattctgaacaaaacagtgtgactgctgtgttacgaaaactaatcacaacattatttgatcatttattcatttatgtgatctctccccccccccattccccaactccaaaattttcagaatcattcttaaaattaatcaagaaaaaatattcaaaataaatttattttaataattttttgacataaattcctaaaatttagagaattaatattaattgaatgaatatttttcacaattttgacttattgtcatgttcaaaacttttactttcaatcacaagtacaaataaaacagaaatatttctaaatattataatgaagataaactaataaaaatgtaaaaatgcgttaaagaaattaattcaaaaagctcaatttagaaaaaagcaaaacataagaaaataataaaaatataagaaaaagaatttacgaatgctgtgaatttcatgtnaatcacatatatctttttctggattctcatgccttttaaagtgtaggtcatttcttaaaacgctaaggggtaaaaaacaaaaaaa

SEQ ID NO: 33357 - DNA, 826 bp, Heterodera glycines
cctgcgcatttcgcttttgtcgtccaccgcaggtcgctttagttggcgctgtctctccgtcccccgaatcgcagtcaccgggggtggttcgggcgacaactgtccctggacttgctgccgttcttgctcgtcgatttgaccccgtcggcggaccattgattgggaggaggaagccaatcgatcggctaaggaagaagtctgactgtgagacgcagattttgtgccaacgattgagacattctttaaataacaaaaatattgtactatagagttaaagggtgttgttttggaaattatatgaggtttagagcatggctttgtcctttggaacattactttgtccatattctgatggtcatctctgcccggctcttcgtccgcttcattcgctgttgcttcccaatataatttggtggcattttcggtgtctccaattttgtgtaggaattgtgccgctttctccatccaactttcactgtttttgcttcggctgctgtctttttctttgtcttcctctgtcctggtccctctgtctttggatcgacttcgtcgtcttccgcccctttctctctctcgttctctgtccctctccccttttttcccttctctctctcggcttcggcttctttttggcttttctgtgctgctttgttttgatcgttctaaattttaatttcccttggttttaaaatgatttgtcaccttttgacttgtccctccttcgttcacttctgctactgtttgattctgtgctcacgtcgctttccttctgagatcgctttttctctttcgaatttgtgacatttttatcggcttcttcggaact

SEQ ID NO: 33358 - DNA, 472 bp, Heterodera glycines
ctgcaacggctttacctcgttggtgttctcagaataccaggcacgaaaaaagtattggcacattaggactaatttatatgggcgtaaaattataaggaaattccaaatatttattttactgggctgtctgaaatgtaatttaaaaatgaaaatttgcttttgttacgttatttttctaaaaattaataaaagtaaatttgttttttttctaaaagtgtttttgaatgtattatcctttaaagatttttaattaggaaattttaagtccatagttggcgatttatgtctacgttttattgcccttttcgcaatttataattttgcgccctaaataaaggaatattttgtaaaataaaaaaaaatgatgccaaattagaattaattaaataaattgttaaatttttattataaggtctaaaatttgcagaaaatgccttagaacttacctaatcagtctagtaaatttcaaaag

SEQ ID NO: 33359 - DNA, 1254 bp, Heterodera glycines
tgtattgggtgttgggttcgttcccccccccccaatttttgacattttcgcttttcttttcgcaggttttggcctctttctgatgctctctcattccaccttttacgcttccgaagaagtgcccggctcggagttcgaagtggtcaccgcctgagggatttgtcagcgaaagtgccgagcgaagcgaacgccgaggaaagggccgcccgactgatcatttgttgactaattattgaccgactgatcatttgtttgttgactaattacttaacgaccgattgatcacttttaattgttcctttttttgttgcccttttcatttcctttttcttccgtcgcttcgtttcgcttggcttcatttgtatttaatttaacacttttaatttgactttgttatttctctctctctctgtctgtctgtttttttaaatatttttgaaaatgtcaccctttttatttggtttgcccatttttccatgctttttttttctattttattccatccgtttttacggccaatttcccctttggggatgaatgaatgggcgcaattgcaaaagcattttccattctccgcggggaattcaaagcaaagaaatgctaattacagagaaactgtgacaaatcgtaccaaaatggggacattttgtctgttttcgtcttcttcttctgatgctttgtctgtcggctttcgatcattcgttggcttttcccttttcttttcctttctttgctttctcaattctatccatttgatcacttaaatcggatttactttcgtcaccattcattgatcagctgtttctccgcgattcgtcgtgacctctctcagtgagtttttgacacgacgactgaccttccctcactttgttgtacaatcactcttcgccgaagacacagaacagacacacagcaaattcaaacaatgacttgctgatcggactgatcggccaccctttctttgatctccctttcccttaactttttcaccgatcgctctttcccaattgggccacccgccacccattcactcactaattttgggccctgcttaaaatgatgacaatagaacaaaattgtcatttgactaattagtctccattagcccattattataaaattctttctgagttgctcaacatatttttttttggctcaacgtgtttttgaagtacgattgcctcaaatgggttggacgattgggggaaaaagggggggaaggggaaggtgggccatggaatttgggggtgggcg

SEQ ID NO: 33360 - DNA, 880 bp, Heterodera glycines
attttattttcattttttcacttataaaataatgaaatcaaaatttccaaaaagatagaatttttttgaaaaaaaaaatcccaggtttaatcccaaattcgtttaaaaagacattagacttaatttagtgcttagttcaaaacaaaatttttccgagactaatgatccgagaccgagacacaaaaaaacctgagacttttcccgagtcgagaccgagactttttcaaaaaaatattttcttgtacaattataaattaattaaaacttactacatttaaaaaaaattgaggcgattcttaacaggttttttgctattttgtccttattcagcatttcattctatttattcgtgttttatcaccaaaaataatcatttttagcctattgttttataaaatttgctatttattttcggtgcaaaaattgtgaacaaatagcatcaaattttcaaaaatttccccggcggcgcctttcggcaccacaggtcactatcacattaatttcatttggaagaattgattctgctgaataaaaatgcaataatattagccgtggattgtgttttaattaagttccttatttttggtgttagtgcccttcctaaaagcgacattttatttaatagaataccaataaataaatgcaaatacataaaaatttattataagtttgttttttatacatatcatgaaataatgcaataatatctaaatttttggcaacattgtttttgacatggatttttcaaatgctcattttttgacttttgaactaaattatttgaaatacgccgctggaaaaattggatttttaatgagagattgtgaaaaaaattagaaaatttaatcacccatcgctgacgattttggatgaacattta

SEQ ID NO: 33361 - DNA, 443 bp, Heterodera glycines
attagggagtatgagatggaactttgaagggggtaatctaaagaatctttttaaaaaaagaatatgtacaaaaagaacatcggttggaatagttcctttcccagcgggttcatcactgagtccacttcatcccccccccctccgaaaaattagtttttcaaaaaaattattcaaaatttctgttagaaaaaaaaatattttcaaaatttttcgggggcgggtgggggcgacctgctccgacccactacataagccttaaaaacgaattccctataaaaaacaatcactgatggctaccttttctgagtcttttgaaaagcaaaaatgaaagttcatcaaaattggagaccttcctcttttgcagttttccgactccccccccccccccccttaatcgacaaacttcctacccgctccctcaaacggaggtgatttttaaaaga

SEQ ID NO: 33362 - DNA, 773 bp, Heterodera glycines
  unsure (1)..(773): unsure at all n locations
ccgaaaacaaaaaaatnncgattttttcaagtcgtcccgtttgggggtactcaaacatttatgggggagcaaaaatccaacgcagaattaaagtacagactatagggaagctattcccgaaggattcggtctccccataaatctgggcgcatcggttcagggggactgccccgaaaacccaaaaaaaaattttttggataaaaattatttaaatgaactgactagataatatttaaaataggttatttctcttcctttcagtatccctgcaaagtttggtgcgcttctgatcagtttctgaaaaaaaagttaagcctaaactttttggcctgtttaaaaaggaattaaaaatttttaaaaattttattcatctccctttttgatagaaaaagcatcagagtgcctaaactaacatgtaaataaaatttggtgcgtttcagaaccctttctgaaaaaatatttaagaattaattttgcaaaaaataaataaaaacgaaagactcagattttcgaaaatttttttgagccagctagctcggcgctcatttcagtgtaagttagtcctttaccggggagtatccctgcaaagtttggtacgcttctgctcaattagcaaaaaatatgagtgatcgaattttcactaaaaaagttaagcctacattttttggcatatttaaaaagcaattaaaaaatttttaaaatttaataattttcctgcaccgaaggtactcactcggcctcttcgcgggcctcgtggtgggccttcgcccccc

SEQ ID NO: 33363 - DNA, 765 bp, Heterodera glycines
aaaatcttttcgctttttgtaaggctaatagagcatgttaagagctttcgaatgataccaacagtgttggatttggatgccaaagaaaaaagcttaagtggaaaaacgagctggcgccgaaacgcgtgggtcccttttgagttgggcattaaaaaaatatgaaaaaactcatttatgctaattttcgaaaaataaataaaaatttaaaaaaaaatcgtgtaaaacgcctttcctggggtttttaggtcgctgatcacgaatctggcatccatttgaaatatctatctaattccggactccgaacccgaattcgaacaaaaagtcgaaaatttaaattttacaaacgcagactccgacttttcccaccccgaattgctacgcaaatattttagtataaaaatgccttttttcttcccctccttctccttctcattccatcatattctgaattttgtgacaaaaatcaattgtaaaacagcaaactgtgctaattacagcaaaataaatgaacagacggtaatgaatttatcgaaaaattataaattattttatccaatttttttcatgtttcagttggatttgcaacgacgtgtggatggacattgcaaattgacaatttggagagatataacaattcacaaggacgaaggaactagaaaaattcaaaaaaaatttgttttatcatgaaaattcaaggaaattttaaaaaattttcaaattttttggttttttccgaaattcagtaaattttgtttattaacactt

SEQ ID NO: 33364 - DNA, 335 bp, Heterodera glycines
cttttcctttggaattgaccatttccatatcatctgcactatccatttcagttttggacacttttgctgttactataaaaagttgtgaaaaattgggtaatcgttcacatcattggtcccataaaaaaataaaaaaaggggtcgtttttttgcgattctgagaactattgggggttatctgggtcgctgatcacggatatgacatccatttcgaccaatttctaaacccggacccgaattcgaacaaaaaataaaaagttcaaattttcgaaattgtatttatgtttcgaaaatgatttaaatgcatgaaaacaaaccaaatatcatcgttcctg

SEQ ID NO: 33365 - DNA, 830 bp, Heterodera glycines
ttaaaaagaaacattttcttttaaggaattgatcaatgcttagtccaatcttttggtcactgaaaatttgccgagacaaattgcacattctgccgatgatgagcaacagcagcagagttcgactgtcgttcatcctcctcccctttcaccgttgaacagtgaggaccatgaattgagcggaatggaagaaggatcggaagaaggtataaaattaaattttttttttaattaataaatttaaaaaaatattttttaatcccttttttaaaatggtttaagtttataaatattattttttgtttttttataaagcattcatcgctcatttttgacaagaaataaaaatagtggtgccacttttaccgctcttggaattttgataattgaatatttattaatttatttaatttttgttttttttaattttaaaaattaaaatcggtacttttggaagaatggcgatgccaattaggattaatagattttgttttccaattctggctaatttgaaatcaattagattcaaaaatttcaacggatctacctatctatttttgatgctaataattaattagcccataatttaattgctgcttttttaggaagcactcatacagtgattaatcggcacgaacgaatcagtgaagatgaacacagaacccgatcactttacggcgcatttgcacccactgatcaagaagatgtacatttaaaaatgccaaaaatagtctaaaaacataattttcaaatacaggaaactcgaagcaaaacaccgagtacgccagtgatgtcagccgctcgatggaagagtatggatgaacagttacagc

SEQ ID NO: 33366 - DNA, 918 bp, Heterodera glycines
taattatttcatctaagttcatacaatttaaaaatggattcaaaagttgctcaaagcgggctataaaaaagactaaagataggttaaaaattgagatttctcaacaaatatcattcgatagctctaaatgagacaattcaaaaataatgccaatagtgactcaatgaacaaaaaggcaacaaaaaaagtgccgcgaaaaaggtcaaccataaaacccagatgggataaagaaaaaaaaagaaatagacaaaagaaaatgacgaaatagtacaaaaaatgggagagaacggcaaacggacagggagttgaaggatgggaaatcaatcagtggataatccgtcagtaatggacggacaatcaccagcaaaatttattttaagactctttttatcatatgattttgtttcatagactttgtctatgatttatcatatgattttgtctatcatttcgcagaattctatttttccaacccatttcaaacctttttacatcgattctgaccgtttttaagcatttttgagtttggggcctatgatcaatatttaccaatttcggttttcgagtgccattcattccccaattttaggtttttaagttagaatctattggataaggcgcgaacattggacttgaagacgcaggcctggctgctgttctacagaaaaattcgccaaaaaactaaaagaaatttccgagtgcacagactcttctattgatatttctttagcgagttggtatcgtttctgttttcgcatgtgatattctcagggtagccagattcaattttcaaaagcctcatttggcatgcaaaagaaccttgtgccacaaaaatcttcaaatcatcatttcaaaaaaattctcattgacctatcaaaaaacacaaaatgaagaaatcctcaaatctggctactctgc

SEQ ID NO: 33367 - DNA, 928 bp, Heterodera glycines
  unsure (1)..(928): unsure at all n locations
ctgtaggcaaggcacatgaaatgtcatttggaggacgaattgaaaatggcggacaaaagtgcggacaacaacgacaaaactattaccggcacaaagtggaggttggagtaaattatgaaaaatttaataatttaaaaaaatgggcaaaaatgatttaaaaaattactttgccacccttcgtcagaagcgcaaaaatttatttttattttttttttgaaataatactttttcatgcatcctcaggaaacttatattcggaatactgctgagataatctcgctagcaaaatttgttttttcttaagggaccgtttcaatgaacacgcaatcattttaagtggatttaaaaatgttaattgtttttcatcttattttttagtaagacatctgtggcaccaaatttggcactggaacacgaattgcaaatggaggacgaaaatgtggtcaaaaaaggcaatatgacctgcagcaggtggaggacgggaattaattaatcttttttatatatacattaaatttattcaattattaattaattcatatttttaagtttttggggtttaattcctcattaagaaattaataaattttcactacttttaacactttaattgtctttcaatttttttagctcgtcatcatctgcacgtaaattgacattgagaaaggaattgacgagtgccaacgatgataatttccggtgagtttttaaacagaaggaaataattttacaaaaattaattccaacttaattttttccataaaaaattacttattagtacctttcatttaattggtttaattaagcgagtcgtccgcttcacaaaagttcgtttttgcgcagagtngnggaggattcaaagcgcgatgaccgagatactgatctgattggctanagcacaactgaacatcagcacagggctcggatt

SEQ ID NO: 33368 - DNA, 781 bp, Heterodera glycines
aataaatttataactcatttcaaaaaaggcgctaaagaatatttaaatattcataaaatccgcaatttttttctctataaaaagaattttatttgacctttttatcacatttttaaaaaaagatataaaaataaaagtgattttgggattcgggaccaaaggggggtgaccagtatttttgagtggaaaacttttttcacccaaaatcttccaaaaacatgtcattaggcgttatttgggccgctgatcacgaatacgtgatcagattttacttttgacatcgtcaagacctcagaatccctgtgtgattggggtttctgaggcatcttttttttggggggggagttcggatccggacggtgttcattaattttctatatattttttgcttatttttacatgtttttaattaatttaaaatagtttgatatataaattaataaaaaaataattttaaattaaaaattttcattatttattttttgaatttgcaaaaaaaattaatttcatttcaaattaaataaatattcaattattaattttcaacgttgtttttaattaataaaacgagtattttattataaaaaattttaaattaaaatgtatgtgatttttaatctttaattaaaaaattttccttatttattttttattaggtttttagcgggtatttatgacgctgatcacgaatctgaaatcagatttaatacatcgttaaagccttagaatccctgtgagattagggattctgaggctaaaattttagactaattattaattt

SEQ ID NO: 33369 - DNA, 805 bp, Heterodera glycines
  unsure (1)..(805): unsure at all n locations
caacaaataaagctcggtgtatgtctncatcatttgggtacttacgcatttttacaagccaaattaatcaacaaaaacattcaattgtcaaccaaagccctaattgtttgttgtctcaacaaagtcgtacattattaacggtgcgccgggacagcacgaatttcggatgacatcggagggagcgttggccgaatcagcgaatttcacctcctccagttgtaaagtcgagagcaaaaagtcgctgatttggctgagcgctgccttctggtcgaattcctcttccgacgtcaccgcaaaaatgccacgctgagcaatgcgatcgcggaacatctaaaaatgttcgaaaaaatttagtatattttgataatgggaaggaaacgggatccgtggtgcgacttttggggatttgaaacttgggaacccgacatttggggacggacccgacttttggggacccaacacttagggtacccgacatttggggatcgaaagtcttttggggatccgacatttggggacccgacagttggggattttattataacaaaaaaaaatatttaaaaatttatcccaaattagacaaatttacgattgcttttgccagagttaatccattgcaagaataaacaacatactatttttaatatcaagtctaattccggactctaagaaacagaaaagatggacctcggaattttgttgctgtacgcaattagacagtaaagtcagccttttaacctttttgaatgcccttgatgaatttctgtgcccgttgggccttgggaaaaggcggttttaataaaaa

SEQ ID NO: 33370 - DNA, 425 bp, Heterodera glycines
aaaattgttaaaatagataatatgagactaaaaaataaaatttgatacctttttgagcgaataaattgtaaaaataactgatttgaaaaaggttgcaaatgttcacatttttgatactaaaatcttattttttgggcttggtgttcatggtggaagccctggtttaaaaatacctggaggggggagggggtttaactgaaatattgcgaacccgtctcaacatcgaatttgaccaccatttttttgcggcgctctttttcaaaaaaactttgggctacaacagaagggggatgggcggcgatgctgttgggagccgcgaggaaaatttttaatttattaacagatttttcctaaaaatacttatttttgcaattttgggacaattttttgcaaaaaaaaaaattggagttttggggggggggggg

SEQ ID NO: 33371 - DNA, 794 bp, Heterodera glycines
ccttcagagcacgacaaatatttcaacaaaaatttttaaaaattgactagagcaatcgaacgctaacggacgacctaatggaaaaaaatccccgaaggagagaatttaattaaatccattccttcgggggaccgtgccgggtgccgcggggtaagcagtgctggttcgtttcatcacggcaccgaaccttttggctagtcagcaatcgttgcttaacttgccagatcggacgggtgcgcatgattccactgttccaagcaccccaccaaaagcaaaacgatataaccaaaatataaggaaaaattttttaaaaaattttttctccatcttcctttttgatactaaagcatcagagtgctaaaattaagttgtaaataaaatttggtgcgctttagagctctttctgaaaaaaatatttatgaaacaaaaaaatcgattttttcaagtgtccgtttagggtactcaaacaattatggggagcaaaaatccaacgcagaattaaagtacaggctatagggaagctattcccgaaggattcggtctccccataaatctgggcgcatcggctcggggggactgccccgaaaacaaaaaaatcgattttttcaagtgtccgtttggggtactcaaacaattatggggagcaaaaatccaacgcagaattaaagtacaggctatagtgaagctattccggaaggattcggtctccccataaatctgggcgcatcggttcagggggactgccccgaaacccaaaaaaatttttttggataaaaatatttaaatgactgact

SEQ ID NO: 33372 - DNA, 1206 bp, Heterodera glycines
tagagctcgcaaaaaaaaaggcaccaaaaatcgcgaaaaaggcattataataggcacaaaaaattaaaaaaaggcttgaaaaggcacgaaaaaaggtatttaaattttttattaaagatttttagggagaaaacacgtaaaacttgaccaaaaaatacttaattcaggtcatttcttagaggtgtattttcccgattttaatggattttttcggaaaaaaagccaaaaaggcaccaaaatgccaaaaaaggcatttaaggcacgaaaatcccaaaaaaggcataataaaagtcaacgtagaagcctcgaaccaagtgaaaattgcgttttttatgcttaatatatcgaaactaatacgcagaaaaaaaggcatatgcctcaaaatgcgcgctctagttattaaaaataaaaaatcgacacaaaatgcaaaattttgcataaatttcaaaatttcccccagcggtgcttagacttaccatactttaattttaccaaaaaaacaacaacaacatagagaatttttaaagcagaagagcaaaaaattcattttaattcattctaaattcaaaaagagaaaaaaagtgattccctaaaattgaaaaaatttttattttatctaaaaataaaataccatttgcttttaaatattatttaataaaactttaaaataaaactcatttagaaacctgataatgataaaatgaacacgattaattcacgaaagagagatgcgaaaacggtgtttatagcaattaaggtttgcaaaaaaacaacaacatattttattggaaatataatttaaaataattaaatttaatttgctctcatttttcatttcaactttttagaatttgaacaacaataatttggagaaactcattgaggtgatttccattcagtttatttatatttttttaaatgatgagtaggacgtgaattttaggttttaactattttttttttgctcaattgatttgaagaaaggagctcaaaaaacgcatttccgcataaaaatttttcgattctgatgtcattatcggtcactagaaatcactattttgggattttgtcactaaaatagtgaaaattcactattttggagttttgtcactattttttcactatttcgacatttttttggaaaattctttaacaaaaatgcaataaacccaaaaatacacccctaagaatcgacaaaaaaatttc

SEQ ID NO: 33373 - DNA, 289 bp, Heterodera glycines
aaaaatgcgaaaaatttcattaccgtatatttcatattcttatttttccttaatcgttaatggataaattttgaaaacaattcaaataaggcctttttaaaaagctcaatgaattggttataattattttaaaaaaattaatcaggtttaaaagcattaaaaatagttaaaaatgttattcttataaatatagatttctttttaggcacaaaaattggggaaatagaaatttgatgattcttgctgatttttgaaaaaatcctcaaaagtagccagcaataaactattt

SEQ ID NO: 33374 - DNA, 958 bp, Heterodera glycines
ttcaaatctagcaatggagaaacaatgcatctaattgttttatctcgagataaattgaaagatggcaaattattatttttccttagcttggtaataatcttaattgaatgttcaattcaataatttcattcaaaattatttttcatgttttctttaatttataatttattgtgttttaatttattctttcatgacatccgttgacgataattttttgtagttaaaaactaattatattttcaaattactttaagttgaatgataaacatataactgtaaatttattttttactttaataaaaattcatttaattgttttaaatattagtttttggaacaattaactttttattcgtttttatctaagtcaccttcactttctttataattttctattattattttctattttttctattaatttgctttatacattctaatttccatattttaccgtttttcaaaaaatataataataataataataagtaatcttttcgcaatacacataaattatttttaaatgtgacttcaatgttctgtgacgattaaaacagatttaatttttaattctctcttgttgattgcacgtgtgaaatctcatgtccgcaaattatgatattaccatccaaattatttaattaaaagaccagtcgttgctcattaattctataattaaaaaattatttatttaagcaatatttaatttctcatcatgggtatagaccatcatattttagtctttttttaatttgttttgttttacagaaattttttacaaaatactatttattgtacatattttatatatttatcttttatgctttccgattatttaaacttatgatttaatcaaatggttaatattaataaggaaatttacttactttttttgaacagaattaaattccaaaaattaagggcaataataaaaatgctttttttaatggactttttt

SEQ ID NO: 33375 - DNA, 1449 bp, Heterodera glycines
  unsure (1)..(1449): unsure at all n locations
tctttttattttatacntttttaaaaatttaaaaaaaaaactgaaaaaaagaagattaattatgtaattataaattggtgctgagatggcagaaatataataatctgttaggaataataaaaaataaatacattaaaagcctgtaaaaagtggaataaatatttaagttccgcctcatgagttttcgcaaaatttatggcagcaaaacatactctccacgaggaggagtagcaaaatattcacaaaaagatactttaatatattatgtagttacatcataatatgaattctaaataaatctacaaaatattacaaaattttaattgataaaccttaaaaggcaatttttacataattttttcaatcgaagatgaatattaataatcttaaaaatatgtaattattaactaaatacaaattaaaggtattaaaaccaacctaaattgaatttaaattaaaatttcttaatttcgctaattctgaagcattttattaaaaaatagaataaatcaatgatgagcattacagaaactaaaattctaaattatatgattaaatatccaaaagttaaataatgtttatatttgatagtttatatttaaatcatttttgaattattgtggtacaattttattttgaactgcaggagtaatttacaattgcaaaaatcaacattaatccggagacaattttcaaaacaaattggcttcctgtgagaagcataaaaaaagtagatatcaacgcgagaaaataatacattcattatatattctaatgataaaagaaattgaagaaaatataataacttaaatttatcaaagaatcaattttagacaaagattttaaaaaacttactatttattttcatttttgctaaaagctatttatatancataactagcgggtgcgtgaaccgtcgttatttggctgggaaaaagcgcttcgcgctttgggagcttcgctacctagatttgatcgaattggttggagagatttttttgaatttttaaaaaattagtaggggtttttagtccacatcgaggctcaagacgggcgcttcgcgcccgtttttaaatttgttggccttggacgggcgcttcgcgcccgttattcaaattttgttggccttacagagattagaagaggtacaacagtgattaaaagacgtcaaaagtgattaaaagaggtacaaaagtgaattaaaagaggtacaaaagtgaattaaaagaggtacaacagtgatcagaagacgtacaaaagtgattaaaagaggtacaacagtgatcagaagagtacaacagttattagtaggtacaaaaattgtaggaatggtacaataaaacagtgagaagagtgattagaagaggttcaacagtgattagaagtggtacaacagtgattaggagaggtgtacaaaaattgtgaaatggtacaacaatggttaacagt

SEQ ID NO: 33376 - DNA, 1020 bp, Heterodera glycines
gtccaattaattatcggtatgtttggcgttcatttggtctcaatttgttgtttaatttgataatgctttaatatcaatttcatcattaaaattaattgctacaaattcattttagcatttgtttgggttgctaatctgttgtttgtgcttcatctcttctgctgatttgcggatgggtgaagatgaattaatgcgtttataaagaaagatttaattaatcccttaattaattaattgctaattcatataatacaattttgtcttccctcagattaaagtattcttttttattattattattaaaggtgatgaactcatacaaataacggatttattttgttaaaactgctgtatatttataaacaaaatgtaagccattaatcagttggtttgaaactgactagagcattgcgaaagacaccgaatgagagagaaaatattattgacagggtttgtactaaattctgaaccaaaaattttgggatttatttttctctccctggcttttcttaactttttgcactatttcttatcatattgcacttggaaatgcagaaaaaaaattggctttttgtggccatttaattctgcgtcgtaagtgtcgcttagattgtgaacgcaaatgtcatcaccatgcgacccaaccaatagtaattgccagggctgcaaaaaatatgcatgaaaagtggccaaaatatgcgcataaatatgcaaataaagtcgtaaaatatgcaccaaatatggacaaaaaaaaacttgaaaattaggggtgcaaattaatttaaaagttttattcatcataaattttgtcagttgtttttgcaattgcaaatcaaaaatttgtcaagattttcggcaatgaagctcacttttgacccactcgcgcatccatttaaatttggatttaattttatgcataattaaaaaattcttcctaaaagatatttaaatcgaaatatttgatgaaaaatgacaaaatatgcaaaaatctgaaatatgtacaaaaaatggcaaaattga

SEQ ID NO: 33377 - DNA, 903 bp, Heterodera glycines
  unsure (1)..(903): unsure at all n locations
cccccccccctcccgttggtgtaaagggaccttaactgtgatcatcaannntttaattntttcgaatgttttttcggcatttcactaattactttcacgtaaaaacatttggaaataaatactttgttcctctttcttctgagaattgtcataaaatttaactattcgctaatccaacatataacccctttccaggtccgtctttcgccgtctccgccgccccaaaaaaagccaacgaaagtggccaggcaattaaccttcgccagctcagatcgcacgcggacatcgaagtggatgacgaggaggaggagaagaagaacagacggcccgacgggagaagacgcaaagtgccaaaagtggtgagaaaccagcaaaattccaaaaaatttatcaaaaaatatatttttcccattcgttcgtcgtgaggggggggggtcgaagcgaagcgggaaagagaaaaaattttaaaatttgaacaaaccccttagcaaaattcatttaaaatttcaaaaaaaatttccccagcggtgcgtaaaaatcctaatttttcttttagaaaaatacgctcaaaaaattgcaaaattggttatttattggacaaaatctatttaataaatcgcaataagatttcggcccgagataatttccgttatttttcagccccgccgttgtgataaatgcccgatggaaattccacgaagtgtggaagcttgaacgccattacagaacacattctgacttcaaacaattcaaaggaagtatctaaaaaatgtttatttttcaaaaattaacaattaatttttaagtggggatttgtgtccacatcgaacgcattcaaaaagcccactttgaagcgccaattgaaccttcatcgctcaggggaaaaggggtttcttttttttc

SEQ ID NO: 33378 - DNA, 1352 bp, Heterodera glycines
taattgctcaatatctggggagaatggccatccaaagcttagtgcgtttctgataataacgtgcgttttcggctttgatttgcttatcgcacgaagtctccagcttcgtaagaaagtcactttgcttcttatggcttggccaagatcagcaacctcatcaagcgcacccgcagaaatatttcctaaaaaaagtatgcttaaaaaatttccaacaaccaaacccttagaggtgcagtccgccttcatagtgttaaggttgtttttaagttgcgccaagcgcaatttttcaggacgaattttttcttcgttagccatttcatccttaaagatggattgagcggtgaagaaagcatagcttcatccaaaattgattgatcgtctaaacagatttaataattactaaagtgtaaaagtaaaaaaaccaaaaactaacgcattttttgtttttttggaaattcgtacccacttgatgcttctgtttctggattaattttttcatgttgagtcggcgaatcagcgtctaacaatttgcttatatcaattagcaaagctttaataaaaagtaaattacaaattatctttcgttagaaaaaatctttgataatatgtgcttatataagcataaaaaataaaaaatttccaacattgtttgatataaacataaggtagtgtaatgaacaaaaattaaaaaaacattcaatagaaaaaataacaataaaatcaatcaaaatatccaccaaaagaacaatccaaattttccgagtcagattcggcaacgtgcgggtcagtgactaaatccggttctttcgtacccacaattggtctgcgtgttcgatgagtcggcataacaatgttgtcaaggtcgagcagttcatgatagacaacgttttcgataaaaacttcggacccactttggcagaaaggcgcgaacacaggtatgccgtccaactgtgtcactcgggacatggccacgtagacctgaccatgcgaaaagcattgccggccattgagcacgagcgccattcgctggagtgtttgaccttgtgcctaaaataaaaaagataaagtaatggcttttcttaattttaagactttattgatggtcatagcgaaacagagacggacaggaaactgcaaacggcggaagcgtaacccacgatgatgtcgggctcgcccgtattcagattgaatgcgggggatagcgatactgctctgcacacccgcacgaggtccagtcaagatcctgcagaaaaggttgttctcagaagtgctcatcacttgaatccgagtgccattgcacaggccctgagtcacatccatattgcggatcagcatcacaggcgtacccacct

SEQ ID NO: 33379 - DNA, 1164 bp, Heterodera glycines
  unsure (1)..(1164): unsure at all n locations
ttttccctttcagaaaaaataatttacatttcctctctcttcctcttttcttttttctcttcctcctctcttctttcctctctcttccattctcttcacttctcttctttcctctctcttcctcttttctttcctctctcttccattctctttacctctcatttcctccncctccctttccccgctccgtcgatcagtgctctccgtttcactcaaaaattaatcgatcagcaagcagccgccctccgccggtcccacttaattgttcctctcttcagccttcctttgatgaacgtgaatttaagccaaaacaaactttagaaaaggaaatgaatcaaaaaatgaatgccaaccgaacataaattaaaatacatcatttaccattgaataccataataatgataataataatcatcacatttattcaatatttaccatttattttgtaatccaaatgtcacactttatatcttatatcctaaacaattgtctctcttcagtgggcggttctttgatcacccccttccacctttgattacgcccccggggactttctctcgatcacttcataatcatcgggcctctcccccggcagtctctgctcccgaggccgaatcgggaagagggcctaagcattgtatccttaccccagaataaaggcgtactgttgcatactgtattaagggggaataaagggatacaaagggccctacggtgactcaggacattcaccatcattcattatcatatcaagtaaaataacacataattagagagaagcatttgccttgaattcctttccatctccgccgaattaaacaaagcaaaatctgaattcggacgatgccaaaccccggcaattgctcctctacgatgtcttcctcttccgccttctcttcttcttcctcttcctcttcttccgccttctctttcattcctcctgatgaaagagacgaatgtcggcgagaaaatgtcgcgcaaagtaagcaaaaacgaggcatttcgccaatgtttcggtcatttcatttgcttttaaagttgccgcccgactgagccaaggagaggatttacgactggcgatgaaaatgcaagaagaagaatatcagtcgcacttttccaaaaccgaaccaacgagtgactgttgcggaggatgccaaattgagt

SEQ ID NO: 33380 - DNA, 485 bp, Heterodera glycines
tttttaaagaaaagaacaaacttcgcgtgctttccctacccactgaagtcgtatgttcggaacgctgatgtttggcagacaatacattcaacggtgacccgaacagcatgatgccgaaacaccttgtgtggctcgactttgttcatttggtgtgccaaaatagatgcgtttgtgcatatgtaatttgtcgacaaatcgctgtacatcgacgcattgtaccactgggataacgaagccgtatccggattgctagtgtcagaggaaatagaacgagaacgggccatttatcggtactaattcagtttgtgcccccttttgggtcgaaatttttcaaaaattttttttggtttaaaaagcctgaaaacaagggtcctggggttttccaggtcgctgatacgaatatggcatccatttcgaccgatttctaatcccgaacccgaatttgaacaaaaagtcgaaatgtcaaattttcgaattttgggttt

SEQ ID NO: 33381 - DNA, 931 bp, Heterodera glycines
agtgaagcggggccgggacctggtactgaaaaaagcgggacaactgagtaccaaggtcccggttttgaccatttttgaccgggaccgggaaattcccgggttttcccggtttttcagccaaaaattcccgggttttcaacccgaaaaggtcccggtcccggttttgcccaaaattcccggtcccgcttcactttattttattctaatgcactttgactaattttctagcgttttctattatttccaatctaataaattgaaaatattaattttcgactttttgttgagtttcgggtcagggttcggattttccgaaagggccggcgaaaaatcaagataaagatttttgtttaataaacatttttttttttgataattggctttgcataaaagcaaaaaaaaaattataaaatatatttgcatgcagaggattcgaacctgggacccaaagaagtctgactaacgcactacatctacaccaaagtccactgacaaaataaagaaaatgattttcctttactttcattataaaaagctaaaaacttccacgtcataactcggcactcgtgctcattaacagaaactaaaaattcgggctctactgataaataatttcagaaatttggtattatttgaacattttagtttttttttttttttgaagcagaaatggaacttttttttcaattttaaatttgaaattgcaaaatttgttcaacaaaaagtctatcaaatttcttagttctttcaccattcattaaaattttactacctagacttcgaaaaaatttaaccttatacccccaaatttacagacaaaatgatattaattcacaaataaataaataaattgaaatgcaattaactaatcccgatttactccaaaaataacggaaataataaaataaatggacaaaaatatacggaaaaa

SEQ ID NO: 33382 - DNA, 504 bp, Heterodera glycines
gccccccccccccccccaaagccaagggtctggctacgcctttgccccctaggcattcaatttttcatttaaattaacaaaactgaggcatacatagaccatgaggattaagattcaagaattcgaaatctcaacttgtcctggtctttttttctaaatccttttatgaaccgaggccgagagtctcggccaacatagatttatcactaaaattggcatcatttttttttaccaaaaatttctttcttctttggcacgaatgcttttcccttttttaatgtaagtttttttttgactaacataagctcttccaacaggatttaattttacatttatttatttatccatatccatctcccattagaactttcgcttcttttcgccctctgaaattgggtgaaggaaatcaattttaatcgccgccgaatttcggaggcatttccatcgccgccgtccccccgggggcggcggcaaaagtgaaagccgagcaaaagcaaaaagtac

SEQ ID NO: 33383 - DNA, 1035 bp, Heterodera glycines
ctccaccatctcccacactaccacccgtgtacaacgaccaggcaatccccctcctccgcgtcgttctatacccaaagttgaactaaaaagggatccacaaccaacaaagttgaaaaaatccgattcgccaccgcctccaccattgcctccacatcgcgcaaagagagagccaaaatttgagcttgcccctcctccacctcatcgcaatgtctccaaaagggaaccgaaaattgaattagctcctcctcctccacctcgccacatccacaaaggtgaaccaaaacttgaagttgacccgcgaccatccacatcgaagcaaaccgggtacttcccacccccgaaaatcaaaaccgagccaaaacatgagttgcaacctacaaagaggccagtgccataccgtatcccgaaaaaagagccaaaaattgaagaaaagccattacagcagcagcagcaacgacctcctcctcctccagctgttgtcgtcgaagaaatgccctatgttcctccacctaggagggggaccaaacgcacctacccccagaatgatgatgatgaggtgcacataagaaaacgagtgaggcaaccgagaagggtaagagtacagtactcgcccgagccaggtccatcaacatctgcacaacgtgatgaacaacaacaacagcaacgtgagctgtttgctattccgtcaaatcaactgaccatgacacagagaatagaacgattatatctcaaatgtaatcattatgctgaccgtatgggtgttcggatgaatacaattaacaccgcaaacggcaagccattggcgcatagcaatttgcgaatggccatcaagtatataatagaccgaagagcgggccgccccaccattaaaccaccgggagcagatctattggaggagcgggttaagcgggatcccattttgtattcatggacggctccaccaaagagaccatcacagagcaaaaccacccggacggcacgggcaatcaagaaggaagtttcgcccgaaaaaatgggagttgatcaacaccactc

SEQ ID NO: 33384 - DNA, 843 bp, Heterodera glycines
ttggcgaagtttatttcaatgagcatctattttgtgtaaggcacaaaagaaatgattttttctttaattaaaatttacacagcatggaaaacaaaaattttataatcatttcataattcaatttaaaatatcatacaatagaaattatttttaaccttttaatttgcttattcattacttttataaaataaacaaattattatttagttttttcaatttaaatccattttgatattattttttataaatcgcatgtgattcccttttaaatttttgtaaaaaagcccaacaaataaatgctttgaccatccacaatttgtttacacaaaatgataaacaaatgaattttaaaatcaatttttgaaatcctacttttagggatgagcttttttttaaatttcatgaaattcggcacgattctttgaggattcgtttttgataggtttaaattagtgaattttacgaataacctgaaaatggataccaaaaatgccaaaatttgcgcaaaatataggcaccgaggcataaaaaaatttagttgaaatccaaaattaagttaaaaaaacgcgtcacttttcatgctcaatttataaattttcatcaataaattgctcgttttaatgatcaacatcagtagtggaaaaagaaagaagaggggtctgggggatacgaaatatatggaatattgtgggggattgagggtgtgccaatgatgtgttgtccaagtgttgtcaaaagttgggataaatatttattaagaagtaaattgggaaatcggcggaagaaaatggagagacgatataaaattaatgaagaactgtaacagaagattaaaatataaaa

SEQ ID NO: 33385 - DNA, 111 bp, Heterodera glycines
ctgttccgcaactgccgcctggtcggccgccgcttccgcttggcgcacgtgatgttcgggccggagatcatcgaagtggccactttccgcggccaccacgaacaaaatcag

SEQ ID NO: 33386 - DNA, 520 bp, Heterodera glycines
gaattttcgacttcttattcgagttcgggtccgggatttggaataggccaaaatgagtgcctattcaaaaatcatcgacccaccaaaaacgcccagtaacgtgtttgacgacttttaaaacaaaattttttgaattttattgtgtttaaaggccccgaatttttaatttttccgctgcttattaatttttactatgaaatataaattccattttttttcaattagcccaattttgaactgtcctccttcactttggcacgtgatcgggcacgccctttgctgatggagttgaccattggcatcccggccatgtccaaatgtgttgtgaatgttgattatgaagccgcttttcttaggtgtgtaccacatggaagcgaaattatacatgccagagatgtcggaatgcagatttcgggcattttgggctcagagttccgattgtcgaaatttttagagccatcggaattttccgattaccgtaatctttggaacggaatttcgattgtcgaaattttttgag

SEQ ID NO: 33387 - DNA, 930 bp, Heterodera glycines
gtctgcagtgggagttgggaacagaaaagacggacaaacaactaaagggcgcaaatttgctggctttaggccgtacatcgaagaactcaaacgtcgtctgacctccgttcagctgttcaccatgaccaattcatattcctcaattggactctccaaattcgcacaattggtgggattggacgagtcgagcggaactgtgcaagagttactccaaaagtgcaattggactgtgtctgaggacggcttcatttctccggtatcacacaaaaatgattttatcggttccctttaattatttttgggaacgcagcctttaattgctattaaaatgcgccgacactgggaatatccatttgattttaaggtgcgaaacgcagaattaatgcaagccattgaaagtctcaacgacgccaaatttggaacgggtttcgatattaagtttgcggaacggggtgtcggtggagcgaccgaatcggacagcaatttcgacaacttaaaatcattggtatttttcagaacccattcatttatcaaaaaagtccattatatataattaatttcacgatttgttaacccatttttggctaaaactaatatttcagatcgattccacaatgttcttcgatgcaatggccgtgcaatagaaaattaattccgaatgtttattccatttgcattatttattggtttttccatgaatggatttaagttaattacatgaaaaataaaacgaatagctttagtaaagattataaatacatgtaaatttttgagcgtatgaaaaaggaaaatacaaaaaaaaaatttagttggtcattgtgtttttcagaattattccctgggcgggtttttggggaccgaatgaatataatcactggatttttcttctgccaattgttgcaaaaatctccaactaaatgtaaacatgag

SEQ ID NO: 33388 - DNA, 156 bp, Heterodera glycines
ggttgcatctaccgattcatcgacggcagtgatgacagcgccaacggcgatctcacccgcgtctttacccagcagataaccaccgcccggaccgcgcacgctggccaccaggccgttcttgcgcagacgggagaataattgttccagataagagag

SEQ ID NO: 33389 - DNA, 1624 bp, Heterodera glycines
  unsure (1)..(1624): unsure at all n locations
tcatattttntggcggatcaaagtgagcaattcatgacgctgtaattaaaaggtttagataaaatagattaatttttttcttggcattgtcgcaagatttcaaaatttaggtgcaattaacaacagaattagctcaaaattaatcaatttgagggattattagtgtaataaatagatgttgcgaccggaaatttttaagtcgcgatgaaaggaggcgttgggaagaaaaaatcctaattttttgtttttaaaaattatttatctcaatactaatttggcatacctaattttgttgctttttggataaaattttatgcgatttacacccctaaatttgtaagttattaataataactattttcccatttttagcacttatttttgggtgttttttagaacctaaaaccaattattttggcagtttttaaacattcataagtagagaaagctatcagcacttgtttttaacaatctatggccctgcttttagtaaacatcataaagtgcctatttttgggttttggcatgtaaaaatctatttcggctttttaacatctattttcgcaatttttgaagaaattcttaggaaaaaagcaataaaaaaatatttttactcaggcggcttggcctatcggcaccctcgaatcaccccgcccccctcccaaataacataaaattatttttaaaaattccccttaaatcgaaaaaattcctcattaaaaattgtgtttaattttgctgccaccgcccacgtgcaaaaaaaagttcaaacgccgtggaaaaattaaagtatttttggggatggtttttttgtatttttatcgccttttaacccatatttgagatatcttttaattttatttgataaattaaatttttttattttaaattattaatcataattaaatatccacacctgtacgagtgtcaatgtgctgatgagagtgataatttgaatgatttggtcagaatcaccggcacgggctttttgaattttttgattcaattcctgcgcaagtgtctcctttttagcagtgaaatcatctgggaatttaaagttattttttaatgcaaaaaatgatttttatatattttttttcaccggagtcactcgttggcgttgtgtattcaatgcgaattacaaagtcatcggcagtggctgcgtcaccaaacacggcacggaacaattgtgagggctgtcgcggcgcctaaaaagatagtaaaaattaaatgatttaaaatgtcttaaatcgtttcttctcacctttcctttcccttgctctcgaatgaaattaactttgacttcagtgaaatttgcatgtcccacattttccatctcgattatgtcgatctgtttgaaatttattagaaataattaattattttaattaattagtagttattaaaagcaattaaattattacgcgttgcgcgttgtacggaattgcgtccgggcgtcgttcactttcctccgccccgcagcgaaggtcaactccaattttggtatcatcgtccaatgtggccattccgctgatcagcacttggacatggttaacatgggcacctgagaaacacatgaaaaaaatattaataaaataaaataaattaaaatagaccccttgaa

SEQ ID NO: 33390 - DNA, 872 bp, Heterodera glycines
  unsure (1)..(872): unsure at all n locations
atgataggtttttgcaatttttagagaatttttttaataagatttacgaatttttgggccctgcgatgccgataggcagcgccaggcgaattttaaaattaaaaaaataaattaaaaaagaaaccatcaaactgaatcgaactcacgacagaaagtaatgtcaaggttgattcaccaaccactacaccacactacacatcaatggccaataataaaattaactttaattcataaaaaatttgtcaaaatggttaaaaaaatcaaaattgtataaattttttgccttttatccatgaatatgtcattcttaggggtgtattttcacccccgcgggggtgaaggtcgcgggggcgagggatggcgggggtcagagtcgcgggggcgggggtgaggccaaaaaacctgtcccgcccccggcgggggcgggggtgacgggggcggggtccgaaccctatttttaactcataccgtactttctctaattatatgccgggtattattatttttcaacctcctcagaaagggtgagaaattggagacggggagattaagaaggagaaattatttttcaacctatttctaaaaagcgagataattggagatgggtatattaatggagactggcatataattagagaaaatacggtaattaaaatataaatttagtattttaaatttaccttggatcttgaacctgttcaaaaatcagtttcaactcttttcccacgacttgttttttataatcgcttctaataacttatttgacccctatatggctttgtctaagctttcgattcgattgataccacttttgtcctgaaatctcttctacctttgcttgnntaaagttttttaaacaaaaacgcatgaaa

SEQ ID NO: 33391 - DNA, 1141 bp, Heterodera glycines
gaaaaagctatggtgcattaaagttgcaaaaaaaagcttatggtcgtgtgaaccgcaatagagtccaattttttgccatttttatacgtccgatttatttaccgaaattgagaggtttttcatcataaaatttaatttgatcactgatttgaattatgatcggtcggtcattcttaaataaatcatttcttcttctgttgaccactgtttttgctgggcccaccactcattcattgtcagaagacggcccctttgtgatgctttgtccagtttcttctgccggtgaaggagacaatggcctaaattaggcggaattttaattatttaaacaaaattaaatgcctttttttaattgctcacccaatgcaattagtgtaactattaagccaaatgaacacattgttacaactgttgccccaattttcatctttcttttgctgctgaatcgccgccgtctccccaataattttgcatcgtttcattatccatcggttgtcccatccctttgttttggccaatgtcagcttttcctttgtccattcgttcaccaattcaaatggcacaatttgcattgacggcacaggaacagaaaaattaaattggtaactgacggaagaaatggcattggcacggagaaaatgctaaacaatttgaaaacaaaaatcagtgatttgtcaaaaatgtggccactcacctccttgaaattgttgatccaatctaagttcggttgttctttaaagtctttgcaacgcaatcgctttggttggccatcgtttctcggagagtgcaaccatttggacaatgcttggccagcagaaattgttgaatttggcccatcaaaatcatcaccaaacgcagcaggaaaccgaccatataaattgattgaagtcaattggttgagatcagtgagaattgtcggcgtagtgcgacgaagcaaattgtccaaaccaacagaatcgtaaaagtccaaatggtgaatattttccgaaaaaattggccaaatttcgcgaacaaaaatatcccaaatccgctggccatccgtgttgtgtggtgatgtaatccacaagtctaaattggtgcctcttttgtcgaaaatttggtgatttgaacgaagaaaagcgatgacggagtgatcgatgta

SEQ ID NO: 33392 - DNA, 800 bp, Heterodera glycines
ttttcaaatcgtctgctcagtataatataactttttctttgacatttatttattttgataattaattttttaattatcgtcttgagttctaaattcgaaacatatgaaaaatttcctaaatttttgcattaatattttatttattaaatttaattcattctctcggctgtccttttcaaaaattaatctttgttctttttttttctctatgtatccgatggaaacaaaaatgtaaaagaaagtgaaaagaaaaggtcttctcttactctacatactcaaatttccttctcccacaaattcctgcaaaaatttttgcatttccctcacaaaaaaatttttcgattcattttttttactttatttttttcattttttgatttaatttaaatttttaacaaaattcgtattataattgattcttggaaaaatgcatatatttttaagccgggaagtgattggggatcttgtcgagattttcctgcgggatcttaaaatcccgatcccgaatgtttttgacagggatttcgggatttgaccacggtgtgtccaatcctggcctggttccccatcccgaatgcctgtcccggtccgactttttcaaaattatgcgctttatagtacattttttgattacatataagcctttatcctatccaaattaaaaaaaaaatctttttttcaatcaaatataaaaaatttccgctgttttcctgtggtggggcgggggccttggcttgttccatgtgaatcaccaccacccacagccagtcatcagccgtcccctctcgccatttttttcc

SEQ ID NO: 33393 - DNA, 659 bp, Heterodera glycines
  unsure (1)..(659): unsure at all n locations
aggtcacttctaattactgtctgttggatttttagctccccataatcccataaggggcccaaaaggagagnngaaaaaaaggagnaactctttttcgggggagagcccccgaaccgaagcgcccagaaaaaaggggagaccgaaacccaccggaagagcagccccacagacaggaccgcagacccgcgccggagcgaagcaccccacaacaggaggaggaccccaaacggacacaagaaaaaaacgacaagccagggagcggggcaggccccccgaaccgaagcgcccagaccgaaggggagaccgaaaccaaccggaaaagcaacccaaaagccaggacaagaaaacagcgggggaaaaaagcaccccacaaaagaaagagaaccccaaacggacacacgaaaaaaacggccaacgagacggcggggcagaccccccgaaccgaggcgcccagaaacatggggagaccgaaaccaccgggaacagcggccccacagacggaacagaagaacggcaggggaggactgcaccccacaagagagagagaaccccaaacggacacacgaaaaaagcgatttttttgttttcggggcagttccccccaaccgatgcaggcagatttatggggagaccgaatccttcgagaataacttccctat

SEQ ID NO: 33394 - DNA, 904 bp, Heterodera glycines
agattggatcgctgagaagatgggcactctttgggtggtcgacggctcgacgtcactcaatgaaatcgctgacgcggaaacgattggccgaatgcagcaacgcattgttcgacccgctgtgtccgcctacccataaatcacaactttttagccgtggcgaaattctctcatcccgttaatggtcggttctgcgattggtggcacctctgctggtgcttttgcatcgtcgtcctatgtgagcacactgtcacttttctcaattcgaattccctttttccttaaggatgtgtgtccgggtcaggccctgcctctccctccgtcccattcgcagcatttttcgtccgcgaatgcgcccgttcctccgcctccgtcgacccatcgtccgctgctgttgagcgacgattggaccgacgagttggacgacccgttgcgcaatgctgcgtcatgctccatggacatcagtcgcccttcgcgtcttcaaccgcaccattctgttgatgcgccgcctcccctgcagcaaaagacgaacaatgacgcttttttgtgtccacctccaacgcagtcgaacagcaaaatgttggtaaaccatcagcaaatggctgaagaacaacgccgtcagcagccgcagcagcaccaattgttgtcattccaagagggcgacacgacggcgaacaatcgcgagaatgtcgttttcggttaacccatttaactaattctctttttgtccaaattgtaatattcgaccgttcaggaaatctcgtcgcgttgaagttggagtccatccacgcccgcaatgcgaacgctgcgattcagctacagaaggcaatcatgggagctgtgcagcaattttgagctgaaggtgctcaattcgagccaatacaataacgagcacttttcggaactg

SEQ ID NO: 33395 - DNA, 436 bp, Heterodera glycines
cgtcggtgtctcctctcccacgcccattaatttctttcaaatttttggccataccaaacaaaccaacagcacaaaacacatagcatacttttatgtatatttctcattatatcttaataaataatggaccctgaattttcatttttaccgattttgggaaacggtcaactcaaagttactgtaattgtggattgccttagttttttccccgcctcctcagcccgtccttgtccgtcttattctgtctgctactgatctttttgtgcttgtttcttttcactctgattgtaataaaggtgttggttagtcccataaattgtccaagcggcgctttatcccccccccccccccggggtccaaaaacactcgacgaacgaaattgggtgaatatggcgcgtccgtcggccgtccacgcccaaatggtcgtccccccccc

SEQ ID NO: 33396 - DNA, 515 bp, Heterodera glycines
atttttggtgaaaagatctgccgagtggcagaattgacgccaattccaacggtatcgccaacaccgtaggaatgtttggcattttttttaatttctccgttattccgagccaagccatcactatcatacgcagaaatgctttcatacatcagccgtttgacggtgaatccgaagaaaatgtaactgaaaaacgaaaaattaattaaaaaagaatgacaattaataataattaacaataattttttaatatttctgatcattgaacattcaaaaaagcacttactttttcatatttttgaccgaaatttcgtaataaaaaatgttggacgagttattgtttaataaaatcgaatattcaccaaagacaaaacaccaaccttttgatgaggaaaaaaagattaggtcgtatatatattattcaaaataccacaatcatttttcttgtaatggacagtcaaatttttgtcgccactgatttcgagattctcatgacaatcattggcatcccaataatt

SEQ ID NO: 33397 - DNA, 1149 bp, Heterodera glycines
aaaaatttattcatctcccttttggatagaaaaagcatcagagtgcctaatctagcatgtaaatataatttggtgcgtttcagagcattttatgaaaaaaatatttatgaattaattatgcaaaaataaataataatttctaacagttagttcgtccataaataatttgtaattgatcaggggctcaccaaattctgcagggatacgtatcggaactctgcaaatgctttctaattttcctagatttcttaagcccggtgaaaattttttgcagacagcaccacttttgcacttaaaaaactttcaaaaatctttaaaaattcatagaaaatttaatttcataggtactactgctaaatcaacgcagagacgcctttccttgacctttttaggcccctgcaaaatctggtgcgcttctgatcactactcgaaaaatgagtgattgaattttcactaaaaagttaagcctaaactttttggcctgtttaaaaaggaattaaaaatttttaaaaatttattcatctccctttttgatagaaaaagcatcagagtgcctaaactaacatgtaaataaaatttggtgcgtttcagaaccctttctgaaaaaaatatttatgaattaattatgcaaaaaacaaataaataatgaactctcttccttaataattttcctgcaccgaaggtactcactcggccgcttcgcggcctcgtggtgggccttcccccccgcccttcagagcacgacaaatatttcaacaaaaattttgaaaaattgactagagcaatcgaacgctaacggacgacctaatggaaaaaaatccccgaaggagagaatttaattaaatccattccttcgggggaccgtgccgggtgccgcggggtaagcagtgctggttcgtttcatcacggcaccgaaccttttggctagtcagcaatcgttgcttaacttgccagatcggacgggtgcgcatgattccactgttccaagcaccccaccaaaagcaaaacgatataaccaaaatataaggaaaaatttttaaaaaaatttttctccatctccctttttgatagaaaaagcatcagagtgcctaaactaacatgtaaataaaaatgggtgcgctttagagcactttctgaaaaaatatttat

SEQ ID NO: 33398 - DNA, 1627 bp, Heterodera glycines
  unsure (1)..(1627): unsure at all n locations
tgctcacactttgcctttccgcctcaaattcgtccctccttcgctttgccgcaatgttttcgtcgtattccgtccgcttttgctcatttttcagaaattcgtacgcttcgtacacccgcaaaaacatcgcttgcgctttctccgcattgttcgggtttttgtccgggtgccatcggagtgcttgctttttatatgctttgtcaatttggccgggctcacagccgtgctcaagttgaagcactttgtatgggtcgaagtcgattttcttgctgctctttgccatgaaaatgtggagaaaaatcagagaataaatgctaaaaatttggatttgcaaaatgagtttttccttttttaatttattttgaatacctaaatgttttaattggataaatgtttttcttaattaggcaattaaaaaaagagattgcttttcacttttcattcgttcattggacagaaaagtcgcgcattaattcaatccctaaatccgttgaactatttaactgactttgttctttgactttactatttttgcatttgattttacctaattttggcctcccctttccttcctttttcgcaaattttctcggcaagtcaatcaaacaaataaagaaataatcctcacattaatcaattctttcattctttgcatcccaatcgttcacacccattacattgcattaccattaccattattcattttcattcattcattcatttcccactaattcagctgatgggtggggggagggacagagaaaacagaaagacgacgagggaagaaacactgactaaactgacgtgtccgtgctccccatatttgattttggattggatgtgtatcatgtgaaggaagggaagggaaaagcaattgccaacccacccaaaaatgttcaccgatgcattcccattccatcactttacaatttttacaattcatttcgttcgtcactttacaaatttccattttcatttaggaaaaagataaaattaaaccaaagaaaagtcgtcaaaatgtccgatccttgcgagtgcgtctttaaccatgaggtggcgccgccttctcttgcacttcgtttttcaattcttttttcccttggcaggccatcatgcgccgcattttgtccattttgcaggaggcccaaaccgattgcactgacacagtgagtaaagggagaaacttttcgacggcatttactcatttttcaggagtgttccacgagcactggcggcgaccccacgggcactgccgggtccaacgttctgctgattgccatggcctggggactgtttgccatgtaattccattttatttgtcatttccagggttcctctcattttatatgttcttccattttaaattcattttcgttttaggcttatgtttttcatgcggcctgcttcgatgcgttccggcggaaacgatcgcgaaaatggccaaatcgcgggcaaaccgtcgtcagcagcgaacggacacaacaacgatgtgagagtggaactagtaactttgattttggaccggaaatattagggaatggcaaatcggctgttagattcgtgaccggcggtcttgaaatggntctaataatttagttctagtaaatttttttaatttaccgaaatt

SEQ ID NO: 33399 - DNA, 930 bp, Heterodera glycines
  unsure (1)..(930): unsure at all n locations
atgtggcggagctgtcgttgcgcaacgtcgtccgtgtggtgggcctggccgacccggtcacacccgtcagcgccattctgcgccgatgctccgtcaaaacggtaaaaatttatttgcaggaactgccggactaccattttattatattttttttttaaatgactcaaaaatatgtcatttttgtacgggcctagggggggggctaggggtattgaaaaattttcgatgcgcaaaaatggtgattttttcccttaaatttttaattttttttcacaaattatgcgcaattgaagaagttttttttttgattttagcacatttgttgactgattttggcctaaaaagactaaaatttggtggtttggtcatttttgaaataaaaaatctgatgggtaaaacaaattttttcttggtacctctgtttttacaaaaatttatcccccattctcagctgatgctccactatggaattgccgaatttggtgattgtgaccaatttcttgcgcatttgtcgcgtcgttttggtcgactgaaaaagggcggacggccggaccacaacgcggctgcacggcaggtgttttttttgataaatagtatcaaaaatataaattttcttaattcaaaattttacaaaaaaaacgaaaaatttaatttttacttttccccctaatttagttttaaagtgcatttattttgtccatcatattttgttggttttaacaacaaatgtataaaaaatggccatgccatggtttagaattgtctagttttcgaaaattttgaaaaaaaatcaaaaatattccccaccccctcccctctttanatttcagtgtttacgattttattatttttttaattaatcaaataataattgcccattttngtagggtgttgacggactggaacagtgncaaattgcgctattacacg

SEQ ID NO: 33400 - DNA, 949 bp, Heterodera glycines
acttggcgcaatgtcgcaatacttaatgattagggctgttaatggattaaattttcactccatatttggccatttattgtatgtaaatattcgagataatgaagtcagtttatccaagaagaaccccccataaatccttgaaaataacattctgaatgtatcttatcacttatcatcacccattgacagtgcatgcgttcacggcttcttcttcagcttaagctttgcctcctcacatgggtcgggcaccggctctaattcctccgggtgctttttcacaaattcgtcatgggttttgtgcttgtacagccaaatactgatgcccaattttttttctatcacgcgaagtggtgatgcggcccgcttcttttcctttttgttggcccaatgccataaatcagtggccaacctcttagccgtccatacaaattttggcatattttcgcgctcattattttctttctcaaaaattttggctgctttacacatcactgccatgtctgtgcataattatgcgtctttattttggaataatcggttcctcataaacagggaacggatttatatgtttttagatattttttgcgcatgtgctatcgcatgagaagctcaaaacatattttggggttttggtagtctttagcacatattttggagattttttggaaaatattggaattttttgacaaaatcttatttggcactcaaattcttggccaaatgctcaaaattaatttatttgtattttttttgaccttttcttgacttttttcataaggcaaaacatttgaattttcgcgaactatttcagaaaaataagtcaatcttagagagctaaaaaaagtttaaaccaaaaagcattgaaatgattttgcttgcatttaagctagcgaattgataaaaatgagattttttaaaaaattaactaggattttgaccagttttttca

SEQ ID NO: 33401 - DNA, 697 bp, Heterodera glycines
aaaaaatttttgagaaattttcagcgattttttggaaatttttttgtagtaattcaccataaaatttctcaaaataattttttttcttagaattttcctatgaaaaaactttctaagatttttttctgaaaaatttctaagttagcaaattttttaaaaaaaaatttctcgggggggggggaggggctcccttcggtgaggaaaccaactgatccctaaaaaatagacgataaaatattataaattatacactaatttacaagtgaaagatgtctagtttgtgtgaatacatgtatttccagggttctccccttcctaagaattaggaaaaggactgtctttttggtgcatgcaatctttagcctggactaggtaggatactatcttgatacatctttggggataatatacatatgtggtacatattttggactttttcggactttttcatacattttttacatattttgtggattttttacagaaattttcggaaattctcaaaaaaaaaatcaaaatttcggcaaatttttcgtacataatttcaaatttttattgcatattttgaggttttttgaaaatttataaaatttcttgtgaaaaataaaaattaaccaaactaatttttaacaatactaaaatgtgattcctaggcttatttaggactttcttacggtcattcgcgcccatttcaccc

SEQ ID NO: 33402 - DNA, 789 bp, Heterodera glycines
  unsure (1)..(789): unsure at all n locations
tccccccattaattcctgtggtagaaaatgcaaaaaaacattttttaaaaacttcaggcgaatctcaaggagcttacgcagctgttttccgcatttggtgaactcaacttcatccgattaccaaaaaaggtaaattcagcaaaataaaagggaaggcaaaagtgggaatttttggtttcggagaattattatgtgcctttttggactgtggcacaattggctagaaaccaaatattttggaatatccaaggcatacatttggatatttttaaatctaaatattttacaatattaattttcttctggccctcccccattcaatcctttttttattcagcctggctccgaaggcncaccgcggcttttgtttcgccgaatttctctccgtgagcgacgcgcaccgcgccatggacgcgctggtgcttccacgcattttacggnncgacgggtggtgtgtgggagtgggccaaaccgagcgaagaaagcgcggaggagaagcgacagcgaacgcaggacagaatggcaatggccgcgggcgttgccggggcgaagaaaaggccgaagatgcgatcattttagagccagtttcaagaattggcactttttaaccgttaattacattaaaatggtccgtccatcttgcgaaaaaatgttgttactgttatcttttggtcatttgtttttataacaatttacacacaaaaagagatcatcaccaatttattacaatcaaaaactggcttattcaatggtacacacatgattttcacacaaaaatgcattatttca

SEQ ID NO: 33403 - DNA, 753 bp, Heterodera glycines
ctcctcttcgtcttcctcctttttcttctcctcttcgcctccctcctttttcttctcctcttcgtcttcctcttcctccttttccttcttccttctcctcttcgtcctctcgtcgtccttttccttcttctcttcatcgtcctcatttcaactccttttctccattctattcttctttgtctacctttttctcccacccactcttcacttccttcttcccattcttctttttctctgtcttcctcctccttatccttctctctttctctctctctttcttatgttcctttttttctctcttctcctccttttttcttgatttttcttcttgcttcttccttttcccccaattaaatgaatgtcatcgctctgtccgtcctgcgcattttgaccgccatttcgccttgcggcgattgtccaatcgatcagtcgaccgattgaaaaatgaagcgttggctgatcaattcaaagccaaatcacatttttattttcttagcattttcaaatttcgactgatttattcagaaaaacttttgcgtgacaaacactcaaaaaaaagggccaaaagagaaaaagtgaggggagagaaggaaaaggagagcaaatgatgagagaattgcaaaaggaaggcaataaaggagaaatgagcaaaataaattattaaaaataataaaaaaaaatatatatatgaaaggcccgggggaatttaatggcaattgaaaagacgcgaaaaaacaaaactaaaatattcta

SEQ ID NO: 33404 - DNA, 1135 bp, Heterodera glycines
gcaggtaaaaatcagtcatctcttcagtgagcggtttagccattcctcgtatttgcattgttgaccaagcattgctcgagcaaaagtgccgtaaatttggttgagcgatgtacgtccagggtagtcaacgtaaatgactggcacatggcgaagaaaacgtgcagacaatgggtttctgcccggatcagttggtggattgcatgccccgacgaattggatacgctcaagtgtcacccaagtgcggtcgatcgtgcggtagaaggccgggaacagctcggccgccatgcgttgaaggcgtacaatttgttcagcctatttcagaaattgagtccaagtttggtcaaattaacacttgttttggtattaattgagtatgtacacctctatatcccatttttggtaaaaaaaaattcaatttttttcgtttttttttcaaaatcacttggaggttaatggaaaggcgtcaaaattttgctcttaactaaattattcaggcgccccccaacgatggaattgatcaaaaggatcggacattttttttcatttatggtacaaaaactgaaaaattttacccaaaaaacccaatttgtacccttgtttttccatttaaaacctgaatgaacaaaagtgagtcgacgtcgtcctggccaagtccggtgcccaggcgaagaacgcccttcggctgggcagagcccagacggctggcctgcccgccggccaacacaacggccgccacgcgaccttccgcaatggctttcaagccttaattacgaaaaatttagtgtaaataaacatctatttgcgattttacattcatttggattcattcgaaccaaaaaccgaaaatgaacaagcacaaaattaacatttatgcaccaaaaaaacgtaaattttcgtgcaattaccaaaaaaataattttttttttttctgaaaaaggagaccctcaccaccgagtggtattacatatctttgtttgttttgttttttaccgatttgttccaagcgctctttctctgcctcgccgagatgagctgtgttaacgcagcgttcatccgggattggccggatgtcggtgcttggcaatttgggctccaatgctcgcttgaataccttattcaaattagaaaagtcaaa

SEQ ID NO: 33405 - DNA, 883 bp, Heterodera glycines
  unsure (1)..(883): unsure at all n locations
ggtcaatgaagaggaagaagaaaacattttcggaagaacttgccattaatgatgagaaaataagcagaccgagtgggggaagacggtacagacaaatgttggagttggtatcagcagcggaagagggagaggaggagtaaaaaggaaacaaacaataatgggagagagagagagagaggcattgataagaaagagagaaagacggattaaaggggcgagaagaaaagacattgatggaatccaattggccgtgcattaattaatgattttattgctattaagcggctgtaaaatcaaatgcctacatattctaactgttttacgcttacacaaacaaacaataggacggcattcaaatcactttcggcaaaaatttttacctattcgttttttggtttgagacctaaaatcgaactcaacaataaattaggtattagattttttggtcggttcctgtacgggacagggattttcaaatgataaaaaaaaattaaatattgaatatttaaaaatttcaccgatgttgattgagtcaaggtcgcatttatgtatgtatcaggggtgggacaactctcgcctctcgtctctcgcctctcgccaactctcgccatttttggtactctcgcctctcgtctctcgcctctcgttttttgggacgagaggcgagagttgaaaatacacccctaaagattgaacttttgagcagccagaaaaattttcaaatttacgcgaaaaaaaaatcttaaatctctttctttccttccttaatgttttctctatttttggatagctccaattcaaatatggtctgctggctaaaccttctgcctttcattatttttctcttgnngttcattccccacggtacagaatttttttaata

SEQ ID NO: 33406 - DNA, 737 bp, Heterodera glycines
tttgaaacaaatgacaaaaaattgccaaaaaaattttcatttttatttttattcgaactcgaagtaaaaggtaaaaactagggttcggaccccgcccccgtcacccccgcccccgccgggggcgggacaggttttttggcttcacccccgtccccgcccccgtgactctgacccccgccatcccccgcccccgcgaccttcacccccgcgggggtgaaaatacacccctaagaatgacatattcatggataaaaggcaaaaaatttatacaattttgatttttttaaccattttgacaaattttttatgaattaaagttaattttattattggtcattgatgtgtagtgtggtgtagtggttagtgaatcaaccttgacattacttactgtcgtgagttcgattcaggttgacggtttcttttttaatttattttttttaattttaaaattcgcctggcgctgcctatcggcatcgcagggcccaaaaattcgtaaattttattaaaaaattctctaaaaattgcaaaaacctatcattttttggacaaaatctattaacggatccatcagttttcaaaaatttttcccggcggcgcctatcggcaccgccattttattgtttttcaaaaaagttatgaacaaaaatcgtaaaaaaaaattcgtacatgactttttttcaatcttcatcaaattttttgaaattttgcctgtatacagagaatctttagggctatcg

SEQ ID NO: 33407 - DNA, 1029 bp, Heterodera glycines
  unsure (1)..(1029): unsure at all n locations
gagatagccattttgtgaggcccgaaggaaaaatttgagagggctaatttatatgtaatattcgaaagtgccaagctaattagcgatcagggcgcacattggggcctgaattaagccattttccctttgatcggtacaaaattggccgaaaaagagatagccattttctgaggcccgaaggaaaatttgagagggctaatttatatgtaatattcgaaagtgccaagctaattagcgattcaggcgcacattggggcctgaattaagccattttccctttgatcggtactaaattggccgaaaaagagatagccattttctgaggcccgaaggaaaatttgagagggctaatttatatgtaatattcgaaagtgccaagctaattagcgattcaggcgcacattggggcctgaattaagccattttccctttgatcggtacaaaattggccgaaaaagagatagccattttctgaggcccgaaggaaaatttgagagggctaatttatatgtaatattcgaaagtgccaagctaattagcgattcaggcgcacattggggcctgaattaagccattttccctttgatcggtacaaaattggccgaaaaagagatagccattttctgaggcccgaaggaaaatttgagagggctaatttatatgtaatattcgaaagtgccaagctaattagcgattcaggcgcacattggggcctgaattaagccattttccctttgatcggtacaaaattggccgaaaaagagatagccattttctgaggcccgaaggaaaatttgagagggctaatttatatgtaatattcgaaagtgccaagctaattagcgattcaggcgcacattggggcctgaattaagccattttccctttgatcggtacaaaattggccgaaaaagagatagccattttctgaggcccgaagganaatttgagagggctaatttatatgtaatattcgaaagtgccaagctaataangcgattcaggcgcacattggggcctgaattaagc

SEQ ID NO: 33408 - DNA, 898 bp, Heterodera glycines
ttgaaattttttgaaatgctattaatacattgaataaaataccggttttcatctatcagaaccacctgataattaaattaatagtttattttttattgaaatttttcgaaactcatacccaaaaacaccaaaaaaatgtttatattatttaaaaataatgaattaaaaaaataagaaataaatatttatgcaatatgttttaatttaaaagttgttttattgaattaaattaaaaatgatttgaaaaatagcttaaaaagtaaaaaatatatatttaacgtcgtaaattttttgtttataacttggtaaaaagaaaacatggttttaattcttggttcattccgtagcctaatgttcagtattcaataataaataaatatgacaactttaaaattcaaaaccttaataaatatccacataacataatgaaatcactaaactaatcaaaaaccaaaacaacaaaacttaaatatggaagcttgagcaaatttaaaaataccatgaactggtgagcaagcgtattaaaatatcttaaattcgaaaatctaatgaatttttgatttattttaataaagaattattaaaaggaaaagtgaattggaaacatattctattttgtaataaaaaaaatttttaatagaaaattaaatagagagtatatttattattataatcagaaaaatattaatttagaggtattaattttaaaaaatatagaaaacgcaaaagatcatataacaaaatttaataaattttaaattaaataaacagtaatatttaacaggagattaaaatagaatggaaatgtggcaaatgaaacctactcaaaaaggagaataaaaaatatatatataaatgaggtaaaaatatttttaatatttataatttaatataaata

SEQ ID NO: 33409 - DNA, 898 bp, Heterodera glycines
cgttggcttaacattggccttttggcgcaaatggactttgcggaaggaattatgggatgaatagggccacaaatgcaaaagtggcagcaaagaaagctaagcaaaagaacaagcagcacccaatccaacccaacccatgccatcctattccatgccatgccaattccaccccccccccccggggggtttgcttaatcagcggttgccgttccacttcaatttcctttctttccccgcatggattggcacaacaaagggcatttttggcattttgttggggagtgtgcgcaaagtgtgaaaatgaattaaaagttggcccaattggaatggaccaatgattgggtgaataatgaatgaatggaatgtgccgttggcttttgcttccccggcttttctcaccttctctgacaatgctctgcttctcttcctcgctctcttcctcctcttcgctatttcgtcgtttcgccgttctgctgcaatgcatcgcctgtccgttcgtcgtccgtccataatttgccgaataaattgaaagtcttcggccggttttacagcccaactgcgcgtgttggccctcgcagaagttttggtcttcgaagttttcttaaatcattaaaatcacttaaaattaattgaaatgagaaaaaaactcaaattaaaatggtaattaaaaaagattggaattaatttaatttgaaaaaataattaaaaataactttttaataattagaagccataatgaacgacaattaaaaaaatatatcccagcacatgacacccaaaattcatcctataccaggcgagcatttgtagccaatctgaaggtatttgcttgtgcccgggcacggatcgcggtcgccgaagaattcggggcggaaccaaagtcggcactttcttttgc

SEQ ID NO: 33410 - DNA, 1204 bp, Heterodera glycines
  unsure (1)..(1204): unsure at all n locations
aaaaagcaagtgagggtcggtacagtcgcaagagggcaacagtttggcgccgtctaataaaatgctaattaattaaatcaatttctactgtttttgggcgattgaaattgttggcaccattacactagcatcaaatatgaaataaaatttcgttttaaatacgcaatgattttttgtccgtaaatatgcgtaagtgtatatggtatggcacctggtgtacataaaaaaaatttcattcaaaaaattacaacattttttgcgggacgagatttttatacactttttagggggaggggggggggggggtttattgctcaaatcacaaaatttttgggtcatttttttgatgaaaatataatcaaactctaattttcaaaaatttttcccggcagccgccatgttctccaacttttttgtagaaaagcgcgtcgcatgggcgctctgtgttgttgatattcactcaccagtctcataggtcagtgcaaataattccgtttcaacagtggtgttgattcgggcggaaatgattatgtccacgtccgcttcctctgcctcgatccaattgcgcgaaatatttccctcaaggatgtcactggcacagcaaagcagggcacctgaaattggcaacgaacacttgcgcagttgaacacgctgctgcggctgctgtgcctgtctggcatatggtggtcctagtttttttcaatgtgccaggcgtagcccgatttttaaagccctggataccggctcccctacatttttgggcttggaattccttccgactcggtattccgtgctcctaaaatgcctcgaaattcgcagtgccattcctttcctgctgaactatacagactagagatgagcgggaagaatttttttggataaaccgggattttgggaccgtgacccccgggttttcgagagggacccagattaacctgggaatttttccttgagaaattttttgaaaaattttaattttttaaaatattaaatgccaattttttaacaaattaaccaattccgggatcggtcttcgctcgactctaattttttacaattaatttttcattctgacgagctctaattcccggtccggtcccactcggctctaatgcattcattcccanccatacacattgcttattaatatttcagcaatattntctacactaataaatgtcgttggcacgtccgaatgaattac

SEQ ID NO: 33411 - DNA, 515 bp, Heterodera glycines
ttggtagaaatttatgaatgtcaattccaataatgaattgttggcaattagctaattgatttgatgtttaggcaaatgttgctctcaacagaagtgttcaggtcgtccgaattgtggctgagtcgccatttactaccgtacagcatttgactgtactcggaaattgtaagttttaagaacggaaattcccgcgttttcatttccaccagacttaatttcatttaatttacaatataatgctcaaattctttccctttttttgctttactcctttcgaagttcggattttggtggctccttcttgatttttagactgttttttgtggagttttatgaagtattaaccggtcatttggttttaaaatatttttggtcacagtttttcgagtaccatcgaatttttgaaatttttgcagatcaatcgagaaatcgaaaattatcgagcgaattcaagctaaacttaaataatttaaattatgccttgcaaaataactccatgtttagtccttcgtgaa

SEQ ID NO: 33412 - DNA, 644 bp, Heterodera glycines
tttgcagtatggtcgcattgctcaaacattggtggtcggcttctctgccgggctaagcgatcacaatgtccgcacaatgcacttgcccaactacacaacggcggacatccaacaggcatgctggaacttcatgcgcccattcaatcgtgagaaggacggccattcgtggtacgggtacaggtcgaacaacaggaggagggggcggggtgaagacgacaagggcagtcctacgaacacgtaccaggcttcgtaagaaaagaaaaaaattttctggacgactggaaatccgcgaatattaaattttttttttttttttgcttggcccactcggaaaaaatttatggggtctctggcacccctagcaaaattttgggcaatttttttttaattgcaataattgaaaaaaaaacaacaaatgcgtcaggtatccgcatgtcagttgcatttacatgtccgcgagtcgttttgaacttgttgatcgccggctgcccaccagacgcatcaccgaattcttccacaaaaaagccttgggtgttgaatgtgatggccaacaacaatgttcaggttggttttggcaaaattagtacaattaaaaacaaataataaatacctaatcataataaaatgaacgctttcaacagttc

SEQ ID NO: 33413 - DNA, 957 bp, Heterodera glycines
  unsure (1)..(957): unsure at all n locations
ccccnctttggtcccgaatcccaaaatcacttttatttttgtaacatctctcaaaaaagtgataaaaagatgaaataaaatttatataatagagcaaaaaattgcggatttttttagtattttactcttccctaatgacttttctgaaccgagataaaaatttttttctgaaaaatcgaaaatttccagaaattctggaataactttttttctttagaagataaaaaccccaaataaaacccataaaattctcctgatttttctccatttttaatgctttatttaatcaaaattggtcaaaccttaggccagatatgaattttcaaattttaacccaaatttccaaggaccaaaaaaattaaaaatatttttgaatttttaaaaaattccaaaaaatctgaaacttaaaataaacatcatatttgtgctcaggaccctaatttaccccagaaaaatatttttcacaccctttttcgaccccaaaaaaatttttgaaaatttctagggggcctagctcgaaaatttttgaaaatttctgaaaatgaagtaaaccgttcgatagagcttaaaaagctctacaattttgctcttaggcattttttgtctaaaaccgacccctgacgagttatgggcccaggactcaaatgtcccgctcaggccaaaaattttttctatttcctggaaaaaatcgaaattttttcaaaaatatcaccaatcgatagagctcgaaaaacggttgcttgaaagtggtctccgtttttctgggaaaattcgttaaaaaatcctaaaattcaaaaacccgaaaaccgttttttaggcctagctcgaaaattttcaaattttcgaattttaaaattggaaaatcgagctttcgagctctacatagtgccgctggccccctgcgctcggtcaagcctatgagtattcacgggactgactgggacaagtgtactgatt

SEQ ID NO: 33414 - DNA, 1571 bp, Heterodera glycines
  unsure (1)..(1571): unsure at all n locations
gatntaagacacactntaactaaacattgctgaatctcatataaaaaaggggattttaatntaattcgaaattaaaacaatcaaacattttcgagtaaaataaataattgagggtttatcaaacagttaataaagtatttaaaaaatcgtgcaaaacaaagcttatttttagtagagtgataatttttttaataaccttgtaaaattgtatgtcatacatccaaaatttctagcataaatacatgataaactgacaaatattaatctcttcaaaaatattctttttttttcggaataatttattttttatgttaaattaaggttatgtttcaaagttttttttttaataagaagtaaatatatataagttcatattaattgtgtgttttcaagaatttttctttatatgaaactttcatattttcttcaatatttaggatttctttttatattttgaaaaatctaaaatatgagttgaatctgttttttcaaatataaaattttcaaataaaaatataaattgtttatagaatagtaatttataagtttttgatatttttttttattctgaatttgacaagaaagaaacattaaaattaaaatatttaattaaagaaatcaataatgattatttaatgctcccaaaagaaatagagaccatagcgaattcatgaaaaaatttattctaaaataaatatctatagcatatttcaaatcatttaaaaactataatgataattaaagtttaaaaaaaggtaaattttataaaaaaagaacaagaaattaattatataatattaaaataattgcctaccatgtcaaccaaatatactaaatatttaattgtaccatagtgacctatatgataaaataatttataaacactgaattgtttatttcatccattaattttattcatttatatcatttaaacttttaatattattgaaaaataaaaaattactaattatattattagaaacgactttaaaattatttttttcagaaatatctccagtgatgcagaatttattacattttaaataatcaagcataaaatgtgctgtgctccgacagttgcatgaacactgcagagaacaagggaatattaatgacaagggaatattaatgaaaattaatataaaaacataaacattttaagactaagaaataataaaaaacactcttacaaatattatgaacaatttactgaagctttatgctaaattctgaaaaaaaactaaataaaataacaattaaaatgtaaattacataaaatagaaaggaataaaaagaaataaccaaaaagttgaaattacaaaatataatagtttgcattttaatatttaaattttatcaaaaatcaaagcttgacttaattcaatattacatagtttagtaaaaattttatatagtcaaaataaaaagattaattttcaaacagttttatttataaatttataaaaaaaaaataaaatgtttagtattaattattttattttattttattanattaataaatataatatattattgaaactgaaaatgaatgaattattaaaaaatctttt

SEQ ID NO: 33415 - DNA, 933 bp, Heterodera glycines
  unsure (1)..(933): unsure at all n locations
gtctgccgcttctccattttttccccgaatttttcgagctttccatcaatgttgttcccttgtctgttgaaaaaaaagagaagacccatgaagatcgtcacaagtacagagcctgcaaggcctgcgttgaacgcaaaaactttaagtccgaatccctgcagttgtccgttaattgcttccctggacactttttcaattgaattgtatctgtcgtcggcagattgtttgatgttgttagtaattttttcagctgcctcaaaacggatatcattgctgtttttgatgtcatcgagctgcagacaaaaagaacatggtaaataataaagtcatgtttttcgtttactttgcttagcacagtgtctctgaatgaacgcaattcgatctgatcgtcagtcgaagtagagactaaatattacaacataaggacaactcactagccaaagcaataataataaactttcgctattaaaaaattatcgaaaaatcattttatttggagcttcagttaaattttctgcttacaagttcgaatggaatgcaattgcatggcagacgatgagccacaaaacatcgtctgaacgtccgaaaaaagtgatgtgaatcatatcactaaatttccatcccaccttgagaatgatgtccttgcttgctttccatccggaaagacgccccgtcagtttgactccgatgacatttgggcacttcaattcccaaggaaaatcagccatcacatcgaccgcatcagcaccaccgacaccaatgcaaattccgcccgatcctcctaaaaaatgtttgtcctatttcaaataaacttttttnaagtgacgaacctccgtttggcgtgtgcgagtccgtgccaattagcaacagtccgngaaaaagcgtagtgttcccagatgacttggtagataatgcgggcgccgggtggccaaa

SEQ ID NO: 33416 - DNA, 650 bp, Heterodera glycines
ttcataaaataaaatattaaaaattgtccttaattaataattgaaatatctttagaaacctcaattattaacatttatgaaagttagtccgtttttcacgaattttatgccttttttaaataatattttttgttattttatattctatttaacaaaataatggaattgtgaacaatttttatttaaaaaaagagtaaattattttgatcagggctatttaaattaagcaaatgttatgtggactcataacaatatcgttgcctgccgttaaataaaaatttttccatttattgaactttgaattttttgggaagtgccgcaagaataatcatagaattgaaaaatccaaagcaaattatttttttactaaatttatttcgtttaaatcttttattacttatttttatttacttgtcgttccccataaaaaatacgttgttttttaggacgaatattttttattttgttacatttttatttaattttttgctttaaattgtctattatattcaaatacgggttcttttcggttttgtgacccccttgaaattttcaaataaaaagtcatttctagggtaatttgtgacgttgataacaaatataacattaatttgcagaattccgaatccctatcctgaattcaagcaaaa

SEQ ID NO: 33417 - DNA, 884 bp, Heterodera glycines
atttgttggtgatccgcacggaaatcaacaaattgtttggaaatttagaaggaatgtggaacggaattttggccgatttgaaaattttcctcggactcgcacgaggcggtaatccaaacgtgaatgctggaggaacaagaatggaacaaattcaagacctggacagagaaagaatcagtacgaggaacggaatttcatgccaattcccgaaccaaatatgagacaaaatgatggacaaaaccaaaatttggttcaccaacaagtgcagggccaaaattttcaacaaaacatggcaagagtgatgccatacaccgagggaattcctgatattatccttgaacttcacaaagtcacactttcaaatcagtacgcaaatatccttagagaaattcctactctttttggcactgaaggaagggacgatgtcagcgatgatttcaacactcttgcatcgtgaatcaggcagatagcagacgaagaccaacaaggtgaaaattgagagcggatcgatgattggggtggagtgcgattttgagccgatgtcataatatctatatattctttccctctcccctcttttagctggtctgacccaaatgcaacagaatctgcaaaaggactccaaattctctgttcaaatggtgccggttccgcaacagcaaatgatgacgatgggcggcggcgccatggatggaccggcgcggacgtattttacatcgcgaaatccaacatcgattgcggtaccaggtcccgcccagagcaaggcgtccgattgtgatgagaagggcaccggaaattttggaaacatcccacccctcgacgggtttatgactcgggagatccggaaatttcgtcacgaaacatgcgaaacgatgtgaatttct

SEQ ID NO: 33418 - DNA, 918 bp, Heterodera glycines
caatcggctagtgctttaaggttttgtgttttgactttgcttttttttccatttattccaatcgaccacgttaattcattctctatacatttagtgtcttatttcatgaaattatattaatttaattttaaataaagaggcaaatttttacagaaaataaatagacgctgactaattagctaacatttataaagaaagtagaaatttgattaaatgcatatacaatatacaaaatattacttttttaaatttgtataaagttcctattttgtctttgactttgcttttttttccatttatttcaatcggctagtgctttaaggttttgtctttgactttgcttttttttccatttatttcaatcggctagtgctttaaggttttgtctttgactttgcttttttgtccatttatttcaatcggctagtgctttaaggttttgtgttttgactttgcttttttttccatttatttcaatcggctagtgctttaaggttttgtctttgactttgcttcggctagtgctttaaggttttgtctttgactttgcttttttttccatttatttcaatcggctagtgctttaaggttttgtctttgactttgcttcggctagtgctttaaggttttgtctttgactttgctttttttccatttatttcaatcggctagtgctttaaggttttgtctttgactttgcttttttgtccatttatttcaatcggctagtgctttaaggttttgtctttgactttgcttttttttccatttatttcaatcggctagtgctttaaggttttgtgttttgactttgcttttttttccatttattccaatcgaccacgttaattcattctctatacatttagtgtcttatttcatgaaattatattaatttaattttaaataaagaggcaa

SEQ ID NO: 33419 - DNA, 733 bp, Heterodera glycines
ttcaattatttaaaaaattaattccctcccaaatttctcttcgtcagcaatttgtaccgctccaattcgttgctgttgcggcgcaatgcgttgatgcattatttgaacgaaatttcggcaagtgtggccacagtggaagtgttcagcctgtccctgttctccattatcaccatccgatttgattatgcgcgtcagtaattaaattatgcatttattattattatttttatacggattaaagtgtcagtaagtcacagctttaaatcccggcttttccggtcctagtgaatttcggtcttcccaattcatacgacattttaccaaaacttttcctgcttcaactaactaaagggctttttcaatttaataaattatattttattttcagatttttacaatgcaatgtttggcactttcattctctccgccaccttttacatgtttctgcgctcaatgctcactttcagtgccgacgaattggaggcgatttttatgagcaaattttattagatttttacattttatataaattttcagcccattgaacagctcaccggtgctgtgcgcctggtctgctgcattttgttcacctggacagcgtcacaacttttccaaattcatcagcggttcatctatcacacgggatgccatggatacggtaggcactacaaaaaaacattagaaaaagaatattttgttacgttaggtgcggaaaaattgaaattgtattatt

SEQ ID NO: 33420 - DNA, 922 bp, Heterodera glycines
  unsure (1)..(922): unsure at all n locations
cgagttgtccaccttgatttccatctcaccgccagcgccgtcaattctcgccttggactaaaaaataattaaaaatgtttaaaatttaattttattatttatataaatcgaaagcagagacccgcgtgggattttgcgggctcacagtcctcaatcccatattattttttgcaaattgctggatgggtggggtaaaaacggttgaatttcaatttgatcctccaaccaaaatctaacagattatatcaggcccctggtaaatccgtccatttctaattcaaaatttgtgttcataccgccttggccaattgccattgtccattcgggtcgcgctggaaggtgttcagttgccaatccgcggtcccacaattgttgcctttcagctaagaaataaattacgataattggtggtaattaattaaaaataaatctaggtaattattgggcaatatttagacggtaatttaaaaaaaattaatcccatttttacaatgacgcgcgaagttcccggaccttcgaagatcaactgctccacctgttgtccatggggtaccttaaaggagtataaaaattcaaaaaattattttgaaaatcctgggacctcaattttgaacaggaatggcgttttcgtctccgaaattacattggccagaatttcacagtaggtcatgggaggcggcggcggttgtgccgcttgggggcgccacctgctcaaatggggccaacaaagggaagaggaacaggggaaaaacagtcgtggcaattagtaatagcatttgaaattctaattaaatttaaaatttctaattaaaaatatatttttanaaattctaattccttaaataataattttttaaaggctatgtgcaagtttaaaaaaaagtgagttcacactctgttttatttanacaagggaagaaca

SEQ ID NO: 33421 - DNA, 902 bp, Heterodera glycines
  unsure (1)..(902): unsure at all n locations
ctgaatttgtctcctccaatttcagccgtcgttggatggactggtaacatttgttgttcagccgttcctcgtcaatgccgtgcagttcaaagtcggaataaattttctgaaaatttatttttggaaattttgggttggttgaattttaagaatttttaatttccaaatttttgaaaaatgggtagagtgtgaaaaaaagctaaaaaatttacccttttcaaaaattttttaaattttcatgaaaaaataaatttcgcgtcgctttttcaaattgatttgatttctttaaatgtttttatttttcacctttacaatgagcaataaactggtgagttgcgtgttggaaagtgattgttgaagcctttcctgcaggaagaaaataaacaattaaatttaattggtcaaaataatttttgatttattaccgtaagccattcgttcagcatttgcgtttgcccatcataccattcctaattaaaatttaaattgattaataatttttaaacgatttgataaaattgaattattattaattgttattgctctggtcttggtaatttgcataaaatccgaaaatactattctgatcaaaaagtgcacactaatctgttcaggatcacagttcattctattcactgttcccaattaaatgaatccactgatcatttggtcgtaatactccgatctttctagtcagatatgaaaaaaaaaatccaaatcatggccttgtccttgaaattttcctaggactctcggaaatcaccacaaattgtaccagttcaagctctcttgaataccatgngtctccttgaaattggttgcccctttcacctgtagaaaaggaattcttanatactctgggaatccgctaataatccgtccnttggatttgcctaatatta

SEQ ID NO: 33422 - DNA, 1536 bp, Heterodera glycines
cgcgggactgagtcggtccgacgctgcgttggtcttcgagcagttggctgccgggtgttgcagcaccgccgcttacatggcggtgcacaacatggtaacaacgcagaaggaggagcaaaccagcaactggagacaggattaaattcacaaatacttttttggagagatttttatgggggctctttcctggatattcaagaacttttccggtgcaaaatccgaaccaatttggcaaacaatgcattaaaccggacggaactcccatttcgtgcttctttatttattatatttgcttttttgaatttgattttcacaactttcccctttcttttggccaggtgccgtggatgattgaccgttttgccaacgaggagctgaagcaacggtacatccccgaattagccagcttcaccaagttggcctcctattgtttgactgagccgggcagcggctccgactcggccgcactgcgcaccaacgcacggagggaaggcgaccattacattggtgggaaaatggacaaaacccattttaatgggtttatttattaattccataaagttgcctttttatgatcaacgatttttcaatttccaatggatggattctaatgaatatcattggatagaacagaatattttctatcgaatggtattattttaatgtgtttttggcaaaatttgaaaaagttatggataattttataaaattagtttatttatttgtaacttttgagccaagagagacacaaaacttgaaattttgccgattgaataacattttttaataaaaaagtaccatatttattagaattgattaattaggaaaagagttacggactcgaaaaatatacgggttaaaaggcgaaaaaaacatcaaattttttgcagtaaatggctccaaggcgttcatcagcggcagcggcgtgtccagcgtttatttggtgatgatgcgtcacaaagacgcgccgccgggccccaagggcattttcgcgttgattatgacgcccgacatgccgggcaagttcagacaaatttaaatttctatgacgttttcatttaaaaatatcccggagaaaaaaatagggcaatttttcaacctttaggcttccaactgggcaaggacgagaacaagttgggctggtgcacgcagccaacgcggatccttacttttgaggacgtcaaagtgccggtgaccaaccaagtgggcgcggacgacgaaggctttaccatcgccatggagggactgaacggaggtgagcatgccaccattttgccgctttggtaaaactaccatgattttgaccatgaaaaattgctgtatttttgactcggtccctaaattccgaccacgatttttccaatcctcctctaataatgaccaaatccaatccattggaaaattattaatgacgaaaaaacctaatctatcgaaaaataaataagtgagtggtaattgcgcttttccattttcttttcggccgtgtgaacattgagaaatgttccctgggcgctgctcagatgagcatggacttgg

SEQ ID NO: 33423 - DNA, 933 bp, Heterodera glycines
tattttaagtgattattgtaatcactcgaaaattttaaatcatttttatattttaaggacggccttctgcgacccttttattatttggccaatttaatccaaaagagtggccgcgcaattcgaaaatttttggacgacaaattgccaaatgaatgcaaatatttgatgaaaaaagaaacattagacgaactggtgaaagcagtcaaagaaacatcgtaaacagccaaaatggagcccatttgcttttaattatttactcaattttgcttcttggcaatctgaaggacgcgcaacaatattaaaaataacattttttatttttttaacatgaaacaaacaatttgtaaaaattcaaatggttttcttcccacttggaatcccttccgtcattttttgcatttcctacttcgtatttcttctttttctttcattcatcttcggtcgtcttcgtccattccttcactcttcccctcctcctcctcttccgtcggcaattttatgttttttgtgagcaatttgaacgccgtttggtcgctgtagcaattggcgtccaatgggagaagcattgggtaggagtgggccaagcaagtggccaacggcagccaaaagcgcctgtcctttggtagctcagacgcatcgacccaaaaatggacaaatttcaaacattcagaaaaccaatgtaaacgaatttttagggaaaaatacccctttaaaatggcacaatttatattttaagaactatcttttgaaaaaaatgtcaaacaaaaaattgacttccttcaataattctctttcctaccaattgatcggcggtaaagcgaagagcgcgtttttgtaggaagaaattgtagtggacggtggtgaacatctgcaaaaaagaaaagtggaggagaaaaatggaaaaaaagctgaaatatttggataaaacccaaa

SEQ ID NO: 33424 - DNA, 933 bp, Heterodera glycines
ttgatttcaatatccttattaacaaaataacaaaataattgatttatttttttgaaaattataagactatttgattaaaattccataaaataacacctattattagaattatttaattcagatattttaattataatttttgacaaaaaaatttaatattttattttacataaaggaagtatcaatcataaaatttttcttcaaatcaattagaataatggtatattattttttttcttaatgtaataggtattgctgcggttttcctttttcaaattaaaataaattttataattaaattattatttagtataggacttcgccaaatgataattgattcaaattaaaaattattcagctgaagaattgagaattgtcaatcttcagccaaattaataataaaatctgtccggtttatattaaattgattaccgttgattaataccaaaaatttgtttgtttaaaagagatgattaaaatgatcaactaaaaattaatgcgttgtaataaccttatgatataaaaacaactaaaataatttaagcaatgcaaattattttataaaatatttaaaattatttttaaatatacatttttaattaattttaatttttaaaattcattgttttacatcaaaatttcatccttctcatctccactttccgtcgaagtgcaattcaatgtctcaccagtatcgcaacctttaaaaaaatgttttatattaacatacaatatttaaatataataaaataaatattaattaaaaatgatttttttttccattaaaaattgttaagcatattactgtttttcttaacaagtcttgatgtgtcctgtttgataaggtgcacatcctcttcatcctcctgcggggcttcatcattaacacctaattgccacattgaattaccctatataaattgattatccaaa

SEQ ID NO: 33425 - DNA, 1355 bp, Heterodera glycines
ccccccccttccccaaatgaaaatttttaaaaattttccagcaaataatggaaatttttttcgaattccccccccaaacgaaaattaaaaagtttaataggcaattttcgtaacaaataacactctaatttccaaaaattttcccggcggcgcctatcggcaccgccggacctaccttttccactatttttacaagttttttgccttaaaacggccaaaatttggtcatttttagtgaaaaagtgcagttgttacccagcagtgaaaaaaaaagttattggttaaatagcaaaaaaaaaaggtcttcaggtcgggtcccccccccccccccgaaaaatgtttctagatacgcccctggtctcaattgtcctctattagtttcgttgtgtttcaaaaaagttatgaccaaaaatgttaagaaagccaattttaaatattgggaaacgaaaatacattaagttttctttaatggcaatttatgctttctcatgtttagaaacgttaccaagcacagtgcaaaattcgcgaggatcacaaaataaatgtggaggaagcgaaggacgcattcaaaagtttggccaaatattcgccggcagagaatgaacagtcccacgaggaaacgagggcgttcaccaaaatgaaaagtgttggttggcacggggttcatgccatggcattttttgtgatttaggatttcactacccatcaaattccggacgacgcggacgcattggatgaacggatgacgagggaattgagcaaggcgtccaaagggcgtcaggagggcactgaaaaggcatggcacaaaaattttttggaaaaattatttaaaaaacatgaaaatatcaacacaatcagaccgtagtaatttcggaggggaaaatccgaagatttttttgttgctcttcgggccaaaaattatttctccagtgttattttaatgttttttgcgccgtggggaaaagcgtgaatttgtagctgtttttcgccacaaaaataattaatttttgccatttttgggtcaaatttcaaacaaaaaaaaacatggtaaaatgggggtccggcggtgcatttaagcacttcaggaaaattcttggaaatttagttaagaaaattcttaaaattttcaaaaaattgccaattggacacttggattctaattgcagcgcgaacgtctcatcccaaaccaattatttatttccatttaatactaaatacgggtgcacttcattttctaagttagcaaattttttaaaaaaaatttctcggggccggcggggggggggggggggaaacgagctgctcccactaaataatacatcattaaattaatattgcattttttacgaggatgt

SEQ ID NO: 33426 - DNA, 971 bp, Heterodera glycines
taaaaaataataataaataaaatcaaaaataatcaataataatttaggcggcaaattatggcattgtgttggactccctcccaccgctcgatgactactaccccggcggacacttccctgaggagctaaagaagccggagcagtggtacgaggagaaccgcaacacgccgtttgacctgcgcgaagtcattgcggattactgcaaagcaggtaaaaattgggcatcaaaaaaaaatatgcaaattttcttcagatgtccaaattttggcccatggaatggtcaaaatgcggcagttgttcgccgctgcaactagccaggagctgaccgactccatcaccatcccgtcagcctgcatgaagttcttcgtggtcttgtcgcacgtcggaaaagagagggtggccatcatcccccatcttgggtacgagaagcgcgggaagcagagtgccatcgctcgcaagtacctcaagtggcgtgccgaggaagagatgcgcgacaacggatggactcttcgccacgtggaaagccctggcggcgaatacaatcacggcaacttcctgctggacggcatgctggaggagcggatcggcgaagacaagaatttggcgatcgaagtgaatgggtaaggaaacacctgccaaacttatgctaattttctcccattcagatgctattggcacgcgtgcccgcactgcttccccgaggacgacgcaattgttggcggtggagagacggccggtgccattcgagcgagggatgagaagaggatccggcagattgcgcgggacttcgaggtggagatcgtgtgggagtgccagctcggacgaatgctggaagtggacccgcagatgaaggcattcttcgacaacacgcccgattccggcccgattgacttccatgacgcctttttcggaggtcattttttcccaatttttggttaaaatatgtaaattttgtttacaggtcggactgg

SEQ ID NO: 33427 - DNA, 1315 bp, Heterodera glycines
ttcttctcgtcatcaattcgttcgcccaatgtgctccttctgctcagattatatccattaaaattaattcgttgaaatgggagtggttttggtctcgctcaattagtcacttttttttgtttttttttttttttgctcttttcccccccttttttgatcattagggaaaagcggttatggtaggggggggggcatttgtacatcatcatgataaaatagtgtacgtaaggatgatgacatttagtcggctaattgcatggtaattagtgggaagagtgggctgctggtagggagggggctggaagtgcacatttgaaatcattggttccgtccgttcatttgcaatttgcacacaaaaccgaagcatcgcattattttgataacgacgcaatgcacttacattaattagtcgaattttttgtctgtttatcttaattgtcccctacaaaaccattcatttcatttttcatctttctatctatcttattctccacattctgttgtttgttggatgtgtgtggagtgattttaaagaaatgattttttaaattatcattaatcacttttctccgattggtccccgttcttcattaattaatgatcaattaatgaccgtaaagttgtcatccccttacaattaccgtaacaattttccatgtaaaactattaagttgctcatcagaaaattcatacattatgaatagtgtaataggggggcctagccaaccaacccatgagtcgagaaaatttttctggaccgggatttggtatcgagatggtacaaaaacaaaaattcgggtcgggattcgatacgaaaatgcgtcgggattcgtgcgacaaaccctgttaaccaagtgaacactacttcttcctcgtcccattaaaatccgaaaattgaagaagaaaaaattcccggactgcgaaaattcgtcgttttctgattttccgccgggtacggcatttttggtcgatttgtgccgcctgttttctgtgtgttcaaatagtgtatggactgtctgacttttcccctctctttctctgcgctcttcccattcaaaaacaaaatgccaagaaaagagacagttggccatatggactgtctaacattctctctttcgctctctctttcactctctctctcgctctctctctctctctacactccctcccatttcaaacaaaatgccaaaaacaaaaatggtggcgccacattgtttttttcaattaactgttaacttcactatattcgtttgtccccctcctcagtgatcgtcacgatcacccgttcctcccgaccaatcagcagttgaccaag

SEQ ID NO: 33428 - DNA, 149 bp, Heterodera glycines
acatgcgtagggcgtcttcgtcgcgggtcatggcgggctcctgactttctgtgtgggaaagtcataaggcgctgctttccgaattggcaagtgaaaactttctatgatggaaagtgacgagtccgcgcctagcgcccgagcctctaacc

SEQ ID NO: 33429 - DNA, 663 bp, Heterodera glycines
caaaaaatggcgcaaaaagttgttacatttgaataaatggagtcgttataatgttaataaatttttttgttcgaacaaattaaaaaaaaatttatttgaggcaattttaaaaattttttctgatttcgcaccctaaaatcatttttttttatttcaagtttctgcctactaaatttttctgtatatttttattcaacaaaaggttttgtccttcaaatttgcgcattaaaattttttttgtgagtttttaattaaattatcgaattactcccgctcccgcccgggactcccgttaaaaatggacgggattttaaatatttacataaaaaaagaagccctacaaataagcacgcccccgagaatcacccaccatttcaggaaacgttgctccccttagggggggggggggggtatttgttgttgttgttggacaaaaaattgtttggaaaactttttggtccctcttcgcgatttcgtcatagatgtcggcactttccgaaaatcttgaaaaaggcgccaaaaatggcgatataggcacaaaaataggcattataaaagtcatcgtagacaccccaaaccaagcggaaaaggcgtttttcgtgcttatctgtgcgtattaagttcgcaaaaattttaggcatttgcctaaaaatggagtcccta

SEQ ID NO: 33430 - DNA, 97 bp, Heterodera glycines
cgtctgcttgaacaggtgcgagacgcgatccgtgttcgccattacagctacaagaccgaagagtcctatctgggctggattcgccgctacatcctgt

SEQ ID NO: 33431 - DNA, 1450 bp, Heterodera glycines
  unsure (1)..(1450): unsure at all n locations
tgaaaaagcgatggaaaatcagtcgaaagaaaaaaaggaggggggggggggtaaaaatataggcccgagttcattatgagcgttcggactaatttgaacaaattcagaaaggtatgggcaaaaaaatctgaaaaactcgaggccctcactaacaataaaaatgtattaaaggattaaaaatgatgaataatgtcattaaaaaaatgatcacctcaaaaaaaggctcgtcaattgggctattgaaataggcactttcgtcgttcggaatgcaactcgttgtgaagttttccaacagcgtaccgataattgggtggaccggaacgcggcactctttgagctgtgctttaatccattcctaaagaacgcaaattggcattgtcggataattatttaaatggcgattgattcaatgaaatccttcaaatgaaaaatttgaaacttatggcacaaattcccaatagttttttttcgcgaaaaacctggataaatgctttcccccataggcaatgcaaaattacactgtataatgttttggtgacaaaaacatacatgcaaaaaaggcgaggaaatgatttgccaaaagaaacaattggtaaaccgaaggatgtgccaaaatccaaaattgaaaaaccattcaatatgccaaaaacaataattgccaaaccgaatgatgtgccaaaacagaaaaatgccaaaaagaaagcatcgaaaaatgatggggggcaaaagaaagaaaaacttgttgttagccgaccatcatcacccaatggagtgccaattgagtttgaattggaaatcaatgaatacactaatggacaattgatcaacaaaaacactatttctggacaatgggacaaaaggaatgagaaaatcattgatgaaatgttaaaaaataaaaaagttggtgtcacacaattggggcccattcagtcaaaagcaggtatattagcacaaagatgaaattcagaaaagccgcgtatctcaggcaatatcatataaccagatctaggattttgccgcttaaatggcaatctttgaaagttttttataaatttttatttaagccacaaatgagggtaaaacctcttatattggggcaaaggtaattaccgaaaaataatatttatatttccatgtttcacgggaaaaattattttttaaattataactgattgataaactttttagacattttgccattaaaaccaggacagttcgaaactgaattccattttttctctgataaccatgcaaacagtcagcaatcaactgttgcatcaacatcgaaaaatcaagtcagaaatttttaattaattaaaaaaataattattttagaaatctaaaaaagtgcctgagcgtctattanaacattccaagtcaatggccgaatttagaaacacgcaaaactcaaatgagtcaataaatgtatctgtaggaccaataaatataa

SEQ ID NO: 33432 - DNA, 969 bp, Heterodera glycines
caggaaaatcgaaaattttcagcaaaaatactttttccttggttttgtgaaaataatgggccaaaaagaagttggggatcgggggtctatttggatcagggtcccactctaaaaaaatatacgttttcgaagaatgccaatgttcacttcctcccccaccaatggcgatttcctttttgggtatactgttccacttttgtaaatacagtaaccgcccagcaaattcatgcccctcgctaccgtattacctggcgagaagaaggtggacgtgaagtggtcagccattgcggacaaaaagtgctgcggatggatgacaggaggaagaggtggaggagcgggaggaagaagtgccgttggtgaagcggaagaaatgatgccgtcgccgacaacggcggtgccggaagatgaaacggatttttgtggttggagaggtgaagcggctgcggatgaatagtggggcggacggggaggagacactgtggcggaagaggaggaggaggagggacagcatgaagaggctaccaagtcagcggaggacatggcatgccaaacaaaaagtgaatgaaaaagtcaggcaaattgtactaaatggcacaaaaaagtcagtcagtctcgagccgaaactctcgaaccccgccccggccctccttactctcgacaaacgacggggacaaaaaacggggcaaataaatcagatttggcaaattcaaatttatggcattaagcactaaattgtgccggggactttataagcagctaacacaagcaaattttgatgagaggaggggggggggcacggcatttttgccatgcaaattttttggcacacacaatgtttttaggccgccgctaggaaaagcggacaaattgacgcggtgaccacccccacgcaatcatcatcatcatcatcagcgctaatccaaaaattgtcggcttttcctctgagatggggggggggggggggggggg

SEQ ID NO: 33433 - DNA, 1038 bp, Heterodera glycines
agtagaaaataaaggggagagagagagggtaagggtgacagtgagggggaggagagaagcgatgggaatagagagaagggagagaaggagagtggggagagacagagagacagagagacagagagacgaataaaaacggtggaaagataatggagggacacaaatggggcgatgatgagacggacaagcagcagcagacactgtctgatgagagagcagtgaagaaagcgttgttttgtgttgattgtgccatcacaaaaacatagataaacactgtttgtgcttttaattcacctcatggcacaaacaaaacaatggtaccaaggagggaggggaagaggaaccatgccaatggggacgttccaaggatggagggaggagaagaggaaccatgccaatggggacgttccaaggatggagggaggggaagaggaaccatgccaatggggacgtaccaaggatggagggaggggaagaggaaccatgccaatggggacgtaccaaggatggagggaggggaagaggaaccatgccaatggggacgttccaaggatggagggaggagaagaggaaccatgccaatggggacgttccaaggatggagggaggggaagaggaaccatgccaatggggacgttccaaggatggagggaggggaagaggaaccatgccaatggggacgtaccaaagactttggtcgcttgtcactcatcaattagggaatcccccccccccccccgccggggagtgggcacagagctaagtaaagtgaaagtgattccgcccaaatgattagaccaatgggagagcagtcattttctcaagtgataatgtttgcctccgtttaagcaatgtttggggattcccctgggggtgcctttccctcccccaccaaaccgataacagtggacgacagaattgcgtgatgtgatgaattttagtaaaaagtcacaagggacttactgaaaaatacgaaaatttccaatttattttttggaaaaagaaagtaaaaatcaaagtaaaagagggggggggggg

SEQ ID NO: 33434 - DNA, 875 bp, Heterodera glycines
  unsure (1)..(875): unsure at all n locations
caggttcgaatcctctacatgtttgtccattttagacttttgttttttgttttttatgcaaggtcaattataaaaaaaaatttttaatgaaataaaatttttattaatttttttaattaaaaaattcattaaagataatggtacaataaatatcctttcatttaaaaacaaattaatttttgtctaaaactttatgagtaatttatttgttaaaatggtaaaaaaaaataatttgtgataatggtaattgactttggcataaaaatcaaaaattaaaattaaaaagaggtatccaaacaattatttaatttatttattcaactaaaaaagtttggcacgttataactcgccactcgggctcattcagcaaaaaataaaaacatttggaaatccggcaacattttactattttttttttctttgcataagtttttattagaattttctaacgacacgaatttgcctacgcaatgtaattgaaaacgaagaatcgtttgtcgatcaagctgactgtaatacgggtacggctgccgacgactgggttcgtgatccgattagtgctaactgtcgaaatcgtccacagtcgaattctttgatagtaaatacataggtgtttaaccatcattgacctcttgaaaagcagctaaatgatgataataagcatagttgggagctctggattttctatttaaataaactaaaatacgtaaaatataatcaagtataacttaaaaataaaattaaaaagccataaaaacaaattaaaatatataaaaaattaattaannctgaaattnatatcnnataaaaactattcattaataatagaatanaaaaaaacaattatttattgcttgaaaaaaaatattttaaag

SEQ ID NO: 33435 - DNA, 314 bp, Heterodera glycines
tcttaagcccaaataatttctctccatcacaaatttttattttctacccaaattataccccaaccccttaatttgatggtttttgaacaattaccatcccccataaatgattagaaaattaattcccgcattttcgcttgatcaaatcgctttccccagcgggcacaggtctgtctcctccgtcaattgatcatccaccccaccacacacagttaaaacaacaacaaaaccataataaccggtttttgatgatagatgccgcccgctgggggttggagggccaaccgtaggccccgaggggccaattcttcccc

SEQ ID NO: 33436 - DNA, 660 bp, Heterodera glycines
  unsure (1)..(660): unsure at all n locations
tagagtgccacgggaccggcacctggaagcggacaactgagtacaactgagtaccaaggtcccagtttgaccgggactagtccggttttttccctgtttttgaaaccgaaaaggtcgcggtcgcgggtttgcccaaaattcccggtcccgtggcactttaatttaaaggatagaaaatatatcttttagattaaaaggtttggacctaaattttacatgtatgagagtgttttaatttttattatattttccattaattttgaaataaaataataatttatatattagtccaatttggggatttaatttttatattatagcaatgggtcatgaataattttcaaaaaaattgatttattgaaaaaattcggaagtagggatttccgagacacaaaatttttaggtattacgcccataaaaatgttgaatatgataattttgaatttattaatttttaagttcgtaatcaaaattaaaaaatataaaattttgattataatttaaatttataaaactatttttaagttgtttgtgatctaatggatatgttcaaccatacttttgcttgctanagaattttactagtaaattatacctttttatttattattttttgaaatttatgtgtcctcttttttgttaagattttaaaaatatttc

SEQ ID NO: 33437 - DNA, 1086 bp, Heterodera glycines
tattttgaagtgttttcattgccaaaagaaattcttttttctgtcaaagtcagggctcggaccaaaactttttcaaaatcagaacatcaggcccaaaaaatcagattttgaggtcgaaaatcagaatattttgcaaaattgctttaaatcgacttggggaacaatttaatcaatttatatagcatcaaatttgtatttttcacctgaccaagtaagaaaaagttaaggcctcaaaaagtgagaatgttcactgattggacgcgtaaactggaatattgaccaaacttcttcttcctctgacttgacagctccctttctaacggctaatttaaatattcatttattaattatgtaaatttagataatacttttagcttttgcctatttttatttgttttttgattaccaattcaaaaaaatgtcggacaatccgaaggacgtggagaaggaaatggaaaaagcgatgtaataattcaaattatttaaatttccatgctaatcattttgctttcccttttcagcttcatcgctgccgactgttggctcaaagtgttcgatttgcttccacgctctcagcttggcctcggaattgcgctgatcagccgccgatttgactatttcgttgaagaacacttcaaaacgcgcaaatggaaattgggcgaaacaatttatgctatggaaattgggcaaaaaatttagctttccgtgcgccgttttgtcaaattttttttaaattattaagtgtaggaacaaaaccgaaaagtacctgatttatgcccgaccgtaaacactttctaaccatttctttctttgcttcctttggattgtgcgacatttttttttttgctggtaattaacgggaatcccgccgggaacgggaaaaaattttttacgaaaaaatcatgttttttttctaaaattttactttattttattttttcaagtgaaaatactaattttttaaacattaaaaaaatttgtctttacgtaaatgattaaatattgaattttattaatggacaaaaaataacaacatacggtagtcaaacacatcacgtgcaacactgaaaagttgctcgcttccga

SEQ ID NO: 33438 - DNA, 933 bp, Heterodera glycines
  unsure (1)..(933): unsure at all n locations
caaatcctaaaaacgaattttaattctatttttaaatgattccactcacaatttgtcgcaaaatgacatttttgttcagatagtgtcgcgaagtgtccagcagaatgcccctgaccggatattctggccaatcatggacagtagcagtgcgaagcataaactaaaatgggtaaaataaactaaaataggtaaaattataattttatataaattttaaaaaaatttaattttatgatagtgcattttgaaaccaacgctttcccctcaaaaatttcaaaaactcgacccaaaaatcctcaactgattatttcctcgattttgttccattttgaacttttcgcaaaatggcctaacaccgttattttaaatttacccttttttaagtgagtggggacaggaaaaatacaacctattgaaaacttggtttagagctttttggcccaatttttaatataatacagtcatggccatacatttatacagtgaaatatttgtcacataattttatcattaattagccaagtaatccaaatgatttgtatgaaaaataacttgatcgaaaaaaaatcttagtttacctatttcggcattttttggaaaattcaattaccaaaaccggtttcgcttcatgtgcctaaaggaaaatttttgggatatggaaaaacatatgattctacactaaattctctagaagatgcaaaaaatcgcgtcaaaatgggctcagtttaggagaaaattttttaatttgataggcaaaatggcataatttttaaaccccatgaaaaccgtctgaacgtgaatttttccaaaaaatgccgaaataggtcaactgagactccagctattttttggtgccaatcattcagattggctaagactgatnaagttatgtgnaaaatattttactgcataaatatctgaccatgactgtac

SEQ ID NO: 33439 - DNA, 538 bp, Heterodera glycines
catctgtcgccgtggcccaccaccaatttgagtgccgtcatggatttgtggggcggcggtggcactcggacggaccaccgacgccggcggtggcaacagttggaggtcataatactggaaaaaacaagttgtcaagtcaatcaaaaaacaatgatggcgaaaattgattggtatttggcaccacaaaaataatttgacacattaaaagtagcaaaattaaaaaaaaaatttcatggcgtgaaaggccctgccacaggaacaccaaatttcctcaaaattttcgactcaaaaccatgaaacctcaatttttttaatcattcagcaattgttaagtgccaagttaattgttggtggcaaaaccaaacaataagaaccaccgattggttctgaaaaattgacagttctggatgattaatattattcaacgtttatagttttcgtctaaaaaaaattttttttttttttttcgcttagtttttatgggatttgtgtccctttttgccaccgaccgacctattggtcatagtccgttgttgtt

SEQ ID NO: 33440 - DNA, 1437 bp, Heterodera glycines
  unsure (1)..(1437): unsure at all n locations
tttcgtttaccggcagaagaaacgaagcgctttttcagcggaaacaacagtccccggaggggcccgtgccgggcggggggtgcaaatggtgtgggtggtgccctttctgttggatgaatttctgtggcattgccggcgaggcgggttcagagatcctaaaatttatgaattttttggccaagcaaaatgccaagacacctcggcaccggactgtcacacgccgccgcgaaacgccctcctcctccgccgcccctttgctgatgctgaagtggcgccgccgcaccgttaccgtaccctgctgctacggttggttcatcgcaaattgcttgcggtggcgcatggtacggtaattgctgccgatggtactgttgtgtgtggtgccttgtggagtttggactttgcccgtcggtgacaatcacaaattgaggcggtgtttggccgtgctggtgaaaatggtcggcatttggatagtggtaaaagtgttggttgtgcggaggcggcggcggcgccgccgacaaaggcaccgattgggagccctggggaaggaaaagcgatcaacacggggctcaaagactgatcgaaccagtcccgcgtgtttgacgctgatcactcgtgcgggcaccacctcgccccctccggcgccggcccgtcgttgcgccggctttggcgcactgttttgcgccgtcgctgcgtttggcgccggcacgtgttgttgctcatcgtccgttcggtctgccgtttgcccattcagcggggctattccgtttgaatgcgcttaattcgttttgtgctaattaagtcatgccaatgtgctcgattttactgccattgctgcctgcactgcactgcgccagcctttccttcaactcgttcagttcgccgttgaccatctaagggttgttgattggtttaattagaccaattaattaaatgttcctaattaatttgccattcgctttgacctgtgccctctgttgtgccaatccgtccattttgtgctccaattcgtcaattcggcctctgagctgtgccaccaaatcgccgtattcgcgttccttcgccttcatttgctccacgtgactctcctcccttttgatcatttccaattcgcttaattaccatttatttcattttgatttttgatttttccttttttggcaccgttcgcgaaaactcttcacaatggtcgtcgcctgagtgtaacggttttccaactgtgaataatgcgtccgcatgttgtccaactcggcagtcatttccaacgcttttcgctgcgattcggccttttccattggacaattggggcaattaatcgcaattaactgttttgtaaataccaaatccgactcgagggcacggattttgcttcggatggacagtgtttcctccgnattcttaaaccatttccgtctgctgtctgctgacaaatgccaaagt

SEQ ID NO: 33441 - DNA, 965 bp, Heterodera glycines
  unsure (1)..(965): unsure at all n locations
tatgaaaatttattcattagaacgttataatttaaaaatcaatatctatttaagcagcaaaaaaagatgcaaaattgaaaaaatgtttattagtgtgagcaaattaactttaaattaattaataagctttaaaatttattggaagaaaaaataattcgtaacacgtataatcaaatattgcagctacaatcttaataaaatcgtatacatctttaaagttttattttattaaagctaatttatttatattttaaaataatcaaataccaaattaaattaaataaatcaaaattatgaacaactttgatgcttcttcattaacattttcataagaaatttaaaaaattataaatagtaaataaacaatttatttagattgaaaaataaaaaaatcaccacaaagaataaacaaacttaaaattaattataaaagacagatggttgaaagataaaatattttattttatggaaatatgaaaaggataaaaaattcaattataaaattatattgaatacattaataaattgaaaaaaattaataaaaatgaatcaaacatttttgtattttatcagcgattttcacgcaaatttgaatcaatgcgataagaaaattgtggcttaaaaattgaatttaatatataaaaatctaattcagaaataaatatcggtatgaaagctattctatttaagaatagattttatgctacaatataattttgagatgcgcaaaaagataactagatatttttatataattttaattaattaccaaaattagaatattttgatataattttaaacaataaccaaaacttcttgaaaaattatcaaataagagcatgatgaatacatgaaaaattataaacttaaatcaaatttaaaattatatctaaaatgcattcttgctcacaaaattctcttncccattatattgctggaccattgtattacatgagcatctgaaa

SEQ ID NO: 33442 - DNA, 706 bp, Heterodera glycines
cttattgtgtagacggccagaaacctctagaattatatgaaaccgtgaccggaagaattctgtttttcctttacgatcggaatttttctgaaaatggcaggtgtgtccagaattcttttccgtgaaccttgaccagagttccaattttggaaaatcgtgaccgggttttatgctacttattttgaaaagggccttaaatctccagaattattggaaaccgtgaccggaagaattctgtttttcctttacgatcggaatttttctgagaatggtcaggagtgtccagaattttttccggaaaccttgaccggagttccaattttggaaaatcgtgaccgggttttatgctacttattctgaaaacggccagaaacctccagaattattggaaaccgtgaccggaagaattctgtttttcctttacgatcggaatttttctgaaaatggccaggtgtgtccggaattcttttccggaaaccttgaccggagttccaattttggaaaatcgtgaccgggttttatgctacttattctgaaaacggccagaaacctctagaattatatgaaaccgtgaccggaagaattctgtttttcctttacgatcggaatttttctgaaaatggccaggtgtgtccagaattcttttccgtgaaccttgaccagagttccaattttggaaaatcgtgaccgggttttatgctactta

SEQ ID NO: 33443 - DNA, 970 bp, Heterodera glycines
  unsure (1)..(970): unsure at all n locations
tgcaggtccacnnggatcgagaaccgggataagaccattgggaaagagcagctcgagctctacaagaaggtatggaaagaaaaaatagttatttctgggactttttcagaaatcagaattaattctccaatgtggcccaaattttaggcccccagccacagccccttgcttctcccagttttaagtcttggatttgtcaaataaattcaagacttcaaattaataatcaaaaattctcttaaaatttttttgaacccaattcaaaaaaggaaaaaaatttgcagtcaaaaaattattcgaatttctccaattttgtttccataatttccgaaagttattcggtatcataatgccaaaacaaaacgaaatcgttttaaaatattcctttctggacttgacttggtttcttgatatcgaagctgttttctacgctatttctaaaacggttataccaaaccccagatttttgaatccggttttcagaaaaaatgccttgtggtgaaaacaatatttcacatttcactccataactttgtgagttcggcacggatcgagaccgggataagaccattggaaagagcagctcgagctctacaagaaggtatggaaagaaaaaatagttatttctgggactttttcagaaatcagaattaattctccaatgtggcccaaattttaggcccccagccacagccctttgcttctcccagttttaagtcttggatttgtcaaataaattcaagacttcaaattaataatcaaaaattctcttaaaatttttttgaacccaattcaaaaaaggaaaaaaatttgcagtcaaaaaattattcgaatttctccaattttgtttccataatttccgaaagttattcggtatcataatgccaaaaacaaacgaaatcgttttaaaatattcctttctggacttgacttggtttcttgatatcgaagctgttttctacgctatttc

SEQ ID NO: 33444 - DNA, 952 bp, Heterodera glycines
actcgcaatctctgaacactgcctccccatttggtcatccgcagcgcttttctcagagggcgccttctccgttgttacttcaccagggacgaagtttcagcgatttctgtaagttacggaggaatttgaatcattaaattattagccaacattttcggagtgaaaacgttttcaaattctgatcacctaatccatgtcttcagttgatccaatgtccgccgtttggcccccgccactcctcgccgcttcttccgctgatccccacgaaatgtgtagaggtcgaatagagttggcgctgctttacctgcgacaaaagcgcgaattgatcatctcattgagcggagctttcgatttgttcccccggacgaatggcactccccgaaatgcttatgtgaaactgttccttcttcccgatcgaaggtgtttttaatatactttaaaattgaaccatccaaaaatatagtgaaaatagtcgacggcaaagcaaagtcatagcggacactttggcacccgtgtggaatgagcacttcttttacgaagcattggacgagcgggcgattgcagaaagggttttggaggtgcgacctttgaaagtccaactgatcgatgccttttctgatggggatatcctaatttgtgcccacttaaggtcactttatgggatttcgatgctttcggttcgcattcgtttctcggcgaaacactcatcgaattgtccaaagcccccctcaacaaccgaactttggtctatccgatcactgatttggacgacgacgatctcatccgattggtttcttagttgtcttttttatttcattcaccagtcaatcgcttagcaacttcgccagaggcgcttttcttcgatgactccgccgatgggacagcgaagtcggtcccattggcccggaggggcgacggagcacaacagcagagggggggggggggggggggg

SEQ ID NO: 33445 - DNA, 1231 bp, Heterodera glycines
aaaacgacgcaaaaaccatttacattgacattgacagccacgtgcactatggtctcgggaaaaacaggggatggacggactaattagacgaaattaggctaattaatggacttttccatgggatggacggactaattaggcgaaattaggctaattaatggacttacaaaaaaattccagcggatggacgaactaattaggtaaaattaagctaattaatggacttacaaaaaaaaatccagaaaattacgctttttacaaattagaaaacataaaaaagggtgatttgctcgggaatattgcatcatgctgagtttcggccgaatatttttaaaaattaggtgaaatttggctaattaaatgatttacaagaaaaaaaaaattcagaaaattaaactttttacaaattaatgatccgaagttaaatttcaaaatccatttttaaacaaatccatagatgccttctatgatgattttggcccattgaatttggctgtgctttaccggttctgtcagttccttcacacattggtgctgcaacagaacaatgctcagcaacagcagcagaagaagcggatttttctctacacaagtgccgagtaaaaatggcaccccaaaaattggtttttcaaatttaaaaattctcgtcattaacataatattttttaattcggcattaaagtatctgttaaaggcatgtgccttagagcttgatccgaacctgggtaaaggcctggatccttcctgggtccaggcccaggccaaactcatggatgtcctggataatattaagggtctggattccaggtccaggccaaactcatggatgtcccaggccaaacatggatttcctggataatattaagggcctggattttcctaaatccagttccagtcaaaatatggatttcaggataatattttagaacttgacttgttatttctcaagtgaccattttttatttcaagatacttgtcaaaaaatgattaaatattttattattgtcaattagataatttaagtttttcctaaacaattaattgtttttttttctcaaacatttgtttgttttttttaaaacaaagcaatccaggccaggacatgacgagcatgggttttcttggacctggatttttctgagtttttgtaccgaaaatccagggccaggtcaaataggaatccaggatccagaattttttcaaaatgtcgagctcaaatatgtatataagc

SEQ ID NO: 33446 - DNA, 1103 bp, Heterodera glycines
aaacaatgtttcgttggcatttgaattttttgtaaattatagaaaaattaatcaaacaaaaagcattatgccaatttgtgctaaaaaaaatccacttcccccccccaaaaaaaattgtcaccatttcaatggccattataattttttgaacatttcttttgtcccccgggggcactcaccgccgaccaatccatccaaatttggcgaggggcacaaggccaaaccaattttcctctttcttttttttttttgcttttttggggcgattggtgggacgaaggtgagaaaatgatggaaaataatgtgatggtaatttcagtgatgtgagcagaggggaggacacaccgcgaataattcaaaatggaacaaataaatacacacaaaaatatgaattaaagcagaaaaaaattcaacggatggggggggaattaaaaatatatatatataatttttatatttttggcatttttaatggagaaagcatatttttaaaggcacctaaaataggcacgaaaagggtgaacaaaggcattttaaaaatgtacaaaaacgaatggcacaaaaattaaattttttcgttacattttcgttttcgaaaatattttttttattttcgcacacccctgttaggaagcctatcaacttttaaatcgaattaattttattttatttagtgttagtaattacaaaatctcttcaaaagattaataagttttgagcaggggagcggggggggggggggtcaaaaaccgcgtgccaaccaaaagtatggcataattttgtaatatcaccgaccgacgagggatttgctcattttattaattttaaaagaaaaaaaggcgagaataaaagtgtcagaaacacaaaaaacgggcaaattgacaatgtaatggacagaaagcagcagaaaaagggcgaaaaatattaattaaaaattcaaaatttatattaatttttggaattgaaacaattttcatgaaaataaatttgaaattagattggaaaattctaatagaggggggcctaaattaatattttatggctctgattttagtataaaattttatttttaaataaaaaaaaattttcgagtggaaaattta

SEQ ID NO: 33447 - DNA, 1463 bp, Heterodera glycines
  unsure (1)..(1463): unsure at all n locations
tgctgcccgacaaaatcgaccgagcaaatatcttcgatttcttcatcatatgtgtttttgcacttgaaatttttgtatttgaataaaaagaaatcttaaaaataatcaaaaggttcgtttgccgaaattttttttcagaatttttctatttttcaattaattaacgatttcttttcaacttttttttcgcggcgtgttcttttcaatcaaaaaacttttaggggaaggaaagagtccggcggtgccgatctgccggtaggcgccgccgtggaaattttcggaaatttaattgaaatttgtgaacagattttatcctgaaattgactttggtttgcatttgcggcagtttcattatacatgattgaagtaaattcggcgcttttagaattttcgcggatttattaaattttttaaaaattagggaagataattaagaaggaagcgcgggtcgaaaattgcttaacctttgattcgtctcctaactatggaaacgcaatttttattcttttctctgttttttaagatggaaagaatttcattaaatttttgttttaagatttcatttttacatatttaagaaagacgcaaatttttttccaccgggttaccctaatatcttattggtatgaaatttaggatttttagcaggaaatagactttttaaacaaagctgtactgagcagggatggcaccgaattccgatttccgtaaaaaatttggatgtcggaattccggaatttttggtaaaagtcggaattttcggacaaattttattttttagttttttttttgccaattcaaaatgattatttatttaaagtgtaaaataacttagtctttggtgttttctgctttattttgacttccaaatgaaactaaaagaaaattcttaatttttccttaaaaaattagtccaaaatcgtaaaattaccaattttgtgcaaattctgttaacaattgccacttatattttcaaaattttccagcggcgttaacgacaaccgccggactctccccaaatgttcccaaaaaaacatatttgaaatttcgtctttcattatttattttagaaatatttagaaaattctactattttttccgaattttcagacttttccgattttcgtgtcggatttacgttttcccaaaaatttttggggcctcaaatgcatccctggtactgactgaatgtttttaattaatttaaaaaaatgaaaaattgcattatatttttaataataaaatttttttagaaaaaaatataaataaagttgaagaaaattgagtagaaaatccaaaatttttattttggacttatttggcaaaaattccgaatttttcgaaagttatatttcttattaatattatcgattccaaaaattaattttttgaaaaattttcggaccttaagtnaaaaggcgctttacagagtctttttgaaaaaatgctaatatccacataaa

SEQ ID NO: 33448 - DNA, 909 bp, Heterodera glycines
ttttaatttttaaaatttttacgaatttcctacccataacggacaccggccaaaaacaggaggcccaacgcggtgccgcacgccatgaatgggcacacgcatgccatcagcgcaagtgccaacttttgcacgtgccattggcgccaataaacagccgagagcagcacggacacagaagtgcaggtggccatgatggcaaaaccgaccttggaaattcaattaattagtataattaatgaatgaattggcccattacggtcaattagcagggagtgtaaagagtaatgatgtgaagggaaagaaatagtggggaaaattggagagactaatggggaaaagaagcgagagatggatgaaaagagaggtgcagagaaaagcgagtgcgagagcacaaaaatggagaaaagtggaaaaaaatacaaaaattaacaaaaaaaaaatgtttctaggcagggttaggcacgccgaaagtcaaaagttcccggaatttaagtcacaaatttttgaatcctgaattttttcaattttttttccagtactcactgaccatcagaaatggcagcatggaaaggccggcacggaccacctccacctcgacgtaagtggtcgaaaaggtcatcacgcggaccaaggaactgttgaactccctgaagaggctcaattaggcacgcacacataacccaaatgtgaattggatgatcagagagcgatcttgtaaacaaaaatagcattttggatcaaaaactttttagaaaccttgaaaagtttggatcaaaaactttttggaaatccttaaagaaaaatttgttttgtacccccccccccccaccttgggccttaggggtggggttatggatttagttgagcttctcgagagcctgcttcttgcttaggcaccgagatatacta

SEQ ID NO: 33449 - DNA, 611 bp, Heterodera glycines
cctgcaagtgaatagcccaatttgaggccctcacgcaacaatttgatgaagcggtcaaccggcgcctttcccttttcttttcgcttccgttgcaaaaagttgtgcagctttttcgggtcgccaattacgtcgtttagctgtgtcaattagttaattagtcatcatcaaatgagcagcatcccctgggggcgttctttcattgtccaattttccattatgaaaatgacttcctttctctgttcactcacattgtcttcaattgcgccctgccttttcagtccccggtaggtcaattggtccagcgattccaccgattcctcctccaaattccatttgatttcctttcgtcttttttcagtgttgccaatcttttgcacagttttctgccatctgaaagcagtgaatgttccgtcagcaaaagtgccgagacaattcccaaataaaaattcaaaatcagaatcctaattcaaaatgaaactccaaatgctcttcgcccacccgtccttcccccggccccttcattttttatgcttacggaatgacgtccttctcctgcttgccctttgccttcagcacttgcttcatcatcattttgggcgatctgtccccat

SEQ ID NO: 33450 - DNA, 1001 bp, Heterodera glycines
tttattatttgttcttatttcactgactgactcactgagcaagaaagtgccgaatcggcgaaataaaattccaaagaacacttcggcactttttgttccaattttttcaacgggactttacgagcccggaaggacatacggtgaacttaacaaataaacagaaattatgcaatttaatggacccaagaagagtgttttgacaaacgttcagttattccatagccaagtgcgtaaattttactgtcggagtcacttttattggaccattcgctctctgtgaattttgtgaatttggcagtgccaaaaattccagtcacttttgggggcaaaaaaatctgaaaaatatttaaattaaattaaatttataaaaacatcgtttgcttatggtgaccaaagttttataaattaaatggaataaatttaaaaatattttttaaccaaagcaatgtccgcgcaaattgaatcttccaaatcgagaaaaatctgaggagaaaacagattttatttgaaatttttgagaatttttattatggaatagacggattaaatcaaaaaatgtcttacaaaatccgttcgaattacgaattcggtggagtgggcattccatccgaatcccttcacgtggatgtaatcggccaaacttaactcatcacacagaaagtgaatcttattcttttttattggtatttttcaataattgataaaataatacccaaattcgtcgctcaaaatgcaatgggcagcggtcagaacaatgttttctttcaaattatttgcattttaattttttattggacacaaatgcttttcggatttaatttttcattattttcacctgtgagtaacactccgctgcaaaattggacaattttgcttaattttgcaatttgttttgtttttttataatttaatgaagcgaacctagagtacgaattcagtgatacgactgatcgaatttcttagcagtgcaatggaaatttcgccgagtaaagcgaccgttt

SEQ ID NO: 33451 - DNA, 898 bp, Heterodera glycines
tcacaattttggagaaatacaattacgtaaatacgagggcccttattttccagacgacaaaaccgtgggtgaatgcggcattgatggaagtcatccaatttatcgcgagcttacgtctatctgctcgctcgataaagaataggaacgaaaaaactttgaaacaaaatgtccgagaaagccttacctatatatatttttttattttttatatttttttccttttggtaaacgactcgtcatttgtagggcttatatttttaggcctaaaagctaccaagatagttagtttttaggttaaaaaacccaaaatagtttctaaaacgaaaaaaataggtactaaaaatttaaaatttaggggggggggtgtaaaatgacaaataattttattcaaaaagcaacaaaattaagctaaatttccgcatggtaattaatttattcaattatgcctttttcactttggttgccggcttttatccgtgtatcacagaaacattggaatatgattagggcccggaatttcaaatttgcggatcccattctctaagcaattcctggttattgttcgaaaaaaacaataaaatcctaaaaaaattttaatgaatttaaagtcaaaatttaaatataatatttattcgctgatcgttttttcactgggaaaaatctaaatacctatattcatttaatataaaaaattctttttatgtattttacatttctttgccaataatttgctcacaaattgtggacttaagtttccggctttgttttcataaaatgttactgattatggtaatgaaccagcaaatgagggaaaagtcacaaacgcaaatcactcttttttgatgaagaaaacataatttacggtcaatttttttttaccgaattagcagctagcggt

SEQ ID NO: 33452 - DNA, 869 bp, Heterodera glycines
caaacatttcaagaacaaatcaacccatgtgctcaatcagttgagcaaggaagtgcgtatgctggacactaatgtgggaaaggctttctccccctttcagttgggcctaatcaattggagcgctttgccttcgatgttcaagcgcaacagtgcgtgccgttcgcttatcgcgggctgaagggcaaccgaaacaattttctgagccaagaggagtgtgaggtggcatgcctgccaaattcctgcccttccggtgagactgcaggaccaaaacaacagtgcctttacgctgatcctttcccatttatgcactgtgaatcctatccatttggtcggttttaggaagtccttttgtgggggccgatggacgggcccaaagctgcgcagtaagcacggcgatgagcacatgtcccaacggttattggtgccacgttggggcgaatgctgccacgacaatgtgttgccctgagggtatcggccgtttgaagtgccgccaccccaaagtgttttgtttagcaaatgccagtccctgccaattgccaatgtccacgggggagggaccgttccgattggatcgcttttacttcgatttgggctccaaaagttgcaaatcgttcatttacaagggactgaagggcaaccagaacaacttcctctctttggtgctttgctcctttcgttcgttttcgcttttccattttctgctttagcgcgcgtgtcagctcagctgtctccccctcgacagttcgtccgtccaattggcattgccaaatggcatttgccaatgctttgctttccttcagatccgtgcattggtcagccggccaaatcgaccagtgggccaagtgtttttctgctcggcttccatcgcg

SEQ ID NO: 33453 - DNA, 855 bp, Heterodera glycines
  unsure (1)..(855): unsure at all n locations
tgaatgttatttttatgnnaattctgaaccgttttgagtagattagactagaaaaaatgaaaaatttggaaatcatgtttcccactcccttctcccaggggtattattttgtaaagtctttttttccccaataaacttgtcaaaccccatttttcgcaccgtgaatgttatttttattgaattctgaaccggtttgagtagattagactagaaaaaattgaaaattttgaaatcatgtttcccactcccttctcccaggggtattattttgtaaagtcttttttccccaataaacttgtcaaacaccatttttcgcaccgtgaatgttatttttattgaattctgaaccgttttgagtagattagactagaaaaaattgaaaattttgaaatcatgtttcccactcccttctcccaggggtattattttgtaaagtctttttttccccaataaacttttcaaaccccatttttcgcaccgtgaatgttatttttatcgaattctgaaccgttttgagtagattagactagaaaaaattgaaaattttgaaatcatgtttcccactcccttctcccaggggtattattttgtaaagtctttttttcaaaataaacttttcaaaccccatttttcgcaccgtgaatgttatttttattgaattctgaaccggtttgagtagattagactagaaaaaattgaaaattttgaaatcatgtttcccactcccttctcccaggggtattattttgtaaagtctttttttcaaataaacttttcaaaccccatttttcgcaccgtgaatgttatttttattgaattctgaaaccggtttgagtagattagactagaaaaaat

SEQ ID NO: 33454 - DNA, 941 bp, Heterodera glycines
  unsure (1)..(941): unsure at all n locations
aattaatataaaacacnttagggctatcgaataatagcaagattataaaaattgtttcatttgggggaagttatgaataattttctgtcaaatttttccattttggatggtttttgagtaacgactgggcaccgaattttttgacaaaaatgaagtcctgaaaaactagcgaaaaatgatttgctaaaaaaataattttggggtgctaaacttaaaaaaacttataaattttctcaggtaatgaaaactataaaattaactacaacaaaaaaattcggtaaagcgacctgaaaatgatttatatgtgttttttttatttttcatcaattcttttcattaggttttgtggaaccaaaacttatgttaatttcatttttgtcaaaaaaaattctttatgattcataatttacctgtcaagaggaattgtttgatataaatcatttttaattgagttaaccaaagattatccatccatcttttgccctaattaatcaatttttgtctggaggcaaataaaagagagaataaatatgggaataaattcaaatttttgccaatttaacacacttttaggtcatcattttgcgtctattttttaaaattatcgataaaaaggcacagaatcagcggaatattcatttttaacaattaaataaaagtaaaaatcattgcagcctttttttagaattaattcaaaatgtcatttacaccaaattcaacaaacaacggcgatttcacttctgatcaaggtgtaaataatgaataatttttttactaaaaattcgaacagaatggaaacggttggatttcctattaaaaaaatagaattttttcattgatttcttttatttatatttttaaaagaaatttaaaatgtgtatttttaaatgaaaattttaatttttgcaatattttagaagcaattttaattaaactctaga

SEQ ID NO: 33455 - DNA, 714 bp, Heterodera glycines
ctttttgaagagaaactcaaaaggactccaattagcgtgtgtttcagtgaatataacggtgagtcagtcaattgccaagtgaattaattaattaatgatttataattttccaatcaatcgcttttttttgccaggtccccaaacctacgaacattcaatagaatatatcaaaaaaagttttgtggaacagaacgtaaattcgaagaaaatgatttatgtgcacgaaacatgcgcgacggacactgaccaggcaaacgaacgaattgaagaagaaacaatcaaatcattcatattttgttacaggtgcaattaattctcgattcggttgcctccatcataattcaaacttcgttgggaaagtccgggctttactgacagagttgtgacaaaaaaagcagaaatatgcgaatgccatgcgtgtaatgaataaaagcaattaatgaatgaagaaagaaagttaacaatatttcttatttattgtgtaaacttaaagggactcccaattttccattttttgggagttcgatcattttcggggactgatcgagttaaatattaagacctagcaagtgaaaaagctgtattatgctgagataggcaccaattcccggggactaatggagtttgtatccccagttttgggtcaaaatttttcaaatattttttttcttttttattgtcgcaattggtttaaataccaaataaaaggagatt

SEQ ID NO: 33456 - DNA, 1509 bp, Heterodera glycines
ggggtttttcaatttttccctagttccaaatagtcaaaaaattttttattattttttcggaaataatatctattaatttccataataatattaggtactgtttttctattgttctagttcgttcgtatcagaaattttgtattagaattaattatttcttcttgaaatcttaacaactttttattaccttttagttttccaaaacatcttttttcacgtcgctcttttataaagacttaaggagaaagggtacggcgtccggcggttccgatagtcgccgccgggaaaatttgaaaatttggttagatctgttaacagattttgtccaaaatatgctaaatttttgcgattttgagccaatttttttaataaggtttatgactttttgggccctgtgatgccgataggcagcgctaaattttggaattaagctctatttctaagatttttcatcaaaaaaatttatgaatttcggtaaatttttgtttttcttcgatatgtattttgtcaaaatatgccaagattggtcgatttctatgtgtatttaatttaaaaaaaaacaatttgtcacaaagaaaataattaaagaagaaaacatcaaacggtatcgaactcacgacagaaagtaatgtcaatggcactaacctctacaccacattccaaatgtccgaaattgagcaaatcttctttatttaataaaaatttggcaaatggttaaaaaaaaattcaaatttcgtctaacttttttgcattttctcccacgaaaatgccattcttaggggtgtatatttaaccccgaccccgatcgggagggtcggggttcggggttgtcggggtatgaagcgtcggggttcggggtcggggttttccccgaaaatggccaaaaatgtcggggttcggggtcggggcggggtcggggttgcaaccctagattaaattaccagattttaattttgtaaattaaaaattgttttaaaaggttttaaatttaaatgttgagagagacagaggaacagaaaatggagaaagatgaagagaaagaagaatataaagaagaaaataaagaggaagggaagagaaagatgaagaaaaatagtgaggaagagggacagaaaggggaagagagagagaggggggaagagaacgaggaaaagagagggagagaagaacaaaataatgatgaagagagagaggaacagaaagaaacgggaagaggaaaaggggatgatggaagaaaaaagaggaagaggaaagaaagggaagggggaacagaaagtgacaaacagaagaagagggcacaactaaattattctcctaatttccttcctattagtagaatagattaggaaaatctttcccaggcacttgaaaagggcaatcaattacacgccctccctcttttttgtattttaatcaaaatcttatagataaatttgaagtctataaaatttatatttagttatattttagcttttatttgttctatttgttgccttcacctttgcctat

SEQ ID NO: 33457 - DNA, 918 bp, Heterodera glycines
cggaattcagggccaaaatggtcggaaatcgctaatcgaaattccgtgccatccctaggtaaaaaccgttaattggcgcattattaaatcgattagaaaatataattcaaaaacttaccaaaaaaataagtccaaacaatagaatgagcaaaatgatcaaactgttgcgccaaaattccattcttttccaccacggaatggcacttttttccaccaaatcgccgcccccaatgctgcctggccacacttaattaggcaattaattaattaagcaattaattaattagataaatgaattaatttatttaattgtgtgatttttacttgtgtcgttgaaagattcgtgcgcattaaaatgatcagcatcagacattttgcaggaaaattacgtaaaaagagataatcgaggaaaattcttaaaattataaataattaggggcaattaatttggaaagtttagccaatttttcgcaattacggccatttaagtgaccactgatcaaaggggcagcgagcgaatcattaataagcaattgaattacacccattaaacaaatgaaaaaaagcagaaatgttgcaggaaaatgattgaatgagagtgactaatgggcggcgactggtcattagtgaggatgggcgtgtaattggggaaggataaatggcgcaattaggccaattagtgaccagtgatcaaagtgcattcaaaacgacgccattagaagggaacggcacggaacagatgaccaaagggcaattaaaattagtgcaatggcattcattaattgagaataatgaaaagggcgactcagaaatcacattttcgttttgttgtgataatttgtagttaattaaaataataattacatttattttcaataactttgtttcaagtgcgataagaaaatcgcggcgccgttt

SEQ ID NO: 33458 - DNA, 962 bp, Heterodera glycines
aaatatgcacaaaaaaacttgaacattaggggtgcaaattaattttaaaaaaaaaatttttttctcatagagtttatcggttgtttttgcaactacagatcaaaaatttctcgattttcggcagtgaggcttcgtgtttacccactcgcgcatctattcagatttgatttaattttaggcataataaaaatttttttcctaagagatattaaaatcggaaaatatttgacgaaaaatggcaaaatatgcatgaaatatgcagaaaaagccaaaataagcaaatatgcacaaaaaccttgaaatatgcaaaaatatgcaaataaaagtcccgatttttatacgcaaacacaaaaaagaaaggctttttcctgctatttagagcatggagaagccaggaaaaaaatatgcatttgcatgtttttgcatccctgattattaaaatgaaaattttggaaatcaatggagaattgttatttaaaaataatgtttatttttataaaataataaataaaaaccgaaatgaattttttcaacaacttttttttcaaattttttattaacattcaacaaggacatttaaatcattgttcacttgttcccgccatatccagcccaattaaattttccaattttttcttcctttcgatttgctttttctttgctgccgccatttcctctcttatcttgtaccattgcttgtcttgcgactccttggtccgtcgctgtttgctcgagagcgtggacgaggcgtttgattgctcatccaatgcccgcgtcttggcattggattggcgattgtttcttctccctcctcctcctgttgctggtgctgctcattgagctgtggtgtcgtcgcaccgtccctcgcccgactttgcgcttcttcctcgttcctcctcttttgtctctttatctgtcctcctccttttttgcgcctcttttttgcgctctcaccgtcctca

SEQ ID NO: 33459 - DNA, 118 bp, Heterodera glycines
ctgaacggtctgagcatcaagccgccggcctacttccaaggcaagttcgacatcagcgttaccgcgaccgcgaccgagaaggccaacaacgactccgcctccaccccgggcaagatta

SEQ ID NO: 33460 - DNA, 446 bp, Heterodera glycines
gcatggaaatgattgaaaatggcaaatggctgagaaaggatgacagattttggaagtaaaattagaataaattatcttttttaccctctttttcaatggcattaataaaatattttgaaattcaaaatctttctctttttaccatttgtgtgcagcagcaaaaaacgactcacaaaaatggatttattctcgtcgaaggtcaaccgctcaatctcttcaatttccttcacttggcttatcaaagaaatctcttccgtttttctcttcgcatatttacttttgtaaatgttcacgaccattcgttgttttgtcattgggtcataaaaaagggaaaatggcaattaaaaaatgtaattaattataaaaatgtgcaaatgaagcaattaacatacgtaaaacccctttattttcaacgcgttttttgcaaaaagttcagagttgaagcg

SEQ ID NO: 33461 - DNA, 1678 bp, Heterodera glycines
  unsure (1)..(1678): unsure at all n locations
attttttaaaaattcaaaaatatttggcaattttttgaccctcaggattttgggctaaaattgaanaattcataactcaatggaggaccggtcaatttaagtgaattaaagctttaaaaatagcaaaaaatcgggagaattttataggatttatttgggatttctatcttctaaagaaaaaaagttattccagaaattctggaaattttagatttttcagaaaaaaattcagaactcggttctgaaaagtcactcttgaaaagtaaaatactacaaaaatccgcattttttttctctattaaataaactttgttttacatttttatctcttttttgcgaattgttataaaaataaaagtgatttttggtttcgggaccataggggggtgaccaggatttttgggtggaaaaattttttcaccgaaaatattccaaaaacatgtctttaggggttatttgggccgctgatcacgaatatgcaatcagattttacttttgagatcattaagccctcagaatccctgtgtgattggggattctgagtcatcttctgggggggggggggggcggcaggttcgaatccggccggtgtacattatttttctatgcatttttgggttattttgactttttttaattaatttgaagatttcttttaaattatttaaatttattttttttaaattaaagaatttcattattttttttgaatttgtaaaaaaattaatttaatttcaaattaaataaatattcaattaataatttccaacgttgtttttaattaataaaagagtattttattataaaaaaatttttaaattaaaatgcattcgatttttataaaaacgtttccttatttatttaattttaaacaatattgtacctctcctaacaatgttgtaccacttctaatcacagttgtaccacttctaatcacagttgcacctcttctaatcactgctgtacctcttctaatcacagttgtatctcttctaatcacttttgtacctcttctaatcacttttgtacctcttctaatcacttttgtacctcttctaatcagtgttgtacctcttctaatcactcttctaatcgctgttgtacctcttctatttactgttgtacctcttctaatcactgttgtacctcttctaatcacagttgtacctctttttatcacagttgtacctctttttatcacagttgtacctcttctaatcactgttgtacctcttctaattccagtgaatcccttcacagtctatgtagaaaatctcctaaagagtcaagtgctttttcccactaaatatccaacgactcacgcaccccctatatactatatatgacatattgacatggagtttcgattctcaaaataaaatctcccgaccgaatgtacgcatcgccctgaaactactgaaagggtcttacaactttttgatgacaatccgacaacactatataaaaaaatttacctgcgtcacgactgagccccaggcacttatttctcattttttcgtgtatttggggtaccgaaactttttttctaaaacccaaatcacaaaatgcctgctgtgaggcgactaatctgaagtgctttctataatatatataaaataccaagcctctatctgcaatacgaaaggctgtacgttcgtgcacattttcagtaccaact

SEQ ID NO: 33462 - DNA, 979 bp, Heterodera glycines
ctcaattttccttcgggcctcagaaaatgcctttctctttttcggccaattttgtaccgatcaaagtgaacatggcttaattcaggccccaatgtgcgcctgaatcgctaattagcttggcactttcgaatattacatataaattagccctctcaaattttccttcgggcctcagaaaatggctatctctttttcggccaattttgtaccgatcaaagggaaaatggcttaattcaggccccaatgtgcgcctgaatcgctaattagctttgcactttcgaatattacatataaattagccctctcaaattttccttcgggcctcagaaaatggctatctctttttcggccaattttgtaccgatcaaagggaaaatggcttaattcaggccccaatgtgcgcctgaatcgctaattagctttgcactttcgaatattacatataaattagccctctcaaattttccttcgggcctcagaaaatggctatctctttttcggccaattttgtaccgatcaaagggaaaatggcttaattcaggccccaatgtgcgcctgaatcgctaattagcttggcactttcgaatattacatataaattagccctctcaaattttccttcgggcctcagaaaatggctatctctttttcggccaattttgtaccgatcaaagggaaaatggcttaattcaggccccaatgtgcgcctgaatcgctaattagcttggcactttcgaatattacatataaattagccctctcaaattttccttcgggcctcagaaaatggctatctctttttcggccaattttgtaccgatcaaagggaaaatggcttaattcaggccccaatgtgcgcctgaatcgctaattagcttggcactttcgaatattacatataaattagccctctcaaattttcccttcgggcctcagaaaaatggctatcctcttttttcggccatttttgtaccgatca

SEQ ID NO: 33463 - DNA, 870 bp, Heterodera glycines
aaaattttgaaaataattgttgctggggatgctgggagagcacataggaggaggcgcgcgtcggagccttacacgcaggccagctactttttcttttgattttcaatgtttatccgaaaaatgaccgaagaatttttggtttttcgtaagtttttgacttttgaaccgaaaaagatgaatccttcttgaaatgctacataatttttctttaccaattaatagagcccggacgggcccgggggcccgtccggcttttaccgggcggccctgtcccgtttttctggacaaaccaccgggaccgggacgcccggtaaaacgggcatttttgacctgggcggcccggtcccgagtcactctaaggaatggaaacttggcaaagcaaacaatcattaaaaatttattagttttatataagctaacaaataacaaatttttgtctaagattattttaaaaattattttccttacatatgacaaaatgtttgaatacagataattcagataatttcctaaaaatgagagataaaccaataaaaaaatcgaaataacaaaatatttttttctctaaaattttctctacttttgaagtactatctacgagcagcagttgggcggctgcttcgcggcgccaaccgctctgttttagtttaaatttattctgtctctcaatctcatttctatctttttttctttttctcttcctcatttttaattaattctctcttagatttccctcaatatagttttcagaccattctgaaggagtgatttgatcatgctggtacaattgacttttttgatcagtactgaaagttatactggcataaatttttccagatttttatgttgcgcagaaaaaaagaagtatgt

SEQ ID NO: 33464 - DNA, 744 bp, Heterodera glycines
ctctcgccgcactctttcggcctccgaaagcccatgacagacgatctttggcaccgatgaaataccgtaacccgcccattccgaaagaaactcacctttttgatggccactttttctcccgattccacgtcttccgccaagaatatttggctgaatccgctgaaacaaatcactctatttccgaatgtatttttgccacagtatttcattgccctccttacagtaccccaaccgacccacccgctagcaattttccttttcattctgtattggtgcccatccgtctcgacatccactcggctgttcacacatcccatcaaataaatactaaaacattttcttttttcggagatttttattttgtattttcaaggtttgatgaaactgaaatgaatgaaaccaatccaattgatgactgttttatatatcaaaaattaaacaaaagaatcggagtttgtgaattttgggaatggcacaataattaaaaagaaaggcacgcgtaaatggcattacaaaacgaaagttaaagcacttaaaaaatgttacgggtaatggcataaagtataaatcaattaaagctgcttacgtcaaaggaaatcaaaaagtcctctcctcttataactcttcttttgcttcaaatgcaattggtccctttcccctttctccgtccaaaatttgttgtcccatggcgtcgtgatcaagcagttgtcccaccacctccgatccctccgtgtcgcttatgta

SEQ ID NO: 33465 - DNA, 160 bp, Heterodera glycines
agggcttgaattcaatgggaaagtcttttgggcagggactgaacgcaatgatcggactgatcaaagaggtacaaaaataatgaaaaactatttaatttaaaaaataatttcttcgttttagcggtttgcagcagacttggaaagacgccattttatcgtg

SEQ ID NO: 33466 - DNA, 1350 bp, Heterodera glycines
  unsure (1)..(1350): unsure at all n locations
gacgattgttttgatttaaatataggacttgcattttttgacatttaaattattttaaaaatctttttggttttaaaatttccaatgacaattaaatgtttaaatgcaaatatgcccgctttatatataattacttaattatcccaatcattattaataataggcatgaaatgatgcaatcaaaattacatcatttttatgcaataaaaagaataatgatgaaatgcattctcgaataattgataggtcgcattaatcggagctacaaacatctgggtcaaaccaaagactagaaaatatttaaataaatatttgaaagtgattttaaatgagttgacgagcagacttttttttagaaaatttctattatctgtttacgaatttttaagaaaatttcttcccaaacgagggtgctgcgccctgacatttcagtccaaaatgatttcaataaataaaatttattattttaattgataatttatttttccactgagctataaattaaatatagaaaataattattttttaatattcaaaaaaaaattattagaagagtaaggagtaagaaaatccaaaatcacgtttcatcattcaatcgatttgttattaattattttttgggactgaaatgtgccatcctcggctattccttgtcacatcgccatatccatataatttttcacttcgtctcgtcacctttttcgcggtccacgacttttctcttataaggaacatttttaatttgaaaaataaaaattanattttagatacatgaataaatttattaaattaaaatttatgcctttacatactagttattatttgattattacaattagtgaaagtttattcaaaataatgaaataaagtaaaggaaaagtttgactgattaaattagcattcattgatcacatatcatcttcaaagattaatgaattaactaccacaatttgaaaaaaatattaaaatttagatgcataaaaaataattgaaccaatattgggcgagtttttgaaattctttcatcaattaagaaaattgaagctcaattggttgatcatctgggctaaaattaaaaattattatgcaattagactaatttaaattatttttgtacctgtaaatgacaggttggtcgttttttgtttgttcatcaccattcccatcgttatcaacattggtcgcagaaggcacttcgggttcagcaatcatgtcctttaaaattaattaaatatttttaaaaatattttaaacaatttaatcaaattttaaaatttttgaactaaattcaaactttttcggaatttaatttatgaaatatacaatatattaattgaaccctnattataa

SEQ ID NO: 33467 - DNA, 107 bp, Heterodera glycines
cttccgatacggattatggaacgcgatgccccactccctgagttggtgcttcacgggatcgacgaagaacgaacagctcgccaggaacgccacgctcttgccggcgt

SEQ ID NO: 33468 - DNA, 778 bp, Heterodera glycines
  unsure (1)..(778): unsure at all n locations
tagcactnttggttggtctaaaatcaaacatacatataataaattatgagtagaaaagaatcattggattttttattacattcagcatcaattttaacaaaaaaaaaaaaaatggaaacagggccaaaaatcggggttggcaattcgtttttaacaaagaaacgaaattacattttcgtgcgccatttgtcatgaattgaagctcgtaatttgtttcatatgtaagtggcaaatattaatttttcttttcaaatgcccaaactcatttgtatgaacagcttcaaatttcattttcaaaattaattgcaaaaaggtgatcaaataaaataattttaattggaaattcatagaagaaaaaacacacagattaaatgaagtaattataagttgtttttcaggtaaagccggaataatcgtaaaaattttcttttaattttttcgtttgaaaataaaccgaaaaaccgtttggaatgcctgccgatactccgtactaaaattgaaaataaatatttaaatatttttttaaattttaaaaccttgtaaaatataaaattggtccatttgacgttgcgccaataatcccagaaaatgcggcaattgcatggccaaaccaagcagtgatcggagatgaaattgtggtaattaacatcaagtaggaaattgcagagaaccaattaccgccgacattcacagtaattatgaaaaaagtgcgcgaaaagtgcgacgattgatcgaatcagcggacggcaaacctaaaaaagagttaattaagtaaatt

SEQ ID NO: 33469 - DNA, 781 bp, Heterodera glycines
taattaatgaaaacataaattttatctatttttagtccctcttgcaaaatttagaagaaaaaggtaaataaataaattcttttttttgaaaactgggcctaggcttaggctaagcctagaatttgattttaatcataaaagaggcgtaggtttgagttagctaagcttagactatgattttcaataaattaaaaataaaataggcaaagactttgattttcaaaaattaaaaaaataaatatacatataatatcttttttattaattaattaattaattttttatttttgtttattttgccattcacccattttattggtcatttacccaaattccgttcggatattccagcctttggtgatcagtggcccagccgatcaggtcaaagtcgggcagctcaacccgttccatcatcttaataaaaaattattattttttatttacgtaaattatcatttataccagggatggcattccgaggccccaaaaacgtcggaaatcggaaatttttcaaaaatataaaatataataaaaaattttctaaacatgttaataggctaaattttttaattcttaaccaagtaaaaggcgatttcaatttttttggtatatttgaatattttgcttgaaaaattattcaatgattttatctaaatctttttttatgtcattttgcataattttagaacattttttggaaaaggagtgagtatttacacgttttttaaggcgcgcttttttcaaaaactttttgggaacatggaggagggtccgggaaaat

SEQ ID NO: 33470 - DNA, 686 bp, Heterodera glycines
  unsure (1)..(686): unsure at all n locations
cttgaaaanggcgcttcccggaacaattgcacatcggtcagtcacattggcactgtattttaaatactgtaaatatgaagattgactgactgacaatggtgtaattttaggcatttttcatctttttttcatataaagattttttaacgataacttgttgttaaacttagactaacaaaaacttttaaagatatttctatttagttttattttggttttgtgaattgtttttttctaaaattttcccaagcaaaaaaaaaatttttatttaaaatttttcaaattttgactccatttttgactccatttttaactaatttttttattatttttaattttgcaaaaaataattttaaattatttgtacactggtggaaaaaagtctttactcagaacatgaaaaaccaccttaaaattcatttaaaaacctgaaataattcatgctagcttatcttttgatactgatcaaaaaagtctcttacatcaacttgatcagatcactttttcatggtgaccaggaaagtcaaaaatggcttgaaattgtggaaattttagaaaaaaattcctagggggttaggaaaatttttttggaaattttgaataggctcattggatagagcacaaaattcactacagaattgccttttggatggttaggctacgatttatactcgctgagataggtt

SEQ ID NO: 33471 - DNA, 693 bp, Heterodera glycines
cggccaccggttggcggatttccgtttccgtctgctcgtccggtggagcaaaaagaagggatttgaacagattgacggagaagcagatggatgaataaatagttgttgtgttttttggttggatcaatccacaatttttctttttttaaattttttttaaaatttaaattgatttcatgtgatttaaatttaaaattaaacagttggtgattttagaccgacttctgttcattaaactttggtctctttggatgattgtatgaaaacactatttatttattttttgaacaaatccattcttgttctcactgttttctcattagttttccaaaacattagaaatggttgttttaattgtgtacaaaatggtaatttaataaattgaaaaaataaatttttatggctgatcatgtggggtcgggaaaaaaaatatggatataaaattcagaaatattacaccaaatgtggaccaataaaatccctaatttatggataaatttctcaaaacttcttaaaaataattaattttagttaaaagtctataaatgataaaatttttaaattgaaattttcttatgaaaagaaagacaaattgattccggttttgtaacagaaatgacaattgttttccggtttaaaaagaaaagacaattgttttccagtttaatataagtaaatacatttcttttccgg

SEQ ID NO: 33472 - DNA, 1378 bp, Heterodera glycines
agatttttagctttaattagtgagtttgacgaaatttcctttaagttcgaaaagaatatacagatgcttatgttcaatcttatgtgaatgttctatggtcttatgtgcctataatttagaaaaatattttcatttgtctcattccccaaaaaattaattaattaacccaaagttaattaggagtcctctccaccggtcgccccattcattttcccaaattcatggccaatttgcaccaccccattcggtcatcaaaaaaaagaagcaattaaccaatattgacgcaatgggacaaaaggagcccgcgggggcgagagtagtcaatacaataatgtgtgggtaatgggacaataatgtgctgatgaatacataatgggtcgaggatgagggaatgaatggcgatgatgatcggttgacttgaccggagagtgatcaaaattttttgccccttctccttttccgctgatcacttgttgctgaggacacacaaatctgatcagtaggacactgcgatgaataacagggggcgtgtggttgggaacggaccagaatatgtttgttggacgactcttagctgatcagcatgggggacgggcattgtcattgtatgggtaaaatgactgatcaatccccgcacaaactctatttaaccgccaagcagaggctgttctggtctccttcggatttgggttaaatatgatccaaactgatcatttttggaccaattgatcagtcattggtcattacttgggctaatcactctctgtttattgttttaatcaaattttctcagtctgtgattaccagttttaatcaaattgatcatcacgctctggtcaccatttgaccaacttgtgaccatttttggtttctgttagtcagcaatgaatgatcacacagatatggcaaataatttgttgtttttaaaaaagcgggcgagaatatgccgaaaaaggttggttagcaaattttatatattttcttatcatttcattgaaatttccaaacattttcgccggcggcccaaatcagcaccgtaccttattttagcattattttttgaaaatttgaacctaaaatggcaaaaaatttataatgtttggcgcaaaaccggtacttgaaaaataacactgggtaaaaaaaagttgtccgaagagcaaaaaacaaagttctttgggtttatccctcttgaaattttttttctggctacgggcctgcaccaaactacgacaatccaagtccaataagcattgatcaagcataacccattcaaaaatataatcagcaacctttgatcacttcaagactaataagcattggttcaaatcgcacatataagcacggaaacccgatcacttcacaactctcagcacattaa

SEQ ID NO: 33473 - DNA, 850 bp, Heterodera glycines
ttttaaatgttatgcattggacatacccgacccattcggtccgataatagcggaaaatcgtttaaaaggcccgatgtaatgcttgcctttgaaggatttaaaattttcgatttccagcgaatagaggaatccgtgaccttccattacctaaattagataaaatacattctcgaacaataattaggtactagggccgcaacttttagtgaaaaaacttttttttttgctcaattgttttgaagaaaggagctcaaaaaacgcatttctgcattaaaattttttcatttggacgtcacttttcgtcactataaatcactattttggggttttgtcactaaacacagcggcccaattttgggctccaagtacaattatgctggatttttatttaataatcagaacgccaaaactttgcaaaacttaaaatttttttgggattttcccttgtaaaattagaagagccgatctcgagttaaaaacataacttcgaaaaaataaacagggattcgatggagggggtcaaaatattggcctatgcaaaatttcaagaaaagtacccacaggaaacatttttttcccaggacaaagttttttctttttctctcatttgggcgtactatttccatgtctctaacatataaaataacacatgaatcatttatttgccaataaacaattttttaaacttttgactaaattagaaatattcttcagaattttcccttcaaaatgagcataaaatggttttatttggtctattattgacaaagttataagctaaaaaaatttaataaaatcaagggtaaaatatagtgtgtaccttttactatttgtatttgttcttttggcg

SEQ ID NO: 33474 - DNA, 1524 bp, Heterodera glycines
atatttttaacaaattgccgcccttttcgcctaccctgttaagagaaatcttaatttcactaataatttctaattttcttctataacagattaactcttctatggtgagtttttcaatttctatgtactttattaagtaaacaataattatcaaacatttttctatgattgcaaagcatttaaaaaatcataggcttgtttattttcattatgttttggaaaggtcaattaaataaacaatttttttttgtaattttattaattgtataaatcttatgcaattttctataagcaatcgatagtgtaacaaatagagaagataaagtctgatcaagcacacacctttcattatttccggttaaatatgtgttcatattttaacaaaaagcagtcttgaatgtcgtcgaaatttgtggtaattccatggctatagccccgaccaattgcgctggaattttgccatgaggcttattttttgtgctggtttcgaatttacaggcgcccatgcaattggagcgcattaaattttttgtcgatttttcttcaatacccacattatacgataagcatttcctcgcacaccgctctatttgctctgttttaaacaacaaaattttcccaagcattcatactgttcggatgagcctatttgaattatattggcgatctgtctattcaaatccccgccattttgttgttgtcactcgcccataaatagacggtcattccctccctcctggtctttcccctcattcattttattttgttattttcctccgaccaaattatcttcgctttttatttattgttcgtcaataaacatttatttattgattgtcttccttaaaccctcggaccgaacaattggcgcagtcacaaaaatttggactttgctcacatcttcgggtaagaacaattgagagcattgatctttttaggattaaaagcaaaagccgagacggcacaacaaattcaccgaaaagccgggattggctgtgaattttgattttaaagctgagttggcaaaattcttcaacaaagcagtcaaagaaactgctcagtcgtcaaaagcctggtcggcaaattcttcaatttaagcagtcaaagaaactgctcttctaaagccgggacggctcgacatttcttctaaagccgagtcggcacgccaaattcgtcaaaagccgggttggctaaatattaaattgacacctattggtgcaatacttcaacgtttattgatttcgggtcgaaacaataatcgtctacaatgacgcaacccgccgcggttcagccaaatctgcagcaattaatcgacgtaattgctcagcaacagacgcaaatcaaccagctgataaatgttcaaagaaacaatcagccaaatccagcaatcatccaaacaataccgtcaatgccggacgtcgcaattttcgaacaatgcgacgaaaagcatcgcatcaccgaatggctggagcgtttcactttgccattgactcgtgcgcaccgaacgcggccgatgacataaaa

SEQ ID NO: 33475 - DNA, 311 bp, Heterodera glycines
ttcgtcgtccaatttgcaattatataaccaaacaaatcatataaaggttacaattttcgatagtttttttgcgataaaataacgaaaaaattgccaaaaaataccgaaaaatggtcgatacatttttcctgccggtttctagtatttttagattgttagtaactcgctctaattcgaagaatctaggtttattttagaattttatggcgaaacttacaaaatgacttagagcccgaactgagcatctgctaatgggttttttgggttctttttttaaaaatttagcaatttttatggggatgtgctaaaca

SEQ ID NO: 33476 - DNA, 962 bp, Heterodera glycines
ctagagtcatggcgctaaccataaaaaagatgaatcattttttgaaaaatttatatagttcgactaaatttgaaaatcgatttatggtgtacaggatgtttgtcgaaacataactcgtcaggcctttaagatagacctgccattgctattcctgcaaatattgagtctagtcagcccaatcgattgctattcgaatggtttggggtcgttggcccaaacaaaagttgtgctgcttcttgcaaagaagactaagccaactgtaaacagcaagccatccaaatgcttcaatgtaaaaaaaaattacatttggatgcaacctttatttttcctcgcctctcttttcgaaaagaaaagctattagcaagcgtgtttggaccaattctaaaacaaatcggggtaattaatttaatctgactttataagataaatgggaatttaagcgaaggattcatgcagaataataatctatagaaattctcaaaaaagtagttcctcgcagattcggggaccgtttctataaagctagagacatatgcgctaaccataaaaaagatgaatcattttttgaaaaatttatatagttcgactaaatttgctaatcgatttatggtgtacaggatgtttgtcgaaacataactcgtcaggcctttaagatagacctgccattgctattcctgcaaatatggagtctagtcagcccaatcgattgctattcgaatggtttggggtcgttggcccaaacaaaagttgtgctgcttcttgcaaagaagactaagccaactgtaaacagcaagccatccaaatgcttcaatgtaaaaaaaaattacatttggatgcaacctttatttttcctcgcctctcttttcgaaaagaaagctattagcaagcgtgtttggaccattctaaaacaaatcgagtaattaatttaatctgactttatgagataaatgggaatttaagcg

SEQ ID NO: 33477 - DNA, 931 bp, Heterodera glycines
gtacacatttaagtaataatgtacatatacatttttaagcttagaactgcgagagtataaaaataaatatatttaatttgaatctgtactgttatttacttgttgacaaaagtcccgaaaaatcataaaaaacccagccaaaaaatagtacgtcaatgataagcatcataagcccttgcctaatcgtccaactcctgaagccatttttcagaatcgctcagcaactgatcaacatcatctatgccttcaaaggacgcttctttattgttcattacgaggctaacaaattgtcgaagcacaaagacgtgccagtcagttgaaggatcgtaaccatagtgcttctatttatatttaattgtgtttattaattctattcagaaaaacactgcataccagcattcttccaagacagcttaacttaatcggcactattgccctcggagtctttcatggcatgttgtgaaatattggcttgagaaagttttgctcctgctcctgccatagtcaatatggcgcgtattatgccgattaaaaattctgggcgcaaatgcagaagttttgtaaccgaaaagcgccgccgcggtgtagtagaactgctaccgccgctgcttctgctgcgatcaccacacatactatttctgacacttccatgaggagtttcacaacgaacaggtcgtgaaaatggtgctaaagacggaaagcaacaaatcttgcgcaaacagatgcaatgaaaagtaagatcacgaattataaacaagttctttaaattttaataatatttacgaaaaatgaacaagaattactctgcgacgatgattgatgccgtcacagattttgtggcgcaacaaacacatctgcatcagcccctgccaatgatgtggatgacgacttctcaattcgtctgttcatcatttgcacgcacgcatttaat

SEQ ID NO: 33478 - DNA, 1015 bp, Heterodera glycines
acagcctatgataagcaaatgaaattattttatacacccatttaaattaatattttgcaaaatttaatattataattatctactttttggttttaaaaatgaatttctctaaatttaaattttaatgctttttttagaaaatatgtgcttttttaaaaatatcaattttatatgccgctaatatatatgcaaaatagaaatttccatttttgaaaatggaattgattttagttaaataaattaatttggattttttaattttttagccgggggataattaaagtagttaattttctttggtatgcccacctttgtatattgggcaatttcgttgttcttggccgcatttcttagtgccaacttttcatgctttttgtccaccatttcatgtttggcgccgtttttgcgccgttcgttgcgaaatgcgcggcgtaagccccattcgtccaccactgctctgctgtagtgccgttcgacccctctctcgtcaatttcaacaaatggcaaatccattcgttgctcaacgttcgagtaccacgtgttcggttttatttgctgatcatattcattatgcaaatcctcttcaatcttttcgatatcatctgcgcaaagaagaaaggaggatttaaaaaatatattattgttaaatgaaaaaaatataattgattgaatctacattatgattagagaccgcattttgaggcataagcctttttttctgctcactagtttcgatatattaagcataactaacacattttccacttgctttgaggcttctacgttgacttttattatgccttttttttgtctttttcgggattttcgtgccttaaatgcctttttaggcgtttttttttcgattttggtgccttttttggcatttttttccggaaaattccattaaaaatggaataaaatcgggaaaatacacacctaagaaataacctggaaaattttcaaaaaaaacatccctaagaattgaaaaaatttctgaaaatacaccattaagaat

SEQ ID NO: 33479 - DNA, 594 bp, Heterodera glycines
aatatttttctattcttaccaaaaaccctctttattgaccttttgtggctaaatttgcaataatcggatttattaaattctgtccgtccttttgttacattttggcctttgccccccccccccccttaagacaatgtcctcgtgttggtcagcggttgcgtcgtctgtccctcggggttcaaccaaagtgtaattaacatgcaattggtgcaattgcaccctgaagggtccatgctcacctcgtgctaccaagagtgggaaagtgtgaggtcagtgagagaaggaatgccaacgacggattaaacattcgcaattgcccattctaagcattggcctaagcattgccactcttttttttactgaattttttaaagtgccatcgaaattcggacgcccattggctccaccacgccaattccttttatcatcggcgccgttttctcggagcgtcgctgccccgggctgttcagcaaggatgcgcttcgcatggagttcttctcccattatcttttgctcgaaaatgtccaatgcgtttcgtttaaccaaaaacggtacggtaaagaacgattatactgtacaaaagtacggtgcttt

SEQ ID NO: 33480 - DNA, 874 bp, Heterodera glycines
  unsure (1)..(874): unsure at all n locations
attagcgatgaatttttgaacaaatagtcaactgaaaacacagtaaaaaaatttaaattcgatactgtcggttcccttttatttatttgatttcaatttttctcacgagagtgtggtgcgcccgtgccgcaaattccccggcggtcatcgatttggccaataggtgttggttgaaccatctgattaagtcctgcattgctgccggcacttcctcaggtggcatcggctcgaagtctccgatcgtcatgttgaaggtacgcaatcagctcgcccgggtgtcgcgtcggtccatcacttccaagtgaagttcgaagaaggtctgcaaaacgaagttgtattttcacggtacggcatgtgaagccagttgattcacctgcagcgtgaacttcgcgacttggaaggcggacttcagcagggctgacagcagcttggcgtcgtcttcgaacagcgaataatggctgtcgttgccctcctcctccgcttcagcttttaatagccattaaattctctatcgtcatggaaaattcaaaatgtcctcccgtggcagttgtagaacggatggatgcacaccttagcttttaacaaatcttattttttagatacggtatgctttgttccaaaatttaaactcaaaattcatattgtcatgtaggaatgatctggtcaccttaatgccattgacttatttgatcagcatcgacagttataatagcgtgactttttgatgttttcgccaaaattggggggccattttttanataaacattaataccgatagcatcgattctcgaatttttttagtgatttaatggtcaaaacttaattagcgatgaatttttgaacaaaatagtcactgaaaacacagtaaaaaaat

SEQ ID NO: 33481 - DNA, 1375 bp, Heterodera glycines
aattttcttaaaaattaataaatttatgtcaaaaataccctaaaaagctaaaatttcgcttttttggtagtttttctctagaaattgcttgttttcttctaaaaacgagttcttataccgtatttagccattttagatgtattttactagaatttaatgaatttgaaaatttttttttgaaaatttacccataaattcggaaaatttatgtccatattcttgccattttctgtccatattttgcgatttttggtccatattttatggccatatttcgcgtttttatatccatataattacaaaccctaattattaataaattgctcaacaaaaaagcatatttttatataattggaacgaaacaattaaaaaagcatttctgagagaaaataagcacaacaaattgagatcgatcatttctcaaatacaattaattattctttcccgtacacttaatcagatgacatttccgttgctttgatccgcttcttctttttcttcttccgttggtggcgacaatggcctaaaattaattaaatattttatttttcgataaaattcaaatgctattgctgctgctcacccaatggatttatcgaaactccacagatcaaaagtgacattgttcaaattggcactcggatttacgctgtctttccatttaattgctggcaccgtcgccgtctccccaattgggcaccgttgcaacagccaattacacacatttacgtcgaattcgtcgatctccttcgtcagtgtcagcttttctttcgtccgtttgttcaccaattcaaatggttcaattggcattggttccaaatataaattaaatcgaattttgtaactgatagaagtggtggcacgacggaatgcctaaacacaaaaattggtaaaacaaaaacaaattgacgaaaattctggcgagacgacctctttgaagctgttgacccatccgagattccgtggagaattaaagtaatacaatcgcttcggttgaccatttttgctcggagtgtgcaaccatttggtcaacgcttgggcagcagttggattcagcacatcaaaatcggcaattccttctgggaatagaaaaccggaatcaattgcattcaattgatcaagatcagtgagaattgttggtgaagtgcgacgacgcaatttgtccaaataatcgccatcgtgaaagcccaaatgacgaatgtttggtgcaaaaattggccaaatttcgcgaacaaaaacatcccaaattgactgatctttctcggttctgtatggccacaatgtcaatttggtgcccattctgtcccaaattggcttgttggaacggagaaatgcgagcacagagtagtcaatgtagctgaagaaatattaaaat

SEQ ID NO: 33482 - DNA, 906 bp, Heterodera glycines
  unsure (1)..(906): unsure at all n locations
aaagacatnnagaatttatcgtcaacaacaacaacaacaacctttgaataggcatgtattaaggatcataatcactttggcgcgggacattttgatgttaaatttacagggtaataattcttgaatattgaaaaatgcattaacgtttggcgccaaagtgtcccgtcctgatcgaacaaatcaacaatactatccgaacaaattttcatctgctcaacttactatacagtatctctttcggtttttcgctctacgggagtacaaaaagtgcaccattgccatcaatgaaacataattgaccaaattcattacgaaaataatgacgcactccttccgaaaagtccaattcagcgccatttccagcaacttcacgcaacagctgtactgttgcagaaccaaaataaaccttaaaaatttgtctattcatttacctttttatgattttgaatataatttcaatttttattaagaaatactaaaagctagccttttttataccaacagttattgagtctttaaaccattattcggagacatcaattttattggcaagagacttttttttatcaatttcactgttggtgaaaatacatgggaatttaaatttttatccaaatggaaactggttccgagccgggaaatttgagaatccgatttgaacagcatcggagagactcggaaccgattgcttttaaagggatcagcccgtctcgacccgcccaatttcaaaattgcagtttctagaaatttcatattgaaaaatttttaatttttcatttatttttcttacttgtactcctctgcattttttgaaagtaatcacagcatgatcgctcaatattcccagattgaaggatcaaatttcaaaccatatttgccctctcttctgtattcttgtactcttgc

SEQ ID NO: 33483 - DNA, 892 bp, Heterodera glycines
ttgttggtgttggaaatgctgttgtaccgatctctgaaccatctcgtcatggagcaaccggtgacgcgatctctccatatggcgctcaattgttggcccaaaagaaggcactaaaatttaatattattaaaataatttatataatttaatttattaaataaattcaccattttcgccttctaacagctgaggctgctgcacagcctgaccagcgacaacattacctatttttttgggggggggggggggataaaaattgaaatgtgattattttaatacctatggccgacaaaggcacgcgtgaagtgcgcggagttgactgttctatatattattttgttttatgcacaattttaaaactcaccgttctggttttgtgcgctacttccctcgccatgctcgcccccgttggcttcgttcacagttgatgctgacgtcgatgcgcctatggccacccggtgtctacgagccctgtcctcaagacgattcccgagcagggtcagttcaacagccgccattgggttataccgcagacgaaagttaccacgaccaccgcggttctggaaaaaatagttttaattttaacaatgttgaattattatattaaaataaaattataaaatttaaaaaaatccaataaataaatttaaattacgttcgaagcgaaacattccaatctctcaatccgtgataaattctgcaaaatgactgctctttggtctatcatctgggagcgcaagttgaaaatgatccggttttggtcgctgaccatccgcccttaactcctggatcgaattcgagacgttgtcggacatttattcgtcgctgattgaaaatgaatttttattaaattgatacctaaaaaaaattttaaaaagaaaatagaaaaagt

SEQ ID NO: 33484 - DNA, 900 bp, Heterodera glycines
  unsure (1)..(900): unsure at all n locations
aaaaaatacaaaattttttccggcggcgcctatcggcaccgccggcccaccttgttccccaaaagttttttttgaaaaaagcgccgcaaaaaaatcaacttcggtttttcatgcttagaatttcacaaaatgtttatttcgaacaaaaaattgctcaaattgatcatggacaatcaaaaataaatcatttgaaaattttaagcgtgttttaataaactttataaaaatgaggctttttgacacaaaatgaggctttttcgcctgccaaatgaggcttttgaaatttttgatctgggaacnctggttataaataatttttcatcaaatcataatgatggtttttaagtancgacttccgcgcccactcagtggccagcaaaaccttgtcctttttggggaaattgcccgtatttcctgactcaattagtcatgaaatccttttcctgtgcccctgttttcaattttgattgcaatttgccttggcaaagttgaagcatccgcctcaaagcttaacacttcgtcccacaccggctccatcgtgcgtttgcgtgccgcgcttttgcgccgtttcaacacctgaaattcaattacaataaaacatgggcaatttaattaaattaattttaatgaaaagaattttgttttatttggctattttaaatcttttggacaaattttcaaaatatttattttattttataattgcattttttatttccattgccttatcatccggtccgatcagctgtgcccgtacaaacacatctgatggaaggccatttccgcgcgcagtgccgccatttgccaagcgcaaattcgatgcctttgaaattcaaaatttaaattaattatatttgcatttgaatttgcttccccacctgatgaacgcttagcgtcaaa

SEQ ID NO: 33485 - DNA, 1014 bp, Heterodera glycines
aaagatgatcacccgattagcagacacctgtaaatgagaatatggattaatttaaaaaagaaattagggtataaataaaactcgccaaattaacgcccaatccgccggcgcgagtggaaatgagaaaaagcaaaaaggcggaattctgattaaatctgacaaaaagaaggaataaaatttagcaaaatacaaaacagggttatcacttgttgatcagcttttcgcggtccgaactcgacgtggacccatccaaacgacagtacgtttcgttccgcacaaagtgcaccggcgcaccatcgggcccaatcggctcaccgctgtgcttcttcagaaattgctcaatcaaattgagcgtgacgacactttggctgaaaacgtcatctccaattaaacaaaaatctcagtaaaatttcgatcaacctgaacagcaaaattttttctccccgtctaatggtctccgaaatgatggccatggaaacaaacattttcgaactgtgctcaaccaaacccgtcacatggtcacgcaaaattgattcagcctgacaaattgagaccttctcataagggttgatgatggttcctccctcacccattccaagtcgatggaattgccattctcaaagaggaattcgtcggacaacaaatcgcactcctcccccttggccatttgttgcggctttcgttttatcgtttgctttggccgttcactgccattgctttgtcctcccttttcatttacacacggaagttcaatcgcttcattacaattctgctgctgttgctcatttggtgtctccatttctctttttgtctgaattggcattgcaaattcggtctgcagataaaaggaattgttgataagattatttggctgctgcagcagttgttgttggtatccatttgctaccattgaattgcaattcccggcaccgttcgacggataataccaacgaggttgctgctgattgaacggccaaaggtcgagtaatcgtagtccatggtgaagaactgatg

SEQ ID NO: 33486 - DNA, 758 bp, Heterodera glycines
tatgttgggccgttctggcgaggctttgaccaaaacgctgcggacggaggcatttcggaatttgatgcgccaagacatcgctttctttgacgacgaacggcacagcacgggcaaattgtgcacgcgcttcgccaccgacacgcccaacgtgcgctacgttttcacccgtctaatggtggtcatttcgtcggtggtcactttgctgggtgccattgccattggattcgtcaatgggtggcaattggctctgattttgttggcgataattccgctgattttggctagcggatattttgagatgcaacagcaggtgactgaccaacaacagaaaatcaaaattacggagttggggagttacaaatgttcagtttggcaagaaaatgcgtgacaccgaactgctcgaagacgccgggaaagtggcatcggaggtgccattgggagggcgtaattgggaacggaattgatttgtgagtggtcatttgaggcggttgaaaacatacgaacggtgcaaagcctgaataagcagctgttcttccaccgcaaatacgcctctcttttgtctgccccccataggttccccccccctttttttggcattttccattgctcattcagtgccaatatgcaccaagtgcacatctacgggttcgtgttcgctttctcccagtcgttgatcttcttcatgtacgctcttgccttttgggtcggctcccttttcgttttgaatggcattatgcgcccggcatcagtttttcggt

SEQ ID NO: 33487 - DNA, 913 bp, Heterodera glycines
  unsure (1)..(913): unsure at all n locations
gtggccagttgttcactgtgcgaattgaatgaatcaggcaaattgaacgccgccgggagagtcccgaaaggaatttctgctcaaagggcatgagacacagaacaatgctcgtcaaatgaaccggtcggattttcccggtcgtacaatgggcactcgtctcccaccatggcccaacattcatttctaattcgtccgtccgtccttttccctctcacctctgctcctcctctctgaacatgcgcacacacgcgccccgaccgaaccgagcgtccatcagaatgcgttggatgttcattttggtgaccactttcttaattgaatgtccataattaaggcaaatgcttttctaggggaaaatttttcttaaaaaaacgaaagctataaaaaattcaaagaaagagagagagaacattttcaaaaaatcctaacaaattaaattttaactaaaaaaatgttgtctaaaaaattcaagtaattataaataattttgattgcacaaatgcacctcgtcgtcgttgaggttgcccaagtggcggacgagcaggtcgatgatttccgactcgacttcgtacaantggttgttgttgctgctgctgttgctgttggtgtggtgggtgttgcaattgctgcagttggtgctgctgttgctgatgaactgcttgctgctgttgttgttgngaaatggtgttgtgctgctgcggccgtagcagtggacagaatgtactgcggcaggggctgttgttgtgccgatgccatcatcagcgaggaggaagacgaggaggacggagtgccgacgccgaccatttgatgttgccgaaaggacgctgaagtgccgctccgatttgtgccgctggtggacgccgaattgacgacatgtagaccctttggagaatgtgataagaatcagtctcaa

SEQ ID NO: 33488 - DNA, 611 bp, Heterodera glycines
caccaaaaatcgtgaaatatgcacataaaaagtgaaaaatatgcacataaaattttccaattgagggtgtaatttctcaaaatttctttaaatttgttaaacataaagtaaaatcttcaaaaaatgctaaatgtggtattaaaaagcattttaggagaaaaaaacacgatacagcttaaaatttactcattttagcgaaaaatcaacctgaaaagcaaaattttgcttatttttgacataaattaaccattttttgagaaaatttatttattcaatatttgtcgtgaaaattttgctaaaaaattatttttttggaaaattttccggtttttgaggtcaaaaaggccaatttgtctgttgagggccgatctattagaggttttttggaaaaacgccaaaatatgcacataaaatatgcacgaaatgccaaaatatgcacaaatatgcaaatatgcacataaatcgcgaaatatgcacaaatatgcaaaatatgcatatggaaagtcatcctagaagcttcaaaacaagctaaaaacatggttttcgtgcgtttcaggcctcccacagtccaggaaaaaaatatgcatgtgcatatttttgccagccctatt

SEQ ID NO: 33489 - DNA, 447 bp, Heterodera glycines
  unsure (1)..(447): unsure at all n locations
atttgttgtttgtgaattaacagaaaacaatggacaaatgttgctgaacagggggagaattgttgcacaaaaatcaaaaagagcaataagcaccaaaacggataattaataggcaaaaaagacggctaatatgtttatttatgattactattttattattattttgattcacttttcggctgtcggagcgaatgcttttgctatgtcaaaatttgccgccgctctctttttggcccaatttgttttgaagaacattgcttttttctgccgcatttgctttttttccacaatcgaatggtcgtgaaaaccgcgaacgaaaacggcaccacggtcgaccacataaacggcacggaaagggcatttaacactgaaaaaatgacacaaataaattaaggaatacggtcgtactatgatcatacattttaaaatggtgggaggaggnggggg

SEQ ID NO: 33490 - DNA, 832 bp, Heterodera glycines
cccccccatttgtttctccctcctcctcatccccttcctctctcttttgtccaatctctcctcccttctcttccttccctctttttctttgtctctctcccaccttttcgttggtggcattttgttgcatttctccgctcgttgtcggctcctcttccgccgccgtttctgctgccaccgccgctgtccccccgtgccctccgaaaatgtctttgagcagcacttcgattgggtcttcttcgcctccgttccctcttcctccttcctcttcttcctcccctttctcccaattgttttccgccatttcgtcgtccttttcctcttctctttgctgctgttctccactgttctgagtgtcttcttcgttttgctcttttttctgaatgctttcattcgtccaattaattcgcttggccatcattaaatggttattattatatgcatatacaaatatgctcattagcttataaatgccataaatattctggcgaaaaaaccctccccttctcacctcctccacattttcaagctgtactccctccgtgccattagcagaataatcgatgttttcctgaagaaaaaagtaatgacatcattaaatgccataattggatttgctattataaaatagtaaacaaatgatcgatcgattgtttgtctttggtttttgttttcttcgccattcgtcccactcactcaccaataaccaaacgtgcattttgttgtgaatgttcggcgcaagcaatgactcagcaacgaatttcgaatgttccttaaaattaattaatttattagtcttttgcatttccatttgaatattatttccctcctc

SEQ ID NO: 33491 - DNA, 877 bp, Heterodera glycines
ttcaaatttttcattggaattgaattggttttgtccctattttcccgatttctgtccgttcgcccacttgtgagtgccatgcgagcagtgaagcgcaattctgtccgtccggcagcagttccatgcctttgtaaatgtacttcatcagcaaatccatttcttcggctgacaacgattttaatgccgcttcaatatccgcacttttgaagctggtcaacacacggacaacaagtgaagtcgttttgtctttgagcgcctaaaatgtaaaaagaatgacggaagtctcaaagaaaatctaacgaattgacaaatgaaaagtaataaaaggcaaaggcacaatcaatgaccaacaaattcggcattccctgccatttcttgggatttcatttgccaatctgtccattcggctgtctcgtgatgcccttttcggacctgattcttcgttctcagtggggcattggaaagagccgccttcaacgcttcgacgttttggttggcttgaagaaattgacggacttgtccctcgtccggcccttgtccgaccggcgtctcagcctcatcgccgtcaataaatttgtcggggtcaaaggcgtccacgtcgagtttcctgtaggcagtgtttgaaagaacatttttagtcattttgagaagcaaaatctaaaaattaaatggtcagattagtgcaaataaacaataaaaagaagcataaattcataggaaaatacttaagcaaattcaaattctaaaaaacataattttttgtttatactaaaaaaatttcttttgttcattttttgcgtacctattctctttagtgtttattttcccgattttattgcattttttattgaatttttcggaaaaaacgccaaaaaat

SEQ ID NO: 33492 - DNA, 1009 bp, Heterodera glycines
  unsure (1)..(1009): unsure at all n locations
taaccaagtcagcctaaaattatcatcaacaatagtttatgattggatgtacttcttttgatgtgagccgtcttatttcaatcttcattattatttacatggatttgattttaggcaaataaatgcccatggtattttcgtgataatgtttaagcaactatttttgggcctattttggcaatttatacccattttcgggttagaaggaatccaaaaataaaaatgcactaatttcagcaaaattcatctatatttttttttactatgggatttttgtgaaaaatccgcttcgattgttttttgctttctgcaaattttgaaactttaagacctgtgcctgtttggcacggccgatcataatggcttttataaaactttcaatactttacatttctaaattgattgatgggatttgaaataacaaacttttcttggctatttggtattaaattatatttatttttcattataatttaaatatttagtcgcttaatatgctaagtattgtgtgatacacaatttaccgttttgcgtttcaccagtttgtgcttctccggataagcacaacattgttgtacgtatccgggttcacagcaaaagcttcctttttcaccgggcgacttcacacacttggcccaaccacatgggcatgaccatcccgcctctctgcacgccttttcttgcagctgttccgggagcaatgtcttaacgtagagtcagcagtgcaacgctgaatagtgaaaaatacactcttaatgatttaacattttgaaaaatatggtgtaagttgtatatttttaatatatagttccaaagttaacactgtttcacctctaacgcctaaaacccgcaatttttcttaaaaataggcttaaaatcacaaaatttttctttttgcttaattctgttaacaaacgcgctgaaaattttcaaaggngggggggcaaaaaaggtaaagaaagtgatcgatatactattggcatgaatttgttggaatggacgtaatgac

SEQ ID NO: 33493 - DNA, 741 bp, Heterodera glycines
ccgaattttaatgtattgggtgtttctcttagagtagttaccctgtcccccgtcgtatccttcaaggaaatttaaaaaaataccaaaactaacaataagatttttttaaacaaatttatttctttttaaattttcaaaaaattggagatttcaagattagctaattaatcgtcttaagagaaccaattgggtgtttcaaacaatgcgcatttccactcgccatgtgtctcaatgaatccgttgacattttccaacacatcgcaaaatcagcaaagacagcagcaacaacagtcggccaacatttcggacggcgcttccgtcaccaccggtttcgcgtctaaagtgacgcctgtccggcgctattacacgcgttccattgcagcggcagaacggacggctttcgcggtcaattccaacactttcagcgccgtctcatcatatccttcgactgtggaaaagtctccgcttttgaggtgaacaatatatttgttgtcgttttagtaagactttttcatttaggtcattggaacacagcgcaactttaaatcggatgaaattgaaaaagaaattggcaatggtcacgagtggcagcagtctcttcgcgcctcgtcaaattgacatgagcgacttgttgagttttggtggtgacagagacgacgcctcggatgaccctccgacgtcgttggacatggcggtggagttttgattgcattggctctgggccgagagtccggacgacgc

SEQ ID NO: 33494 - DNA, 805 bp, Heterodera glycines
acacaacataaggaggacttgaacctgagacccctttttgttgactaactcacagaccactaagacgaaaaaaccaacttaattgtacttggagcagggttcgaatctgttcttatttataagaaatgttctgatttggagggttcaaatcttacaaaataaaaatgttcttatttgtaagaaatgttctgatttcgggctattgttcttactttgttcttatttgtcgcttctcagaaaaatctgtcaaatttctttaaaaatttctgattggcgtactgtttaagaaaaatattttcaattttggcattataatttctttcttgctgttatttttggctaattattttagtttttattgctttattgtctttctcttttgtttttaatttagcacctgcactacatattactaacaaatggcaccgcctaagcgcaaaagcttttttaaaagtgaatattccaatgaatttcaggggatcacaaaaagcaaaacaggaggtgaatttgcgcattacgtcccatgcaattttgacatttctttgttgtccattgaaaaagcagccattcctcaccatctgaagacggaaaaacacaaaaaagcagcgaaagctgcaaattccgctttggcaatcacggcattcatgccaagcaaatcggcacccacggaggaaggttgaattacaaataaaaccagaaataaactttatttgtttacgcgcttgggcatatcacaccgcgcgccatgcgcaaagctttaatcggccgattgtgtctcaaatttgttgacaaaaattcttcctga

SEQ ID NO: 33495 - DNA, 736 bp, Heterodera glycines
catatcaaaaacaaaaagttgtattgactcaatttggttcattctaaatagattaagctttcgaatgataccaagattgttggatttggttaacaacaaaaaagttatagtccgaaaacttgggctggcgccaaaacgatacagacccccggtacggatggtcaaaagcaccgtcgagaaaatttttacaaatttggatgaaatttgcgatgaaaatatttattgaatgaggatatataattcgagaaaataaatttgcggatcccacgcgggattggaattggaactaaaattttttctgcattttccaaaaaatttggaattgcggaatgggacccctcataggacccttcccccggtctttgccgggaaaaaatctaaaattttttaatgaaatttgttaacagattatgtccaaaaaatcaactatcattggttaatttgtgaatttatggctgttttaaaaataaagaaaaataatttttaaagttttgccactaatttttcactcaaacccccattcttaccaggggtggggcgcgcacagaaaaatcccgcggtcgcggattcaatttgccgcggtcgcagatcgcgcaaaaaaaaaatcgcggtcgcgcatgttttccaattttttaaaccatttttaccgttttttaaaattttttcttatataaaaaattaattaaaatcccgatgcatacaaatttgggaagggactgaatgggtgtaggggggg

SEQ ID NO: 33496 - DNA, 999 bp, Heterodera glycines
ctagagtctttgaatcatgggttgcactttttcgaaattaacacaaaacgaagacaaagcttgtaaatttctataaaataaaatttatacttatttttcgcagaaactttttccgataatttttcccagagggatggaggatgtttggcggtttcgaccaaaattttttgtagttcgtaagaaaaaatttgagcttatgtacaaaatgaaatgacccataataaaaaaaatgtttggcttggtgtttttgtgtattcttttttaaatgaacgcggatcgctttgtcctccacaaaattaaattcaaaattaaacctcagacaaaaatatacatttagagcacttggtagtgccattcttagcgtgcgtacaaatcggcagttttgtcctcccacccagcagggctggagcgcgaccgtgatgcgcgatccgcgattcgcggcattttttccgcgatccgcgatgcgcggaatttgtgactgcgcggcaattttggataaatttttaaaaggaaaatatttattgaagcgattgttttatatgaaaattatttaaaaataagtttttgtttgtgaaaaagcaagagatttatggagaattgggtaattcttcccaaaaaattcatttagaaattccacatttttccctagtcggagctgactaaaatctttaattttctttagaaaaaatttgttcaaaataacaaaataggtcattttttagacaaacttttttagcaagttgcacccaaattttcaaaatttttcccgacggcgcctatcgacccccccgccaccccccccccccccccccccaaaaaaaaacttaaaggaatttttttggcggaaatctcatataaaaaatatttaaaaggcttacgggatttcagacaaaattggaaagtttttgaaaaaaaatatgaaatttttgcccaaaaaattggcctaaatttgctgttttaaaattataaagtactgatttttttaggacatattttttt

SEQ ID NO: 33497 - DNA, 873 bp, Heterodera glycines
taaattatttaatgcaatttatgtaaggtaatgaacctttaaggggcattttcgaataatttcaggaaaaacgaaaaatatttctttgaaaagtttaaaaactaacaaaacaaatttgtaaatttaaacaaagaataaaaataatttaacattttttggcttgctgtgaagcctcaacaacagctatttacaattcaaaaataaattggagttgaaattatgtaattccattttttgaagagctctgccgattactttactttcatattttttcaatttaaaaaaaaaatatactgaaatttttacaatgtctgtaaactaaaaaaagagtaatgataataatttgcaaaaacgtaacaaagtctcagatttggtaaatttttcttcaaagtggtcagaaatttggcccaaagtatgcccaaaggaaattaaattacggccaaatgatgacgcaaaatgggaggtgtaaatattttgtttaaataattaatgttttcttcgctttaattgaacaaaatgatgccctatataaatgatggagaaatgagactaaagttcataaaataaagataaaagagctttaacgaaaatgtgtaaaatacaaaaaatgacaatctaaagaaaaataaaaattggctaaaaaatcattatggatagcttctagcattagtccattttactggcaataagatgaatatgagatagagaagaagaagcttcctcgagaggaagattaatggatcaattgagcaataattgatcctatatgatcgagcaaagtgaggagctggagagagcaggcttttcacctagacaccaaccttcaccctctaaaggagagcccccccccctcccaaacataacccccccccc

SEQ ID NO: 33498 - DNA, 930 bp, Heterodera glycines
  unsure (1)..(930): unsure at all n locations
aaatattttgaattttttttatttacaataatttataaatatattttttcttttttttaaataaatattttagttatttttcggtcggatgaggaaaaaattgaaattgtgagaaattttctgaaaatgaaaaaagaactcagtgtgaatggggataagcgaccgtatggcgagaaatataaagaaatatgcgcgaaacttggcgcaagttcacgttcaatttataaatggaaaaggaaatttggctttagtaagttgaaaaattagggccttaattttagtaaataaaaagtcataaaaatgcgtataaaataggaaaatcttatgaattttaatttgaattcaaatcatgcagaggaaccaacaaaattaattcactgaccagtcatttttcattcctacacatcagggatgtgccgagccagacaaaatccgattccgattaaatcgccgattccgattatggccaaaaatccgatacggttttaaaaccgattacgattatggcccaaaatccgattaattgcgattccgattacgattccgatttttttaaaataattttttcccaaaaattttattcataatcaaaatcataaattttaagattgtgatgcaaaaataaaagtttgtccacattctgaggcaataaacgttttctcagatctgtcacaatcaacccagcggtggagaaaagccgttcgctttcagtcgatgtagctggggctgagaaatatttttttgatagcttagattcggaaacgaaatgtcttctgcatacagaagcccaacaaactggttttgttttgcaaaaacgatcaagcattntggaaanggtggatgaccaacgcacctngataggaaaattgcaacttagtaataattcatttcatggttcttttctgctttatgtcccaacaaattttttct

SEQ ID NO: 33499 - DNA, 1487 bp, Heterodera glycines
gcaagagctgcggaaattgtgaattaattctcagaaaaatggctatctctttttaggacaatattctatctcgtaaccccgatgctaatctgttccgcagagcctcttcaaaattttttccattaccgcaagagctgcgggtaattgtgaattaattctcaggaaaaatggctatctctttttaggacaatattctatctcgtaaccccgatgctaatctgttccgcagagcctcttcaaaattttttccattaccgcaagagctgcggaaattgtgaattaattctcagaaaaatggctatctctttttaggacaatattctatctcgtaaccccgatgctaatctgttccgcagagcctcttcaaaattttttccattaccgcaagagctacggtaattgtgaattaattctcagaaaaatggctatctctttttaggacaatattctatctcgtaaccccgatactaatccgttccgcagagcctcttcaaaattttttccatttccgcaagacgttcggtaatcgtcctttcagtctctggtacccggatcgggggagtgctgtttcactctgggtgaattgtgcaatggtttcgggtccgtgttgactcgagctgggggtcggtggcggtcgcgtgcgacacgtaccagcaaccagttcggtccagctcgggctctcagttgtgcgttctcggtgtaaaagccggtcatctgttcgacccgtcttgaaacacggaccaaggagtttagcgtatgcgcaagtcattgggtgttcaaaacccaaaggcgcaatgaaagtgaaggcttcttacggagctgatgtgtgatccctggcactgcggtgttggggcgcaacatagtcccgtctcgatcgcatgcgatggggcggagacagagcgtatgcgctgagacccgaaagatggtgaactattcctgagcaggatgaagccagaggaaactctggtggaagtccgaagcgattctgacgtgcaaatcgatcgtctgacttgggtataggggcgaaagactaatcgaaccatctagtagctggttccctccgaagtttcccccaggatagctggagctcgttaagcagttatactcggtaaagcgaatgattagaggacttggggacgaaatgtccttaacctattctcaaactctaaatgggtatgaagccagggttgcttgactctgaacccaggcgttgaatgtttgagctccaagtgggccatttttggtaagcagaactggcgatgtgggatgaaccaaacgtggagttaaggtgccaaagtgcccgctcattagaccccataaaaggtgttggttgatatagacagcaggacggtggccatggaagtcggaatccgctaaggagtgtgtaacaactcacctgccgaatcaactagccctgaaaatggatggcgctggagcgggccacctatactccaccgtcattggcttgtacacgtgcttgtcgcgta

SEQ ID NO: 33500 - DNA, 487 bp, Heterodera glycines
ttttttcaggaagagattttcgtgacaccctttatatctaacattcgaggcttcggtcatttcctttttcttttgcgcatataatttaggctatttgattttatcagcaaattccgaaattagcttgggaatgggcccttttgaggccaacctttttttatgaatgttgtcccattttacgttgtggtctgcggcctatggatgcttcagagccatttacgccttcttttcaataatcgtatgtaaaaacgactatctctttttttcgaacacttttttgaaaattttttccggaagaaattttgggacacgcagctataactaacattccaggcttctggcatttcctttttataatgccgatataatttaaggtatttgattttatcagcaaattcccaaattaacttgggaatgggcccctttgagggccacctttttttatgaatgacgtcccattttaatttgtggactgcggcctatggac

SEQ ID NO: 33501 - DNA, 1000 bp, Heterodera glycines
tcaattcgacccgaatttcatcacttgaaatgccattgataaacaaggcacaaagacacatgtcaatgctgtcgcggctccattctgcctttgctatcaaacttcgcaatagcaccgaatagtcccttatcgattgccctgtctgctgcttggctgaaaacaattcatgcctacaagcggcaatcgattttgcttcgccaaatctttccaccatcagttgttcaatttcggcaaggtccatggttcggacatcctcaggctgtgccattcgccgaagctcttcgtacacctgacccatttcagtgaacaggagcagacgctttgttgcgacatcggtcacgcctttaagctggatgaagaattcgaaacgttcccaccatgtcgcccagcacatctctggcaaaaacggtccggggccttttccagcctttattaccgctgccatagttggacttttcttaatttgtcccactcggatcaaattcaagatgctgatcaactgtaatccgacttggatttacagtgattcaattgttatccgtcccggattaacaatgaaaattggtgctgctcaactgctattcaacccgaattaacagtgagaataaattgttatccgtcccggattaacaatcaaaatcgatgaggcaatgttatccaatcggattaacaatgccactcagctttcagccttgcttttcagcaaattttcctcttgctctgttcggcctcgataagtgattgcaattgttatccttcccggattaacaattcaattcctccaaattcggcgattcgtcgctggctgttatccgtcccggattaacaccagtaattgagagtgccaccacctgggtgaactattccaactcggaattagcttactctccttcgacgatttttggaaaattgctattccgtcccggaattagcaatccaaatttggtgctttttcagcccgatcgccgctcagcttctcttcagttcgcctttgctctgc

SEQ ID NO: 33502 - DNA, 927 bp, Heterodera glycines
  unsure (1)..(927): unsure at all n locations
tggactcttcaaagggaagcaaaccagctcagtaacaaattgttttgcgcaaccagcaacactgttcgtcaaatggcacagtctccaactactgtcgccaatccatcgcgcagaccactgcaattacgcttccgagtattgccagctgcaagacaacagttcactcatctggacttcagcatgtccaaacgacaattgtttcatgtgcgatttccaagaagccgaagaaatccacggagaattcaccaagctcaacggtcaaacaacagcattttggatctcggatgatcgacaaaaggcactgaccttcaccgagacgcatgccgtgcaagcatgcgacgggagacaaatcgtcttatcagagcagaacttcggcattccaaaagagcaattcgacatcatcatgagcgaccacacaagagcgaaacgcataaatataaacagcatcagtgttccggaaggatcgatttgaaatcgccaataacccccaaattacaatttcctactgtaaacttatacagattacatttggatataagaaattgaaatattgagaatatcacaaaagtgatcatgaaaattgtaaattggagattattgggacttatcagctcggtcctccgcaaacactgattcagtttatatttagaggataaggagttgaaatggtggaattccaaaaaggtgaccaagaaaattgtaatcgaagattattggcgattatcagctcggtcattccgcaaacactgattcagtttatatttcgcgaagaatgagctgtaattttgcgaattagacaaaaatgatcataaagtaacaaatgagagaatttcacattctgctaattaggctntaatataaactgtttaagtggtgcagacggatcaggttgataagcgccaataacctcagatttactattttcgc

SEQ ID NO: 33503 - DNA, 932 bp, Heterodera glycines
ttttttgagtttattatttttataaaatactttttcagaaccgagttctgaattttattctgaaaaatcgaaaatttccagaatttctggaataacttttattgtttgcaagatagaaatcccaaataaatctcataaaattctcccgattttttgctatttttcaaactttattccactaaatttgatcaaaaacgaagagagttatgaattttcgaaatttcactggattttccagggctctaattttgacgatttttcaaaaatttgtaaccaccttccaaaaagtctgaaacgcaaaataaagcatatattcatgttcagcaccttaaattatgccataaaaatgcattttggcaaacatatgagcaaaaaatattttcatgaaatgcaaaaccatggggtcccccctatggttttgagtttcaaaatcacaattaattttataactttttttaaactcatgctataaacatgagataaagcacattagattgggcttaaaattctctacaaaaaagctcttagacgattttttgataaaatcaactcctgacgagttattgagccaaaactgaaattgaggcctagcaaccaaaattttctatttccaaaaaaattttaaaaattttttctgaaaatgacaccaatcgatagagcatgaaaaacggttgcttgaaagtggtctccgttttccccggaaaaatctgtaaaaaatcataaaattcaaaaacggaaaattttcgagggggcctagctcgaaaatttctgaaaatttctgaaatcaaaaaacatggttggatagagctcgtcgagctctacaaaaaagccgcttacaccgacctcctcccatcaaaagccggggagttattccaccggcgctgaaatggcccaaaaaagtatgccattttttagtcagttttttcggaaaa

SEQ ID NO: 33504 - DNA, 962 bp, Heterodera glycines
cgaaaataggattcctccctaattcacactataggctgtttataaaccgataaattaattttcttccccgacactctgtccccgattgtcggggaacaatccaagcttaaaattaaaagaaagatactaaattactttttttttttacaatagatggcttgacatagatcctcctccggcctcagcctattattacgcatttggcggcggtcctcgcatttgcattggcatgcgatttgcacttttggaggagaaaatggcacttgtgcgactgttgcggcgctattcactggccaaaaatgagcaaacggaggtggcgaaaagggcaaattgaaaatttaattataattaaaaatatttaataattttttgttatttttagaaatttctaaaggtcaattcgcaagttgtgcttaatcctggcgcagtgatggtacaattgaatttgagagaagagaatttttaagaaaatcaaattgactgaatttgaggaaaatttgtaacaaatttattaaaatatttcacccaaatatgttttatgtaaaagatatttataaaaataattagtgaattctttaaattttaatacttttccgacaataatcgcaagaaataatagtaaaaaatttgatataaagcaaccaactaaattttgctttattaatatcattcgatagctcaaattttctctgttaattttaagatttgaaaaagaaaagttatgaaattatatggatttttttatattgattttttaagcttgccttttaggcacaaaaaaataaataattaattatgcaaatgcagtgaagatttaataattctgccaagaatttgccaacaaaatttcttccacaacgcaacaaaaaaaaaagaaaattaaagaaattttaattaattaaaaaaaacacccgttcagcagggggaattgaaatcccaaaatgggagggaagtttcctaaa

SEQ ID NO: 33505 - DNA, 199 bp, Heterodera glycines
gccttatgagtaaaatgttacaatcacattccctttgatttttaacatttattttcataattttttttttgtcgaatttgtgcattagtcagaagtagggttcgagccccgcccccgcccccgtgactctgacccccgcaaccctcggccccgcgaccttcgcccccgcgggtggacggttttgaaaatcctcccctaa

SEQ ID NO: 33506 - DNA, 563 bp, Heterodera glycines
ttttccaaccaatttaattctcatttaattatttttcaaccaattgaaatgtcatttaattattttccaaccaatttaattctcatttaattatttttcaaccaattgaaatgtcatttaattattttccaaccaatttaattctcatttaattattttccaaccaattgaaattatttttcgctaattttctacagatttttttaggtttgaatttaaattgtcattgatgaatttaatgaaattgtgctaatattttatgctcattaaggcaatttttaaagccttagaaaattagcaaatttttacaccagttttaaaaaaattccacataaattattcagaaaacaatttaagattcggctcaaattgtcttttaccagtgaaaaattctccgaaaatttttcaaccgaagccatgatttgttgatatgtgtaaaaattgttaaccccgtattttttgaccggaaattattaatgattttctaacttttaaatttgttttgctatttatctcccaaatttccgaaattttctgaccgcacctggcattttggcgccacc

SEQ ID NO: 33507 - DNA, 936 bp, Heterodera glycines
atttaaaatattaataaaaataattaagcttatattttgcattttaaatttttttaacgaaattaatgcgaccattgcccgtccttgaacttaattttattccaaaaacgatagaattgtcctcgaaattcgagaccattttgaaaatgactacgataaaactatgactgtactggaatttaagtccaagttttaatgaacaaatatttatttgtttgtagattttcaaggactgtcaaaatttgtttttgatctaacggtcacaaaatctcacacattgtaaagtcgaatttaatagcaaaaattttaaaaaaagctaagagatagtttgaatttaatcaaattatttctataaaatcacaaaatattttaattaaaaaaagtctaaattccaaagaaaaagtttgcactaatatttaaatgaacaataactgtttgtgtgatagacattataaacaaaaaaggactgttgatgatatgtatagttggtgagcaagcacattagcattcaattttaatttgtttacattgggttggaaatgccgtctattggctcggcaaattgtttgaataataatgtggggcaccgtcaatgacgatggcaatgaataaatatgttgttggcatttggcatcgttgtgcctaccaaatttggaaaataaattattatcactttttttttgttcggtacggcacggcatcgacttctctgaatatatgtgccaataattcacttggttcaattcatataaatgcataaaaagagtgtaaattaaatttactaaaaggcaattaaattgcattgctaaaaacggtgacgtaaaaaaaagtacagaaatacgcaaatttttttattttccagaaattaatttaatttaaaagagatggttgcgcaatgcataaagtgccaaaaattcaaaaaaaaaatttttatca

SEQ ID NO: 33508 - DNA, 1131 bp, Heterodera glycines
  unsure (1)..(1131): unsure at all n locations
tttctttttttatatgtctaattcagaaaaccaaagtttcgtcgaatggcaataattcatttctattntatattaccattccttagtgtttgaattttcctntaaacaatcatntaaatctgtctttctctaaaaaacataaacaaatctttactaatttttaaattactttgttcaatccttttaaatacttttctagctaaatatcaaaagttttaaaatttcccgacaagaaaattcaaattttcttgaaaatggctgaagcatcttcaaatgtcaccgaaatcagcggcactgtcattttcgctgcttatgccatggcatttttggaacttggcacactcattccgacaattcccatcctggcattctgctcttcaattgtttacaaaacttccattctgcaccggaaccttaagggcattctgttggcccaactttttggcatatttatgagtttgtggccacgtgtctttttgttggttgacaaaattttcgtgacaaaaaatttttttttgttggtgccaaattttattgctggagcatcaactgctgcattgacattcatcaacattgttggccatgtgctgattgtggagcgaatatgtgcaactgtttacgtggacacttacgagagataccgtagttgggcatttacggtggtttggctgtccattacggtaaaatattgtaccttttaaaaagcaataatgttttgttcattaatacataaaacagttttttttcaattaaacatcgcgtgaaaagtaaaattaaaaagtttttctttcattgagtaattatcggtgacattaattaatgaaataaatattcttaatttaatcagttgtccgctttaaagatcatcctttctttggggctaacaatttatcaaacgcttgttttggattcaatgttttcactaacaaatatttttgttggtatttacaacggagcaatgatcgccagtttaatagaaatttttgtaagctaaaaattaaaataatttgtttatattaatttttttagcttttttcaattatcacaaaatttaaccaaaaaatgtttgatttacgtcaaggcaattgtaaaaatcagcaattatctgttcggtatcaggtaaaacaaaat

SEQ ID NO: 33509 - DNA, 894 bp, Heterodera glycines
taacgacccagcaccaaaggcagtattaattaattgtttagttgccgatggtggccaatgcgaactcaaggactatcgggtcaaatttcgcataaaaagcgcaccaaatgcattaaattttgcaaatattgtattgtttcatttgacgggtcatttacgtaaaagtaaaaacattggtgctaatgacgctcttatacggacgatttatgtgcaaacaattcccgaaaaagtgtgggccgaggacaaaaacattcgatttgacgtggttttgaaggcgtacagctgcaaaatatgctggtgggcggagcagaagcagcagcgaatggtggcaattgcattaaatttgttaattttggacgagacggtaatcaaaaaaaagtcattgaaaaataaataattatatgaaatgattttataatttaattttggcctatgcatgtaagcagggatggtgttccaaggccccagtcttttgagaatcggaattccaaccccataaatcggaaatcggaatccgcgccatctctgcatgtaattgagtaccagacatgagacttaattttatagtttctctgaaaatctttaaatttttttttttgttttttttctaaatcatttatgatttttcaaattttgttacccctatccaacggtttgctctttaaaaagccaggccgttgtgccagatttagcctggtgcaaattgatattcgtcgattattattttctggcattcccatcttcagactaagaacctattacgtttaaagaatgtgtgccattctcaccgcatcagttcatatggaccaattaatcttgaccaattgactgatcacattgtggaaatggaaatcaatgaactcaatggctgtgttcctgtggatcttgattgaa

SEQ ID NO: 33510 - DNA, 876 bp, Heterodera glycines
attaattatttttcaaggagaattaatgtaatgggaaaataaaaataatattaaaagcaatgcttccaagtgtcccggttcttcagatttgtcctgattttagaaaggcaattttagaaatttcagatttccccaaaaatatttcacgcaaaattttttaatcagtttttagcaccaccaggtaaaaagtaccaaaaaaacggaatttttttttcgcattttgccaggacacagactttggcttgaccaccttcgttggtgggcctggcattctgggaggtggcgaatgcaatatgaaaaacgggaaattgaagtacatgttcaagttggctgacggtgtgacgattaaaaatgccattattgacacgccgggcatgggcattttctgcagaggcagttgcacgctggagaacatttagtaaaaatttttttttaattttcaatcatcctattaaaaggcatagctagctatacatcttctttcagtgggaggcggggcctttggcaaattttgttgatagatttgcacataaactgctgaattgtggctttttggaaaaattagtgaaattttctattgagaaatttggatgggggggggggataaggtaggggttaattccgtcccgccagttccgtcccaggcatgtttaaaacagcataacttttttcagttggccaaatgttataaatttggcttcattcgaaagctctacatgtttagaagctgttaataaactaatttctaagcgattgaacaatttataaaaaagttgcaccatgaaaactgcaaaaaagtgcgaatttttgcatgtttatatttataactttttacattccggcctttcttttgggaaatttgggtgaggggggggg

SEQ ID NO: 33511 - DNA, 810 bp, Heterodera glycines
  unsure (1)..(810): unsure at all n locations
gaagnattgacccttgaaaggttgaatcgtgtgtaaaagtaaagtaatgagttggaagtggtgttggattgggttgtggaggtaaatgatttggaaggggatgaagtaagngagataattgggggtaaaattgttaggataaaggtgggggggggtaataataaataaattaatatttttgggattttttatgtaaaattcatacattaaaaaggggggtgggtcggtaaattttttgcgaaggggggtcggacgccgatgaccttttttttgcttttcaaaaaccgtttgtttttcggcgcgttttttccaaaaaacttttcgggaacaggggggccggctggaagctatttttaaagagctttgaataattccaatttctaaaatttgatcgattttggaaaaaaattatgtgttgaaaaaagttgacaaaattcagtatttaaaatatttatttttaaaaataaatgctttccgacgaagttattgttccccgacactttttaaatttctcctgggtaattagctaattagtttctggtctttttataaatcccatatcctgcaaatgtaaattcgatattttttcaaattccgaattgaaaaaaaatttttttaggaaaatgcttccgcctcggcactgcgcgctgagcgcatgatggatttgattggtcagatggacaagcggttgaacgacgcgtacatcaagctgggcactgtgcgtgccgacgggcaacagatggtggagcagaatcggctggctgtggaaaacattggcgatttgaagcgacgcttcgagacacaggtggg

SEQ ID NO: 33512 - DNA, 949 bp, Heterodera glycines
ttcaataaaaaaataaggacagctcttaaattccgataatataaacacatgctatttcagacacacctaatctactcgtttgttatctaatgatctgctgttctgtccttattaattgaatcgatcaaattgtgtcaattatttaaaaaaaatctaatctactgaaaattcgaaatgattacattttgtttctgatttgatcaggttcagtgactgatcttattgatataattgcgcaaaaataccaggaaacgactcaagacaaaacactttttaataattttaaaaaatttaaaattgaaaattgtaataaaataaattttcacaaaaatgcccaccaaattttggtcatgcaccgtcgttgtggccgcagatgccaacgccgtccgtttagtggccattgtctaaaaattaaaaaaaaattaattttaaattaaataaacaaaaaaggggcaaaacaaaaaagccactatattcatagttctatatttcgcgatttgtttcatattttgtcattatgtccatttttaatgtttttctatagttttacatttttccaaaaaaaaacctctattagtacggcaccacactcagctaaattggcctttttgaccccctaaagaccgggaaatttccaaaaaaaaaaaaaatttttttcgtaatttatttgagaatgttgaataaaattttcttaaaaatatacaaatttacaaaaataagcaaaaaagcgaaatttcgctttttgggttgatttttcgctaaaaaatttttcgaataaaatgattttaaccatatctagcgccatttttgaaagttttactttacatttagagattttgaagaaatttctgaaaattttaccattttatttggaaatttatgtccatactttgcaattttatgtccatgtttctagatttgcgattttttgggccatattttatgacta

SEQ ID NO: 33513 - DNA, 75 bp, Heterodera glycines
actcgcgtggcatggatacgaaccctgctcgctgagttcagcagaatcacctcacacttcacatttttgtcatgg

SEQ ID NO: 33514 - DNA, 370 bp, Heterodera glycines
gattgttgaattgagattaattttcaaaaaattttctgttttcacttagcacgtgtgccacctttccctctggactggatacgtgttgtccttgtgcgcccaactcagtccctattgttgctgcttccagcagaggcaaaaatatatacactcactcactcacactgcctaagggcacccactcactcactcagtttatgtgttattattattccctgctattgttgcctgaggcaaaattagacccccccccacccctcacgaacttcaattgtacacgcgccagcacttcacgctctgctcctcccccatttccactacgccgtccccccccattcccctagcgcaggggagaaggggggggggggat

SEQ ID NO: 33515 - DNA, 1153 bp, Heterodera glycines
  unsure (1)..(1153): unsure at all n locations
gaaaaactcaaaaaaaaaaaaatttttatcaaataaaaatccaaggaaaatttcttgaaattttagaaaaattttaattttttttttgcggcgacgttttgtcccggcgacggttttggggtgtaccccgtttgcgcccgccggttcaccgcccatcccgtatcgtcctccccagaaattttaaaacttattaatatttcaaaaaatcttacattagtattttttaataagaaaactntaagaaaaaaatcgaaatttcagcaatttattgtaaaaataattttgcccaccttttgttcctcattctttttcttctgctcctcctcactttttgggttttcttccttttcttgccccattttccgttcctttttctcttccttcttccccttctgctgctcttcttcctcttcctttttccgtttttcttccacttcctttcgtcgaaatgcattttcttcggttttcgttttaaacaccggcggcttttctatatcgaattcggttgtggcttttttgttattgctgtaattatttgtcgaattcgtcgttacatttccatcggccgcagaaaactgaattttttagaaaataataaattgtcaaaaatgttaaaagtcacacaatacatttgtcttgtactgttcataagtgttgttgttcaggttgagttccaaaaagcttggtatatttttgtttgtttcactgtcagcgcggcgatgtcgccgttcaattttagctaaatgaaagcaatgctccattggtagttagaaattctaaccctgcacaggttcgtggccagaaaaaaaattcggaaggggaaccccgaagggtgtgctcaaaaaattttaactagaaaatttaatgagaaaaattgcaagtaaaaaaccggttaaaacttttataattctttatggtaaaatttaaaaaaaaaatttaagaattcttaaaaatttgaaaaaatcattgaataaattttaatttttttcttgaaatttcttataaaagttttttgcggggtaaggggaagtaaattcaaataatatgtcataggcatcgccagagaaaaattttcaacgaatttttactaaaaaaccgttttccgtaattctttaaagagttggtaaaatttcttaaaaaacaacagaagcat

SEQ ID NO: 33516 - DNA, 1018 bp, Heterodera glycines
caaaggaagaagcaaatgcagaaaagcaaaggcaacccctactagggggaggaggagcacttgtatactctgtccggtacttactttttacatttccacgggggtccaatttatattgcaaaaaattcataaaatgaaaactttcaccgaagtattattttttttggttgatttggggcaaaaattgtccaaaaatacatcattaatattaattatttaaatggagtaaaattgtaatttttcgttttccaacagcagcagcagcactacagccaacaacaatagcatcagcaaaaaacccccgaacaaaaagaagcaaaatgtcgctgatcgaactgctcgcaaaaacaacatcggcggcgcgggcggtgaagaagcgccagcggttacaaaaacggccaaaaccttggctgaactgcttcaatactcaaacgtcgttgcagcaaatctggaaaataaacgtaagagcgccgccattgctcactattttttattattattgtaaggttcaaaaaggatgaatcaatcaacaaaaataaattcagtcacttcaccgacgacttccaagaatgatggtcctccgacggcggatggtttcacatttacagcagcagctcaggaagaatgtccgtcctcgtcatcgtccaaatcaattgccacgctcatcaccgaccggttcaggccaaacagaggcactttttaccgttatacaccagcgccagtggttacaccggcggtcgtgcacaaactcttactcaacggtaatggcacacaccgttcttatgttgttttcataacaatatgtcatcctcaaccccatcccaacccccatatatgtgcatatcctcaaggggagtagtttccccacccgaaaatttaaaaaaattgtcaaacagaatttttgaaaatctgaaaaaaaaattttttttaaaatttcaagaaaattttaaaaaaattcagagatttttttgggaaaacgagtatttttgaaaaaaaaaagttgctgaaagaatgcggg

SEQ ID NO: 33517 - DNA, 1027 bp, Heterodera glycines
agaaaataaatcatccaccttattcaaagtttttctccttaaattctttcgggttcgataaggcactttcttgaactcgcttaggttggcccttggaaatgccattttgaccatatttgcctctgcagctgcgatcgtctttcctttcatttggccgattttcttgatgtggcccatcgttgtcacttttccagtgacacaaacgcccgcctgcactggtcttcccgtcgccaatgagagaattgcgagtgcagcagcggcagatgccgatgagtccactatcgtttggtactcagcaaaattttggccgggacaaacaacgccgaatctttttgaaaaaaaatcaaaaaatttttcatgaaaatcttaaaaaatttttcgcgagttttagaataaaatttactaatgcatcataaaatttcaaaaaaagcccggtaccgattttttaacggtatgcagtgaaaaagagcaaaaaaaaaattcaaaatactcgtaaaaacattctttactattttaaaaagaagccgaaaatttggtcacctttagaataaaaccgtaaattttcagcatcttttatttgtaattaaaaaagaaaattttttcaaaacaaaaattttttcaaaataaaaaattttttttcaaggggtgcctaaagaataggcaacaataaacaattttttgtattggaatttttttcaaattataaatttggaatttaccttcaatacggggtcgacatttccatatatgagcaggggatgcattctttggctgaccactgcttcaacacggattctgattattttgccttgaaaatggaaaaaaaagaaatgaaaaacactttttttcggtcgacactgtaaattttgtccgggacgtaacgcgtacaaaaacaaaaattttttgtaccgtgactgatcgtacccctcccccttccccatctcctcccaacacagcccaccgatttgtttttcaaaaaaaacgaggagggagcaaacggcactttgttcgttttgccccccccccc

SEQ ID NO: 33518 - DNA, 874 bp, Heterodera glycines
  unsure (1)..(874): unsure at all n locations
gcttgttcgccggcaccagtcatgtctaagccctaaaaatcgcattagattcaatataatctttgattgaaaaactcaatcctcattatttgtaaaatgaagacttcccaatcttccagctttttattctcatttgttcttcattttaatggcctttccattcaccatcattcttccgcttcaggaaaaccttgtatgtttaaattgtctgcgttaattaaacaatcaatttaaagtcgtgggagttccttttttgaaataatttattttcagaaacccaattggtcccttttttcgacttttgtcggaattgtcccattattaacacttttttgttccctactaatgaaattcatcaaaattaacaccaaacttccccctgaactgaacaacgaattgctccattttgttcccgagtttttctatcgaagggttttgatgagctcaaattttttggtttattacttttttcgaaacggaaaaagagaaaaacaatggaaatacaaagtaagcccaaatcaaaactgaacaaaaaattacaaattgttaaatcaattttctatcaaatttaattgtttttgatttttattgtgtgatttttgaggctttggcagcgagagaggcaggcaccctgtacangtttcggagggccaagtcgcaccattcgtgcgtttattcccactgaggaagaccaccgccgcgccaactttttgtcgcaacaaatttttgcatcgcccaattttgcttgttcggtggatgagggctttttcgcacttttggtttcactgcgaaccactgggccggaacaggtgaaaaatcagtacttagttcgtttttagagacctgactggtcgcgcccagcncgggtcgattt

SEQ ID NO: 33519 - DNA, 1398 bp, Heterodera glycines
  unsure (1)..(1398): unsure at all n locations
gaaaaatgtaaatctaaatcataaaactaattatgacaaaaacatattcaaaaataacctttgttgatgaattattttcgctacaaaacattaatgcgcaatagttaattatattaaatgaaaaaccaaattacnccattatcaaaacgcatttaaattcaaatttattatcatataatttttaatatattaaaattatttgaaatcgaaaaatatgaaatatgcccaccatcattnatttataattatattttggttgccaaatttgatcaaattgaaacggtcaagaaaaaagtacaacaaaaatcttttgttgaaatatttggagaaaagttgggacaaaaagaagaacacgaagaaaatctggaagaaaaaagagaaataattggcaaatattataaaataaaagagaaaattaaacaaaaaaggaagattatcgaaatctgtgaatttatttttttaacgtatttatcacgaaacaaattagtctttgtacaaaatccataccctaatttgttaatttgtttattcagtaaaattgagacggtaagattccatattgagaaaaaatatagctaatattgataaaattagagtcgctcgggacaggggatttttgggaaaaccgggaaggggactgactaaacatcaggtacacatgagtagttagagtctacaaatccgccggattacggtagcctcccatacctatgggaggggtgcaaggccaactgagcgccagccacctaaccaaaagcttatttcagattctttatcagcgccctaaaatacagctaaagacatatttttggaggattttgggtaaaaaaatgtacactcaaaaaacatatgcaacctcccccccaccccattggtcccgaatcacaaaaagagtttttaatgttaaaactttctttaaaaaagagataaaaatataaaataatatacctcttgttagagatcggaccggtcggtttttttcggtatttttcgattttcggtttcggtttttaaccgaaaaaaccgaccgagaaatttttgagtttttcggtctttttcggtttcggttttttttcggtttttaaccgaaaaaaccgaccgagaaatttttgagtttttcggtttttttcggtttcggttttttttcggtttttaaccgaaaaaaccgaccgagaaatttttgagtttttcggtttttttcggtttcggttttttttcggtttttaaccgaaaccgaccgaccgaccctcttgtccggtctctatctcttgtaatgcaaaaaattacagatttttctttattttttaagctagctttatccactaatattgtccaaccctgaaagcgagttattaatttctaaaaattagcgtaaatttccctggctcaaaaaatgaa

SEQ ID NO: 33520 - DNA, 939 bp, Heterodera glycines
agacgaaagtggaggaaaaagagaggaatcagcatccaacatgagatggcacggtccattagctgacgccattgttgatggtggttgagcacggtaatgaggggcaggaaaagagtgacgatgtaattgcctacggaagtgaagggacggagtgatcggaagaaaggaaggcaatgaaaagctttaccgaaaacggatgtggcaaaaacgatgagagcgaatagaaagcccctgagggcactgagcacattggggacgaagcggacgaggaaaagcttaagcagagagagcggaagacggacagacatagccgggggcgatgaaatggacgcattgatcggagggaggggtggggggacggacagtccgaccggcggaaggagtcgggcaaacgacgggcaaaccatagccagtggaatgcccccttgctattttctcgtaacgccaaacgatagcggtaaaattgcctctcggaaatattttcctctgaaccggttttcttgataccaagttctcgcttctttgtctgcacaccaaaaacaggttcaaaaacagagtcattttgagcaaccaccaccttaatatgtactataatcaaagaacatgtaaaaaagtttgtacatcattctccacttgccgcccctgcgcactctcaggttcaggcacgttgtcaaattcggtctcgaaatcgttaatgtgttcagactcatcattaaccgttgatgcattattttgacttgaatttaaatcagcacttatctaagaagcaaaggaagaattaaaaagttggattgcgagtaattaataaaaaacctacattgcgcccttgcaaaaatgccttcttcatgaaccaacgccacccagcagtgcccttttggatgaatccgtggggaacaaacaggggtcctagctgggggattcccccttttcacctccctc

SEQ ID NO: 33521 - DNA, 939 bp, Heterodera glycines
cttccgtttgagctttcagatgaattcgatttggagcgttgcaccattcattcgttccaaaaagtttatgggctccctttttgctcgattttatcgcttttaccgctcaaaagaattgctcccgtcccgccgcccattttgacgggagagagaaggtcactcactttttggcgattaatttggacgataaaaacaaatcccaattcttcaaatagagatggaatgttgttttaaattaatgtaaattaaaaaaaatgttaaaataaaaaacttttaaatgttttatcaatttaatttattaatgaaaaattaaattccaggattaagtagataatcaattgtttttctacaattttgatttttaaagaaaaataaagataattaaaatttagatgaactaataaaataatttaaatttagcaaatgcaaaaatcatttatcagtgatttatttttttacaaaattttaggtttttaaaagtcggtaaaaaaaaagtaaaccaatgaatttccaaataatacacgcaaaaataaaatgcttcaaaaatttataagtttctctgaaaatgtaaacaaataataatcttttctcaaatcttcgggtcaaaaattttgcctaaaaatgagacaataaaattttttagcgatggcataggatggagtcaaaggtcgcgatgatggtgaaaaaggagaagaaaattataggaaggcgagcggcgaatggacgacgaattggcagaagaaaagggggggggggagaaatgcgcatttaaatgcacaatttttttattggaaaccaaaaaaaacaattaatgccaaggccataattatatatttagagaagcttttattattattattattttttattagaaatccaaaaaacaattaatgccaggccataattataatatttttgacaacattttactgttatttt

SEQ ID NO: 33522 - DNA, 938 bp, Heterodera glycines
  unsure (1)..(938): unsure at all n locations
tataaaaatattttaatacaaagaaataaagaaacgccgtgatagtattaggcttttctctgcacagtggagttgacccatagtgtctcatgtctatttaaatgctgtctttccctcttccccggcagtcttcattcaatcatattcttttgttttcttcatcatctccacctttgacccctccgtatttattttgtttaaatttcactaaatgatgactaaaactcagaattaggtttaagaatgcctgctgaaacagctaattctaattcgaacgttaattcatctgcaacagcaaataataacgcaatttcaactcatatgcttcgcgagaaaaacagcgacgaggcaatggtaagtgaaattgtctaattggacaaatggtattctcccacccctcttctgatttaaaggaagttgaccagaaaatcgtgactgatactgccgacattttgcagtctgtgctcgaattcgcttttggcgtttcaatcgacgacaacaatggcattgcacaggaattctcctcatctcccgaattgcttttacaactgcaggattctgtgcgcacaattcttacgtctttgtgcctaaaaagtgtttcgccattgaaacaaataattttagtttctttttaagctgacgaagtcagtcaatcgcttctgttggatgaactgatatttacggcggtcaatctgataaagccgagcaatgggttcagctcctcaaattccatcccaaattccgacgactctttggccgtggtttttccccaacgcaatttgccgaattcattcatcgcctcttcagcctttgattatctcattggaacacggaaacgatgcaaatgtctgctcgaccaatcgntaaaataaattgtgatttangattacttgggctgtttagaaacacatcgccagcacagcacttttaattttgct

SEQ ID NO: 33523 - DNA, 1598 bp, Heterodera glycines
  unsure (1)..(1598): unsure at all n locations
cagtcataatttgaaaaaagcgaaatttttcacaactatgggaatgatgtttaattttaaattttttaagttaaatgaacacgaagaatttctaaaataattgcaatgatccaaattttgttgcttntaaaggacacaaaaaaggttatgaaccggacacagggacccttcccctttttcattgatactcacatcccattgcccttttcccgattcttccgacgaattatggctgtaaaaaaataaaatnaatattaagtgggcaaaaaaatccatttttaaatttctatggcttaatgattgcaaattccgccctcnncagtgtgagaaaaagtccccaaccgatgttttgaagccgtttagttgagagaacagtgttttttccgcaatttacggtcgcatttggtgacggctgtccacggggtttgaccgctgcgtttgcgtccacattttgctgttgcgattcagacgacggcttcttctcgtccagactaaacattgcttcctgaattcatattttgcatagaaaatggtaaaaataaaaattgaaaattattgaccaatttgctcaggtcaagctcttcagccaattttctgaaaaaaggaaaaaatacatgttatatgtacggtttgatcacccactcgtcattcatgttgttaaacacggtgcccttcacttggttcgggttcagcgccgtccaattgatcattggcattttgctgccaattttcgcaattttcttcttcggcaccgcttcagcggttgagacgaataagccaagcggaggcggcggtggcggcattcctcccgctgctttagggccattttgcacaacttttttaggctgtacaaacaatggtggcggcggaggaggaggcggtgggggaggtgccaccgcttttttcggaggtgcttaattgtaagcaatttttttgaagttttagacctttaaatgttgttttgttaccctgctgctgtgacggatttgtacgtggtgcggaattgacagaagcggagtcaacggaatcctgtaaaggcaacaaatcatatttggtaatataagactatttaaaacaattctccaacaattcaaatactttcttttgtttgccaagtgtcccttttccgtgctttaatgcttttccgtaacaaatcgtgcattaattaatttacctaattattacaacattttccccattcaccgtaccatttccttgtcagtctgttgcgttgtccgctgtttgctgctgtcccgttgttccctcactttttccttcccaactttcgctgctgttaccgttggagttgtttgtgttgtcggagttgttttttgtgtgctgttggccgtttgtcgctgctgttcggctagtttggcttgtgccgctgcgttctgtgccactttcaaaccctcttaatatgagaattttcattttacataataactttttttattntcanattacgcnttatctcctgcttggccctctccagcantttcatccgtttttcgtactcaattcngtcccgcctcaactttcgctccttctcgcgccaatcccgcgtcagtgtggtgatctttttcacattttgcctctcc

SEQ ID NO: 33524 - DNA, 576 bp, Heterodera glycines
ttttaggggtacttgtgcagtttatgccccataaaaattttttttatataaattttaaaaccaacaaagctttgtgtggttaaattgttcaattcgtgatcagtagggctgggaattttatgtaaatacattttttttttcctggattctccatagcctaattagtaggaaaaacaccttctttttggtgtttgcgaacaaaagttgagacttttatttacatatttgagttttttctatattatatgtacatattttcatacatattttatttacatatttcgcgatttttttacataaaattcccagccctagtgatcagtgaccccgacaacgtataaaaattggttttaaaaatttatattaaaaaaattttttgtggggcgtaagctgcacaagtactggttttcggttctaaaaccccaaaaattgggaattgacccccgagaatcgagacagagacgcacgccaaaaaaaccccgacaaatttctcgacacgagaaccaagaccgagaatctcgagcagaatattaatattataatattaggttattcatttctttttttgttttcgaa

SEQ ID NO: 33525 - DNA, 297 bp, Heterodera glycines
accatttgaattatgccgtgttcgattcgtctccatttggcttatttgttcattttgcttccacttgccttctctcaattccttttcggcccttcgggcgccgtccgccaatcgctgcaccgcgcccaaaatgcgttggtctctgcccagccaactgagcagcacctcctccaaaaggtgctttgccagtcgcgtttgccccgtgtaaatcattgccaaacgattggccatttcatttcgaagatcatttccaacgggcaccgttcgccattggcactgtctttctcccccggggca

SEQ ID NO: 33526 - DNA, 778 bp, Heterodera glycines
  unsure (1)..(778): unsure at all n locations
gataccgatcgcgagactccggctgcgggagtgtgaggtgcttgaaattcgctgatgctccgggccaattcccggattctccaatgccaaaaggaaaggaattgggatcgggaggattgggggagaacgacgagggcgctgtcgggaaagggaggggtcaagacgggaatagacgggaatgggcgccttcgtttggccacacacgagaatttgccgaatgtgatggagtgtggagaaatttcattatctgaatattctaaagacagaaactggccaactgcaaacatagaaacttatgaaaggtatattttatttaagagtaaaatatttttattggttttaagcgaattctggaatcaacttgaaaatgcaaattcggaaacagttttcatatatgctcaagaacaagagccgaaacatattgataaaaactggaaggcgccgttaggggcggtactagaacatcaaattttggacccgccgcaaggatttggaattcctgtttcaggaataaccgatttctacgtatatcttaggcgttgtgcagcattttttcctgcccatacagcgaacgcagacctgttttncattaatattataatgccaaataatacagaaggattaacaatatggtaaattaagttttttttaatctttagatttcggntagatataaaaaagatacatattaaccatcttttgtctaaaatttatttataggtatagtatcccagctgctgattttcaaaaatttaaaagtctagcaagtacatatttt

SEQ ID NO: 33527 - DNA, 945 bp, Heterodera glycines
  unsure (1)..(945): unsure at all n locations
ttaacgttattcctttttggtaaacaaatttttgatggtttatgtcggagtaaggtgattttaaaatatgatccttttattttacagcacaagagccggaaaaacgatacattgaatggggctgtacgtccaatttaagccaaatttgtgccaagaaaattgacgaaatcgattttagctcaaataaacacttgtgcttttgcgagattctcaaaaatccaagcaattgatctaaaggagcattgaagttcctttgtctggttgtaggtgaatgttatcaaaaattataaataattaaataaaatataatacaaagatttatttttttacaaacttaacctatttttaggtgtgaatccaccaaatacatcaacaaaaaatatggaaactgagaaatttctattgtataaagaattttgtatttaatgatttttcaattgaatttaatttttttgattcattcaataagtaaactttgcaattaaataatgtttacaatttcaatcctgtccttttttaaaaggtacaggattggtttttattatcctttttgtaatcaacgaaaagcataacgcaaaaacaaattaattttttaatatatgttctaatttgttcatgtaaataaatgaatattaagaataaaatgttcgaatttcgatcgtttctgccggaagacagtaacggtagcaaagtcgattggacgcataaactggacttgagccgcaattttttgccgaatattttcaaaacaatttttagcagaaagaaagtgtggtccggcggtgcctataaacagcgcccggaaaattttaaataacttatggcccaatttgttactatatttattttatactattcagttgacttaatatatttntgtgaatattcaaacagaaacaagattagaccaaagttccaggacccatagaaaaaaaaatatcttta

SEQ ID NO: 33528 - DNA, 596 bp, Heterodera glycines
attttgcgactttaatgaatccattattgtaaaaatatttaattaaccaatttaaaagcttataataaaattaaaaaaattgttgcggaccaataaattttcgacaatattttgtccatattataacacattacccccatttttccatttatttctttctaacatttgtatgtatgtacgattttcttattttgcgatttatgtccgtattttgcagaattaaacgttaaagactaaaagaacttcatttgcacagctttgcttttccaacctgtccttttctccaaatgttgtttttatcgttgaaacattcataaaataacaaaacataacataaaatgacagcgcaaaatgcaataaattttctgtttcactcattggacaatttaatgccctttttgcttttagcattttttatttgtataagtacaaagtgtgtaaaacaaaataaaaatgttttatagaaaatattttcagatttattttttaattcgaaaaagttctttttatttggattaatcacatattttatctctcataatatcactggcaaaatcttttgggaaaaaacgtagggggggggggggggggggggg

SEQ ID NO: 33529 - DNA, 395 bp, Heterodera glycines
atgattcatcccataacattgtgccatttttccagcaattcttcttccaacgatctgatgcgtggcgtgtgcggactgcaaaatttaggcaacacatgctttatgaactcgtaaattaaaaattttatttttataatttttttgctcatttttcagtgccatccaatgcctcagcaatgtgcctgagctgaccacctatttcttggaggacaactatgtggacgaggtgaacacgtccaacccgttgggcaccggcggtcgtctggtgaagcagtacgcggacttgctcaaggacatgtggtcgggtcgtttttcgtccgtccggccctatgaattaaaggtttttttcaattgtcacccccccccccccactttatgcggtgggggtcgattgg

SEQ ID NO: 33530 - DNA, 738 bp, Heterodera glycines
ttttaagttatggccccccgaaaaccaaaggaggggccgttttgttttcaaaaaattttagtccgtaatttaattccaaattaaatattttggctttgtttttaaaataaaaataatatttaaaagtcataaaaatataatgttttgttcaataaggaacgtgaatcagtatgaagagggtttcgcccattccttgttcggaattgattgagctcggcctttgattcgtgatcgctgattaaccattccaaaatcccgggagtcgtgtgtttatgcccttaaaactaataataattttatgatatcatttatttcacccaacaattcagtactctagggaatttgtgccttacaactctaaccaacaattaatttggatgaattggcattatttcaaggagagagagaattttgggaaattttgacaattcgattaaaaaaaactactaaaattcttgacaaatttctgaccctaatccctatattcaaaccctctcccccggcttttccatccaaaacttttttggatttttctttgaaatcctctttttttacaaatctttctaactggcatatgcgtatgcatttgcattattgctcgacaaatgcgattttcccgcggacgggaaaaacccaacaatctcctgacgtgaaaattgtttgcctgacaaaaattggtgtaatgacgtatcgaattttacaaatgtgctcctctcattcctcccccaatttgctgcg

SEQ ID NO: 33531 - DNA, 932 bp, Heterodera glycines
agggggaattgaccgccagcaaaaggaattggcctttcgacgattcacacctatttaggtctcttcggacattctgaaagccagcgggtacactcaccagttcaaaaagctgctctcttccggcgctcggattcgccgcgagtcgtccacttgcgcacggctcccaatcggcagtgaagggatgtgcaagcagcaaagccttggtaagtgcggttaagcctcgcctccaccatttctctctctttcgctcaattaacttcgttaattgccttcgctttttccattttgtccttttgccgcccaaattcaaacacacggcacattcattctgcacctttctttacctttgttagttgtgccaatggcttcttccaccaaaatattcaaaggcactttctccgcctttggcgccgttgtggtgaaattggagaacagctgaaaataggcggcgttggaataaatggcgcggatttgcgttgccggggcattatttatttgagcaaagggagggagagacacgagctaatccaacgaaaatcgaagacgaagaaaatcgaaccgaggggaaaaagcctcattaagcagcggagagatattcgatgtaatcagtgaaagtgagaagaggcccattccgccgatgattatgctggccgagccttcgaccccatgccgccatcggagtgcttatccctgccgattctcccaatccgccgccgtggtcgccaaattgtcccccgatgcgttccccggtgcgtttgaggccgctactttacacgtgccgcttcgtcctctctctcccgctattcggcgctcctccgctcggcttctccgtccttacgactctttgctcctccgttctcatccgttgctgctctgcgcgtctctccgcaaatgtcctcacaattggcactgattcgtctctgctgcgcact

SEQ ID NO: 33532 - DNA, 887 bp, Heterodera glycines
ttgctgctggccaaacgtatttgatggtgcagaacattccggccgccgccggctgtttaaagtaattttttttcaatttttggccaaatgtaagagaccgaaccccacaaagacctaagattttactggtttttttggggggggggtaccacattagaaaaaaaactgggggttgttctattttgggaggtgtagaattcacctgtttttttcgaagaatttgataggaaattcaaaccaaaatgcattaagtccgtaaccagaaatgggagaaggaggccctaaaacttggagtcaaaatctcttaaaaaaatcggactgagcgccaaatttttggtaaatttttaactagtttttttccttcctccaaggcattgtctgacggcgaatcccttctgttccgaggccatccatttggcggtggactcgcgtctgatcactgcccgcgagttgcgtgccatcatcggcagccagtacaaccaacaaaagtcgggccaaaacagttccggtgcgcgggtcattgcgcatctgctcgaaatctacgacctcaatgttggtcgatttcgacccgattgttgttgtcaatgttcattgaattttaccattttatggatatttcaccattattttccagtataaatagagcctggacgggatcaggatcccgacaaaatcaggatttcattccgggaccgggcttcaaaactcgacaaactgaaactcaatcccggtaatcctatcccgatctgatgccaatcccgataccgatttttaaaaaattcccggtctaataataacaacaaaaatgtctcgcacaattttcaagcagttcgactatgtccatgtttcagaacgagttgtcgtcgtccgctccggtgccctcctcg

SEQ ID NO: 33533 - DNA, 923 bp, Heterodera glycines
tcattgtgtcacttatgcggtcactccactcggcgtcgtttcgggactgatcaaatgggtcgatggagcaattccactctttcaaatctaccgaaggtggcgcattcgacatgtaattttgggaatttacaatatgtttaaatgtttaaaataaataagctttttcagcttcaatttaatgcagaaaatgatgaaagtaaacagcagaaattgggttcaattggcaaaacaataccgacaaagcaacaaagacaaagtgcacaccttaaaaaaggtgttggtaaagaaagtggggaaacggcggacaatgcttccatcggtgggaaaaagaaagagggggacaaggagcccgagccagagcgaccgatggaacagttttacaacaaattgaaggcagtttttgcggcgaatgtttgttttttttctcaaagtttatgccgtaaatacaaaatttgttgttttttccagagagtgccgaaagaatgtttgaatgacagaaaacggtggcccaacgaagtgctcaaaatcgtactcaaagagctcggagatgaaacaccaaaagacattttggccaagtctgatgatttaaaataaaaaaagtattagtagtgaatgaaattaccaaggataattaagagaactatggatttatgcggccacttctgatgattggtggatgaacacacaaaattttgccaggacggccgccgttagttctatgctcggtgcgttaattgggctcggagatcgccatttggatgtaagttttagtggataaggggggagggaagtgtttgttttaagaatgttctggtggacctccattctggtcaaattgtgcacgtcgactacaacatttgcttcgggaagggccgaactcttcgcgttcccgaaacggtgccgtttcgtttgacggagaacat

SEQ ID NO: 33534 - DNA, 844 bp, Heterodera glycines
atatacacgtaaaaatggagttggggtaaaaacgactttggttttaccaagcaattaatgaggggggggcaaaccttcttaaattcaaaattaattgaagacacatcgcgcaacaccaatttgttctcggagcagatgaacccattggggtggttgaactgctcactttttttggtgaattccaaagtgatgttccttaaattataccattgaccaaaaattaaatgaagaattcaaatattaccattttttgcccttttctatggcaatgccctcaatgagaggcgcaaattggatggaaattcgctgaatggaagcatggcaactgctggcatttttgtcaaccgaagccgagctgtttgaaagcgaaaaagtggtcgtgttggatgaaacagtctaaaaaagaagcaaatacaaaatttgacaaaaaaaacaacaaaaaaccttttcatggtaacgaattgcgccagtgatttgtggagagtcgagaaagaagccatatttgcctttgacagcaaatttcatggcattgacaccaagcgaacaaaggccgatgaaaaaagccaaacgaagcaaagaacaattgagaggagagaaaacactgcaattcattgtgcgaagtaaatgtaattttccaaccttttaaacaaaaaaacaattaaaacaatttaaaataaaaataattaaataacataataaagcaatcgtatttaattgatttacaaccatcccctacggcaaacccttccccaaggctcgcgtccctcccacagagtatcaccacgaaaattcaaatttgaatttagcgccaaaaggggcgacaatcgtacaggggtcactactg

SEQ ID NO: 33535 - DNA, 1034 bp, Heterodera glycines
  unsure (1)..(1034): unsure at all n locations
taaccaaaatatanaggaaaaattttttaaaaaaatttttctccatcttcctttttgatactaaagcatcagagtgctaaaattaagttgtaaataaaatttggtgcgctttagagcactttctgaaaaaaatatttatgaaacaaaaaaatcgattttttcaagtgtccgtttggggtactcaaacatttatggggagcaaaaatccaacgcagaattaaagtacaggctatagggaagctactcccgaaggattcggtctccccataaatctgggcgcatcggttcggggggactgccccgaaaacaaaaaaatcgattttttcaagtgtccgtttggggtactcaaacaattatggggagcaaaaatccaacgcagaattaaagtacaggctatagggaagctattcccgaaggattcggtctccccataaatctgggcgcatcggttcggggggactgccccgaaaacaaaaaaatcgattttttcaagtgtccgtttggggtactcaaacaattatggggagcaaaaatccaacgcagaattaaagtacaggctatagggaagctattcccgaaggattcggtctccccataaatctgggcgcatcggttcggggggactgccccgaaaacaaaaaaaatcgattttttcaagtgtccgtttggggtactcaaacaattatggggagcaaaaatccaacgcagaattaaagtacaggctatagggaagctattcccgaaggattcggtctccccataaatctgggcgcatcggttcggggggactgccccgaaaacaaaaaaaatcgattttttcaagtgtccgtttggggtactcaaacaattatggggagcaaaaatccaacgcagaattaaagtacaggctatagggaagctattcccgaaagattcggtctccccataaatctgggcgcatcgggtcgggggggactgccccgaaaacaaaaaaaacaatttttttaagtgtccgttttggggaactcaaacaatttatgggggagcaaaaatcc

SEQ ID NO: 33536 - DNA, 896 bp, Heterodera glycines
cgtcttccattgtattcgcatgcattcggaccaaacgcttaattcttaccttaaattcaaatgcatttaaatttaagaaatttacaaaattatatttaaaaaaagttcatgttgaacaatccgtactattatacatattgtattaactttgcgtccgtcccttgtcgcataaatagtgtcgcctttgaccagacgtccttgataaatccgaaaatacgtcaattgtccaaaatttcctgccttagatcactgaatgcatttaacaaaacgaatacaaaatcctacttccaatttaaacgcaagtcctataaatggcttttgtttttcggagtttgcggtcctcaaagggtccatcagcacgcgttctgcattgtcatttttgcttaaggaaagaattattaaaaaaagaataaatattgcacttactcatataaattcacaaaattgtcaacttcagaagggtttggcaaataatgtacaatagcatctaagggggagggggtccgttggagtgattaatgtccaagtaaaaaggcaccgatcatttgttggacccccttgttcttcagagcactgcccacgagcacggggacaaaggaccgtttgatggttgccctccgaattgcctcttttatctctttgacggacggcgtcacttcgttaaggtaacactcggcaataacatcgtcacaatttgcgaggttttctgtaaagggcaagttcagttaatacatgaccaaagctttaccgagaagttcttggcggagtatctttgcctcttcgcggtattcttgcggaatttcttcttttctcagaacggaaccatcttcgacctcattgaaaaaggccaactcctctaccaaatcatgataccctcaaacacgattcgatcccta

SEQ ID NO: 33537 - DNA, 741 bp, Heterodera glycines
ttttgtattcttccccaacaacgcatttcggttcttaattaaaaataaaataaaaattattttttaattattatttttcattttttcggttaccaaattccaatttgtgccgaatttcgtccgtttcgcatttaacccaaaaattgtccaccgtttcattgtttcccgcctcgattttgtgaacttttcctgatttggaattgactaaacagccttcgaaaatggaatttgacgcactgaaaaaataaaaaataattttgaataagtaaaataaacggcggcacccaatggcacatcgatacgcccaaatgccattgtccgtccaattttctcccaatcgacggcacccgccgtgccaatcgcgacaaggacaaacggctaaaaccaagccaataattatgacaaacggatcaaatcacaaatgatcgaaagttaattaggcattttattacatggcaaaatttcttttccgaacgaaagagaaaaagtgaagaaaaacagaagaagaacaatttgcatcagtggcagagttttgaagctgtgaccattgggagaaagttgaaaaaggggaaagaatgaaacgacggattcgtcaaagccgccccattcattcattagtcattgtaattacccccccccccccccccccaccaacgacacactcgtttatttatccattcgcccaagcactcataattaatgaataataattatgatcggggatcaattagcagatcaaat

SEQ ID NO: 33538 - DNA, 874 bp, Heterodera glycines
agccgtccatttaattgtgtccccaattttgcatttttgttttattatttgtatttttagtgttttaaataaattcaatttatttataaattaaaattattttattatttttttgtcggaatttcgggtcaaaagaaagcagtgaaaagatgaaaatgagtgaaatgtaatgaaaaagcgaggacaaatgcacaacagcggaagagaaagagcagcgaaaaaagggaaaacggaggaaaaaaacgacggggcgacgaactgagcaacgggggagaccagggatagtcattacagaggttgccgagacagcgacacaattcaatctgaagagagagagagacggagcagttcaaaggggaaagggggacagaccgtccgattggacgacttcacagccaaatgacgcggcagcaaagtgcgcattgggaaggtggaacagctcgtatctgtggggcaattcaatggaaaagcgattggcaatttattctattggaataaagccatgttggtcagtgagtgatcagcccttggaattttaaaagtcaaattgtataagaacttatttaaatgcgaaatgtaaaaaacaaacccaagcatttgtttgggcttggatttcaacattcactcgcttttcacgattcctcgagggcatccgagccaattaggcaaacaaagcccccccccccccctctcgcaatttcatgcttcaatagttacggacaatgtcggggacacatctgtcaacactttctaaccaatttattggtgccgacgggggaaggcccagaattgtaaaagtcactttggtcagattggaagccaaagccaaggaaaaaagacaaggagagagtgagacgaactcgagaatcatctg

SEQ ID NO: 33539 - DNA, 278 bp, Heterodera glycines
tataataacgctgcggacatctacatttttgaattgcccataattggtaattactctttctttttctccatattgaccatcatactcatactccccccaccctttctcctccttcatttttttcttcctttccttctccaaccctctcctccctctcttgataggttaaactgaaggcgggaaacgacaatctgatccccatcaagatagcttctgcaggtcctgctcgagcggccgcccggggatcgatccccgatctagtaacatagatgacaccg

SEQ ID NO: 33540 - DNA, 1009 bp, Heterodera glycines
  unsure (1)..(1009): unsure at all n locations
ggggtactcaaacaattantggggagcaaaaatccaacgtagaattaaagtacaggctatagggaagctattcccgaaggatttggtctccccataaatctgggcgcatcggttcggggggactgccccgaaaacaaaaaaatcgattttttcaagtgtccgtttggggtactcaaacaattatggggagcaaaaatccaacgcagaattaaagtacaggctatagggaagctattcccgaaggattcggtctccccataaatctgggcgcatcggttcggggggactgccccgaaaacaaaaaaatcgattttttcaagtgtccgtttggggtactcaaacttaaaaatgagaattcatgcgagattttctggaaataagcttaatagggcctagttaagctgtaaaaaaatttggggcgatttgaatgagaatagaaagagccaggttcgatgaagttttggtaagccaaaaaaaaatccaaacatttaaaaatctataaaaaatttaaaaatgagaattcatgcgagattttctggaaataagcttaatagggcctagttaagctgtaaaaaaaatttggggcgatttgaatgagaatagaaagagccaggttcgatgaattttggtaagccaaaaaaatatccaaacatttaaaaatctataaaaaatttaaaaatgagaattcatgcgagattttctggaaataagcttaatagggcctaattaagctgtaaaaaaaaatttggggcgatttgaatgagaatagaaagagccaggttcgatgaagttttggtaagccaaaaaaaaatccaaacatttaaaaatctataaaaaatttaaaaatgagaattcatgcgagattttctggaaataagcttaatatggcatagttaagctgtaaaaaaaatttggggcgatttgaatgagaatagaaagagccaggttcgatgaagttttggtaggccaaaaaaaatcaaacatttaaaatctataaaaatttaaaatg

SEQ ID NO: 33541 - DNA, 702 bp, Heterodera glycines
gtcatgacaccttaggtttaacaaacctaaatatttagttaaaaaaattatcaggtcaaagagcatttcctcttagttattgggacggctaaacatggacatacatataaaatgagcaaggactcatataatgcatgtgacgcggaaactgtatgtgataggacgcgcttaaaaccgacaagaaccgcctttatttcttcaatattcaatgccgaccgtgacgtgagactgaattttgaggatttgaagccctacaaccaggaaaaactcagcttataaatagaaaatgatcattaatattgccaaaaacaaattaacccaattattgaaatgccattatggggatttatagcaattaccaaatgaatagatgatactttgttgtttcgtctattttatttttattttaaaaaattttttttgttaaaaattttgatatttaatcaatagggctgccaaaaatatgtacaaaaagtggtccaaatatgtacataaatatgtaagaaaaatcccaaaatatgtaaatatgtataaaaaccccgaaatatgtaaaagaaaaaaatatgtatttacataaaattggcagccctattaatcaactgagacgcagttgaccccagacttggctagacgcagttggcgagacgcagttgaccagacgcagttggccagacgcagttggccagacgcagttggtccgtt

SEQ ID NO: 33542 - DNA, 793 bp, Heterodera glycines
ctctctctctctctctcttgcttttcttctctcattttctcccacatctttcccacaccctctttctctctcccctctccttttaccactctatttctgccactcgcacatttgctcatgtgagtggaattagtcgtccgtcctccgtccgcccccttccacggcccctccctcccctttccgcccccaccaaaattctctcctcctccattttctgctgatcgcttcaattcaaaagcatggcttttccatagtcctctgttgcgatcagtgctttttcgagaattttttaagtgctatttttgattttcacgagtcacatttaattttaaattaaaaattttttttaaactcttgaaattgtcattttcattcggcgaattacttaaaatttcaaaaataatacctcttttttttgtatatgaattattattttttattaataaagaaattttcacatttgacactttttataaaattgttaaaaacattgaattaaaaaaaattagcatttaaatttaaatgtagaattttttcaatttattacatataaatattttataattttatgtaaatttattcatttttatagacacttaaacttttattacatcattaaaattatacttttttatataattaaaaataatattttaaaaaaatttggcaacatttttttcggtgttttatatttttattcattttatgatcatatgacatattgtcaggggctaaattaaattcgccttctcattcgtcatttcctggcatatggccaatttttattgcttct

SEQ ID NO: 33543 - DNA, 1676 bp, Heterodera glycines
  unsure (1)..(1676): unsure at all n locations
taagcggcgatgtttttttgtaatggaaaaaatggggaaattatttaatgactcagattntaatgtaaaaaatgggtgattaaaaattaattttggaaaaatgctaagttttcagaagttgttgtaaaattgattattaatttatttaaccattttaataatctgtttgatagaatgatagagaaaataaattgcaaaaattggcaattaaaattagtgttgtataaaggttatgtttttataatttttaaaaaaaataataacattgttaaaatatattgaatcgcataaattatgatttgttttatgacacatattttaattgaaaaatgatttaattaattttgaataaaagtcatgtttttataagttaaaaaataattgttaatttttatttaaattattaataatttttcaattgtaaaaattattatttcttatttgctatttcgattcctcattaaaaattaaaaaaaagctttagaattcctcatttattaattagttaactcaattagcattcggaattcgcattaaaaataattggatgtagaagaattttagaacagttgaaattaaatattttttatttatttttttaattttgcgcgtaaaaaaggggggattgtaattagatatttcatccacccgccgatccaccaacattccatacaattttcaaaatggatttaattagccaaaacgaggtcataatataaatgaaattattataaaataaaaataaaaacgattttttaaaaattaatcataaaataaaacctatctttttaaaaaattgaaaatttatgccaaaaataatcccaaacatggaaaatttctatatctaataatttatattattttgtattttttttttcttcaaaatgattttcatactaaacatagctgatttcaagtttttttagcttaaatttagtgattagaagaaatttttgaaaatttgccccaatttgtaaaaatttatgtgcatattttccactttttatctgcatattttgcaatttttggtgaatgtttttcgactccataattatattttttatattttaatgccaataactcaagtacatttaaaatcgttaaatttgccaattatcccaaaaaacaaatcaatcacaaaatttctcgccatttaagtcaatatttggacaaaattcaccccctccctcctcgaaaaatgatctcggaagcgaacaaataccattttctgcccatcacagaacagagattaatccgcgcagagggcagaaaaagaatggcacagaaaaatcccaacaacaaccaactgaacccgtagtggaaaatattggacaaatgttttaggcaaacaatgaaaatgtgggtggactgctcgttcacccgtcccattaggggggcaggggaaagcaaaacacccatcaattcattcaacaaattctctcccatcaatgggtgggaggggacaaattcaaatattgggactttgcatatatgtatcatttactaattaatttgggtgtgcaggaaaatcagtgcagatcgagagtctcgaaacaaaaataaattttgtgaggaaaatattgaattgaattgtcgtgtcattaaaaaaagaaaattttggagaaaaacaattcgacaaaattggataaatttgcaaaaaaaatcagggttcatat

SEQ ID NO: 33544 - DNA, 885 bp, Heterodera glycines
  unsure (1)..(885): unsure at all n locations
gtggtctcgagtctccngggaataaaatgcaaaaaatccataccaattgatggcgaagcaaattccggatcaacattggccaatagctgacagacctacaatttgatagagatagattaataatagagaaccacgggaccaggacctggtagcggacaactgagtagaactgagtaccaaggtcccggttttgaccgggactagtcccggttttcccaaccaaaaattcccggtttttcaacccaaaaaggtcccggtcccgggtttgcccaaaattcccggtcccgtggcactctaattaatatagcaaccatcgataattaaaactgtctatggttcagtgcttcctttttcgatttgcaatattatatcacaagttcaaatcctacttagcgcacaaaaacattttttaaataaaatatcgtaggtgatccagtgtaaatagcctaatggaagcgaataatttcttggattaaaaaagtcctcattcatacgtacggtattccgcgtgctctcctccaccacagcaactgcagtactctgctcagaaatgcactcgttcagctgctcgttggcctcgcgcaatgcgccaatttcggcctccaaatgtccgttggcgttacactgtgccaagtgcgcgagttcttcttcttccaatttcaaggcttaaaatggaggaacaaatatgaaaagtcgaaaaattcttcaatcatttaaaccggttcaatttttttacaaaacgtcaaaacaatagttatgaataaggaatgatcaaagtatagtaggatcactcgcctgtttgggacagttcagcacggataacagtcagctcttgttcaagctgttcaattttagcctctaagcatcccacacgagtcccactct

SEQ ID NO: 33545 - DNA, 1038 bp, Heterodera glycines
  unsure (1)..(1038): unsure at all n locations
ttcttactgtactncgttggcggaaccaccatataagccgggcgaaaatgagtggttctccaacgatgtaagttaagcatgaaagggggcggggaggggctgggccaaaatattgcgaaggatttatgggcaggactgggcaaaaaaaaagcacaaaattgacatttttggtgtaaatcaggcatgggtggccacagcctcaaaaaatttcggaaatcggaattccgacggctgaaaaaatttcggcaacagaaagaaagcccaaaaaagccggaaatcggctattttttccaccaaaattgcaagtttttgagtaggattattctggggatagaagggggccggcagtgacaaaaggcgaaaattttttgtaaaaaaatcccttaagcctctcacactgtactatcaaaaatgggcggggcaggcaccgggcaagccatgcaatgacaccaccaccaccaacaacaacaaccggtaaatgggttaaaatgacaaaaagtttcaaaaataggggcaaaaaatatatgccaaaaaatttttctccgcatttttcgtgctctaaagagtaaataaacagaattaatttttgttaaaagattttttgaaaaattaattgatgatcatttagggcatttattctttttatgtttttctaataatttttacaaaaaatcaacacaggtttttacatattcttacaataaagtttaaaaaaagccgaaaaattataagaaatcgatcattctcatcacaataaaagtgatttgagcggtgacagctcagaattttctccgggattgcgggatttatacctgcgggattccgtaccgcagaaattttgaattccaatcccgcagcgggattcgcaaatttgaaatttcccggttttcttttgatgtatttaatggtacagtggggggccggtgccgacccaaaacgggcccacgcaacagaaaaagctgaagccgaaaaacggaggaggaaaaaaaaagagggacagtgaaaaagagggggccggcggttgatgaaaaatgaacc

SEQ ID NO: 33546 - DNA, 785 bp, Heterodera glycines
tgtcaatttaccaccacgcgctgcacgaccgatggcataaggcgaagaatttgctgctgatgtcgcatttgcaagcactggtggaccattcggatgccagcactcaagtcaatttccaagaaaagacaccgacccaaaaacaatcgaattaagattttgtacaatcgcacaatttgccaactcggactttgtgcttttcgtcatggatttgttcgtgaagcgcatcagaatttgtctgagatccagaacacccaacgggccaaagacttgcttgctcaaggcattccgccgcgacaatcggaaaaaacggcagaacaggtggcccattttttttggaatataatgccgtggaagtggtgccctctccaattctgttttgtccgtttaggagttgaaggagcgctctctgcaagtgccctaccacatgcacatcaatttggagttgatggagtgcgtttacctcatctgctcaatgatgctcgagatcccaaacatcgcttgctacgagtacgacgtgcgtcgacggcttctctcccgttccttccattaccaactgaaattctccgagaaagcggcgctcatcggtcctccggagaacacccgcgaacacgtggttgccgcctcgagggcaatgctcaggggcgaatggatcaaatgtcgcaattacataattaacgacaaaatgaacgcaaaggtccgtggagaaattatgaaaaattaaaggaggaatgaaattgaatgtccggtcattaaaaaggtgtggaatttgtttcgcaattctgacg

SEQ ID NO: 33547 - DNA, 741 bp, Heterodera glycines
ttttcgcgccagcggattttttcaagtataacttttttcattgtaagccaaatccaagtttcttggtatcattcgatagccctatatgttctctattaacctgcaaaattgcgaaaaatttggtttaggttcagaaaagttatggccagaaaacttcaaaaagctgtttttctaaacatttctggcaataaatttagttggatttgggttacagtgaaaaaagttacagtccaaaaactccgctggcgcgaaaacccccgagtcatttttcttaccgtttttctcagaatgccaaaatttgtgctaaaaattcctaaattgactgtgatatgcttttatgatattatgcggacttttctattatgattttgcgtaaattaccaattttgtttaaagttacattttttataacatacctaaaaatgctatttttaaaattgttttcggcataaaaaaccacatgatatgctgagatacactttttatgcatatgtaaatacggcctacaaacttcaaaccaagcgaaacacatgttttttgtgtcgctcaggcctcacacagaccatgaaaaagaaatatgcctgtgcatataattacacgccctacccttaatccatgaagaaatgaattatatctgctttttgacatttgcaaggaaagtcaatcaatcaccgttctggtatcgttttcttctctcccccgcctacttcgctacattcacacattccatggaggaacagg

SEQ ID NO: 33548 - DNA, 822 bp, Heterodera glycines
aacaaatactaactgttcttttagaatttgcccaactttcttactcaatcgacctcacaaatggcgttctctgaagacccgttgatcaaaattgaagaggacaatcctcgagctgacgcgtcaactcacaatttgcctactaatgagaagctgttgccacaaaataatcattttgcaagcaatgttttgaaagcgcaaacggattggcactcacaaacggaacaacaacagtatcaaatcatcaattttgttgacaacaatgcaccaccacatagtgaattaacgtcgagctttaatgattttgctgatttgctgtcaaacacgaagacaaatgacgtggtgccggattttggaatgactcaaatgcgcaaaatcgagccaaaacattttaatgaaccaaaaatactgaacaatgttactcatttaaatcaaacagcggccagtcaagtctccaacaattcgaaacagttccatgaacttggttggttacaaaaaaaagttttctaattgtgttttatatagggatgtatgttgcaaagctactttctaagacacctcaaaacggaatcgcagaagctattcgcttgaaaggccagattttctcaatgtgcaccagcaagcaaattgatttgatgagtgaaagtatgtgagacccatccaattgtttcattggcttacacacacaaaaaattttcaatttggatttattcgaatcatgatcattcctttcttactttgaatctgcattacattcttctatctgatttggtgattcaccattaattaatattttactgtgctttttactttaccctaacgcgc

SEQ ID NO: 33549 - DNA, 710 bp, Heterodera glycines
ggggttcgaaataggccaaaataaatgctattttcgtgatcagcgaccccaaaaacccttagaagcatgttttcacggctttttaaagctgaaaatttctctgctaaaaaaggggggcaccatcggcagtattacccaaataatggacggattcgaaaaaaattgtggcgacaatttaatacctctgttgatctatttattggtaaagtccaaatcacttaaaatggtagcaggacaaaacatgattgggatattaagaaccaaaactacatataatattaaaatcatcggttgagaaacagtaacagtgccaatgcatttctcgacacacaaaaatgattggctaattactaccggctggcttctacccttgcttgataaagttgacacccttcgcaatttccttcttcagttcgggcaccgctttgctgatcagctccttttcgtaagcggtcaggtcacccaatggcagtattttttccttaaaataaacgattttggattacgtggttaaagcattccacataacggatattaattatagctgtggtagcaaaaacttaagaaaaaaccccattctgaaaaagtagtcataatttaataaaatgggacaacaaaccacgccgttgggtcccagctccaatggtccagcaaagtaatcaagggcttccaccacgtcggacttgacatacgcacactgcacactcttc

SEQ ID NO: 33550 - DNA, 1144 bp, Heterodera glycines
ataatatatatatatatacatcagcagggatttgtcggaataaacggatttataattgccgacacttttgtgtttctcgaaattccgattgccgaaaatttttggagggcgtcggcacatttatccctgctgctgatgtacaaattagtatatataatttattgttttttttaattgtgttttagtgttgtcccaatttcagtgtccgccccatcccctctattttttctgccactaaataatccaatttttttgccattttgtcattcgcctgctctcctcctcctcctccactgctcaatctcattatgttgtgtagcttttcactgttcagctttttgttacattgtttttgttcaacacatttcgggcccggaattttgaaaagtcgggaccggaattcgggattggcatcaggccgataaaggcaggcttgccagcaggatttaatctctaatattatattttcaaagcctgaaagtagtgataatgtccactgggaaaatttctaaaattggttttagcttaaattggatttgtccaaacaaaaaaaattggaagttaatagattgtgtccaaaaaataataatcaaaaatttgcgattatgagccaattcagtgtccattgcggagaatgtaattttacacgatttaaaaaaaattttgaaaatttgttgcaacgccaaaccgggattcttttgtcgtgagctgttcttatctcgcaccgcgcgtatcactgccacaattacccactctccagtgatggattatccctttttcttgtagaaaaattttggcttggcggtcacataatgggaaagtacccaactattaagctaggagatttgtcatccaaagaaaatgttgggaagactggaaattgtaaaatgttgaaatttttgcttctaaaattcacataaaatttaaaaaaaaagaaagctcataagctgtaaacttcgttgttttccatgaaaatattacgaaaataacaaaattccgggtcaatatgtcgaaatcggggttctggtctcaattgtccgggtgccggacttttttcaaaaaatgggatcgagaccctgggaaaaccccggcggtatattccgatcactcacggactctacacacatttcacatcataatcaaa

SEQ ID NO: 33551 - DNA, 912 bp, Heterodera glycines
  unsure (1)..(912): unsure at all n locations
tacaaaaatcttcaaaantttgaaaaaatcataaaatgaccccatacaaaaattttttcagaaaattttctttaccaaaatttcacctttttttgaaaaattatcacgtaaatacaatcagtttttaataataatcaaatttttttaaatatcaaatttttagccccgaattcggaatttttaaattatatcacaaaaaacaaataataaagattaattcatataatcagaaatctcaaaaaattatttcgccaaaattttgaatgtgccaatttccgaaaagacctcttattttccagaaattttcaggcgcttctcaacaaaatccaaaaacttggcctacatgaacagtgattttgatgattttgaaaatattgttatttccaaagaaaacattcattttacgtttatataaattcaattgaactttgaccatggaattttcatgttattttttaattaattaattacggcgatcgagttgtaaattgcgtgctgaattttgttctgcaagtgatgattaatttggatatacttctaattattaattaattaagcggtcatcgagttgaaagttgcgtgctcgtttcggtttaaagcattgaccagattgggtataataataaaaacatctttaagaattaatacagaaaatataattatgtcataatttccccttacttttaaaaagattaataaaagtaatttgttcattaacaaataagcataattatagattaattccccctaattttatttttttttcattttttttttgaatttgtaagaattcattttaaaatttataattctatagcaacggaaaaaaggtggctttttcacaattttcaaatgaaatggatgccagatttaatatttatcacattttgtgcgttcataccagacctgcca

SEQ ID NO: 33552 - DNA, 628 bp, Heterodera glycines
ttttgaatttatcaaaaagtaaaagcaaaaggggggacccttttgttttggaaaattttttaatatatagtcatgaaaatttattccctggggttcttgggggtccataacctcgaattaggtgtcagattcgtgatcagcggcctttaaaaccccgggtatcaaattttcatggttttttatcacaaaaaaattttgcaaaacaaaagggttcccccccccccttttgtttttgataaaattcaaaagggcctttccttaaactagcgccagatttatcataatttaatattttgtccatatttttgtttttttatccatataaacctggaccctaataataaggcaatttccaatacatatatgtagttcattttgcacaatatttgaacatcgatttttggtaaatttaattaagtgactttttgcttttgttttttatctacataataatgaatttttaaacaaaatttttctttaattataaatagaaatgccttctttacttggggcgtcgaatcattatgtagttttgcaaaataagtttggcagtaccggttattaggcaccgtcgagaaagttttaaaaaatttttaatttttatacatatttaccgaaacaaagtccc

SEQ ID NO: 33553 - DNA, 963 bp, Heterodera glycines
atatgcctattgcaactgaaatttattcaactttcccgacaaattgttgagataattattctagacgatttttttatatctcaaagcttaactattgcctttttgtatgataactggtagatattgggagtgaaaaaaagtttgtttgtgactatttacaataaaaatttatgcagcatttctaaaaaggatgtaaaaataatttcttgcgtaatattttttacattatgttgttgaagaatttgagtctgcttctgatgcaattggaaaatttttcagcttttctcaaaaagttttttcccagaaaacggatgggtcaaataaaaaactaaacatctcacatgaccaatttaaattcccttacattttgggtttactttattatgctggtccataaaaaaatggagtttttccggtgccaaatttttgtgaattttctttcggcccgtcataagcggattgtttgggggcaaatgaaaacaaattttgtgttattcgaatgcgctagccgagctctacattttcaaatgtatcaacaaagggtctatctccactctctggcgagttatgtccagccaaagcagagtgggccataaacacgaattttttaatctttggtatttcctctattttgagcctgctctacatttatgtattgtgccaatatgcctattgcaactgaaatttattcaactttcccgacaaattgttgagataattattctagacgatttttttatatctcaaagcttaactattgcctttttgtatgataactggtagatattgggagtaaaaaaaagtttttttgtgactatttacaataaaaatttatgcagcatttctaaaaaggatctaaaaataatttcttgcgtatattttttacattatgttgttgaagaatttgaggctgcttctgatgcgattgaaattttttcagcttttccttgaaaaagttttttc

SEQ ID NO: 33554 - DNA, 946 bp, Heterodera glycines
taagcctaaagtttttcgctcgtttaaaaagcaattaaaaatttttagatttttattcatctccctttttgatagtgaaagcatctgagtgcctaaactaacctgtaaataaagttttgtgtgtttcagagcacgttctaaaaaatatttatgaattaattttgcaaaataataaataattaatgaaaaagtcagaatttcgaaaaattttaaaaacaacaagcgttggcattttttcaggttaagttagtcctttacaatggagaaggcctgcaaaatttggagagattatatcgatgttagtgcgctaggttcgatgaaactttttaaaatataagcctaaactttttggcctgtttaaaaaggaattaaaaatttttaaaaattttattcatctcccttttgatagaaaaagcatcagagagccttatttaactttaaattaacatttggtgcgtttcagagcagtttctgaaaaaatatttatgaattaattttgctaaaaaaataaaatagtgaagctttaaaaattaataaaaaattttaaattcagaattactggagttagcatcatagcagtgcttttccttgtctttttgatgctctcgcaaaatctggttcgcttctgatcagtttataaaaaaaaagttaagcctaaaatttttcgcatatttaaaaagcaattaaaaatttttagatttttattcatctccctttttgatagtgaaagcatctgagtgcctaaaataacttgtaaataaaaatttggtgcgtttcagagcagtttgtgaaaaaatatttatgaattaattttgctaaaaaataaaatagtgaagctttaaaattaataaaaaattttaattcagaattactggagtagcatcatagcagtgcttttccttgtctttttgatgcctcgcaaaatctggttcgctcctgatcagtt

SEQ ID NO: 33555 - DNA, 939 bp, Heterodera glycines
  unsure (1)..(939): unsure at all n locations
gaaaattctggttgaaagaaaaggtttaaaaataatttatagatgaactcaaatcctcatgtccaacatattaaaaatattcataaataatgcttgttgaacgccaaaaataattactagagaagaaacggggtagccgacgcggcattaatctgcaattattaaaaaattttgaaatagcccaaaaccactcgtcttaataacgaaaatatttatcaattgcttttgtttaatattgacaataatatgaatgcaaataatgtaatcgtatatgtgaaaattctgttgaaagaaaaggtttaaaaataatttatagatgaactcaaatcctcatgtccaacatattaaaaatattcataaataatgcttgttgaacgccaaaaataattactagagaagaaacggggtagccgacgcggcattaatctgcaattattaaaaaattttgaaatagcccaaaaccactcgtcttaataacgaaaatatttatcaattgcttttgtttaaaattgacaataatatgaatgcaaataatgtagtcgtatatgcgaaaattctgtagaaagaaaaggtttaaaaataatttatagatgaactcaaatcctcatgtccaacatattaaaaatattcataaataatccttgttgaacgccaaaaataattactagagaagaaacagggtagccgacgcggcattaatctgcaattattaaaaaattttgaaatagcccaaaaccactcgtcttaataacgaaaatatttatcaattgcttttgtttaatattgacaataatatgaatgcaaataatgtaatcgtatatgtgaaaattctgtagaaagaaaaggtttanaaataatttatagatgaactcaaatcctcatgtccnacatattaaaatattcataaataatcctttgttgacgccaaaaataattact

SEQ ID NO: 33556 - DNA, 1045 bp, Heterodera glycines
  unsure (1)..(1045): unsure at all n locations
atttgacaaatccaagacttaaaactggggagaagcaagggtctgtggctgggggcctaaaatttgggccacattggagaattaattctgatttctgaaaaagtcccagaaataactattttttctttccataccttcttgtagagctcgagctgctctttccaatggtcttatcccggtctcgatccgtgccgaactcacaaagttatggagtgaaatgtgaaatattgttttcaccacaaggcattttttctgaaaaccggattcaaaaatctggggtttggtataaccgttttagaaatagcgtagaaaacagcttcgatatcaagaaaccaagtcaagtccagaaaggaatattttaaaacgatttcgttttgttttggcattatgataccgaataactttcggaaattatggaaacaaaattggagaaattcgaataattttttgactgcaaatttttttccttttttgaattgggttcaaaaaaattttaagagaatttttgattattaatttgaagtcttgaatttatttgacaaatccaagacttaaaactgggagaagcaaggggctgtggctgggggcctaaaatttgggccacattggagaattaattctgatttctgaaaaagtcccagaaataactattttttctttccataccttcttgtagagctcgagctgctctttccaatggtcttatcccggtctcgatccgtgccgaactcacaaagttatggagtgaaatgtgaaatattgttttcaccacaaggcattttttctgaaaaccggattcaaaaatctngnggtttggtataaccgttttagaaatagcgtagaaaacagcttcgatnatcagaaaccaagtcaagtccagaaaggaatattttanaacgatttcgtttttgtttggcattatgataccgaataactttcgggaaattatggaaacaaaattgggagaaaattcgaatatttttttgactgcaaattttttttctttttttgaanttgggtcaaaaaaattttaagaagaattttt

SEQ ID NO: 33557 - DNA, 973 bp, Heterodera glycines
  unsure (1)..(973): unsure at all n locations
tcgcgttggagaaagcaatgcgcagaataactggggagacttagggttagcgcatcaattatttttttcagaatgtgatcggggtacaaaaaatacgggtcaaaaaatgggtgtaaatccgcttggagatgcgttagaaaagaaagaaaaatatgttcggacagcttttgaagagctgcattgaatgctgcagttgccgctgctgtacgcccacccgttgctgagttagggtcgagatcggcatgaaaaaagacaaaaaggaggaaaatgaaacaaattcgctgctttgccctcgcgttggagaaagcaatgcgcagaataactggggagacttagggttagcgcatcaattatttttttcagaatgtgatcggggtacaaaaaatacgggtccaaaaatgggtgtaaatccgcttggagatgcgttagaaaagaaagaaaaatatgttcggacagcttttgaagagctgcattgaatgctgcagttgccgctgctgtacgcccacccgttgctgagttagggtcgagagcggcatgaaaaaagacaaaaaggaggaaaatgaaacaaattcgcggctttgccctcgcgttggagaaagcaatgcgcagaataactggggagacttagggttagcgcatcaattatttttttcagaatgtgatcggggtacaaaaaatacgggtccaaaaatgggtgtaaatccgcttggagatgcgttagaaaagaaagaaaaatatgttcggacagcttttgaagagctgcattgaatgctgcagttgccgctgctgtacgcccacccgttgctgagttagggtcgagagcggcatgaaaaaagacaaaaaggaggaaaatgaaacaaattcgcggctttgccctcgcngtggagaaagcaatgcgcagaataactggggagactttagggtagcgcatcaattatttttttcagaatgtgatcggggtacaaaaatacgg

SEQ ID NO: 33558 - DNA, 880 bp, Heterodera glycines
  unsure (1)..(880): unsure at all n locations
ttaattgtcattcatcacaggcatttttaacaanttttttcccccaaaattaagacctaaattttgaagcaatgcttaaaattttttgaaaactaaaaagcatgataaagaatttaaggcttcaagatccaactttttatgcttaattattgctgaaattgggattttctacttaatgattagtagggttgctattgctgctaaaaaatggataaatatagaaataaagctgcattaaaaagagacaaaataaatgtacgaaattttttaaaattataaaatatgtaaaaaagtgaataagtttttataaatgtgattttcatgaaaatgttcttctttaaaaagcagaaaaagcacaaaaagacctaattagcattgatctcttttattttggtaaagtttataggaacggtgactgtgaatttatggaaaaaagctctgcatttttaaatttattttataaaaatttattttaaatttgtttacgattaaaatccttatatcccgaaacaattattttaaaatttaattattattacttttatagacattttactcaaaaaaaaaaaataaataatatattttcattttgaaaatttaaaattatcggttttatatgcctggatccaataaactaaataaaagaataaaaatagactaaacaataaaaatacaaaaatttaagctaccgacagaaaattcaaaattcactagtgacttcaaattttataaaaattttctgtctaaaattattatagcaattaaaaataacatttttaatataaaaaaaaaatcgaaaaataacagagctcgcacaaatttattcaaaaaattctctcaatcatttgcaagctattgaaaatgatcaccattcaggatt

SEQ ID NO: 33559 - DNA, 895 bp, Heterodera glycines
attgtaaagttcggacttcacaagcataaatttggcgaggcacaacagtgctgcttccaccgccacattgctccatttggtgtggtgttgcagcacggccataagcacgggcattgtgcggcctggtcagaaaatggcatgtcaaatggaaaaccaacaaattaaaataacaatcgaccgaccaatgattgtgtcattcgcaaaggtggacttgtcgagcacttgctgaaggcacatttggttcttctcctcctcagagatttcttaaaaaaaatgccgactaataacaaaaaggcatttatttaccttggcaaagttcgtcatcgtttccaccttcatccccattattgtttttgttggtgttttcaaaattcagctcgctatgacgtgatggaggccgtttggggttgggagtgttcagaccctaaaggcatttaaaatagtcaattaaaaacacccaaaggaaatgtaaaaccaaaatacgccgacccatttttacactattccaattaagccaaaaagcgatcttttttgttttccggagtcacttttcatgagaaatctttcgtcaacgcccacccgtctcagaatggtgtctttgatgtggacagaaaaagtgcactcggcgtaggagaggaacttgagcaccacttcgccgacaaagaacagcagtcggctgaccaccaactccaacacggcacgccgttgttcgacagtttgtgtatccaattgctcctcgagtgggtgggttggtcctgttggaagcgtgtgctcagaatcgtcagagccaataattccatcggcacaaactttgggtgccatcatcatcatcaccctgtaaaaagtgccataaattatgtaaaataatatttattttgtgctaaagccttcccta

SEQ ID NO: 33560 - DNA, 814 bp, Heterodera glycines
ttaaaaataatttaaaaatgagaaataaaaaacaagatccgctaataaaaaattgcaccacgacggaacgcataaagccgacaattaccgccctcgggggctttatttttcagcccccctcacaaggtgggctcgaatttagggggaggggggccggcaaatgtttatgcgcataaaggcacgctttatagacaatggaagcaccgactgcaattcgagcgcagaataaaaatctcttttttaactataagaaattcggcgccatccgcgtacattgattctctccgatgtttcacagaattatcatatgaatatgtatgaaaaaatgattttatgtttttaatagagttgcacgggactggcaaatcagctttggccccttgaatcagcaaaatgctgataagcagagttgggagcctttatatttgaatatattttggcattttgtttttactccagcgatttttttcagcttttttccttttttaccgtccatgcatggtgctgctgattgtgaggtgcaaaatggccaacaaagatgactctctgtttcggcaccctttcatgcccattttttgcctaattatcgtcgcagtaaaatgcttgttaattcgatgctaccattccactgattttgaggtggcatttaacattgaaaaagagtcaaaatgccgaagtttgaaggtccaccgcaattggatggcattggtctaccacttgccaatgtccgattggtatcgctccgatttgtcccaatggacgttggactatccgccattttttgcttatttggaatggatttttgcacaatttg

SEQ ID NO: 33561 - DNA, 894 bp, Heterodera glycines
  unsure (1)..(894): unsure at all n locations
gcgtactatctcttcggttttaatcatgtaaaaaaccctttcacttcgctctatagaacttttttttcgccttacagattttctttaaattttgcatatcgatagagaaaaggaaaatgagcaaactttcagtgttttgagtaaaaattttggcctagaacattacaaaaatgggatgaaaaaaatttgcatttctttttctctccttttggagtactattttcatgtctctaacacataaaaaacaccaaattcgctaattctaacaattttggtttataggctacaaaatcactttgaacacttagaatcaatagaaaatgattagttttcgcattttggttgaaatcagcagtttaggacttgagttataacgtgatagaaattttaaactctcacaacttttttcatatgagttaaattgcttagcatttgcttagaaaaagattctccttttcaaaatctttttttagataccaaatttgttcagtttagttgggaatgaagcgagttatggcagatcaaaataaaaaatacaaaaaaggcattttccagtgtaaattttgaaatagcgcgcaaaaatttacgccaaatgcgctatttggcgttatgagcaattttgtctaacactggcgcgtacccatagtgatatggctgatagaaataaaaaatacaaaaaaggcatttaccagtgtaaacgcgcacaaatttacgccaatttaaatatactatctcgtcgtttctctttttctttgtaatttctctctctttggtgtactatctcttcgattttaatgatgtaaaaagcaacatttacttttctatgtctaactttttttctttatgttaatccctaccanatttgcatagcgatagagaaaaaaattccgcatc

SEQ ID NO: 33562 - DNA, 843 bp, Heterodera glycines
gcctttcatcgccgctcttcgccagtccggatgggaactgtaggtcaattaatggcttatttaaactgtttatggagccaaatttaaaaaaaatccccttttggcacccttttcaaacattggcatccttttcaatgcgttctgtgctttttagacctgcacttcgtccgtctccggcgaagaaagtcgccagcggcggcccgccgttgtgttgctggacgggacgaatcagaacgaattgtgcaccatggtgaagtgagtggggaaaacgaattctcgggttcaaaattaaatggaattttaaatttttactcccccccccccaaattttctcccctttttaatttcctttccctattttcccactcaaatgtctttcccccctttagcgcagtccgtggcgacgacgaccattcagacgtgacggttactccgtatgcattcggtgccgacgacgttctgtacgccgtccttttcccaaaaatgccaaatgaacggaccgtccgtcggctggccaaacagttgcggattcaacaggtccctccctccctccccccccctctctctcttttctctctcccgttctctcttctatctctctccctctctctctcccctatttttttcttcccctcttattacccctctccccctccattttcagtttttcctccgctcctccttcgacatcgccctttgcgagcagttctcccgcctttcctcccgtctccgagctgtccccgctcttttcattgttgttgaagaggcacaacagcccatcaaaaatctgtgatgaacacaacattgccccagatgtgaacagagagtacgaattgttgacgg

SEQ ID NO: 33563 - DNA, 87 bp, Heterodera glycines
ttaacgaggcgctcggtgagcattttaaacgtaaggaaattgaaaataaagaagtttcagaagctgaaaaagggccgcaaaaacgag

SEQ ID NO: 33564 - DNA, 55 bp, Heterodera glycines
ccacgaggtgctggcgcacgccgccgcgaccctgggcggggcgctgttctacgtg

SEQ ID NO: 33565 - DNA, 1288 bp, Heterodera glycines
cttttttatagtcaaatgagtgtgtaatgtcaattgacaaacaatcaaacattgatattgatccatcaagcaatgaaattgttaaaatgtcaattgatgacgaggaaaatgatgtaaatcattaattaatttatgcattcaattttttaaatggatatgaaacttttaaattttaactcaattataaattaattttaaaatttcgccttattaaattcaattttaaatgaatttttaaataatattatgacgcatttaaaatatatttagattttaattcagagaaattaattaaaaaatatatttagccaagttcaagcaataaaagagccaaaaatgaacattatcaggaaaacgatgtaaaagcatattttgggctttcaatttttcaaacgatttaaaatttttaaattttaattctattaaaaatattatatatatatatataaattaatttttattttaattaaaattaaatatttatgtatttgataaaagaagaattatattttgggcttttcttttttaaatgattaaagaataattatatttaaatttaactgaaaacgagtaaaaagattattttaaattttattcaattaaaaataaattatttaaaaatatgtctagccaacttcaagctataaaagatcaaaaaatcaccaaacatcaaaaaatgaatttattcaacaaattgattcgctgctggaagcaaaagaaaatcttacacaaatttacatggacaattggtacgttgtggacgacatggccaaggaatatttttcaattgtcatcaaaatgcttggccaaatgccaccgaaaattaaaaatttgttcgaaaatgacattgaaattttgaatttcaaatttaaaaacaaatatcaacaaaacattggtggcggaggtggtggaacaattaatttggacaaaattttggtggaaaatgcgatggattatgatgaggacacacttcgccaaactcatcggagtttaattgaacgtttcgccataaaaattggcagaatgttggagattacgataaacaacgcttttgtgccgtcgaatggcataatggcaatcattgaactgcacatttatcaaacattttcggaaggactcaaaaagtaattttgttttttaatatttaaattctaaattaagaaagaattttagtattggctggaatttttagcacaagaaatctaggaaattttttttaaatccaaaatttggtaatggaaaaattaattaggaaattaaatttttaaaaaattcattcttaatgacg

SEQ ID NO: 33566 - DNA, 71 bp, Heterodera glycines
cagacgcacgttgcgcagaatgaacggcatcacggtggtcggcagctgataaccgcccgccaggccgcagg

SEQ ID NO: 33567 - DNA, 847 bp, Heterodera glycines
ccaattgccaatgcgggtgggccaaatgcgtgaatgggtggcgagtggctgctgtccggtcggtacagcttcaacaatgttgtgtcacgggtaaataaaattctattgaataaaagaaatatttaatttttaaaaatttttaaatgcaaaaaatcatttaaatttttttttgaaaggcgttgccaccgcctattcctggataaatgcaagaattccgggcaccccggatgatcggtcttcttgagccctttaacaaagcggaagtgccaactaaaacatattgatttaaattattattttttaaataaccatattgatttttctttatcaaccaacattctcacttacaaatttccttatttttggttttactaattaggaatatttaattattgttattcatttaattctcttaacctctacttcattttgactttttcctattttattgaattaattttagaaaaataaatgctggtgcagaaataattattggtttgagagagaattgctgttattgatgttactcaaaaaaatcaaatgaattttataaaagttttggatacaagtgttcgaaaaaccagatttattgagttcttcttggcataacttttttaacggtcaatgaaattttttgaaattttgcagttctaatagagaacatttagggcaatcgaatgatgtcatgaataaaaaaagttactttgaacaaaataacatacaattttctattaataatttcatttaatagtgttgattaatgacacagcaccgagataatcactgattcaaaagaaataacaatttggcatatgatctggcatatccgcgtcaaaatcaaaaaact

SEQ ID NO: 33568 - DNA, 1541 bp, Heterodera glycines
ttgggttgtctagatcactatgaaggagtgatctgatcaagttggtataaaagacttttttggtcaccatcaaaagttgggttatcatgaatcatttcagatttttctgtgctctaaaattccagattcaaaaagtggtcctaaagatgaccacccaaaaaatggagtgcagttggtaaaatggtttgtaatcaataataacaattatgaacgggttaatgattggcatcattaaaaaccccacaaaaaatgctacaagaaatgtaaaacatatatatacaatatacatcaaactgagattttgtaaacaatttaaaacaaattatacaaaatattaagtggtcctaaagatatgaccatgactgtacaagagactatgtttaaattaaattaataaatatatttttgaaattattacaaaataattaattgtaaataatgtatttataatgaaatagaaaacaattgtaaaatgacataatgctaacacatagaaaaatgaaaagacattaattatcaatatgcagaaattaaaaaaaaataaaattttcgcaattaaataaaaatataaatgataaaaaattaaacagaaaaaactttttataataattaaaaaaaggttaaatatttcaaaaattttttttaaatatattaattaggtgtaaaaaaaattaaaactcttacaatatatgacataaatgataattaatataaaataataaattcttaaagacgaaaataaaataaatgctatggtaataaatataagctaaaattaaaagaaattgattattatttttaaataacttttaattaataaattttaatttatgttataaagtaaatttgattatatgaaataattattaactttttttaacaataaatctaaggaaacaatgaaataagtactgcttttatttttaaactttattaaatattcattgattaaaagaaatggcagtcaatcgacctttacaaaaagaaaaaaataaataaagaaaaaataaaataaaagacaccgaggcaattaaccattggcaaatctcttacaataacattcattattcattaaaataagtagtataatttatatttcaagttaacattttggggttttgttttaaaataatctcattgacttcaactttttgttttttttttaataaaaatattttcaacctatgtgactaaaaaatcatttttcaacgaaaagaggaataaatgttcgtaattcaaaaaaaaaaaaattaaatttcattactaaaaatacattaaaaaatttcttaaattttaaatattttcatattatgaaaaaagtgactttgaaaaaataaaaggaaatcatttaaagattgaagaaccaaagttatttcagatttaaaaagataatcaagaataatttgaaaattatattataacaaatattatattatacaaaaaatattttaaatgtacggagcaagaaaatcatgggcgttcaacaatctacgaaaaaataatataaaaaagagcaaaataaataaatgttttatactaaa

SEQ ID NO: 33569 - DNA, 907 bp, Heterodera glycines
ttaaatattgataaagttcttcggtcagtattactttcatattttccaattttacctttaatgatacatattttacttatgccattatataaatatattttgatattatgtttataaaaattcttacattttttttaaacaggtttttatatttaaaaatttctatattatatattttcaagttatattttctagaatttcaaaatagttaactatttcataattattataaaatttcatgtatttttctttatttagaattaaaattttatttaattaattggtttaaaaatttaatttcgtttgtgactttggtaagcgcctttgagcatttattaaatgcaaacatataaagtcaactatgtttactataatttacatcagttttttttcaaacttcactgatttaatagtcatgttcttttaagaattctttagaaatttaaagaattttcaaaaaaaattatggctaaattataaaaacatttttcattttgaagaaatgtttttcttttcctgctttttctctgactccttttcctctttttccacttcatgtttctcctcgttcttcggcttttcctcctcttcctctccatcttttggctcgcacgtatacttaaccgaattgataaattcaacgctttaatcattctttatttgcctgcaaatttccaaaaaatttcgttaggtccccgtttgttataaagtggccggcttcatgtagcgctacccttcgacgaagctccatcttaatttaatagagatgtgttaacatttttaagtaagttgcatacattcaccaaagcatgtacagcatcttgttgagcagttgcatataaattcagcgcacttaataaattcattttatttaattaaataataatctttacataatcagaaaact

SEQ ID NO: 33570 - DNA, 1177 bp, Heterodera glycines
tcatagtaacttctatttcaaatggattgaattataaatttggatattgatcaaaatcctgattcaaactccaaatataaaaattccctttcattttttcacacaattttcgcctttttctaagtttacttttgccgtcgaacccttctcatgcggcgcatcacctcctccacaacgtacgaagcgttcagattggacagtgtcattttggtgggaagcaaagcgaagcgccgatttattcgctggcaaagaatttttaattaaattaattaaaagattttttggccaatttcatcctcacaccattagcttactttgcttcatctcccttaccccctctccctttccatcactccctccccattcgcttggattagcttcatccccctttacccttggctttatcccccccccctttgttagctcccttccgtccctttgtttctgttgtgccacctcttctaatgcgtttgctgctctcccacagatcactttctccaaaatgttctgtccttcctcggccaattccctctccattctcttcttctccgtttcgtccatttccaccacaacattaagcggcttttccacacggagttggcatctgaaggtcattttcactaattaaaaagtgatctccgctgaaaccgttcgattcgaaagatcgccgacccctaaaagggaaaagaagctgatcagatcaatggtgatcaacagagggcacttatccccatgcttttcacttgcctgtgggtgccttagcgcggacacattcattaacaaagtgacatccgtgaccacaaatttcgctgtgccctttttgtcggcggcggaattcgatccattggcggaccgactgatcagcttggccttgcaactgcgtgtgttttgtttgccatttccattaccattcattcagcagaatggctttagcacccattttttttcttggcttttcccatttgccaatgtttccttcacaattcactcttccactttctgtctcacttttcgccttgtctctcttcccccacccctccattttccatgtttttcttacatttatctgtctttcttgggtttgatttcctattttatctatccctacattctctctctttcactccctctttctcttgcaccctccctctcgctcctccactgtctctctccccct

SEQ ID NO: 33571 - DNA, 739 bp, Heterodera glycines
aattcatttggccataaattggtgagaaaagaacaaaaactcatccgatatcaaattgatgccaaatgaatttcattgtcacaaatgaaaaaataaaattcgaagaaaaaaacaaacaaaaatctggacaaaaaaacacatagcaaaacattattttaaatcaaatgtgatcagaaaaagagctacgccgacaacgtttttgctttatattttggctttcatcttctgttttcctgcaccgattggcgggtaaatgattttaccctttgaaatacgaatttcattctgaaaataattcttttgcatgagaaaataaacttctttttgcccatcacatttcacctgaacttcgcgccaaacgagatgctcgtcgaagtacaggccgtgcagtttcagcattttgacgaggtaatggagcattggcgtgttcgggtagtacttctcgcttagcttggcttgctgctcctgaaatcaaatgaaaatttgcatactcaacttatccaacccgtggctaaatttgaataataatattagataataatctgattttcctttgcttacccatggctcggaggccataatttcagcaacgcgcaacgatttgatatcagtcggtcgtgtgatctgtgagcagcagaattgagtttatttttattgtaaaaatgaatgatcgcagtaacttgcgaaggtaacaatttctaccccctgaaattatttttgctggcaacccccccccccc

SEQ ID NO: 33572 - DNA, 1362 bp, Heterodera glycines
ttggaaattcggggttcggggttgtcggggttggcattgtcggggttcggggtcggggttgccaaatcgttcggggttcggggtctttcaatttttgccttatgcctaatagtcaaaatttttttaatattttttcggaaataatatttattaatttccataataatatttgtattgtttttatttcttttttatcagaaattttgtatagaattaattttttttttcttgaaattttaaaattttttattacttttttgttttccaaaacatcttttttcacgtcgctcttttctaaagacttaaggagaaagggtacggcgtccggcggtgccgataggcgccgccgggaaaattttgaaaatttggttagatctgttaacagattttgtccaaaatatgctaaatttttgcgattttgagccaattttttttaataaggtttatgactttttgggccctgtgatgccgataggcagcgctaaattttggaattaagctctattttctaagatttttcaccaaaaaaatttatgaatttgggtaaatttttgtttttcttcgatatgtattttgtcaaaatatgccaagattggtcgatttctatgagtatttaatttaaaaaaacaaatttgtcacaaagaaaataattaaagaagaaaacgtcaaacggtatcgaactcacgacagaaagtaaagtcaatggcactaacctctacaccacattccaaatgtccgaaattgagcaaatcttctttatttaataaaaatttggcaaatggttaaaaaaaattcaaatttcgtctaacttttttgcattttctcccacgaaaatgccattcttaggggtgtatatttaaccccgaccccgagtcggggttaagggtcggggtcggggttcgtcggggttggaagcgtcggggtcggggtcggggttaaccccgaaaaatggcctaaaatgtcggggttcggggtcggggcggggtcggggttgcaaccctagtttgtgtacatcttgccagtcggatgttgcgatgagaatcgcgcctttgcaagtgtgtgtgaccccagcggaggcatatccatccgtgtcgacattttcgcacaaatttccggcataaccaggtgagcaaacacatcctttgcaactttttgagttctggaatccgtcattttcgcacatcacatttttaaagcaaacttctaaaggcacgaaaaaaaagataaaaagataggcgctaacaaagtggccacttttgattattaggtgctatgacgttactcaaaataccatgcaaataaaattgaaattttgcaggataatagaaaacacttagagcttcgaaagataccaatattaaa

SEQ ID NO: 33573 - DNA, 1236 bp, Heterodera glycines
  unsure (1)..(1236): unsure at all n locations
agaatggttttcagggagtttatttgcgctgtttcataatctacatgaattcttgaaatatttaaagtgtaatctttccataaaagcttaatttctcgccaaacaatgttataagaaacagttgtgctaaaaaaatttttaaaaagttagccaaaggcaaaaaccgtttcttcattaaagcaaacgctaatggtatccattcgccattttcagccgataaagtggcatcgccaaactataagagttttaaatttacgaaaaataaatctaattaccaatccgtgaacaatatatagctgagtgaaaggtttaggggcaacttcgaatgtcccatcgactaccaaaatttggcaattttcaactgcttgtgttgctgtttttgtagcaaatattacaattccttcatctctatttcgataaattacccaactaaaaataatatatgctcattttttggaaattaggattactatattcaacaacttctcattagtagttagcggcttatttaacaacaatttaattgctccttgtcgtgttaataataattgctctggtatatcataggaatcggtcgaaatcccatgtttttgctgtctccttctattaattataagctcgcctaattgagtcaaaggtagggtaattatatgttaaagattcttccgtatctgtttctgccactgttgcaatgtcaaattcttcggctttttgaaacccctataaaagtgaattttcttaatttttaatatttaaattacctctctccataaggtttttatattttctgtgcatgtgagtattttcaacctttgttgcctatcaatttgctcaacactcaatttttctattgggtctccaatgcatttttcatgatgtataattggttttgtgctgaccaaattcatattctcgtcaatgatagtatgagctattttaggcactctgttaaaattaattaaattaagaaaattttttaaaattcaaaaagagaattttctttttcctgtatctttttgcattttaagcattctanataaaattttctttgatataaagttgaaacaacaaattttctccaattatttgcttcttctgttccaattaaaaaaagtttttcggtatcttttttggtcgtacattgccgaactatgaaagtttcaccagtatntctgntttgatttgctacaaaataagcagctccaagactttttttgattttttcatgtagcgctc

SEQ ID NO: 33574 - DNA, 1032 bp, Heterodera glycines
aagaagaagtgagttaaattgtaacattattggcaattaagttggtcccatataaatttggcaaatttgtctttttgtgttcaattggctctgacaatgggcacttttcattgcctttccctattcattttcagccttttccctcaacatcgactgacccatcgacgattgatcttacgattcaaaagcatgtccattcaattgtggaagagcaatcagagcaggtaaacatttttatgtcaattgctatgaccatgccttattttgatttatttgtctaaaactaattttgaaacggacaaaaaggtatccgcctacgaatcggaagaaattgaagtgaaacgaagaaaaattgtggtggaggaggacgaatcggaagagagcatcccgacacttccgccaaagttggacgaggagagcgaattgtcgcgactgaaacttcagtaagtgggcaatttgtaatgcattttttcgctgggtttttcaataaattaatttgtactgctccataaaggctgctgctatcgaacttttcgcaagaacaattggaccggtacgaagcaatgcgacgggcgagtttaccgaaatcgatcattcgacgggtcaaaaaatcggaaatgcttctccccccccccctcaccaccatttgttcagttgatccatcagttcactggtgtgaccgtcaaccaaaatgttgtaattgcaattgccggtatggccaaagtgttcaccggcgaactcattgaagagggtaccaaaacaaacgcattgatatggggatttttaccaatgttttgtagcattggacattcaaaaggcggagagagaggcgaacactgacaaaaacaatggcagcagagagaggcagaacgggggcgcagaagatgaacaaccgcaaaatgagcaggcaaaaccggggagagaggagacacacaaaacccatggggcagagagagcggggaacggatttttattcggaaaagcatggaaatgaattcaaaacatacgaaaaaagagggggggggggggggg

SEQ ID NO: 33575 - DNA, 877 bp, Heterodera glycines
  unsure (1)..(877): unsure at all n locations
aaaattcggtgtgctttatgggatggccaacgacaaattcggtgattatcagacaaaggcacggcgctgaaactgaacaggcgcgcatttattgnccaggaagtgggctcagaacgaagagcgaaattgaggaggaggtcagaaatggcattgatacttaagttaagcaatttatccgtaataaaaatttcagtttaaatgtgcccgcgacggcaaatacccagaagagaatttggaagattggtcaatcacaggcaaacggagtttgactcagaaggcgcttttccattacacggaccgtcgggcgggcaaaggctattccgactttggtttcgtttcctccccattaattcccaaccgaattcgactctttcagccaccaccctttactacggtcgcccttacatttggccgcccgttcgcgaaattaaccgatggcactttttcatttgtgtgacctttgccctggttattctcgtcgactgcaaatggtgagcagaattggttgttttacaaacatgcggatttttgtaaaaaaaaaattttgtacgtaatcgaaatctgaaattttgcagacaaatagcacattaaaatattatctgcaaaatttcaagtctttctaagaactacatactgacaacgaataagaaaatcagctttttcaaatttcttgataggctaatgacttaaattcccatccctattcataagatttcctaaaattttccggcgcgccgggtcttattttaccatttattttttgaaaatttgaacccaaaatgtcgaaaactaaaattccggctttcactgttttatatttcttcgcccttttctgaatggtcgtccttcgaattgtttcgtccgccctaaatcggaa

SEQ ID NO: 33576 - DNA, 1602 bp, Heterodera glycines
  unsure (1)..(1602): unsure at all n locations
agtgagtaaatcctataaaattctaatttttttatgcatgtttcataaatattttggcatttttaatacatatttatttacacatattttgcaatttttcttaaaattttaagcgtttttttgcagccattttagtattatgtttacgcaacatttcttctcgtaattcaattcaaacatcgatatcaatttttatgagaaaatattagctagatagaaacttaaaaaatgaatgaatatatgtaaaaaaaataataaacaattgtttattattttaaaattatcatcaacgaatttccttcaaaaaattacatttattcggttcttaaattgcaaaatcattatttatttatgtgacataaaatgagtatgtaattcaatttactcactttataacatttaaatttaattatttttattataactgatacttttaagtcttcatagtgaattaaaaaaaaaatttataatgaaactgagcaaaatcgaaaataaaattaaaattaattgcaaataatacataaaaagaaaaagataatagtataattatgtcaattggaatgattttggcaactaaatttaacaaagataaattattaattgaattcaataggttttttacattgccaagctaacaataagaaagtaacaaatagaagaaaatgataattgtataattaatttttaattataccaaggtttattccaaaaaaatgaatgaatatttattatttttagtaaataattaattgatcatttaaaaatgaaaaaccaaaacaattaaacattctaatgaacgaattgatggacagaaagacaataaaaaattaatgaaaaaaataattaaattttacaaaaaataaaaatatatcattaaaaatatacgccgtccaaattattaacaaaatcataataaattcgaagagagggacctttcattttaaaaagatctgaagatacataaaaagatacttaaagaataaagatccaaaaatggaaaacaatttgctgacaatttattttttaataataaatatcagcaaaggaagtgccaaacttagaaatggttttaagatttgaatgttatcagtttttgttttaataaattacaaaattattaattgaaactcaatagacattcatggaaaaaaccgcaatagattggtaaaatttccttcgggaaatcatggaaataataaaacaaaatattcaattatttttattaaacaaaataaaacttaaattgataaataaattaatattaaaatttacaatatttgaaaatatttagcataagcagaatatattgcataatatagtcatattaattaacaaaaaacaataaaattatcaaatattcttcctaatccatccctatcgtaacgcaaatggacgaagtgccgtgaattttaaaaagaatagaaaagttaatgagaaaaatatatgcattgaagaagacaaaaaatgtaataaataagtaaaaaattaaaaagcaaaaaagaaacaatttaaattataaaatanaaataaattttaataaaatacaatagtattattattattattattattattatttttattgcattttgtatcaatata

SEQ ID NO: 33577 - DNA, 989 bp, Heterodera glycines
tctaacaagggttgccattcgtccttggatgggcctcgctgattggaaaattgaaagggtccttttttgcaaggtgtccttgcaaattagcatccgaaaaaaactcaaaattttaagatttcaaatttttaccaatgtttttataacttattgcattatttggtgcaaaatatgttaataaatcgcacaaaaaaatcaaaaaaatttttcctggcggcgtctatcggcccattttttggatttttttgaccactttttgtacatgtttttgcaagccctaactacataggtatgttatgcaattaaatcctgttaatggacaaaattttgccttgtcaaccttctactagcaacacaagttttacaaacaatgaaaataatgacaacaacataaaaatagacagtgacaaatgcactgtaacagaaatggaagaagacgaggaagaggacgaagagtttcaaccaaacgagacggacctgagcagtgatgatgtgattagtcagccaaatgttgagagtgatcaggtttatcaagcggcaaaaaaaaattgtagatcggtgttaatttcagctagattctgtttatcatactccgaattgtgaaactcagtggccaaaagagaatgacgaacaggttgcgatgttaataaaaaaaatgtaatagttagccaaaaatcaagtcggcagaaactgattctgacaccaatttatcagaaaacttctataggctgattcgaaatcatcatatgtgccctttgtagaatgttatacttgatgattatattaagtggatgcagtttgagaaaatttgagtaaggaaaaaagctagaaaaagatgcctaattgaaagatctgaggatgcttaattaattagagtcattaagtgaaggagaaccaaacatttttgggtcaattacctatctaccttttattaatcgaccaaaactcaattttaaatataggaaatattatgaaaaattactgcctct

SEQ ID NO: 33578 - DNA, 838 bp, Heterodera glycines
  unsure (1)..(838): unsure at all n locations
aatcactgtcggcacaagtcatttcgtcgctattttctttttcncaaatcgttcaatggggtcccaagtcgtaacaaaactcaaatccgaatcctaaagtggataaggacaactgtattttttattcttgagtttacattaaatcacctgctgcccaaacaattcgtcctcaaagttttcttcttgcgagcttttgtttggtgtcaattcttccactttttcattatttttcatgttgaaactgcagcttaattaactttttttttaaaaaggtgtgcattaaataccccggtcattatttaatgtttcactcttcctaattcagtcttcatgaacagaaaacatttgcaaataattaacaaataaacaattttatcaaaaataccgtatttcttcgattatatcccccccctcgattagaaccccctctcgaataaagccccccttttgaggggggttaaacaatagagcccccgggggctataatcgaagaagtacggtattacatatttattcacaaatcgaaacaaatgtgaagaaaagtattattattaggaagaagatactaaaactgattttatagaattgtttttttatatgatgggctcaatgttctcaaataaatattgtaatttgcgcctttttactgtatcaaattatgattttgcggtatgttacataataagcaaattgccacggcgaagggcctgcttacatgatttttttaactttgttttttcactcggaaaaattctaaatgtgaaaaatgtcatataatttcttagcactctctctattttttgttttgcatttcgtgaatttttgtaagtgaaatttt

SEQ ID NO: 33579 - DNA, 1261 bp, Heterodera glycines
gggtcctttccttttttcccattgcaaatttttgttttcctccattaattgcccaattaggccaaatacagaagaataatgaaaacattaaaaagaacagtaattatcgtcaaacaaagaaatgcgccgcggggaaaaaagacaaaagcaaaacaaattgggcgaagaagcgcattttgtgggtgggcaaaagcatcgatcgatccgccgatggtcgggcgaaggtttcgctctaagcggaggggagggggacaaaaataaattaaccatattattagctatgcctcggtttggtctgaatgtcagatgggattggaacaaaattggcgccgtgccaatgcgattttaaggacagatattagaacagatgtccctggaattgtgatgccaaacggaagtttggaggggggggggggggggtgggtttaagttcccccggacgaattgctccttttgcgttctcaaaatgtccttggtagttggttattctccaaggacgaatacgttttaaattatttatttataatttagaattaacaatgttttaaaaaagagaatatctccacaaatgggacagggaatgtgaattataattggagaaaggcccgaatatatagcagcacaagtgggtaattaactaattaacatgtgtgttgtaaacaaatggaatttgggacatttaaagcgaaatgaatgaatcgccgagagtttgggggggggggggaagagaagtgggaagggatggaattagtggtaaataaacaaaaaggaaagggaaatgcataaaactgatcagtgatcagcagcactgctggctctgataagcgacaaatgatgagttattaataaattaatctctttgagtcaattctttgcaaaaaattgttttttctttttctgaagttatttaaaaatcgtaatcatagttacaatatttattttcaagaatttattatataacatattatggttcgacagaagcaaaatttcaacacagagaatacttcaaaagatttgtacggcgggttcaaagctcccgataaaaaaagcggtgatatgaataaaagggttcaaagctccctcgaaaagcggtttgattcctttatttgtctgaatgattctgaagaaaatgaaccgatggacattccgaaaaaacgaaaaaagtaaagtatgaattcggctgatttgtctgatgaattatcaatgcaaaaatttgaaaaaagaaacaaaaattcggattttcacgaggaaatagcggaat

SEQ ID NO: 33580 - DNA, 938 bp, Heterodera glycines
ggtggggagggaggtgcggtagcacataatcataaaatgttgttcctaaacagaaatataatatgtatgcccccctcccccccccccttcttcccccattcatcgtcatatctcctgctgcctgggggaatgatttttatttgcaaggaagtacaaatgttgaaaaaaatggcaacaatttttaaaaaacaaaatatttgaaaacaaaggaaattttatataaaattttaaaaaacagattcaatttatgtataaagtctgtttttgaatgaaattgatatataattttgtgggggagggaaataaatttttatgtaaatggttgcatggagaataatgaaaaaataaaataaaataaatgcaattaaaaacatttttataataaaatgtatatattatacacatacaacccaaaaataaaattagtggggctgcaaatttcatgtgtatacatatttttccaagattttatgtgctctgctgggacttcatttttacatattcgaattttgtatgaatatttcccaattattgagattttaaagaaaattttttcataaatgcccaaaataaaatacaaaatttcgctcatatttccatttttacttgggtttgagaatttatagaaattcttaaagaaatttttgaaaaatggaactaaaaatcatttagaaaagaaaaaatcaaaaattaatttttcaaaatatattaataaaatttctcgcattttatgcttattcacgcattactaagaataataaaaaaatattattatacatacctatatatggtagattataattggagtttttacattcattcctacaattaaaagcaatttaatacataaaaataccagtaattcaaaacagatacataatattagggctgcttcccgacattttttaaattctccagctatcaccgacaaaaatttt

SEQ ID NO: 33581 - DNA, 1197 bp, Heterodera glycines
  unsure (1)..(1197): unsure at all n locations
ttccagccttatggaaagatatatgggacttttggttccatctcagttgtcaacgccgcgactgcatcgttatatatcagtcgatagattttcgaatcgcttntaatcgtctctttgcgtnnccttaatcttcactctgagccgagttactgcggtctaacnacgttttgggtagaatggcggccagaattaaaaaatacagtttgctatggcttcgcatcacccgcttcaacgggtgttcagtgtaaatatcgactggccattcaaattctgcctttccagccttatggaaagatattatggaacttttggttccatctcagttgtcaacgccgcgactgcatcgttactatatcagtcgatagaattttcgaatcgcttttaaatcgtctcttttgcgtcccttaatcttcactctgagcagagttactgcggtctaaacacgtttttggtagaattgcggccagaatttaaaaatacagtttgctatggcttcgcatcacccgcttcaacgggtgctcagtgtaaatatagactggccattcaaattctgcatttctagccttatggaaagatattatggaacttttggttccatctcagttgtcaacaccgcgactgcatcgttattatatcagtcgatagaattttcgaatcgcttttaaatcatctcttttgcgtcccttaatcttcactctgagccgagttactgcggtctaaacacgtttttggtagaattgcggccagaatttaaaaatcagtttgctatggcttcgcatcacccgcttcaacgggtgctcagtgtaaatatcgactggccattcaaattctgcctttccagccttatggaaagatattatggaacttttggttccatctcagttgtcaacgccgcgactgcatcgttattatatcagtcgatagaattttcgaatcgcttttaaatcgtctcttttgcgtcccttaatcttcactctgagacgagctgctgcggactaaacacgtttttggaataattgcgaccagaatttaaaaatacaggttgttatggcttctcatcacccgcttcaacgggtgctcagtgtaaatatagactggtcattctaattctgcctttccagccttatggaaagatattatggaacttttgcttccatctcagctgccgacgccgctgcatcgttattatatcagtcg

SEQ ID NO: 33582 - DNA, 999 bp, Heterodera glycines
aaacaaaaaaatcgattttttcaagtgtccgtttgggggtactcaaacaattatgggggagcaaaaatccaacgcagaattaaagtacagactatagggaagctattcccgaaggattcggtctccccataaatctgggcgcatcggttcggggggactgccccgaaaacaaaaaaatcgatttcttcaagtgtccgtttggggtactcaaacaattatggggagcaaaaatccaacgcagaattaaagtacaggctatagggaagctattcccgaaggattcggtctccccataaatctgggcgcatcggttcggggggactgccccgaaaacaaaaaaatcgattttttcaagtgtccgtttggggtactcaaacaattatggggagcaaaaatccaacgcagaattaaagtacagactatagggaagctattccggaaggattcggtctccccataaatctgggcgcatcggttcggggggactgccccgaaaacaaaaaaatcgattttttcaagtgtccgtttggggtactcaaacaattatggggagcaaaaatccaacgcagaattaaagtacagactatagggaagctattcccgaaggattcggtctccccataaatctgggcgcatcggttcggggggactgccccgaaaacaaaaaaatcgattttttcaagtgtccgtttggggtactcaaacaattatggggagcaaaaatccaacgcagaattaaagtacagactatagggaagctattcccgaaggattcggtctccccataaatctgggcgcatcggttcggggggactgccccgaaaacaaaaaaatcgattttttcaagtgtccgtttggggtactcaaacaattatggggagcaaaatccaacgcagattaaagtacagactataggggagctattcccgaaggattccgtctcccaataaatctggggcgcaccggttcgggggggactgcccccgaaaacaaaaaaaa

SEQ ID NO: 33583 - DNA, 1075 bp, Heterodera glycines
atcgaaaaaaccaggtgaaaaaatttggggaaaaggtggttcatggggcgatttttctctgctggcccacgcaattgcctaggtgtgtggaggagggaggaaggggaaaatccttattttactgttacagtaacggtaaaaattgataattaccgtatcgatttttgatcaaatttatggaattcgaacagtaaagtgctgttttgaacaggtccaaaaagccaaataaacttctctaaactgtcaatgattttaccgtatcataacaataattacaaaataaaccgtcctcttgcacaaaatatgaatatttgtcaccctgtaaaattaaatcaaaaaatctgaaaaagaatatataatcttcaaaaatcaattctatttattaggttattttttctttttatttttttaaatgattttaatttaaattcttttcaggccagaaatgaaagttcttaaataaataaacaccagagactaaattaaaaaacgaagtcaatggatgtttagaatttttctatttcatttcgaaacaacgaaacaatggaacagttttagtattaatataattgacgtaaaccctaaagcctaggaaattaaaataaataaataaaactgaacctaaaataaaaaaatttaaaaaaaaaagaatggcaaatctctgatcaattaaccggattcaaaatttagggcttccatttcataaaaaaaaactcaaaatattgaaagaaaatttttaaaaaatatataaagttctaagaattatggggtctcagggtaaaatttattaaaataaacaaaataaaatttaggccacatctttttgtacctattcttgcattaatgcatattttataatattttaaatttttgtaaaataaaataattttaattatgcaacagaaacaaataaataaagtttatgcacagacacataataaatgaataatcgtcaaataaaataaatccaacagcaggaaaaatgaaaagttcaaaaaaaggagaaaggaaaaaaggacaattcaaggacagaccaaaagaaaagcaaatgacaaccgaataagaaaaaactagg

SEQ ID NO: 33584 - DNA, 876 bp, Heterodera glycines
tgcaacactgccattcctctggtcaccaatttgctgaccgttttgctcagttttttcggaattcgaaagtccgaattaaccaaatttgcccatttatccgtcagttgttccgccaataagcgaagttcttcaaattcgcaaacctaaaaaattagtgaaatgaaacaaagccaaattgtgattaaaacgaacagcggggtcaggttcagccttagcaatttcagttggaccgtcgacttcttcagcaacaaagtccgtcatttggttaaccatttccgatatgacgagtttatcgggcaactcctaaaatcacacacaaaaatgatgaaattccaccggtgaattcacaggctcaccatgttgatcatctgattcaacgtgctcattatgcacacctcgtccacttggtttttgttggtcaccggaagacgtaacagaagtcgagcaatttgcgattggagttgcaatgccgggagatcaaacggtggcagaacgaaccaaattcggataagggccaagccttggtgagcgacgaacagacgcaaaatgttcgggtcttcaatggccagcagaaagtcgaccatccgtcgacgggactccgtttgatccacccgcaccataagcctaaagaaatcgaaggaaagtgtcgaacccatcagggaacttatgcagaccaaagcccctccttctcttacacattccccatttgagcacctgttaaactccaacactttctctctgttgcgaagcggccccttcgcgaggatttcgctcacttcggccgtctcgcgcagtgtcgggtcggagattctctcgggtctaagggccaccgctcgcttcgggtgttgtttgtcggtctttcggtcaaattcgcca

SEQ ID NO: 33585 - DNA, 978 bp, Heterodera glycines
attcagcgaccccgaaaaccctaaaatagacccattttccggctttttatgagctttttagactttggacaattgtctaattgacaatgagtatcccaccacatgtaaatgattgattgccccatttgttctcaggtgccggctccacaaacacaatccgtttgcagaaagtcgaataacagagggacgtgtccaatgagcttttgaagacttcgcgtgaccgatgaaaactttttttaggaatttacgcttttgtgacttttgttttcatatttttgttgactcggtgtttattctcaaataaagaacctacaaaggagaggtacccaagtgaccatgggacttccgaatgaaactttcagggtaggtagattaccccccctttgtattataaatttttttttatttttgctaaatgaagcttctggccgagatatgaagcttttcctttttgccttttcaatatcattttcaaagaatgtaaagccaatgtgagcgtcggtggcctggtggttgtgccttccatacttttttcttcttctaaagttcaattccccaaccctgtaaataattattttgtttttttttcatatccaaattagtttttaagctttttaatattaataaatttgaacataatatttttttcatttttatcttatatgagagaataatttgtctattgacctattttgcttatcagtaagtgttgaaaaattctgtcgttgctactcttctcggtcctctcatctactctcgtcgcattaataatcattgtaaaaatacttcccaaataaatgccaataaatccaacaaacgttattcttttattgcaagacatattttttgtgtaaaagcccccccctcccacccaattaacaccaaaggaaaagctgctggcaaaggatttttagacacattggaattttgtgcaaaacaaggttcaaaaatgagactttgaaagacctaattgtggat

SEQ ID NO: 33586 - DNA, 964 bp, Heterodera glycines
atcccagaaaaatgactatctttttttttgataatttttatacacatcaaaatgctctcgaccatgatgggagggcggtgccccattaccttttatttttgaggaatttttaaatttatactctatcccagaaaaatggctatctctttttttgataaattttatacacatacaaatgctctcgagcatgatagggagggcggtgcacaatagcccttttattttagagggaatttttatatttatagtttatcccagaaaaatggctatctctttttttgataaattttatacacatacaaatgctctcgagcatgatagggagggcggtgcgcaatagcccttttatttttgagggaatttttaaatttatactctatcccagaaaaatggctatctctttttttgagaaattttatacctcacaaaagcgcttgggtatgagacggagggctgtgcacaatcgccattttatttcacagaggatttttatatttagaggttatcccagaaaaatggctatctctttttttgataaattttatacacatacaaatgctctcgagcatgatagggagggcggtgcgcaatagaccttttatttttgagggaatttttaaatttatactctatcccagaaaaatgtctatctctttttttgataaattttatacacatacaaatgctctcgagcaagatagggagggcggtgcgcaatagaccttttatttttgagggaatttttaaatttatactctatcccagaaaaatggctatctctttttttgataaattttatacacatacaaatgctctcgagcatgatagggagggcggtgcgcaatagaccttttatttttgagggaatttttaaatttatactctatcccagaaaaatgcctatctctttttttgagaaattttatacctcacaaaagcgcttgcgtatgagacggagggctgt

SEQ ID NO: 33587 - DNA, 947 bp, Heterodera glycines
ccacatcgccagttctgcttaccaaaaatgggcccactttggagctcaaacattcaacgcctgggttcagagtcaagcaaccctggcttcatacccatttagagtttgagaataggttaaggacatttcgtccccaagtcctctaatcattcgctttaccgagtataactgcttaacgagctccagctatcctgggggaaacttcggagggaaccagctactagatggttcgattagtctttcgcccctatacccaagtcagacgatcgatttgcacgtcagaatcgcttcggacttccaccagagtttcctctggcttcatcctgctcaggaatagttcaccatctttcgggtctcagcgcatacgctctgtctccgccccatcgcatgcgatcgagacgggactatgttgcgccccaacaccgcagtgccagggatcacacatcagctccgtaagaagccttcactttcattgcgcctttgggttttgaacacccaatgacttgcgcatacgctaaactccttggtccgtgtttcaagacgggtcgaacagatgaccggcttttacaccgagaacgcacaactgagagcccgagctggaccgaactggttgctggtacgtgtcgcacgcgaccgccaccgacccccagctcgagtcaacacggacccgaaaccattgcacaattcacccagagtaaacagcactcccccgatccgggtaccagaccccgaaaggctggcctcaagaccgagctcacgcagctactccgagcatctcagcgcactccgcctgcaaatgccccattcgccactgaacagaaggacagcaaaccccagtctggaggctagcagcccaacgtacagcaacaaacgggtgaatgcagaccagatacgccagctctgtccgtttccaccctcatcggtttcacgtcctctttaaactctct

SEQ ID NO: 33588 - DNA, 985 bp, Heterodera glycines
ctgcagcgtcgaaaattcataattggtataaaatgcaaaactatttcaatatttaagtaaattttcattcttttgaaaattaattcatattttcgaaaaaccctaaaaaactatactaaaattaatgtataaaatatttccataaataaaatttcaaaggaaaaaagaaataaacaataataaaaatgaacaatgtcatttcgattaattcatgaaaaccaaattgtcgaaacttattctaaaagcatgtgattccgataaagaaatatgcacaaataaattgaacaaaattgaatattaaattagtaaaaaatgataatgcaaaatttaaaaaaagcaattataaaaagacttattctatatttgtgaagttcgagaattgaaaaaagctcaaaatgattaatttttataatgatgcctaattgagggagccctataattttaaaaattttaattcatagccagagaacaactcaaagaaatcatggttgaagtatacacagatgcacataccgcagctcgaaattttttgtttgtttgtatgtgctacataatacaacccagggacattgctttttttcgagtaaaatttcatattttcataaaactgagacaaaagcgtatagccaactcagcgccactggcgcttagtctgccaccggcgaataagaatgtccccattattccttgatgcgctgtcgaaaattacgcattgctgcaaagtttattgcgccgatccatccggccaattagatttaaattttaaaatagataaactttttagcaatcattcaaaattttgtgtttttagcacattttgaacagcctgagctcatcataggtaaattgtgaaaattttgaaaaaatttctataaaattggcactaacattgcgcagaatgaataatgcttactttttgttggtcgcaaaaactttttacccttgagtacttttaatttttggaaaattcggtgattttttttaa

SEQ ID NO: 33589 - DNA, 912 bp, Heterodera glycines
agctttgatcagtgtcctctcgctgtctctcactctctagctgattagagtcggatctatgtgcctctctctcattaagttcaggctcgcccatccacactgatcggagggcaaaaatgaggaacacagagctattggtatttcaatttttaaaaacatttactagcaaaatttgacgcctccttttttcatatttttggtccattttacaagactttgattagtttatttatatccacacacacatacacgcatatcaccaatacatacaatttaagtgatcagatattgattgatacatgatacacacacatcaacgaaatacatatgtacaattcaaaggatcaataggataaatgtcaatttcttatccttcttctgttgttgtgccatgatgctaatccaacgccacatccgcggttgtcgctggagtagtcgcagcgggcgcctcagtattggtcgccgcattcgtcgtcggagtagtcgccgctccggttggatcattgttagtcgccgccgctccatccgcggtcgtcgtcggagcagtcgcagcagcgggcgcctcagtgttggtcgccgcatccgttgtcgcagtagccgctccggttgcgtcagtgttagtcgccaccgcgccatccgcaatcgccgtcgttgtcgccggagtcgtcgcagcggtcgcctcagtattggtcgtcgcagccgtcgtcgtcgtagtcgcaacgggttcgttggcgttggtcaccgtcgctccatccgcgttcgtcgttgtcgctggagtagtcgcagcgggcgcctcagtgttggtcgccgtagtcgcaccggggttcgttggcgttggtcaccgtcgctccggccccgcggtcgtcgttgtcggtggagtaatcgcagtgttccccgcggtccgttgtcaca

SEQ ID NO: 33590 - DNA, 719 bp, Heterodera glycines
gggaaggtcaacaaaagtgcaaaagaatcaaagcaacaaaaatattgaaaagcaaaggcaaatgaaaagaccgaaaaagaaaaaagatgcaaaggatgctaacaaaagtaaggacaaagcaatgggacggaggagatgaactgggaaaaagtgatcagataaaagggaaatgaatggacacacaaatcggcagggaaagggacaaaaaaaggacaaagtgccgggggggggggggggggtcagtcaccagaatgccatctgccataagcccacaaaggctgttcaacacacactgaagcttatttaaacggggcattttcctttcattcttctcagctctcagagtaatccctttccaccccaaaatttggcactttttctctccataaaatttttttattggcttaaaaagtgtttattccttatttccacaactccgatttcttttaaatttcaataaaaaactaaagacccattctctaaatttattttcggcaattttaattgaataaaatcagatgtcagaatttgtcagacacgtcattagtcgttcgagttttcattcgaggactgttttagctatggccaaaagggggatttatttaatgacctttcaaattggcagccgttttctgaatttgtcgttcaagcgatttccgctcaagttccttcattgaaaaagggtttgttgagggaattttctgcatttaaattgaaca

SEQ ID NO: 33591 - DNA, 820 bp, Heterodera glycines
tattaattcattgtctgcctttgcttctcccatttccttgttcatttatacatcaatgagcattttgtgagggtggcgaaggtggggaaggttaattaatttattcgtccgtccgttgccggggaattcgcagaaaatgaaaggcgaagtccgtccacccgcgcacctttcatttttcttcattcattctgcaaaaagataaacagttaaacactcattagctttggccagtaatttggtcgacaaagcatttaattaataaattgccaattattggtggcatagaaacgaacgaacagatggacggacttagggaagggtcatccccccgccgggggagcggggggggggggggaggggaggggagcttcccgaaatggtcatgataatttgtaaaattagttgggataagttgaaatgaataattctatgctttcattcgcacaatttgaccaatttgtcattaattaattacctttaccattttcacagtgtccaatgtctcgtccggatctcgtctcctccaccactcccattttatgatggaccgttccgagtctgctgaatcgctttcatcgtttttctctaacataaacagtcgtacaatgacttccccaggggccgacgaaaaatttgctgggacactccttccgcgggagggaaattacgaatcaatggtcgaggggacaaaggtggatgaaccagcagatcagcataggggagaacaacgaattccgattgaaaggggtggtgattatctaaataacttgatccaacaacagtggcgcgggagggaagaatgattgatcgtggaaaaatg

SEQ ID NO: 33592 - DNA, 746 bp, Heterodera glycines
atgattagatactatttaaaaaaaacattttttgcaaaccaaagggtccaaattgcaaaagtgacacttggcaaatggcgcccaaaatgccattttcgacattcattaattaattcattggccttaagtcactgcaacatggtgctagaagatgtgaaggaaatgtggacggaactgccgaagaaaggaaagggcaaaaagaagtcgaaacccgtggcgcgcgaccgtttcatccccaaactttttttgcgcggcgacagtgttattctcgtgctgaaaaacccgttggccaacccggacgcttgaagacggaagtgtcgggggatggaaaagtcgtcgttgttcttttcgcatgctttttaatcttttatttaaataaactttgcctttgcgttttttaaaaatattactgtttttctcctggttataatttttaaaatttcaattccctcggacattttccgaatggctccccgaaaaaaggtcatagaaaattagaactggaaaattggacactataggaaatgagagaaaattcaaaatgaataacggtaatactatagatggtacccccccccccccctttttgaagaaaattttttttttgttctgaaaagtcttggaaacatgtttatggggggatttcgaggtcgctgattacgaatatggcatccatttccaaccaattcgggatcccggacccgaattccaaaaaaagccgcaaaaacctaaaattttgaaaattc

SEQ ID NO: 33593 - DNA, 1553 bp, Heterodera glycines
ctcatagatactcgttaaaggatttaaattgtacccattccgatgaccggcctcataagagatcggtctcgttatttctcgtcactacctcctcgcgttgagagtgggtaatttgcgcgcctgctgccatccttagacgtagtggccatttctcaggccccttctccggagtcgaacccttatcctccgttacccgtcatcaccatggtagtcagatacactaccatcgaaagttgataaggcagacacttgaaagacacgtcgccggtacaagaccgtgcgatcagcttagttgttctgagtcaacactggacgcccggagggcgcttggttttgtggcgaacaaatgcgctccgctctggggagattggagctttggtgcatgtattagctctagaattaccacagttatccaagtaagaagtcaaggtcaagtaaattatagctggtgtaatgagccgtacgcagtttccctgtctggcaggttaaacttacacatgcatggcttaatctttgaaatgaacacatcagttcaggcaggatcaaccagatagctgctagcgagcgttgccaagcgccgctattacagccgtcttgtaaagacggatagtttcagcagaaacaactccgttcagcgcaagcgtgcgcatgggcggcgaaggcgaccgagcaagtggtaatgacacagcgctggccaggcatccgagcttcccggacttgggaagaaccatctcgccgctggacacagctccgagggcagtgcacaggcactcacacgagcactccggatttcccggttaggacacttcctcaggccaaaggccttcgggcgcttatgtctcggtgttttttcgaatgcaagcacactggtccccagggcaaggagttccgatccacgaactcatagggcttgtcaaccatggcaatacgccactcgctcgtataccaacaccaccaccaactttaggttcagcatccccagtgctgagttccccacagcatttgtgccttaggcaacatttacacaagtcaattaactcgccaaatttctttaacacacagacgagctgcatgttttattcatttcgacagctgccaatcgctggagaaactgaggccacgacaaaggtggcaccccagcagcagccatcaccgttcaatgccgagcacaagcgcaagcaagcacttaaacccagacggccgcgctccccacagcgaaatcgcttcttttttccagccacaatatcgcaaaaacggcccaaccaccacactcacccacgccaattaaccaacgcaaagcacatacgactaggaactttatacaaatttaaaaaagtaatattttgtatatgcatttaatcaaatttctactttctttataaatgttagctaattagtcagcgtctatttattttctgtaaaaatttgcctctttatttaaaattaaattaatataatttcatgaaataagacactaaatgtatagagaatgaattaacgtggtcgattggaaaaaatggaaaaaaaagcaaagtcaaaacacaaaaccttaa

SEQ ID NO: 33594 - DNA, 365 bp, Heterodera glycines
  unsure (1)..(365): unsure at all n locations
tctttcgtttttatttatttntttgcaaaattaattcttaaatattttttcagaaagggttctgaaacgcaccaaattttatttacatgttagtttaggcactctgatgctcagttcatttaaataatttttatccaaaaaattttttttgggttttcggggcagtccccctgaaccgatgcgcccagatttatggggagaatgctcagttcatttaaataatttttatccaaaaaattttttttgggttttcggggcagtccccctgaaccgatgcgcccagatttatggggagaaaattttcaaaattctgagtctcctattattttatttttttttcaaaatttgaagggcggggggggggg

SEQ ID NO: 33595 - DNA, 783 bp, Heterodera glycines
aattgctggatggttgtgtgcagcagtgacacgtccttctttgtattgggtaccgtcctcatcaacttgccaacgaataagtacggttgcacgacctgggcaatacgggggccttcttggacagcgccaatattcgcaaccatcttcgactttggagagtgcctttgaagtttggcattttttaaatttaaaagcatacaaacttcaaatgtatattcatagccgtcattggtcaggagaagtttgccacgatttgatttcgcctctaaaaaacgccggagagccatgaagaaatgaatggaagggaatgagcggtaacgcatgcaaaacactcgagataaaatgaccattgctctcctcttatctttacttatgagaaaggtcaatcactcataatttgcttttgtgcccttgtaagccacattgtacagacaaaaatggaatcctaaggagaatataatttttctaatcaaatactgtatcattattttgtagaattgaaattcagcaatttttattcatctctctacctttttttaaaatttagtgctactgacaaaatgaatcgttgtttccgcgttaattttgtgtgaacttaattaattttccgccattttaaaaatttgcctttactgacgaaatcacttcttgtcgaattcaatttactgtcgaaatcacaattaggcacaaagagtaagcgaaatagttcactgtcgaaatcacttactgtcgaaatcaatcactgtcgaaatccactgtcgaaatcacttactgtcgaaatca

SEQ ID NO: 33596 - DNA, 724 bp, Heterodera glycines
aaagactgcactggtcgaacatttgtcctgatcagcttcccgtcctccccttgaattgtccgtaacaattgaatctgagcattataaattaatttttaatttttccatttcttaattggcaccagctcggcattgttgaatctcggcacttcgtacactgaccacaccaccgcttcgttgcagtccggtgtggtcagagagccgttgtagcggaaaaaagagtttaaatcggtgggtaaaagaacgctgggcatgcaaatgtcaatttgaacggaagcatcttcaatttttagagatttcaatttaaaatttatattttaaactctgtgaattatgtaaaattaaattttattcaaattcgaggacgatttgttgatttctaacctaaaattaagaaaccaaatgaataacaaattttaaatttaatagttcaaattcaaaatttttgtgtacatttcatcgccaaaattcctaaaaatttccacaccttaattggtttttcaagtgcctgtttttggccccaccatctttcagtttttttttgccatttatcccacctgcttttgtcacttgacttagtgcgttttgcagtgccaccaatgggcgtccgatgaatgccgttttgtaaaaaattcccaccacagcgaagccatccgctgttcgatgtgcttcttctgttgtaagcccttctttaatatggacaaggtgaagctaaaatagcaaa

SEQ ID NO: 33597 - DNA, 801 bp, Heterodera glycines
agagaaaaagaaacaaaatttttcaccaaataacttttgatcgatccttatttttgtattaaatttccttattaatcgctgtagaatttttttctctatcgatatgcaaaattaaaaaaaatctgttaacggaaaaaagtttcttagaataaatgaagagatagtacgccaaactgagataaattacaaagaaaaatagaaacgacgaaatagtactaggcttttctctgccagtggggcgtacccatagtgtcacacaaatttaaggccaacaaagagcagagattggcggaacagagaaaaaaaaagaaatttttaaaaagatgagaacaatttatttaaaattcaaaagagttgccattttgaaggggattttgtctgtttttcatttcccatatgtatttgagtttgaaagaatattatggccccaaatttttaaaaatccaggatcagatttaaagggaatttggcaattgacaagatttccagaataaaatcctgcttttcggggctccaatcccagccatgttcaggattctcaaaaaataatactaatacaaaaataaaatgactaaaacagaatgggcacctgggttccatatcggatatgcgtctggatttctggagaaaattccaggtccagaacaaaacacaagttgccgaaacccagggaaaatccaggttcaggccgatcacttgtacccacttttgaaatttcaatgggatttataaataattatgccaattccaattagagtccggtaaaaaaaatttccgggagcgggatcgggagtcaaattt

SEQ ID NO: 33598 - DNA, 845 bp, Heterodera glycines
attgcccgtcaccgccgcgcggcattcactgcctccatcagaaaacaacggcacatcgacgcaatcgaatcagcaacgaaagacgaccgaagcaacaaaaacagtgccaaaagaacaacaaagagagtcagtggacggcactgaaaatgatgatggcagaaagagcggtaggagcagcaaaggggaaattggaagacataaaggagggaaagaatggaacataattaccaaattatactatcgtataatgtatgggcactgaattaagcgggtgccatcaatcgcagagacccatgaaaaatgacataacaattaagaaaactcatgacctttcgctgctcccttttcaggcagactgtttggcaaagttgggcctggacccagccgccgcggcgtcaacatccaacggcttggatggcattgactgcgccgcaaataacaacggcagcttggaacctccccttcgtgccgccacagcacacggcaatgtgttatgtggcggaacaccgttgccaaatgccgttgagggcggcaccgcaaacccaactcagcaatcggcaacgctgttcggcacaccgcaccacagaaggcaccaaaacaaacattttcgaaaaacgcaaaatttcgttaggtcaaaaagtttacgcgaacgaactggcgttgatcaacggctagagcggctgccaagcggtcctcagcttagacattcattgctcccgtggaccgtaaaagtgggcgcacaatccgaccggagcagaccagtgcaaattggcgattttgtcggtgggtcgaacaaattactattcatgaaaagggccaatatttttctttttactcttatttgc

SEQ ID NO: 33599 - DNA, 883 bp, Heterodera glycines
ttgacaaatggaggaccacccatacctggcgccttttttgacgttagcgccagaaatttttttttgtaaaatttagggtttttttgttgtcatcggaaaaaaattttctattatgtaaatttagcaaaattaaagtgcacagcagggatggcattccgagcccccaaaaattttcgaaaatcggaaatcgtaattacgaccccaaaaatgtcggaaatcggaattcccgtaccatccctggtgcacagggatttggcgaacactttccaagtcaaaaacctgagcccaaattttagggaaaaagcaaacatattttgcctaaagtcatccatttttcttcaaaatttttataataaatttcaagatcttcagcgattttttgaaaaattaaaaaaaaaaattagtatttcattataaaatttggaaaaaaaatcgctagaaaaatttttcaattttttccttgaaatttttgttataaaaaaattatataatttctttaaaaaaatattttttttttcggggtgactactcccatatgtaacaacagcatgggccaggtaaataatattccagaaatttatatttttttcaattttttacttaatgacgagcaaaagtcccgtggctgttgatggcgtcgtgccgcggcgttttgctttggccttgggaatatttctgggtccaaaatgggcttgaactcgttgttgtcgttggtgttgttgttgttgtcctcccattcttcggtgttgcccatttggtgctgattatgctcggcgttctcctcgcccggcggcttcaagaagaatgtgtaattgtcacggcggagcagccaaaaagtgcgcatttggcctttgccctgttaaaaaaaaggataaaataattt

SEQ ID NO: 33600 - DNA, 1331 bp, Heterodera glycines
  unsure (1)..(1331): unsure at all n locations
ggaagaagacttgaaggccaacgaaaaactcaccaagttttacggcttcaacatcattggcatggacgactcttcaacgctaatcgaccgtgatgaagtgatgaaaaatttcaaggaaaacttgtcgttcgtcaacaacaaatatcaaatcgcattaccatggaacgacagcgaagcaccatcacgaggccgcgaagaggccgagtgagtaccttcggtgcaggaaaattattaaattttaaaaattttttaatttctttttatatatgccaaataatgtaggcttaccttttttagtgaaaattcgatcactcatattttttgatacattgagcagaagcgttccaaactttgcagggatactccccggtaaaggactcacttactctgaaatgagcaccgagctagctggctcaaaaaaattttcgaaaatctgagtctttcgtttttatttattttttgcaaaattaattcttaaatattttttcagaaagggttgtgaaacgctccagattttatttacatgttagtttaggcactctgatgctttttctatcaaaaagggagatgaataaaatttttaaaaatttttaattcctttttaaacatgccaaaaagtttaggcttaacttttttttcagaaactgatcagaagcgcaccaaactttgcagggatactgaaaggaagagaaataacctattttaaatattatctagtcagttcatttaaataatttttatccaaaaaatttttttttgggttttcggggcagtccccttgaaccgatgcgcccagatttatggggagaccgaatccttccggaatagcttcactatagcctgtactttaattctgcgttggatttttgctccccataattgtttgagtaccccaaacggacacttgaaaaaatcgatttatttttgttttcggggcagtccccccgaaccgatgcgcccagatttatggggagaccgaatccttcgggaatagcttccctatagcctgtactttaattctgcgttggatttttgctccccataattgtttgagtaccccaaacggacacttgaaaaaatcgatttttttgttttcggggcagtccccccgaaccgatgcgcccagatttatggggagaccgaatccttcgggaatagcttccctatagcctgtactttaattctgcgttggatttttgctccccataattgtttgagtacccccaaacggacacttgaaaaaatcgattagtgttttcggggcagtccccccgagccgatgcgccctggaagatggggagaccgaatnccttccggaatagcttccctat

SEQ ID NO: 33601 - DNA, 727 bp, Heterodera glycines
cagtttttctcctttttcatttcttttgttgattataaatggtcaccttttgtcaatagcttttcgaaaagcgcacgcgaaaaaaggaaaagaaaaaggaacggacgaatcattgggactgaaaggggcggcgattggatggcaaagggaaagggcgcaattcgcccactcttttcgaccttttgacgtgtcaccagcgccgtcgtccgtttttggcacctcctctttgcccgttcaccaaaactttctccgctggccttggccaatgcttctgccacctttcgccgcccctccgtcgccattccctccccccccccaatttccccgccatatttttcaattccattcatcctttaccaacacacaatccgttgaaagcaaaagcactttcaggccaagcaatggatgttcttcagcccttccgccgatgtctctgcccaatcattgccaatataagcgggggatcaattaaccgacattccaacctaacctctcgccgcatcacctctcggagtaatctaaatgaagcaaaaagttatccaaaaatatatcaattctacacatgcaaaaaaacaatcactaggggagtaaaaacgtatcgatctcgagtcttgacaatcgagtctcgagacttaaaaacccgagaccgagactcgagaccgagaccaaaaaaacccgagacttttctcgagtcgagactcgagaccgagagtctcgaacagcacta

SEQ ID NO: 33602 - DNA, 1327 bp, Heterodera glycines
atttagtcctgtactgggggagtatccctgcaaaaattggtggggttctgatcgcttttccaaaaattacttggaataaatttttactaaaattataagcctaaaaaataaggttaattattttaaatattttttcaaaaaatcgcccatttccggcactatgccaattttgggcgggacagacctaacggggagatataaagtatagggaatatcaaatctattcccgaaggattcatcctcccaaaactgtctgactgttcgaaaaattttttttaaattaagcctaaaaaatttgtctaatgattttaaatattttttcaaaaaatcgcccttataaattgcattggatattttcaagacaatttagtcctgtactggggagtatccctgcaaaaattggtggggttctgatcgcttttccaaaaattacttggaataaatttttactaaaattataagcctaaaaaataaggttaattattttgaatattttttcaaaaaatcgcccatttccggcactatgccaattttgggcgggacagacctaacggggagatataaagtatagggaatatcaaatctattcccgaaggattcatcctcccaaaactgtctgactgttcgaaaaattttttttaaattaagcctaaaaaatttgtctaatgattttaaatattttttcaaaaaatcgcccttataaattgcattggatattttcaagacaatttagtcctgtactggggagtatccctgcaaaaattggtggggttctgatcgcttttccaaaaattacttggaattaaattttactaaaattataagcctaaaaaataaggttttattttaaatattttttcaaaaaatcgcggctaaataaccattgacatggtgggcataatataaaaacccttttctacagccaaaatttctgtccacttgatatgctcagaaaagcacgaaagttaaaattaaatttcatgtttttgggtttatttgactagttttatggctgttcgagaatttttgtgcctttataatgcctattttttctgactctgatgcatatcatttgtcatttttgtgcctaaaaatgccattcctaatagaaatgtttaaatttgatataatttatttttttaaatttccatttacacatagtgatgctagaaggaagcgggatgtgggagaaagtgggataaggaaatgggaaaacctcaaaaaggagagcctgtagcctcactcagtcggttagagcattccacagtcagggaaagtcagttccgtcccagccaagtttagagcaacgtaacttttacattgttga

SEQ ID NO: 33603 - DNA, 1018 bp, Heterodera glycines
  unsure (1)..(1018): unsure at all n locations
tttcagagcancgttctaaaaaatatttatgaattaattttgctaaataataaataagtaatgaaaaagtcagaatttcgaaaaattttaaaaacaacaagcgttggcattttttcaggttaagttagtcctttacaatggagaaggcctgcaaaatttggagagattatatcgattttagtgcgctaggttcgatgaaactttttaaaatataagcctaaactttttggcctgtttaaaaaggaattaaaaatttttaaaatatttattcatctcccttttgatagaaaaagcatcagagagccttatttaacttttaattaacatttggtgcgtttcagagcactttctgaaaaaatacttatgaattaattttgcaaaaaataaataagtaatgaaaaagtcagaatttcgaaaaattttaaaaacaacaagcgttggcattttttcaggttaagttagtcctttacaatggagaaggcctgcaaaatttggagagattatatcgattttagtgcgctaggttcgatgaaactttttaaaatataagcctaaactttttggcctgtttaaaaaggaattaaaaatttttaaaaattttattcatctcccttttgatagaaaaagcatcagagagccttatttaacttttaattaacatttggtgcgtttcagagcagtttctgaaaaaatatttatgaattgattttgctaaaaaaataaaatagtgaagctttaaaaattaataaaaaattttaaattcagaattactggagttagcatcatagcagtgcttttccttgtctttttgatgccctcgcaaaatctggttcgcttctgatcagtttataaaaaaaaagttaagcctaaaatttttcgcatatttaaaaagcaattaaaaatttttagattttttattcatctccctttttgatagtgaaagcatctgagtgcctaaaataacttgcaaataaaaatttggtgcgtttcaaagcagtttctgaaaaaaatatttatg

SEQ ID NO: 33604 - DNA, 836 bp, Heterodera glycines
  unsure (1)..(836): unsure at all n locations
attgttttcaatantttggccaatgatcaaagacaacattcactaaatttggttatggccaaatgacctccgaaaaatgcgtcaattcgccccgtccattctctccgattgtccatctcttcgctatttttttgtagaatttttccccgcctttccgcctgacgaaagtgccaatgcatcggctggccaagctttggcaaaatggcttttggcccctcgtccggacggtttgcccaaggtgctcaaatactgtcaatgttttaatgtggaacaatcttcaccaataaccgatggaatgaaagcggtgctgatgacaagccaaattattaaaataattttttacattttcagccctttctcggcgcttcatcctctgttaacttcatcgttaccttttgcagttacgataaaccgtttgctgcttttcccattccctatgaattgaccaacggattcactggggagcgattgtcattgatcaaagataatagccaaaatcggtatctgctgatccgttgtccaatttcacgtgatgagaccaaatggacgaaatgggaacaggaggtcatctttaaaaaacataaagctcagcggaacaacattttcattcaattgggtgatggcgacatcggcgatgagtgagaaattaataattcgagtgcataattcattttttatttaatttgtgattttcgtcttctcgatgatggaactcccggcccaagtgatcagcagcagaacagaattgtggagaatgaccgatcaacgtcgtgatattggcacttgaaaattattgagacgagactatttgacataatttttgttaattttatttt

SEQ ID NO: 33605 - DNA, 1271 bp, Heterodera glycines
  unsure (1)..(1271): unsure at all n locations
tccccgtatcgagttggctccggaccagcaggtcctccgaactctttttgtttgtctctattcttcatatttccatcttcataattcccgtctcgtgcgagtgagttactgctcttctgttgaccttcattgttggactcattatcagcgggaggctttgtcgacatggttcgaacattcggcgcaaaaatccggcaattaattggcacaaagagatgagcgaatgaagataattgacgacccgaagaaaccaaaaacaaatcaaatggagaatacattaagttttcacctaaattttattttgtatataaattaattatttctgttaatcctttctttactcgctgtacataagtgtcagcttattgttagcccaaacacgtacagattaaagttaggtaattaaaaagatttgaattatttttcatggcattatgtttttggataattggcatttagatcaacctaaccaacaagaactaaagatcgattcatcaatcaaataacttttgatttcgtttaatgtggtcatttacattcatacatccaagcccgtagttagtggtgaatgaaagggcgggtggggttaggattgggtccattttgaaaatttctatcaatttattaaaaaatttaattgcaaatattcatttagatttaagcattttctaatttaattaacggtttgccaacctctgcacattcttcgttacaacttccgagattaatggcgtcgcacaccgccggcatccaacaacttcttgcagccgaaaaacgagctgctgaaaaggtttgacttgatgttgatttttcaaatatatttatttttattttgcagattaatgacgctcggaagcgaaaagcacagcggctcaaacaagccaaacaagaagcacaggcggagatcgaccaataccgacatgtgagtgtaaaaacagaaaaggaaagtcttgaattgttaattgtaagcagttgtaatggatctattacagttaatgagtccaatcgctttttattttatgaatccaatcaaataacaaaatgctttctttctcggaacataactttctcataaattttaatttcattcgaaatattacctagtcaacaagcaaataaacgaaaagtcatcatctaaaaaatttataataccgacgaaataaatttttacgtattgttaatcaacaaattttttggtaattgcctagcgccgagcacttttcactcaaattctttagatttatgctttagagtgataccacanaatatag

SEQ ID NO: 33606 - DNA, 719 bp, Heterodera glycines
ctgttcgagatccttcttcttcagagttgcaagactcggtggggccatagaggcacgggctgaaaaaacaaaacaaaattaaacaaatcccctataaatccagtccatccctcccccgtccattccctctctccctttccatgtttattcttcctttaccttgctgccaatcttcccgcatcgccgacagccgcatttttggcacttgtctcagttcctttgaaagcggtggtggcaatttaagcagtttttgcacacgtgccgaacggaaaagcaacgcaaaggcgagagtaatggtgttgctggtgcaccaatagagacaaactgcctaattaatgacagaggataagccatgggaagggattatgaaaaggcaccgatgtgaattggttggcggagaccaaaatgagcaacggaaaaccgaaaagcatagcgtactttaccatcttcggcatttgtaacagactgcccgtctcaatgccggcctaaagacaaaactcaagtgagtgggactccaaaatccgcaatccttggaaagtcagatttaaaagtacaaaaaatgtacgttaatttaaatgaaaatttgacctattccacaaattccgttaaaatttctaatcccaatttcagcccccccaacaatgtctaatggcttaattagtcaatttccgattactctgaacacaaaatgaagcgacgtggcggcaaagagtggcaaa

SEQ ID NO: 33607 - DNA, 655 bp, Heterodera glycines
ttgttgttgcggttgttgttgctgttcgggttgttggggctcaggcagcggccgcgcttccagatcattaacatttaacgagatattaaaaagattttcgcttgggggcatttgcaaaagttgaatgatttagaagcacaaggggaggcacttttatagccaggaccttacagagcgatttgatatagagtgctcaaaaaatcattaaaaaataataaacatagcaaagggcggggtcaattgattgcgtcaccataaagggggcggagtcagttgattacgtcatgctaaagggggcggagtcagttgattgcgtcataataagggggcggagtcagttgatgacgtcatgagataggggggggggtcagttaatgacgtcatgaggtggagacagttgattgcgtcatgctaaaggggggggggggggtcagttgactgcgttatgctaagggggcggagtcagttgattgcatcatgataaagggggcggagtcagttgtttgcatcatgataaagggggcggagtcagttgattacgtcatgctaaagggggcggagtcagttgattgcgtcatcataataagggggcggagtcagttgattgcgtcatgataaaggggcggagtcagcgtgtgaggcacggcacccgcat

SEQ ID NO: 33608 - DNA, 1402 bp, Heterodera glycines
attttcaggcttccccctaaccttttaaaatttttcttttttaatgatttatttcgctgattttgagaaaaaaatccttaaatgaatctttttaagtaaaaaatttacataaaaatgttaccaaaacttccaattttcaaaaaaaaagaggtgggggggggtcatattgaagggtagaagagagaaatttctgaaaaataaatttagctgatttcttaacaaaaacgttaaaaattctttaaaaaatttcccccgcggcgcctatcggcaccgccggacccaaaaaatttctcttaaaaattagcccaaaattgcaaatttatattgctcatttggcccccttttcagtcctatttgcgccaaaagtcccattcatcgccagcaatcaacagaaattgttcgacaaaatcggttgccggcggcaatttgtgaagaatttgtggcaaaaatcgcgcccaatgtccaattgatttgattcatttgttacaaagtgtttatgttgagaaaatgtgtaagaaaatgccaaaatactggtcatgtttaattgtaatattattccatgttatatgtttttttatgtatgttgtagatcggacttttattgtatatatatacataattttacgcatattcccattttcgaaaatgttaaatatttgttaggaaagcatcgaaattttttggaaaaaaagaaagaaaaaaattaccatagaaccgaatttagcgatgggagcaacggtatttcgagcagttataaaaattccctgaacactttgttaaatttgtaagttaaaatttaatattttattaggaaaattaacagcctttttttgtaaaagaaaaatatttccaattcgctgaaaaaattaaattaaaaaaaaaattatgtatctatttcagttctcgtcatgtctcacaaatgacgtcgggcgctactgtaaaagtgacagtttttgaaaattttttcactttttttggtaatttttttttgtttatttacacataatgatgtatattaagcattattgtcatattcttgatcagcgacctctaaaacccccgggtatttggtttcatgactttttaaacaaaaaaaaatttaccaaaaaagtgaaaaaattttcaaaaactcacttttacacacaccatcccaaaaaacgagatgtgtaccaataaatagagaatgccagagaaaaacattatctttttttctctaattttttgtctccttttggcgtactatctaatattttcattattaggaaaaacaacattcacttcgtgatgtttaactttttttctgcatgttcaatctataccaaattttgcatatcgatagagaaaagaattctgcatctttctatagtgaatttaattttgtctatggacaaactcaaaagtt

SEQ ID NO: 33609 - DNA, 597 bp, Heterodera glycines
tttattaataataatatttgttttccagatcaaaatgcctatgtcaacatactatatgaatgtcgtgaacgacatcatagcgtcctgggttgcactccatggacgaaaaaattgaattcgacgccaagcaggcccatttcaagcgaaaacttgggccgctgcgttatggcaaccggatcccgaaggccgaaaaggcccactacacaccggaacagcgagaggccgaccgctggttgtccaaccacgcttggccgcccccagcgcccttcaagggcattcttttccccgccaagagtaagtgctttaaaatttttagtctgggactggaacaaggcttttaagactgtaatttctgtacatttacatgggtacccatataaatgtacattaagtattgctttttatgtaatgtttgatttttagtctggcactggaaaaagggggccgctgcatatgcttcgcactggcgagacgagttcttggggtccaaaaacccggacgtcaaggcagctgcggacgccgctgccaagggcgactttctcaaactcggcatcaacgagtacgtgcgacttgacgtgcgcgagctcacggagttga

SEQ ID NO: 33610 - DNA, 1163 bp, Heterodera glycines
cccacttttccgtctctccgccgccggcgtcgatccaatcgatggaattttccttttcctttccctcccaaaaggcgtgaacaatgggctgaaaagtccatctttcttctcttccacaacaaatactccttttaatccgtttgtctctcttcccttttcctttctccgctgcttttccccacatttttggggagggaaaaaatgccttcgaagggacacagaaacttttattttgaatttaacaaattaaccataatgcgtttctctgcgacacataaaaagggctcaaatgactaattgttcaataataacacacgaaatgaataaatgacattcacatttacagtaacacctttttggccagggggaaatttcacttcgcgaaatcattattcaaatcgttcttttaattttgtccaacatttatttgttctgtccatgtcgtacaataatacaaataataataatacagtacatataggcgaatgtgataagatatgaaactttgttatgaattgtccaatcaacaacaacagatgaaaagagtggtgggaatggatgaaacgatacaacaaaatttccttaattcttcgtcgccctttttcagctcatcgcacaaaactcggacggatcagtcagtaccggtcctgcaatttatacaaatcattttgtgattttaagtagcaaaatggacagaatgccctcaacaaacccaccggactttttcgaatttccaccaacttcatcaagaaaagagcattccccccccgccactcttttttagtgttatttcactaattctggtggaaagacaaaaaagtcggaaaaagaaaaacgaaaaaagcgaacaaaagagggaaagaaagaaaggaaagaagcaaaagaacaaagaaagccttgaaaatcaaaagcttacatctcaactttttgctggggtcttctaaaacaatgtgtaataattgaggggttaatataaaaactttcattggttaaacggaatttggtgctgaaatcacttaccgaaagatatgagctaacagagctggaaagtccggacaatttttccgtcattttgctcacaccctgagggagaagaaaaacttatcgaaggattattataaattagccaacctgacaagtttctatcatgcgacctccccccc

SEQ ID NO: 33611 - DNA, 727 bp, Heterodera glycines
gattcccgaagattccgtcggcccgccgcggtggcagtctgaattcaacgaaatactcagtgagtgggcaatgagtgattggacactctgatcagtggtgtctgatcggcgagataataagggaagggggggggagtctcgagactgggatttaagctctatctcgagactgtcaaaaaagcggtggaatttccgtaatcgagattcagtctgatccagctcagagtcaatataactcttgaagttattgactgaatcaaacaatcttgatatcgttcgaaagctcttcacaggctctattagcctactaaaaattacagaaaatttcgaactataaaaaaagagaaataaaaaactttgaaaattctgccttttttgcggttttaaactgacaacttttttgagagctgattaatcactgagaaatagcttataaatatcttctaaacatctagggctttcgaatgataccatgattgtgaagtttggccaacaaagaaaaaagttatagctttttgaacattgctgagacggagttggccagacggagttgacccctaccggaaattttgcgcttctaactttttaaaaaaatgaattacagtcaaaatggacaattcagtaccgatgggaattaaacacaagaataaactatttaaaaaaattaatatttcaataaagtagttgttcagtcaagggtctgtaatttttgtttttttaaattaat

SEQ ID NO: 33612 - DNA, 712 bp, Heterodera glycines
atggaatttttaattcattatttaaattaaaaaatttagcattgccttattaaatcatttttttgagtccacactttaattcctttttttatgactttcagctcattttatttaagtcaaaatgaaaaattagctttgtttaaggtaccctttaaataactttctctcgtaaatgttcttaattcgcaaattccctgaattgctttacgtcgctatggaatttaaatttcccaaattaataattatttcattttcactaaaattattcataaagaattaatatttttttcccgacgacccatcacttagcctttaaaaatatgaaacggtttggcattgtttaactttgtcgtgccattctttcctccccgtgcccacattttccccctactcctctcattattggctttttctatccccacttttggcatatgtgccgtctgtgtgtgctcccaaattggcaccaccgccgaattatgcttttcctctttgcttttgccccaattttttatttccctttgccctcccccccccccctctcaatgcttttcctctcccccctttttggcattgtttgtccttatttgcccccgagggtctttcgcttcaccgggcggcgccctcccttttttctcccgcttttttggcagaatccaaatttcccaagagcaccttctcattttggagaataaaaattctcttctaaaaggct

SEQ ID NO: 33613 - DNA, 685 bp, Heterodera glycines
tctattattataattcgataatttaaaaaaaatatataaattaattttttaaattttgattaaaagttgaaaaaacagtgttctcaagttgtccatattcaatggcctttcaattgaacagggtaattttgaaaatttttttaatatttgcaattctttttttttggcttttgaatcctgattcccaaaacttttgaaagtctcggaatcccaatcgcgaaatccgatcccgattttttaaaaaattttctaggttacatatctttgcttctaatgatagcaattatttttttgttttgttttaaataaacattttatgcttatttttttgctgaattaactaattgattcattcatttattatattaatttattatttattttacttttcaatttccgcccccggcgcattcgtcgccgtcgttaaataccccgacccctaatgagacattattggtcaactaatcgccgtcacatctttctcatgagaatggatcgtgattatcatcatcatttactttaactaacagttgcgtttttttaccatttgtatcattaatttctccatactatataaacgaaaaaaaaagtggcagaacgtcctcattctgctgaagcggcgtatataaatgagcaatttcgacataatgatcatttaatgatgacaattagtaacagctgctgc

SEQ ID NO: 33614 - DNA, 428 bp, Heterodera glycines
tagcattgttttcacccagagaaattattcatttgtttctgtaaatgtgtataaaaagcgtaattttcgtttcattttttcattcaaatttttgcatattttcttcagattaagctttaccattacacttttcgaaaattaaaaattaacgttcgttaatttagtgaacccattaaaaaaagtagcaattgttttcacagattttaagttgaaaaaacattcaaaaattgttagaacattaattttcacatataaaatgcttccaacctaagctaactaaaatccatcccaaattgttttaatatttgcctcattatggggttttcggggttgctgatcacgaatatgacattcatttcgaacaattccctacccgaaatggaagaacagttgagaattaaattttgcgaattatcggggccccgtct

SEQ ID NO: 33615 - DNA, 675 bp, Heterodera glycines
aggcaattgagagagagcgggacaaaacgtcgcagcttacaaaaaataaatgcaaatgtttactgttggacatttccaataataaaaaaataattgacaatggccaacccttttaaaattgacaaaataaatgactcacgtggtgatattggaaaagacgtagtaattgagcttatcggcaagattgaacggagttttgtcatttccgaatgaaacattcaatgcggccacaaggaaaatgacaatggccaacgaacggatattggccgggaaaatcccagcgaagaaatcattctggaaaacacgaaagttaatgaaatacaagaaaaatacaaaagtaaatatcaaaaataaaagcaaacctcgaattttgcgatgcgttttttataactgcgtgaaaacgcgtgccaaatgtcccgcagaacttcctggtcataagagacggaaatgccatcgtgtgttacggtgaagcttaaggcagcaatatttctggcctcagccattctaaaaaaattgtaagacgatggaaccaactgtcgtatttttttaaagaattatgtatctaacaaataataaataaaagatagaatttatgtgaaatacgcacaaaacttagtgtgggggagggggtaaaaaatcgtttactttttgtgtaatatatagagactgttgttg

SEQ ID NO: 33616 - DNA, 849 bp, Heterodera glycines
gggctctaccaattacatttgtttttatttcttggtttaaaactatcaatcacaaatacataaagtaaatggcacggaattccgactttcgaaaattgttggggcctcggaatgccatccctggtatgcattcttgggtcattcagattaacgaagtaaatccgatgcagagctgcacgtaattacggattacgggtttttggagttacgggttatagatttttgggatgtttccgtaattttgacccgtaactgaaactttggattatttttcgagacgatttcttgtaagattatttttttttacaaaaacaaattttctattttcattgaaaggttacccgtgttgatttcgtctgacttacttggtaatttgttgtattaataactagagaccggacttttaggcacgaaaatttctcaaataggcacctaaaaaaggcaccaaaaatgtgaaaaaaggcataaaaaaatacaaaaatggcaaaaaaggcacgaaaaaatggaaaaaggcaccaaatattcaacattttctagcaaaaaatttaccaagagaccttttttttttttttgctcttctggtcaaatttttttttcttctatgttatatcaacaattcaatttcataaccggagagaaaatttttagctccgaaaaaatgacaattttttgggggtcccggcggtgccgataggcgctgccggaaaaaaaattttggaaattgtaagaatatgataagaaaaattgcaaaaaatttcccatttttttccaaaaatcctgaaaaaggcatgaaaaaaggcaccaaaaagttcaagctagaagcttcaaaccaagttaaaaactcgtttt

SEQ ID NO: 33617 - DNA, 539 bp, Heterodera glycines
attaatcggtcgatcaaaatttgaaatttacagtccgaagacaacgccaaagaatcggcgccaccggcggatcaaagcaatgggattaaaatggaaaatgacaacagcagcagcagagaagaaaacggcggggacgaagtcggggacggggaggaggaggacaacttcggggagacactgggccaaattttcatgctgaggtcattgggaaacaaaaatggaatggcaaagacaacaaacagtatatccgacattttacagtaagcaaatcgctgagaatggcgtcggatgcgcacccgcaaaaaacaatagcaaaagtcaccaaaatgccattgggacggaacaacaaatgacggaaaagtcggcacaattagctttttgtaataactaataatttaattgcagcgatttgccaattcgatttctgctgaacgaatggatgctgaagggagggccgagcatgatgacaaatggcgaagggacagccgaagcgaacgcagcgaacaacgcaattggcatgggcaccgacggcaatgctt

SEQ ID NO: 33618 - DNA, 941 bp, Heterodera glycines
  unsure (1)..(941): unsure at all n locations
ttttgatttacccannttttaggtgccaacaacaacaccaacaactccaacaacggtaagaaagagtttttcttacaaatgttgttctattgaattgattatccctttttactcaagacgctggaacctgaacgcctcatggtaaagatttgcaatgaggtggcggaggcatgctcatgcggttgggcaaagtgcgtcaagtccgaagggaccaaaggaggcttctgctgtttggcgggacatgttcacaaatgttgtgcggatcctgagaacaagtaccaaatggtgaagcgggatacggtaattgtaacacattttcagatttaatcttttctgaattttgaaggaagatttggtgaacgagctccgaaagaaggacgaatgtgccagtaaaaatacaacgtgtgtttgtggtggccattcgggcctttactcgagcgctggtctaaaattcatgtgctgcgacacgtcgtcatcgtgtcactgttgtgaaatggttggaatgaatttgaattcattatttttcttagtgagaataatatttttaaacctcaattagttttaatcgaatcaaaataaatgaaaaataaagtgttttgcgttcaggattggcccctgcaccagacaaagcctgatgtgacaattaccaaaaattaattttagataaatgcgcttttcccttatttctaagtttgaactgcctgttgcgagaacatctgagtgtaatgctacgattgatcgcttatactacgatgtaaaaattaccgaaggtcaaccggcctgcattttggaacgacaaccatcacggcagcgactgctgtccagaaaattaccgcctaattaagcgtatgttgaaaaatagaaatacaacacaagccatctttaaatcgtaaaagatttttatccctgtattgtgggacgagccctgcagggatattttt

SEQ ID NO: 33619 - DNA, 912 bp, Heterodera glycines
tttatatacaatagaatttaataataaaacaaattaatataaaattataaccactttccatttcagtttctcgttcaacatcttatcgttaccgttgattttctgaggaaaacctttgatgtatctttttttaaatttatctattctttctttatcttgttttctatcattttttgccttttttcgcataaaaaacatttagaaaaattttttatttcttataaaaaaattaaaattttaaatgaaatatttgttataatatttcaaatattgcgaaataaatgcttttagtaataggttataaaaatttaaataatttttaatgattgataattaacacattgacctagggtaaggtttaaaataatatttttttaataaagtttcccaattttaattaaaatatgttttccttttccaattgcttttggcgcactaataaaatccaaaatatgaaaaaaaaaatttcattttcactgtgttttccgtgaaaaatttcacttgataaaattgaagatttatgtatgttgttttagaaaaaaaaaattgaaatttttactttttgtataaaattttcgtaaattttattcgatgcgacgaaaccttaaatcagggcttttatctgttctaatatatcagaaaagttcctattctagctattcaaattttgcataaaatttgaatttttgtgtcataatgttaatattttatctagaatttttaaaatttgacgcaaaacttggtaatttttgaacaaaaacagctaaaaaatttgaaaattaacggtcacggtcacgataaccgtgaatttcacagattttcaaattaagcattcttggcattggtcaaatagctttaatgggttttttattattctttctccaatttcaaaattttattaattttcacaag

SEQ ID NO: 33620 - DNA, 705 bp, Heterodera glycines
aaatattgatcatatggcccagaacccaaaatggtcaaaatatatgccaaccgatagctctccgtctgtaatgaaagaatccgaaagaatttttttgcgaaaaccagtccctgaagagttacagacccgggactgaaatggccaaatgactttgggactgaatcgtccactgacttaaaatgcatggaattgcggcaaaatacttatcaatcgattcctcatcgtctgttaatcaagaatccaaaggaatttttagataaaaaagaaattaacaaaagttattggtcctcaaacccggttcagtcaaaaaataacaaaaattcgtcaaattttttgcttattgcgctaaaaaccgccgcacactcgactacggcggccagtaggtggggcgagactacggctagagaccagaaatttcaaatttgcgggtcctgttgcaggattggaattcaaaatctgtattaataaaaaagtctttcaaagtataaaaaagtattaaaatatatttttaaaccaaaaaatgatgaagatgaaaaattaataacgttttttttgcttacactccaagcaatcgactgaatcttctttaatgcatttaaaaagaccgatttgccaaattgggtggctcataataatagcttaaattaaagtaaataatttttatttaaatttctttacaaaaaagccataatacattatgtatag

SEQ ID NO: 33621 - DNA, 958 bp, Heterodera glycines
  unsure (1)..(958): unsure at all n locations
aattatttattaccatggcagattcattgaaaaatgaattaaaattatttaaattatcagaattttcgaaaaaattttggacaatttttttttaaattatttaattatttaaattttttattttttatttttagacattgacacatgaaattggccatttgttgggcttggaacattcatctgatccgagggctgtgatgtatccaagaaaaaaggagcaccagccgggctttgaactgtccgacgacgatgttagggctatacgatttttgtacaattaataaaattcaatatttaaataaataattcattattacatatttttgtggataacggaaaatccacacatacttatttttactgatttcctttttattcatctttttcagaataattatttttgaattgatcaccaaaattcgactaaaagtgatcagaatcacaccaaatttttaaaggattacaatgggacaatgaaaagctgaaaacaataaattgtgcaatgattgcggttttgaatttattattttgaatttttttttttttttgccaatttttgcaaaatttaattccccataagtttttaaaagtgataggaagtgcaccaaattttaaagcgataatagttatatttttgaatttttattaaatcattttgaattttttgggtttacgattttttaaatttatttccctcattaatcttctaaaaagattagaagaatatcaaactaaaattaagcacatattttctctgaatttactttataaatgaaagcaaaattaaaatttattaaattgtcaatgattttaaacatttgaataaagtgtctttaggaccgattttttgaatttcggttccaatttttctcatttttcaattttggggctgccatttttccgtgtcccattttcccgcatattttgatgacaantttacctaattgccccacatttc

SEQ ID NO: 33622 - DNA, 654 bp, Heterodera glycines
gaaaggaaaaagcgcaaaggcaaaatgaagaagcgaacaacgaagtcccaaggtcgagaaggggggagatatggtcgagataagggaagtcatcggggggggggggagaagggatgagcagtttttgatgggcaaatggggcgggggacaaagacagcgagcggagcagacattcactcactcactgatccatcatcggcacaaacaaacatcacacacaccgaccaatcccttttcgggacactccgcccaactttggatctctccccgtcgatctcgacaacgcattgacgaggccgaggaggagaaaaagagtcaaattaagacaaagagagagaacgattaagggagacggaaatgaaaacgaagcaaaaggccgagggaaaaggaaaaggggagggaatcggaattagcagaataaaagggagagaccgacgccaataagggcagacgcaacaaattttggaaaatttatcttttctttgagaaataccaaaattcgcatgaaaaataacaaagaaaagaagaaaaaaaaaacagaataaattagcaaaaacgaaactttgaactcaataagggtgagagaaaggaatgaaataaagaaagtaaacaaaacaaaacctaaagggaataatagccagccaccaaaagggg

SEQ ID NO: 33623 - DNA, 1019 bp, Heterodera glycines
actgatgtgattttattttttctatttttgtaacttaatttttttaggaaattgatttacaaattgacgtaagagactgcagtggttcaagttcggctggggatattttttctcgttttgaaaaggatgcagaatttgagcaaatactgaatactgtaaataaactttatatacccctcataataattaatttaaggcaacatcccccagtccatctgccttggagacaagacaaaaagccgaagttgaagtaaatgaatatttgcgggatccaaaaattaaatccagggccgatccatcattatactgggaagtcaattcacaaaaatggccaatgattggtgacgttgtacggaaatttctttctccacctgcaacaagttcagaaagtgagaggcttttctcaacggccggtctaatttcagatgacttgcgaaagagtttattaccagaaaatcttgcaaaacttttgtttcttcatcacaatttgcttttaaccggtttctcaattgaatgatatttgaatgatttttgttttaatgcgactaaaaattttttaaattacggattacagattgcggattacgggaaattacggggtttttggacccccgtaattacggattacggatttccgtaactgagaaattcgccgcaattacggattacggatttccgtaattgcaaacccagttgcgtgcagccctgtttccgactgtccatataataaatctatctacaaattatttagaaaaaaaatatataaaaaattttgaataaaataaaaagcatgttttttacggcggattttcttgtgaattaataaacattttataattaaattttaaaatcattcaccagtgcctccttgttaaataatcgtaaccggagctttggtcttaaattttattaatcctcattgaaacgcagaaaatcttcaaaaaatgtatggacacgctaaagtacataaagcatgcccaaaatataaatatggccgaacctaaaaaaatttaggcgaa

SEQ ID NO: 33624 - DNA, 682 bp, Heterodera glycines
cacattctattttagaagatagtttcaaattaccttgtcataccaaacggacaaaagatcccatttttaaatatttttgtataatcgcgatcatttatttgaaaatttccaaattcagtctcaaaattcatctctcttttcatcattcatttctcattcaattgctcatactaattactcccctatttgctgagaaatgagaaaaggataaataataaattgaattatataactaaaatgttgtattatattgatgatatgatgagtaaatttggtaaataattgattcaataatttatccaggcaatataattaataattacaaaattcattgcgaaaaatatttttttaataaaaataattcatttaacacaagagtgatgactaatgaatggttaaaaagattaattaaaagattttgaataccatttttaaaaaaatttaaccagttaatccgttacacttttttctaaacaaattattgatagctattagatataatataatttttattctaattgatgcatgatattatgatataatgactaaatgtggttaataataattgattgtacaatttatccatgtaaaaaatgaataattaccaaatttatttgcgaaaatatttccataaattaaatctttactttttatctttacaaaaaacatggaactgttttta

SEQ ID NO: 33625 - DNA, 918 bp, Heterodera glycines
  unsure (1)..(918): unsure at all n locations
cttactgcttttctttccccctccctttgcccctttcctctttccttcccctctcacctctttgcccccttcccactctcccctttcccccctacccctccgtcctcttcttctcttccccctcctcccttactgcttttcctccgcccccttgtgaagccgttcattttgcgttctcacaaaagccccaaaaacgcactcactttttcttttttctctccgtcttctctttgtctccattagcaacaaagatttttgtattggaatttacccgtagacaagttaccacacgcatgaccttctgttgacgagcattgaggaggaacagcttacttcagaggtattcgtttattcaaactgttacaagggagtgacaaatcgggaaaatgaaatttaaaaggctttgccttatatttttgataataacttttaaaaatgttttgtttgtttgaggaacgagaggaggcttggaaggagtacgagagcgaaagactgtctcgccaacttttgccattgccatcctcatttgaccatggatggcactgccgcagttcctggtacgtctcagcagccgtctttcggcacgtccaccgacatggcgcacttctccaacgcattgcaactgcgacaacttcgactgtatgcaggccaagaccgcctacagaatcttccagatcaagcagttcctcagctatttcatcaacctgatccctgcagaggaccttggcgagatgaacagcgcaaatgcatttgccaattatttcaacggaattttgcaggtgaccaccaatcatacattaaaaaggcgnggaagtcaaacaaattttttgtgaaagagtctggngtggtcaattttgcgaagggacaccggccgtggaattttccaataagaattttagagtttttcttgaaattttt

SEQ ID NO: 33626 - DNA, 1003 bp, Heterodera glycines
  unsure (1)..(1003): unsure at all n locations
aaggacggccaaacantttgaagaagtgcactttcttccgctccattaatcgtgcaaaatcggaaatgggaacaaaagatcgtcatcattgtcacaatcattatctgccagatcgtcagcattatcactatcttatcttctttatcactccttttgctcattgtttcaaaatgtttgggtcggaaggcttttctgcgtggattcgaatcttttttcgagaaatctttcggcccaaactccgtttcaatgccttccccccccctctctctcccccccaataaatttacgtccttttgccatctctaaccatatatttttgtaaatccttccatgaaaagttttttctctcttcgcttagttttgtgcctttgtctctctctccctctcccactctctctttgtatgtgtgtctctagtctcgtctttctcgccatttaaccaatttctaagcaatcatttttattagacaatttttgctcaaatggctgttacattaaacacatacaatacttgtgtatacattttgtacatacatatggcatatattgtaaatgtgtacaaaacaatgactagaaaaataagtgatgggcgggagaaggaggagggaaattaatgccattaaaggcactcaagaaatgatggagttcatgacacaattagaagcttttttctgttatgccgtctaccatcgcttttcctctgtcgtgcaaaatgcttgtgccattgccaaatttgtgcaatgtgtggccaatgaatcgccgtagcgggcgcccatcgccggcggcgattgtgccgaaagtgcggcggctgagagacccccgccgggcacggccaacgacgcccacacgcttttctcttgcgactgttgctgataggccacctttgggcggggaattccattttttggcttttttccgctaattgcatcacaaatcaatcctatcctctgacctttgactcattttccgtctgttttcaaaataaatcccaaatgttgcgatgg

SEQ ID NO: 33627 - DNA, 1244 bp, Heterodera glycines
ttatttttgataaaatttcgcaataattaattattttctttattattattattattattatttgtacttatacttttaacaattgcttctcctcatttcgttttataatttcttctcaatcatcaatcagtgcttgctttttacactgattgtgctttctttaagccaagaaatcctcgaatttttcgttatttgtccattattacacaccccaaccccactaattgcgtcattaaatcggtttgtttttggctcatactaaaattgagaatttatatttccgtgtttgtttgtattattatagaaatatccatttaaataagtttttaggtattgaaagtaaaaataaatttttctttaaaacataagaatctaagtcaatataatagaatttttaagttataaaattcattttcatcaatttaattaaattttttctttaattcaattaatttgatttattaataaattaattcgctaataatattaattcatcataaaatttatcaaaataataatttaataataaatatttaaaatttttgagtttctattttcatattaattattatttattaattaataaatactattaaaaccaaaactatttttggggttttattttaatgaataataaattcatttttttaataaaaatttgataacgctaaataccctttttttaaaaagcacttaacgcgaattgaacacctgctttgtgggcccaggaaaatcccctctcccccccccccccgcccaatttgtgtgcaaattcattttccatttatggccaattttttgtttactcttaattatcatgagtggaaattcccaattggcaatttgttcaaacaaaaaaagaatttattgaattttaacatttctctaattccacggcttttttaatttaatttttttttattaactttttggcctgactttagtttaaagacagattaatttggattggatctcaaggacatagtaaatttaaagacagacattaagggattaagctgcgcctcaaggacagaaattcaaagaatttaaggacattaaaaatatttaatttacttaaaatttctttaactatttttttcttttttccgttttagtaattccggaaattttttcattttatttattcatttatcctcccaatttcctaagaacataaatttgaatttgcgtaaaggtggtttatgcttgccggcatgttcttgcgtcaaaatatgactctagag

SEQ ID NO: 33628 - DNA, 939 bp, Heterodera glycines
tggtcattgaaaaagtgaacaaagtttaataaacacacattaatccgttcttatgttcaaattatggataatgatgcttcttttactcgagacacctttttcacaaagcgaccataagggattcatttgcactttcaatttgatattttaaagcatttttatttaattgtttaaatacagtttcattctttttattattaaatcggttttttatacaattaaccacttcgactgaacaaaactgtcattggtcacttttgccgtcactttttgacaacgatcgtccacaaaaatattaattaagcccgacaaatagccgctcctagcgactgctgccgccgatcaattaacactttacacatttccaacccaaactttgcccatttccttttttatttgcccatttatttcccttttctctgatcgctttaataaatttattcttttgactgaaaattatatgtaggaaaaaaccttaaccttaataaaacaaacagaaaatgaataattattaattaattttgtgcatagaaaaaagttaatttgctgacaaattgaatcaaaatgtgtaaaaagcggaggaaagtcaaaatatttgttattttcgttatcagagatcaaattgtaaatgatagaattattatcaccagcagaaagggcagcactttaagtattctgataaaaagaaacaaatcactttcccaatcactcgaaagaatgcgaatttaaactaaaatgattttgctcaaaaatgaattttatttttattaaattaatttgtaatttaattattttgattttttgttgtcttttgccgacacattacgccaaacacataaatgactataatgtttaaacattggcatttggaatgccccgggcacaattatattcattttcagtattcttcaagaaaaaattttgaatcaattcttcatt

SEQ ID NO: 33629 - DNA, 1050 bp, Heterodera glycines
ccaggcaagcgggccgaacgacgaacgggacggacgacggaggagagggaaggggagggcatatcggatgtaacgaatggataatacgtagaaaagaggctaaacgagcgatttttgctgtgtgcaaagtttgttcaagcgctaaagaaaagagagccctcgaaagagcggaaagataaaaaagacaagggggaggatgacgacagataaaggactaaaagacaatgacgaagaaatggggtgacggatagggaaaggttgaaggggaatctcggaatctcccccttccccggcaacccccataattcgtctctctgccccttcgaaggggaaactgaataatcgttggacattagttaattattttacatatcccagccagttgttgttaaaatgaaaacggaaaagcatttccgtagggattataatacaatatctaatagagaatgaaaatggcaaaataacttttctgatggttatgaatttgaaaaggtaaccaaatgggaaattcgaagtctgagacagacatcttccgatgcaataatataagtggggaatagcggtagtgagcctaaagacactgggactgacagaagaaatgccaatgccaataaacataaccaaaggtagcaaaaaaggcggatctcaaaatcaataagtcaaaagtgaaggaggaaaggaatgggattcttcttttcatagagtgtattctcatccttaattcagagtacggaattttgcgtttgtttgcctttgggtggcaaaactttgagaaagaatttttaaaaaattcgaatttcaacgcactgaaataacaaagagacgggaggctaagtcagaaagcgatccgaattcctctaaaacttttctattctcattgtcagttaaataaacacgagagaaagggggtggattgacgtgaagaagaaaagcggcagcatttgcagcagaaacaagcccagccgacgtaaatgtaaggcacggaaagggaagacggactggcgcccccgcacggcactccctccggcaatattttattgcgctgccgtg

SEQ ID NO: 33630 - DNA, 1002 bp, Heterodera glycines
aaaaaagaaaattttgtaaataaatagctaaaaaaattcttttacaaacgcatatgtggtctctgtacgtatgtctccaatcatatattctttaaaaaattccattaaatgggaattgccacaaactcagtacaacttacaagaggaatttctctaggccttttgctattttcttgctttttcctgttattttttaaaaagagtcctttaaaatatcattggcttggtaaaaattccattaaatgggaattgccacaaactcagtacaacttacaagaggaatttctctaggccttttgctatgttcttgctttttcctgttattttttaaaaagagtcctttaaaatatcattggcttggtaaaaattccattaaatgggaattgccacaaactcagtacaacttacaagtggaatttctctaggccttttgctattttcttgctttttcctgttattttttaaaaagagtcctttaaaatatcattggcttggtaaaaattccattaaatgggaattgccacaaactcagtacaacttacaagaggaatttctctaggccttttgctattttcttgctttttcctgttattttttaaaaagagtcctttaaaatatcattggcttggtaaaaattccattaaatgggaattgccacaaactcagtacaacttacaagaggaatttctctaggccttttgctatgttcttgctttttcctgttattttttaaaaagagtcctttaaaatatcattggcttggtaaaaattccgttaaatgggaattgccacaaactcagtacaacttacaagtggaatttctttagtccttttgctattttcttgctttttcctgttatttttaaaaagagtcctttaaatatcattggcttggtaaaaatccataaaatggggattgccccaaactcagtacaacttaccaagagaatttctctaagcctttggctattttctcgcttttttcctgttatttttttaaaa

SEQ ID NO: 33631 - DNA, 761 bp, Heterodera glycines
  unsure (1)..(761): unsure at all n locations
cagagaatggctgacttcaatcttcagaatgacgcgctccttctgaaagcgacgggacagccattgatagtcaaaagccgacaaaacgaccttcgctctaagtttttcttcaatcgcttgcgtcgccctttgaacgctttgggacgtgccgatcactntcacaaaagggtctgaactttgcctattagtccgtccacttattaatttccctgccctcaccttttttagttttcgctcgaattttcaattttgaaggccaacaaatctgtatttcattttggtttgtcgtcattttttagaatcccttcgctcctgtgttcttctccactcgcgcaaaaaaagaatcggcactttccccaggtgcttctcctattaaaggatttgactcattgggcaccttcccctgtctctctccctatcccacccctcttctctctctctctcctttctctgtctcaactctcccctcctttctcctctctctctttctctctctatctttctctctctctctttctctcactctctctttctctcactctctctttctctctctctctctttctctatctctttctctctctccttctttctctctctatctttctctctctctctctttctctccctctctctatctttctctctctctttctctctctccctgtctctctctctccccctctcttctttcttcattaccagtgatcattgcttccagcctaaataaaatccaaattaaaaactcgaataattaaaaa

SEQ ID NO: 33632 - DNA, 968 bp, Heterodera glycines
caaaaaatggcttttaactctcaaaaaatgtaaattgtaaataattaattaattcattttgtgtttttttgtttgtttaattaatttttacaaaaacatttgaaattaatttatagcactattttattaagcctaaagaaacttttcgtcatttgctattttctcaaaattgacattgtcagattattaattaatagtttgttaaaattaatattttcatattgcttatttgatttgttatttattttcttctaataattatatttatttttgtatgaatttactttacttttttacaattaaattttttttttcggtttttgtgttggagtttgaattgtataaaataatttactttttactcctgtttccctttccgttgatatggtgatcttccgaagtggtatttagttgataatgttttattttattatattctttataagctttggattcttttgtaaattttcattttttcattgtcaattaattatttattaaaattaattagattaaatattcttttgtgcggctaattttagtattaatttatgttttaaggcttgcactttttcgttttatattaaatttcgccttatcaaagtttttgaaaatttacaaaatttcatttaatttttgtacttaagacttatataaaaattttggtttggtgataaactaaaaattaaataaaattaataaggaatattacagatgataaatgttctaattatgatgcaatacgagaaatgaaacaaatttaattgatttgtccaactttataaaaatttcaattatgtattaaaatcataattatttcataaaaaatttcacataaatttttaatgataatttctaaaatttttaaattcaaatatacgtacatattttatattaatcaataaaatataaaagtaaagagaataaagtaataatattaatttaaaacacacaaattatttacaaat

SEQ ID NO: 33633 - DNA, 1119 bp, Heterodera glycines
tggtgacctgttcctgcaactcctcgaatgcttgtccggtggactccatctcctgcatcagtccgtcctcctcctgcttggcggactgcaactcccgcctgagtctctcgccttggtcctccaaatgcttcaccctcctccgctgttcgtccgtccaacatttgcgtttctccttcaaatcggcacgtgccaatgttcgtaatttgtctctgtaacggtcgcgttccaatcgaatgcgcaaaatgactttttgtgcctccgttaaatcggtgggcggtggtgaaaaagcgccggagttctgatgctaattgtaaattgaaaataaaaaacatactcgttttattcaaaaccggttggtcattgcattgtccgttttgactcgctgtgtccgtcggttcctcccttttcacctcacaatcagccggggaagtgccgtccgtgtcggccttttgacctgctttttctccttctgagaccgacaagttgcccgttggcatagcagagcccgagggcatttcgtcctccaatttgatgatcaaataattgtcattgttcacacgccgttctccgtccaactctttttggcactaaaatcagtgacgaaatggtatgccaatgcattagatttgtaatccgtcaccatttgcacttgggcactcatttcgttgcacttccgctttagccgtgccacttcctgtttcagctgagtgttttgtgtgtttagtgagttcatcagcgcgttcatttgttcgttgatgggcatcgcctgctcccgtgaagcggtgttcacctcatagtccacacacacattttcgtattcgcgtcgcgccgtgttcaaatcattgtccaattcgatcacagtttgttggagacgatccaatgcaattaaactgtcattctgagaattggttgattgatcagatatgcttgcaattaacaggacaacaaaacgtccctggcgaaaactatgggccaagattcaaaaattttcaagtaaaaacaaactaaggaaggaataaaaccaatccttaatattcgctgctgacaatgagtattagttgattgtgagacttcgaaggtaaaacataaaagataaactgattttccgatttagataat

SEQ ID NO: 33634 - DNA, 883 bp, Heterodera glycines
  unsure (1)..(883): unsure at all n locations
taagatttcggcccgtttcattttcactttgtacccgtgcttttttcagatgcctacgacataaaccatttgttgatcgaatgggtggacaatgcgccgatcactaagaacatgaatatcacaatgtccgtgtgttcattgatcatcgttcgtccaattccaatcaattccctctgcggctgatcaggtccgacatggacatcgtcaaattggtgcccggtacttgcgacggcaattacagcaccggcatttggagttgcgtgacggcggagtttttcgtttcgcgcgagttgactcatcacattttgcagacgtacgtgccaacgacactcattgtggtgaacggcacgatttattactgtccaatttgaagttgaaaagaataatgccttaaggtgatcagttggttcagcttttggttggacgtggaagtgatcgctttgaatttcaaattatttaaatgaaattaattttgaaattcgttgcctcaggcggtgcccgcccgcgtttctttggccatcacaactttgttaacactgagcacacaggccaattcggtgaagaattcgttgccagaagtcagttacatgaaatcattggacctttttctggcggtcagcgttttgtgagtgaattaattaattgaaagtgccaaatgaggaaaatgtctgcgcctaatttcacagatttgtgttcggtgtcctaatcgaattcacaattgtcaattatacacaacgaaacggtaatttgggggaaatgccaaaagtgaaaagcatactgtgaaagagaatacagtaatcaataaataaatggtagcggacttttctgagcgaattaataacaaatgcttanatagccaaatattgtctggacggttcatctc

SEQ ID NO: 33635 - DNA, 937 bp, Heterodera glycines
  unsure (1)..(937): unsure at all n locations
gaaaagtcccggtcacggtttttctcaaaattcccggtcccgtacacntctagtgaaaagcttaaattaattaaattatgtcgtcatattcgcgatattttttttccgaataaaaatttcttcaattctccgattgatttgccattgaatttcacaggcaatgcttttgctgtattttcgcgcctcccaagattttgcttttttgaaagaaacgcatcgccaattagtggaaagtaatgaagacaacaaaataaagaaaatgatctcactgcttgacggtctttatgaggaaggcatcaaacaaccggtggcaatgttttgccaaagatcggtaggaaaatgccaaaaattaaatgataattcaacattaatcaaaattatttttaattatttttacctaaaattaattatatttttaagtgaataatgttaaatagagataacatttataggcactaaaaaccgccaaaataggtaggctttaggctctaaaaaaccccaaaaataggcactaaaaaatggaaaataggcactaaaaatcctcaaatttaggggtgtaaaatgacaaaatgtattcaaaaaaagtaaaaaaaaattaggccaatattgagataaataatttttaaatcacaaattcttgtcaagaaaataaataaataaaatttggagatgaatttttggaaagttttttatttcttgggggtgtatttttgaaaattttcgggtcgattcttagggatgtattttttgaaaaaaaaataggtcgatgcttaggggtgtatttttcgtttttattgcatttttattaacaaattttggactcaggaaaaaatagccttttgcctaaaaatgttatccctaatgttaaataactaattttacatttatcaaaaggattacatggcgagtcaaaacgatgatggagagtattgctaaa

SEQ ID NO: 33636 - DNA, 960 bp, Heterodera glycines
tcgatgataaaaaattaattagaaaaaatgaacaaaaaaaaacccaaatacaggaaatgtttgaattcacgattggttgggtcctaatcccgcccgcccactatgcccatcccaatttgtccacattaaggcatcttctcgaatttctgcgcagtggactctgcccgagagtgcttgaactgttggtcggaaatctttctttttgttgccgcctattaaccccgactgcgcaaccaatttaatgccgaaaggtaccgttaattcttaggtggcccaattgctctcacattcttcattttggcattattgagcaaacattgagaggaattggtggaaaggagtaagcgggaaaaaagggatagagacaataaaggactccctaatcagtttttaaaatatttatttaagtactgaaatcgaaataaagctattgatttaattgtcttgcgatttgtatcattcattatcactcctcattctgattatttctttggtttgaacggggcaagaatgtcagtggctcggcagttgtcgatcgtgcacttctcgcataattcaaatttgatgatggcccttccttcgttcgtctcgtacttgtttttgtttccccaaagacacgaaagacactcttaattaaaagatttttctaaaattaagtttaaagtagctaattaccatcacataaacgaaaagttaacatatattttgggcggaaaagtttccaagattggatgcttcttgggattttagccggaataatgtcagtttgttgctcacacatctgttcattttggtgatcgcccattacctcagatgaatggatttattattatttgtgtattaaataaaatgaaaaattttcagttttttccgagttttatatctatttttgtttgtttaacctattttcttaaaaaatttcgattgttcaaagcgaatgtttatttcgattaattaaaa

SEQ ID NO: 33637 - DNA, 907 bp, Heterodera glycines
ttaagaacccatggggtgctctatgcacccacaaagtttcattctggaaatcccacggacacctggggaccttcctttgtaagcaaaaaatttttttgcccttttttccattttttgggattctcgtacttttaatgcctttttgaccattttgtgttttcatgttttttgtggcatttttccgaaaattttcattaaaatacaataaaatcgaaaaaatacacccctaagaaatgacctgaaaatttcagaaaatacgcctctaagaattgttggtcgccaaatttaattttttttttcttgataaaatatgtttgaaaattttcttattctaaaaaattatcaaatatttaaaagaaacactagtttgctgtggatttaacgtcgagaaaaaaaaataacttcgaaaactaaacgtcattttttataccattaaaatgtagaggtagtacgccaaagtgagtgaaattataaagaaaaagaaaacgatgagatagtaatatttttgccaatttattaaaggtttcataaatagggctaggatttttatgttttaacatattttttttgcggcttagttatggcgagagaagcccaaaaatagcattttctccgaacaatttttggtttagagcgacttataaaaacacatattttggcgttttggcacataaaatatgttagcacatattttggggtttggcacatattttgcacatattttggcatttttgagaaaaattgcaataaaaatacaagaaaattgaaaaatacacccctaaaaatcgacttttttcctaattattaacataattttcaaattaaaaaattttttcttcgattgtagaaactaatgaaatctcgaattcattaattcgtcattggatttcgaagttctctgctggaa

SEQ ID NO: 33638 - DNA, 621 bp, Heterodera glycines
aactattaccaaatgcactgggtgtcaagttttctgagatgaaattctgcggatctaaatttttattcatgcttttttgctttcgggttaatttttttaataattcaatttgagacactaaaatgctaaagcactaaaatctaaaataacatcacctgaacatttttaaaaatttggtctctttgtgcagtcatataattttccataaatgtttcttggccaccacaatcccacagatgaaggaccatattacccaaaaatctgtaaattgcttcttttggttattcaagaatgcgttgcagttacttgacgtgcgcatgttccacttccattgtagggccaagacggcttgtgtctctcgcaatgtaatttgcaaagatgattgaacgcatgcttgttttgcccgctccactctttcccataagcaaaactttccgtttggacatttttcaaaaaacaaaatacagctattattgtatttatatcttgaaaaaacggatgattgtggtaaaacactgactcagttataattcaaatggcctaaggttcctggatttatccaggaaatccaggtccagatcaaatgtgaaaaaaatccaagtccaggcttttttcaaaatt

SEQ ID NO: 33639 - DNA, 960 bp, Heterodera glycines
  unsure (1)..(960): unsure at all n locations
agatcctagtcctgttatgaatagagaagcaggaaaaatttccacttgttttgggacttcaagataaaataaaattctccaattgaaacagatcgccttgcatcagcctaccttcactaatttcaattttgggagtatttaacttatcgaaaattaaaaaaaaaaattttttttctttattttgacagtatcaatcgggaaatagtggtccgcaaaagtcggtccgcaaatgtcgcactacgaaagttaaaatgttttgcaattgtctaaaaacgctccttagtcattgttttggtgtttttaaggtcaattcttaatttatacacaatttttggtattttttgagagttaaaaaccatttttggcagttttttaaggcatattttagtgcatatttgggcatttttcgggtttttagggcatatttgggggatttttagtgcatattttatgcgcgtatttggcatttttagtgcatacaatttataaccctaattatggttgattaatctttattttttcactaattatgaagcaaaacgccaaaaaggcatcgaacagaaaacaacaccttttttaggtataggtaaagcagctttcgctccaatgccaaccgtacaaatgcgcgagcaaatccaatgtcagttttaatctcggtcattctcatgatatttctgcaaaatttaataggcaaatgaatttaattaattattattttatacgattttaaatcgtagagaaagttatattanaatttataaaataaaaatatatttaaaaagaataatattttacaattttatcggtgaagaaaaataaataattttttaatanactaataaatcataaaaagtttaaaaataaatttcaaattanatattaaattagcgattttatataaaaataaaaagtaaattaaataataanttttaaatgcatattaattttcactttaagtcg

SEQ ID NO: 33640 - DNA, 1155 bp, Heterodera glycines
  unsure (1)..(1155): unsure at all n locations
ccccccccccctctaataatcccccccccatttttcttaccgttttgtcccactcccaactcttttttccatcggtaaattaattctcgatttatgcccattcgttgtgccactttttcctccgtttctctcttttcatcttttatttgataaaatatttttattatttttctcttttctttttcggaataataaactttcctttctaaattaataattttaaattttacattaaaatttaaatgcctaattttccaatcacttactgtcattttcaaatttattcttccatttataaattattaatcgatgtgtgcccaattttttggcaattttattttcaatttccaaacgattacaaagtttacttttcttacgaattaatttttcttttaattcatcaaatattttcacaattttttcccattcatctcttctttttgggtagttttgacctaatttttaatttttcgtattaaaaatttaatattattttaacatacaaaataagggttctgtacaaataactcacccaacgattctttggctccaattttagtgtcattttcactatcattttcactgtaattggcattttcactatcgtttttacggccattggcattttcactatcattttcactggaattggcattttcactatcattttcattggcattgtcctcatgtgccattggttgctgtccatcctctcctccgtccaaattttcggtgccttcgtccgatgtgtgctcatttgcttcctcttccgaccattgatcatctgttgaatgctttttcagtttttgatttcttttttggcactttcttaccccctctctttctcaattggcacttccatttggcaatcgtcgttcggctcactccaaaggtcatagtgatttctttctccttctcactcctcgttttattgtccatttttgtccaattgttcgctttcatttccataaaatgtctcactatttttcgtttctctaattcagaaaatcgcttttttcctaaaaataaaaagcttttgttaattagaccaatttccctagatgtgcccccatttaataatatttactttcaattttaattcattgattccataanntaataatgaattaaattatttaataccaatacttcacc

SEQ ID NO: 33641 - DNA, 982 bp, Heterodera glycines
gacgaagggagggaagggagagaggacgagggcacataagaaagtcaagaaacggagaaagagagggcgaggcgtacggaaggtgcgacgagaggaagaacgagtcaaagtaaaacagacaactttttagttactgggaaaggcggaacacacaaaggtagcggagtacagaaaggatcaatggacaacaaataacgaactataactcggagtgattcatgcattacaattgaatagaaaaaataattgactgtaaaactgtccaggaatagttatcatttgtatcattcggctggatttgttgtacgtttcattaccgcctatcagcagctgacccattgttgttcttcgggcacttccaatccgaccattctcgccgtttcttttaccgtcctttcacctcccttgaaatatttggctcggatttcgtctaaattccttttgcttcccaagtaaatggcatatgtttgtgctgagtggtgcgccttcgtagcttcacattgttttgtatttcggtgcaaactcagctgattgcgtaaatatttatgaagcgcggatttcgtcgtaaaactcttaatttttgtcaaatgttcaagaataatttgggttagataggccccctcctctctttttccgacaagaaaagattaccttgtcgggtcttttgagttctcgaaaaatttgtttgaaagttgtaattgcagttgaggtgaaagaagccataaagatgaatgtctgagattaatataatcagtagggatgcaacttttagtgaagaaaaatctcgaaataaactaaaatagtgagtaaaaatgccaaaatagtgaagaaatagtgacataattttcagccaaaaattgagcaaaaataatttttattcactgattgcaattggaaatgagctacatttcctttataaaattctcttatgaaatattgactttttttaaatcaaaaattttgtcaaaaaaaaatttggggg

SEQ ID NO: 33642 - DNA, 638 bp, Heterodera glycines
attacgtggtcagctggcagtgcttggacatcatccgcaaggacatggtcgacccgttgagcggcaagcggatggccgagtcggacatcatcgaactgcaacggggcggcacgggctacgcggctacaaacaagctggacgccaagctgatcagaccccaattggaactgcaataaatggatgattgttcatgttgctgacttgatcatggatttgccaaatatttgctataatttctgtgtttgtaccgttttgcaatttacaagatttgatgattttttttttgcttatttggggtttctgaatcctttgcatgcatggttggttgatcaaaatattttggcacggaatggaaacaatttttatttgtggtctaatttgtataattgtttttttggcatggatttgtttaaatacaaaaaaaattggttctcttgacttaccgtatatgctctaattatcccccgtgggaataattgggtactcatctagtttacctgatacttttaacatacattttcagattcctataaatgtattttagaaattaatgaaaataagttttaagggcttttctaggtcgctgatcacgaatccgggctcatttgtcagatcagcgcaaccgttcactacatggc

SEQ ID NO: 33643 - DNA, 896 bp, Heterodera glycines
  unsure (1)..(896): unsure at all n locations
cttttcgtgcttcgcccactttgcacttttcgtgcttcgacatagcaccggtctaaacatcgaaaccataaatacaagtggagaagagacgcaaactgaaaatacaaatgttggtttaaaccgaaacaaaaatacaaatgtttgccaacaaacatacacaacgacaatattggcacaaagatcgaaacaaaaatacaaatgtttggaaaacacaaaatgggaaaagacgtaaaccaaaacacaaatcttgggaaacaaacacatcacataaacaacgaagttggctaaaaaccccgaaaccaaaaacacaaatttggaaaacccacaaaccgaaaatacaaatgtttaaaaacaatcacactcaaacgccgatattggccaaaacagcgaaacaaaaaacacaaaaggagaatagacgcaaattgaaaatataatattggggagcaaacacacacaaacgattatattagcccaaacaccgaaaccaaaaacacaaatgtttggcaataaaacatgtacagaacggtgttggttaaaacagcgaaaccaaaaacacaaatggggtaaacacacaatccgaaaatataaatgttgggaaggaaacaaatacacacacaaacaacgcagttggcaaaactcggaccaaaaacacaaaattcacaacaaacatacacaaacacgaagttggcccaaacataccaaaacacaaatttggaaaacccacataccgaaaatacaaatgttgaaaacaaacacacacaaacgccgatattggccaaaacagcgaaacaaaaaacacaaatgagggagagacacaaaccaaaaatacacatntttgggaaacaaacacacacaaacaattatattagcccnaacaccgaaaccaaaaacacaaa

SEQ ID NO: 33644 - DNA, 1052 bp, Heterodera glycines
aaatccaagcaggtgcctttgtcaaaaatttgttggttggaacggagaaattcaatgacggaatggtcaatgcagctgaagaaaaaaaaacgcttgagtgaattattaaaaaaaatttttacgaaattccgagggagtgaaagatgatttggttgcgcagagcataatccggcaattcttcgatagcgtgcgggtcacttcccatcctcacccccgccacttaaaaattcaaaatttaaaaaatattttaattaatgaaaaataccgtttttaaatatgacaatttccttccaaagtgtcaattcgcttttgccatcaaaatgcgcgtccaccataacatcgaaacggtcggaaagcaatgccattttgaggccgagttgagcacggtcaagagatgggagaatgtccatccaaacatcgctacaaatccaactgaaattgtgaaaaataagaaaaaaggttggataattttatttcattcaaaattttatttttaaatatactttaccgtcggttcattagggaattagcacacagctttcttttttaattgttaaatgaaaaaattgattggataaattagaagaaatgaaaaagaataagtgtatgcgtgttaaggcaattggtgatgatgggggagggacaaactgcataattaggtcaattagtgaccaatgatcaacgtaacacaaaacgacgctattggagaggagaagagggagaaagagtgggagaggaagcctctcttcccccccccccctctcttttgttttagttcgggtccgggattcgaaattagtcaaaatatctgccacaccatcttttgatgggaacttggctaacgcggctcttggaaaatccgactctggaaaatccgacaccaactttaaattttaaaaataattttgattctttgagttgatatttaaaatacatataataaagttacagtattgaagttatccaaaatatttttattgccataatctatctaaggtaggaatatatatttatatttttatgtatgcccttttctgattatctcaaaaaaa

SEQ ID NO: 33645 - DNA, 672 bp, Heterodera glycines
catattcgtgctcagagagccccgagaaccttataatacatatttttatgacttttgaaattttttaaaaaaatttcaaaaaaggtgtgataccatcggtactattatacccagctcgtttcccccacgtcgtcatccccccccgaaaaaaattttttcggggggggggggggttgggaatgatgtgcacccctaaatatgggtttgatacagggggttttcaggggtgttggtatggatctgtcacccatttttatgaaataccaccgatatccttaattgaataatatacaaacaccgttatagttggagcatgatgaggatttcgagtctccaccacactcgtcggacgaggaggcgccagaggacgaggtggattcggactttgacaaagacgaggaggaggatgagcccacgccggcggaagaggacccggaacaaattgagcgacgacgaaaggttttttttttggaaggaaattaattcataaattcacacctgacaaaaaaaaagggtttccgaccggagacaaaaaaaaaaattcttttaataccgtccaaaaaaacaaaaaaaaaatttttttttttttgaaaaattttcagtaatgttcatgattaaaattgtaaacgccatccacctatgtattaagtcagaaaacaaatctacaataca

SEQ ID NO: 33646 - DNA, 213 bp, Heterodera glycines
agtgttctccacaaaggaatgtagtggtagtgtagcgatgactttaggcgatcaatataagatcgccgggccacgcaaagaactgcaccctccggtgcaaatgggatggtaaggagtttattgtgaaaaagtggttattagctgcaggtctcggtttagcactggcaacttctgctcaggcggctgacaaaattgcaatcgtcaacatgggca

SEQ ID NO: 33647 - DNA, 954 bp, Heterodera glycines
  unsure (1)..(954): unsure at all n locations
aagagctgcggaaattgtgaattaattctcagaaaaatggctatctctttttaggacaattttctatctcgtaaccccgatgctaatccgttccgcagagcctcttcaaaattttttccattaccgcaagagttgcggaaattgtgaattaattctcagaaaaatggctatctctttttaggacaattttctatctcgtaaccccgatgctaatccgttccgcagagcctcttcaaaattttttccattaccgcaagagttgcggaaattgtgaattaattctcagaaaaatggctatctctttttaggacaattttctatctcgtaaccccgatgctaatccgttccgcagagcctcttcaaaattttttccattaccgcaagagttgcggaaattgtgaattaattctcagaaaaatggctatctctttttaggacaattttctatctcgtaaccccgatgctaatccgttccgcagagcctcttcaaaattttttccattaccgcaagagctgcggaaattgtgaattaattctcagaaaaatggctatctctttttaggacaattttctatctcgtaaccccgatgctaatccgttccgcagagcctcttcaaaattttttccattaccgcaagagctgcggaaattgtgaattaattctcagaaaaatggctatctctttttaggacaattttctatctcgtaaccccgatgctaatccgttccgcagagcctcttcaaaattttttccattaccgcaagagttgcggaaattgtgaattaattctcagaaaaatggctatctctttttaggacaattttctatctcgtaaccccgatgctaatccgttccgcagagcctcttcaaaattttttccattaccgccagagttgncgaaaatgtgaaataatctcagaaaatggctatctcttnttanggacattttctat

SEQ ID NO: 33648 - DNA, 875 bp, Heterodera glycines
atgattagctgtgcctttccgacttttatttttctttctttctgaaggtgcatttcgctcgctttgttctgcggctttttctactccatcactgtgattccggtgctttgtaagttccgtaaaagcatttgtttttgagttttgtcccctcagtcatccaagataatccccagctgtttcccgacgcccctctcagtggcctcaattacattttttcgcattacttcggaatctttctctccgcttccatcatcttcatcatcaatgcactcattaagtaacaattaattggtcatttatcattttgactaggcgcatttgtcatcacattggaatgtttttcaaaattgcctagttaattagttccctaattagatatggtcggcacttgtttgtttctcattacctcccccccttaggcgcaataaccccaccgtcaatggcactgtcattttaccttctttgctcagcggggccatttggggctgtggcatggcatgcttatttttggccaatgaccttctgacgccaactgtcacttatccggcaagaagaatcgatcccctgactttgttcgctcttttttaccattgtcctcttttggccaggttctgatcactttgcccggttgtgtggcttctctttggagcatttacttcttcaaggaaattgaaatggtcagtcagtcaaattctgatcaatttgtaattaataataatgttgtttttcttcgttttttcacagaatcgtcgcaactctctgatcattttctgctctttcctttccattttttgcggtgcttcgatgattttcgtttcaaaatcgaagtcccgctcgacagactcttctcttccagtttctgactccacttaatt

SEQ ID NO: 33649 - DNA, 778 bp, Heterodera glycines
gcaataagtggtcaattaccattttgtttgcattatgtaacatactaatttaaatattttttgccatctttcgatatggggcctcaaaaattccatgagtagccaggaagaagtcagaattctcgaataattttggttaggatatatgtaaaaagtcatttcgtccaaaagttccggcggcaagtatttcatattatttgttgttgtagttttagggaattttccggatttcggtgaggggacaattttaatgggactgacttaggatgtgttcgaattattttaggatatttaaagagacacaatgccaaagattagcaatgaaaattgctctttggtcttttaaaatttaaattccaacttactcggttggctgacatgagaagttgtgtatgtatgtttctgagaaaaatttggttatagttagtagataaatgctctaaaatcgttttgtcagttaaatatatgtatatttgggtaaataaaatttggcgaacaatgcaatgaatggaaatcatgcttaactcgttaaaacttgttctcgcgggggttttgggaaaaatgatcacggtttgacatcatttttgacaaaccctatctaaaagtccaacaaaaagttgaaaattcaaaaattttcaagcttctttttttgttcaaattttacatatcgcccgctttcgttgtttacacaatctaattaatttgaatatgattaatcaacgaattaaaaagcaaatcaattttttattttaatacaattatacttgattatttaaag

SEQ ID NO: 33650 - DNA, 165 bp, Heterodera glycines
ctcccctttcgtcccccgccgatcacccgcactcccttttgtcctctgatcactcgtcttcccttttgtcctctgatcactcgtcttcccttttgtcccctgatcactcgtcttcctttccatcttccgatcactcatgttcctttccatctgatcagtttcccc

SEQ ID NO: 33651 - DNA, 805 bp, Heterodera glycines
aagttcagaacagtcttccacattattctgccgtcaatttgttccgcagttttttatccaatttcttgaactgcttcgcattctcggcagaaagaacaattgtccgctttggttgcggcgatcactttttggcggaagccgctgattgcgccaatcttcatgttgggccgcacttcgccagtcagcgtaatcagaaatctgcagacattgatttttagtctgaaaatttttttcaaataggcaagacgcgaaaatgtgaaaaacagcacaaaaaaagcttttcaaaaaataaattatatttttttgacctaaagcagggctgtcatcgtccatgctcagtttgcaaggacggttatgctgatttgcaaggatataacggggaaaattcatgaaatccaaggacatttaaaatttttgtttgaggcttcttggtccaactttttcatgatgatttttgcttaagttgatattttcgtgcttaatgctgagcatgtaattttgtgcttatttttatgcttaattagcaattcttgtaaaatttttgactaaaaacaccgtctcccgataataaaaacgaaaaatacaaccataagaatcgacttaaaaatttcaaaaaatacacccctaaaattgaaaaatttttcaaaaatacatcctcaaaaaatttatttaaaaatgtcaatttttgttaagaaaaatctgaaaagaaaaattgagaaaattaactgataaaattttgcttcttcttctacttcttctttttagaaagcttccagttgatccacctgccaacaactgtgacgtg

SEQ ID NO: 33652 - DNA, 824 bp, Heterodera glycines
ccgttccgaattttatttagttattttcattttcattttcatttttatattttttgtccccacaatttagcacatgcacataaataaataaacaactcttctaatgactgacagggaaaagcatttgcattttgttcgccttgcggaggaagcggcgcgttacgacgaaatggtccaggggatgaagcaggtgaaggaaggaaggaggagaccaattcagaagaatggacctaccattaattaaactttgcatgcttaaggtgattgaattggatgccaaactgaacgaaaatgaacgcaaattgttgggcgtcgcgtacagaaagtcagtcactgggcaacgcttcgcttggcgtgtcattgcgtccgtcttggcacgagggaaaggcacgaagagacagctggagatggtcaagcagttgctgaacaagctggagcgcgaggtggaagagaggtgccgtgaaatattggtcagtggtgggtgggcgcattcttgtgccgcgaaattcggcactaatttgcgtaacttttcaggatttgttggaccgggttctgatcaaggaggctgcagatgatgaagcgaaagtgttctacttgaaactgaaggctgaccacttccgctatttggctgagacacgggcggtgaaaaacggtaaaaggacagacggacggaccatacatgcacaaggcgtgtctcgacacaccccccccccccatcgttagtcgtaaggggggcggctgtaaaagaggggagtcgtcgtagagggaggcgttaacgaagggagaaaataaaaaaattttggaccttcgtatgaaaatcggtc

SEQ ID NO: 33653 - DNA, 1111 bp, Heterodera glycines
attgaatgtttgcttgccgttttggaccgatcctaccaattgcggcattctttttcgatccgacttacgccacagaatacggcaacaaattggatgctttattcaaacaatggcccgagccattattaattaatgagacggaagtgagtggcggaaaaacacttggccaaaaaatcattggaagtgttctacaaagaggaaaaagcccaacaaaaaagggcaaagaaaaggttaatgaggagagttcatcagcagcagaacaagaagcattcgtcatgaatcgtgcaaatttcgaaaatttaattaaacaaaactttgaaactgtaaaagcattgatggaacaaaacagcgcataccaagtgaatcgaatttatgaatggctttattcaacgacgacaaatcgacagcaagaaatgccaaaatcacagaccgaaacggctataccactcgatgatgactacgtgctcatgccaaaatcacagaacgaaacggctataccactcgatgatgactacatgctcgtgccaaaatcacagaccgaaacggctataccactcgatgatgactacgtgctcgtgccaaaatcacagaccgaaacggctataccactcgatgatgactacgtgctcgtgccaaaatcacagaacgaaacggctataccactcgatgatgactacgtgctcgtgccaaaatcacagaccgaaacggctataccactcgatgatgactacgtgctcgtgccaaaatcacagaacgaaacggctagactactcgatgatgacgacatgctcatcgcatttgtaacgaaagattatgccaattttgagaaccattgcattgaaatgaacaaacaggatttgttggcgcatgttggattactatcaaagcgaaagggcaaaggcaggtacgatattggagagaccgtacggtatttgaaactacagtatgaagcataccttggcgttgtgtatttgctgaaaaagaaatggaattgtgagaaaatgcaatatcctttgttaagagaatgcgaaaaatttcaaaaatatttgcttgttttatatgaatttttgttcaggaaataccttgaaggtaagtaagaaatttttcttaa

SEQ ID NO: 33654 - DNA, 725 bp, Heterodera glycines
  unsure (1)..(725): unsure at all n locations
tgataccaagattgtacaatttggttgcgtctgagaaaagttatgagtggatttagtcaaaaacttagcaaattttgcactttttgtcctccgacctaacaccgtcggcaacaattgaaaaaaaaagtaacagactgtgagactgaattgtccataaaagagggagagaaaagacaacaagagaaaaatataaggagagaaaagaaaacaaacagacgattagagagaaggggaatatttccttttcactatccatttttatatcccataaagaaaagcgagttgaaatatttgaaatttaactgtcagacagcaaacgccactaggtagcgaagcgcatctcaaacgaggtgttcgaaatttaatttttggggcgggggccttttttgcccctttaattgttcactattaagtgttttaatttgctttggcttcttttctaaaaaaaaaaatctttcataatttaaaatacacgttgaagaaaggcacatatccgacgagagtttcagttacggaagccgtaattttactgagaatgaaaacggagtaaacagttcgacacctgaaaatttatctaattnaaaattttacaaaaactaattttttaattcttttacaagaaaatttcaagaaaaaaaaataaaaaagtttttatatctatgctttttcttgataaaaatttgtttctaatttaaaaaatatgggcaattaccgtatatgctcta

SEQ ID NO: 33655 - DNA, 1020 bp, Heterodera glycines
caaacaacgtttttacgacaaaaagtgcagcaactgctccgcgaggcgggtatcccgacaactgaaccggaatacgatgcagaaatatacattcatcaagtgcaagggttgtggaacgtcaaatatcccggtgagtacaaaattttcatatttaacgattaccagatgagcccaatcaccaaatctgatatcaccgattaccaattccctattcttctctaccacaacaacaaccactttgacggcatcaaaactctttcaaaatttttcaacaaaaagaactactgtctctcctgcgagtcgccgtactacaagaaaatcgagcactcattaaaatgtacttcactctgccacgggtgccgtgaggtgggagtcgactatccatgtgagccccaacaaggatacagcaaaaaatgtgagcactgtaacaacaccttttacaacaacagctgttatgaacgccacctccacaaggatttgtgcaccaaatttcaacgctgtgaagattgtggggtaatttataacataaaggttcatgggagtgttgggcataaatgtggggaacagttttgtaaactttgcaagcaatttcatataaaagaagacgaagacgacgggatgaacccctgtacgaaatgtttcatccagcccctaaagcaacaacgaattaagtcatacaggatcatcgcatacgactttgaggcgacacaggacaagaaggtggagaaccggttcgagcacgaggtcaactttgcagcggctaccatcatttgcaccgactgcattatcaacagcgactggaacaaatcacttcagggaaaaaagtgccaaatttgcggtcctcaccgcacaattaccttttcaccttttgactacacggagacaacagtcgaccaaaaaatcatcactcaacacccgctacgcgaattcgtccattggctcctttttgacacaacaaaaatttcaacagtcgcgtttgcacattttgggggccgctacgacatgacgatgatcatcaag

SEQ ID NO: 33656 - DNA, 1246 bp, Heterodera glycines
ataaactcattgaaaacaacaaatttaatttaatttttgtttaatatttttatctttttgattgaccgtgggcaatttacctttttatgaaggtcaattcatattttttgtgaaggtcaacaaatatttttcgttttgttgtaaattacaaaatatttttaaattattttttactgcagttttaatgtttaacaaaaaatttaattgtttgtcaataaataaatttgcaaaaaaaatgctaagaaataatgaaaattttttctgggattattatgataaaaatcaatgtcaataattatttgaacacttggggaccggccgttgtggaccaaaaatgttatgttttgcctcataacttttttttcgtaattaacaaatccaacaaaattgctaatctgtgatagctctgaagttatttacttatttaacgagcctaaagaacgatttacaacaaaattataagcttggaccgtccgttgtgatcgctttattatttatttattgaccggcattaaaggacaggcaaataatttattgaaattgaacaaaattttttttctaaattttcaatttttttaaaaacatttttgtattcgaatggtactaagcttattgtatttggttgactatgcaaaaagttgtggcgtataaatgttttggtccgcattttccggtccgctaatgtaatcccagttttatcttttgcgttttattttgactccaattttcccaccaatttttgtgccaaataatcccttcccatttggacaaagtaattttctgcgggtgggagaatggaagcaccagcaaaaaatgcttccttaggctaacgggcacaagaacagccaaatgcatccaatttaatgccaaaatgccaaagcatcgaattcaattgggagggcaatttcatttgtttaaaatgccaaaagtcaaattaaattcaatatcaaattttataaaaataaataaaaattgaaaatccatttaaatttatcttttcaaattccccatttttaaattttcccaaatcctgaaaatttctttacttatttaactagtggcaaaaaaaaaccaattccatgcaaagctgtggaaatcggaaccgagttgttccggctttggtggccaaaatgagcggaggttggggggggggaggggtgggcacggcggggtgccatttccaaaattgcggttctgccgggaaggggagggggagaaatgccattccttccgcccaaattccagt

SEQ ID NO: 33657 - DNA, 779 bp, Heterodera glycines
tgcgtctggccaattgcgtctggccggttgcgtcttagtacttatggggccggttgcgtctcaaacatttggttcggaaaaataattttttttgatttatccgaaggcgcaaatattaataatttttttcttaaaactcatacgtatgaaaaagttacaagcattttttgagaaataaaaaaaatacggggttaactaattcggagtgaaattgtgcggggtggaaacatagtgctcccatatcagaaaattgtttttgcatttttatacatttcatttgttttaaatcttttaatatagcccgattttggcgctgtgaacatcagcgcgatgaattcaaatgccgaggacgaatccacacaacgctaaatgacgtcgtgctgaagaccgttggagaacacacgtgcaaccacagcgcggcaaatgtggtcacacaaaaaatcgtttctggcataaagcggcgtgccgttgagacgatggaaccaccagcggcaatcagggcgcacactcttcagcaaattgccacgccagtaatggcgaaaattccgacaaagaatgccacaaaaaaagtgaaaaatcgaattttttttttactttttcacatttttgtttttaagctggtgaagcgagacagcggtgtcttttaaggggagcttttcacatattttttaaatttaagaattctgatttttggccggcttgctttcggaaattgggcttccgaaatgaagtacatttataaggttatttatttatttataaagaaaagaaaaagtcca

SEQ ID NO: 33658 - DNA, 1232 bp, Heterodera glycines
taactaataatatctgtttttcaggttagcttggaaatcttttttacatataaataattgtatttttatttttgaatatttttggttttattttttatagaacaattcagaaagttgttgtaaagtgattttttgtttaagcatgtattagaatagtgcatgtatcgtgtttgaaatttgcttgatttgctactaacttttggccaaaatgatcgcttttccgttcagtcagttgatttttaatgtgtgatagagacaattaagactacataacttccaaactattttaaattaaacgccacaaacaacttttatgagtcaaataaaccaagcattttggtttgccttactgttgtaatttattttcttgtgattatatttaaccatttttggttcattagaaagcattaaatattttcgcattcataattactttaaattccattttaattccgacaagtaatttttcaatgatttaatttatgttaaatttattttatttgacgttttaaataaacaatgaaacagaaaatactttcgatattattttaatattgcttcttattttttagaaacaaaaaaaatctgtcgagtaacccggtgccagttagggagtgagtggacctccttgaacgtttcggggtttgtcccggctcctaacactgggagtgagggcgatagattctgtacttttgttttgtaaattaatttattcaccaaatatttacctatttttctatattacataattttcttaatccttgcgtttggcttatttggtttcaaatagaagatgaatacaacttttaataaatgaatttaatgacacttatatgttataaacaatatatttcattttttgcaggcatcgttaatgtttagtattattaatctaagcttttgcttttcaatattaaaagcacattttaattgatgtttattttaaatgataatgtccatatatgatgggtccactccaatcgactcattcttttttaaggctttttgttttattttatgtaattagcaattaatttgataatggatttaaaagttttagtttaattttttttatttgtctatgtgtctactcaatgtatgatgctaattcatgtattcagttattaattttattgaagttcaaaaaatttaagaatagtttaaatttttgggtttttcgatttcggttttttaggggttttaaccgaaaccgtccgaccaaaacaatcaaa

SEQ ID NO: 33659 - DNA, 461 bp, Heterodera glycines
tttcagagcagtttctgaaaaaatatttatgaattgattttgctaaaaaaataaaatagtgaagctttaaaaattaataaaaaattttaaattcagaattactggagttagcatcatagcagtgcttttccttgtctttttgatgctctcgcaaaatctggttcgcttctgaccagtttataaaaaaaaagttaagcctaaaatttttcgcatatttaaaaagcaattaaaaatttttagattttttattcatctccctttttgatagtgaaagcatctgagtgcctaaaataacttgcaaataaaatttggtggcgtttcagagcagtttctgaaaaaaatatttatgaattaattatgcaaaaaacaaataaataatgaactctcttccttaataattttcctgcaccgaaggtactcactcggccgcttcgcgggctcgaggagggacttccttaaat

SEQ ID NO: 33660 - DNA, 933 bp, Heterodera glycines
ccgaatggaacatttctgtggtcacaaagcttggcaaactaaaacatgccattaactcaacggatataattttattaattaggagaaatgaataatttaacttttaaaaaatactctgtgtgcacggccggaaaattgaacaaataatcgcaaatgttgctcacatcgtcgagggaaaattgcgcccattctttcaacagccgagcgaccaaagcgcgagtcaactcgaacatgagaaagtgatttttggtggcctccaagctttgccgacagtgctccacggaaattacgccttcgcgcagactcataaagagtgcctcggcatctttgcggtcttgggacgtcacttgatttggaggggcctgaaaaccaggaaaatggagaaaaacagcaaacaatagtcataccataataacctgagcagcaaattccaacttggaaagttcgttagaaatggaaacagccattgtgacgaatttgaaagagaaaggaaacagcaataaaaaatgtatgtaaataaacaatcttaacggaagttgtagtaatttatcttcagcttttggcgtttcggtttgctcaaaaattaacttttagcccaagaaaaaaaatagcatttcattcttcaaatataaagtctttgtttgcaacaagtgaataaataataaagttgtttgcatcactttcaatttattttctatgtaaaattttaatttcagaactttttatttacattaaaacatttcgccattttctcccttatttaagcataatttaatttatcggttctttgcagtttagaggacccaaaaattttgcaaaagtcccagtcatctacattcctatcttcctaccattgaataaagcaattatccaattataggacaccgataaacaaaaaaaaattacttgtatctaaatggaagttgaaaatcc

SEQ ID NO: 33661 - DNA, 903 bp, Heterodera glycines
ggataaattcccataaaatttttcaaaattttacctataaattggctaattttcagtgaaaaactgtttataaatgatcaaaatttccaattttttccccggcggcgcctatcggcaccgcctgcgccccccaaaactcctattttttcttagaaaatggcccaaaatcgcaaaatttggtaatttgatgaaaaactgttctccacggcgattcaattttggactcccagtgcaaataagtttattatttattttgtaatcagaacgccaaaactttgcgatacttaaattttttaggggattcccccttgtaaaaacacaagagccgatctcgagttaaaaataaaaaataaactgtgattcgatagagggggtcaaaatatgggcctatgcaaaattttaagaaaatctgacccgaggaaaatttttttgaccctagtaaaaatttcaataaatttaactcttttttagccaagtgcgctatttaaagccaaatcaaataaaacttacaatattctccagaattttctctttaaaatgaatataaaattattatatttggcctattattgcccgagttataagtctggaaaatttcataaaattgtcgatgttgtacgtaaccaacgctttttgaatatgatttttttttgacacgaaaacttttattaatggaaaataattcttcctttcttctttaaacgaagaaattgaaattaacacacaacatgaggaggatttgaacttgagaccccccttttggtgactaactcacagaccactccgacgaaaagtccaacttatttgcgcttggagcccaaaattgactcgccgtggtacaagaaaagagagcaaatacttgcattaagaaaaaaattgcgatgagaaaacccgaaattcata

SEQ ID NO: 33662 - DNA, 1228 bp, Heterodera glycines
  unsure (1)..(1228): unsure at all n locations
tctgccacgaccaggacgaggctgcccgagtgatgtcccatttcaaaattctaatccgcccgatgatttccaatccacccattcatggtgcgcgaattgcgtccaaaattttgtccgacccgaaattgcgccaacaatggtcagttgaaatggcatcatttgggggggggggaatgccaaaattaaataacttttcgtccaagtctttcaccgccttttaaaatagaaatcattcgtgatcatagactcaaaatccagatttatcactctatgcttaacaagtgtccaatcccaatatgttttgaggctgggcgatgtgaagggcatggccgaccgaatcatcacaatgcgctcccaactccgcgatttgttggccaaggctggctccaaacgcaattgggaccacattgtcaaccaaatcggcatgttctgtttcacgggaatcagtcctgaacaagtccgacatttctttgtgctattcccaatttccaatgattcaggtcgaccgactcgccaaagaattcagtatttatttgacgagggacggacgaatttcagtggccgggatctcatccaaaaacattgactatttggcaaatgcgctgcacgaagtgacgaaataggcgagcagtttatcaaatatgtcccaaatggccctcggaagtgctttaaagttatgcgatcgaatgtagaatagaacactttctacaggtgataagaacaacccgtgactctgtccccctttcatttctctgttttacgtttcattttgtaatatgacaggtttatagtaaagaatgcattttaaaaagttttggatattaaaggaaaagcaaaaaaaaagcaaacgactaaaaatttatcggattctctgtttgaatgcgaataacacaataaaacagtttaaaattgaggctgaataatttcctagtcagcgtttgtattcaaaacaaaaatgttaaagaaagcacacacagagatcaaaaggattagataaatatcatccacgggacgcgccaatggtcgaaattgttttgggtaaaccccgcccaaaatgaacctttccgacccatcattgtctgtttttcaatcccttgtttattttttagaggggaaagggggggggggagggtccgaacgcacccctttggacaataaattaacagatatangaatcttnaatttgttgtgggcaagaaacataaaaacaattataaaaggggggggg

SEQ ID NO: 33663 - DNA, 432 bp, Heterodera glycines
  unsure (1)..(432): unsure at all n locations
tttttattgaattctgaaccggtttgagtagattatttcaatgggngngnnnnttttgnnnnnnngnngggnnntcccttctggggggggnnttattttgnggnntttttttntgtgttttggttgtttggtnggtttttttgggttgtgtttgttttttttgttgtgttntgttgtgttttgtgttggttngattataaaaaattgaaaattttgaaattatgtttgataatatgttgtgataggggtattattttgtaaagtttttttttaaaaataaaattgtaaaaaaggatttttgggatagtgaatgttatttttattgaattgtgaaatggtgtgagtagattagaatagaaaaaattgaaaattttgaaataatgttattgaataaattgtgatatgggtattattttgtaaagtagttttttt

SEQ ID NO: 33664 - DNA, 947 bp, Heterodera glycines
atgtgataatcccactaaggagttagaagaatgtatcaaatcgtcaattaatgaagctatcgaagatgctaagagaactttgggtggcgcggataaagccggagtagttattttttcagaaatgttagatcaaggagacataattgtgccgataacacctattagctcaaatgtggcagacgcagtcttcaaccaatttatcaaagtagaacaaagtgtagcaagaaaaagtcttaacatttatggaacaccttttgtcattactgtaacagttcttaacattaatggattaagaaaaaataaagaataaattattattattttttttttgtaaaattttataaaaaatgtgaataaaatattaaaaattttaatggttaaaaatatgtcacacccttgaaaactgtcccagatttccaaggtaaattgaaaatttactcccaatttggtaaatgaaaaatatgtaagatttcaaaaaaacagcttcacgttcttagaaacccaaaacttgatatttgtaacccctacaattgaggaccatacattttgggaccctactttttttgggacttgacattagggatctgacatttggggaccctacacttgtgagcatttggggatcctacatttgcagagttgacattgaggactctacattttacgaccctacagtgggacaacagttggggaaccctacagttggggatctgacatttgaagacttgacactttgggaccctacatttttggggaccagacatttgaggaccctacatttacggaccctcgacatacaacatttgaatacccacagtttatgaccttattacatttggggaccagacatttgaggacttaacatttatgtaaccgatacttggtacctgacatttgagggggaccttaaattttgaagatttcaaacagaaaaataaaaatgatat

SEQ ID NO: 33665 - DNA, 1018 bp, Heterodera glycines
tgtaagaaaaaattttcccactggttttatttcaattcctttagggaagaaaaagcagaaatttgtagtggttttcgacaacaaaaaaaaggcaacgacgtgaaaacaatttttggaaaatttaatgcaatttgccaagaaaaatttcgaaaaatttgcccatttttttgaaattttttatttttcgtttcggggggggggggtggaattctcactcctgtctatggacctgcccacaacacacacacacacacacttgcaggcggcggatcagcgggacgccggaacgcgatttgcgtttcagtgaccaaaatgaataaatgtcgttcatgtagtttaggccaagccgttgcgcaatggcttgaactctgtgccaaataatttgcaagaataaatgttgtgccgccccgtcccggcgaccgcacttttccattggtatcactggcaatggcaccgagttgagtgtctgtttggcattcaagtcgatcattttccgggcctctttcagcttggtctccatttcgcgcttccacatcgtaacactttgaccattccttgaaaaaaaatgaacaaatgctcaaaaaaaggggggacaaataagcaaatcgttatgtgatgctagaaggcagatgaaaaaaaattctaaaaattccatccatttttaagcaaatcgctggatcaattgcaaatttttttttaatatttatatttaaattaaactttttttttgataaaaaacaaaacaaaatttttttatactttttttaaaagttttattggtagaaaagtgcagtgcatattatttgcttttaaatttcaccaaaataatgcgtgtacaacaaaaacaacatcattaaaccgcacctgtttggttccgagtgctggaagcaataggcaaatcggtcaattgttattgagtccgggttgttgcgcactcgcgactccttgaccaccattttcatcccggcatagcgagcgcaggtggcgtgaaatgagcgaacacaggccttctttaaga

SEQ ID NO: 33666 - DNA, 702 bp, Heterodera glycines
tgccgagcacgtgtaagttgtgagaaaaagaagtcaaagagtgagagagcggcgaaaagtgtgtatttctgtgctgtgcggcggagaattgaataacaaaacaccgccgcatcgacccccccccccgcggcgggcgggcggcgctggcagaaaagtgcaatgttcccgccaccaccaccgccgccgctgttctttcactcccgcccgatccacccgccagacgaggaaattggcggctgagccccccagggaaaaaggaaggaaagggcagaccaaagcgggaaaggacagcggcagaaagggtacacacagcacaacacaatacacggcgtgaagggaaaggaggggaggggaagggacgggcacacactctcgacccctccggcactctgataattttagcgataataatgggatgcataaagacgattgtagaaggaattggaagcgttacaattgtttgacaaccttcttgagcgtaattacgatttttacttataccatttttttctaggcttaaatcacctgcgattttcggctctctgataattttagcgttcataatgggatgtattaaggcgattgtataaggaattggaagcgctaaaattgtttgagaagcatattgagagtaattacgatttctattgaaccattttttctaggcttagatcacatgcaatttttggtactctgataatt

SEQ ID NO: 33667 - DNA, 958 bp, Heterodera glycines
  unsure (1)..(958): unsure at all n locations
tagggttcagccccgagccccccgacccgacccgagacgtttttttgacctattccacgacccgacccccgacatgtgccctcggcggtccccgacccccgactttttgcccccgacactaattcgggggattggggactccgagcgttgtagttttttggaaaaacacgccgcaaaaaaaaccagtttttgaaaaagcaaaaaaaggtcatcaaattcgacgttcagacccattcgcaaattagcaaaaatttcggtttaaaaagaaaaaatgattttttcgttaaaaaatttgttgatcactacccgatcggggtccccgacccccgacaattgagctcaccccgacccgacccccgacattttgcccaccgagggctcggggcttaaccctacctaaaaactaactattttggcagtttttagcaactaaaaatcgtatctctagttatgtacaacttcaaatggatatatatctccacggaatgacatattttatcctactgagccaaacccaaaaaaagtatcaatgatagaaaagattgaaattgaattatttaactattccaaagccaaaatcgggacttgccttgaactcaaatacttggtacatttgatagctcttaatgttccgctcttattattaggtatattaagcgggggaacttctgttttaggtgccccagtggtgtatggaatggctgaggcgtaagcagcttcagtccatggtctgttgtacgcagccgcgacggcttgcgactgtaaatgttgcgcaaagagtggcgaaagaaatggacgtcccggtaaactgtgatggcttaatccatggccataatatggcaaaaccanatgctggnggaagattgnngtgagctnttttctaaattacgcatttcaaaatagtttattgcatgaatgctagggnaatccgagcgattgcttctttttatgctttttt

SEQ ID NO: 33668 - DNA, 912 bp, Heterodera glycines
ttccatgtcaacggggtttgtcatcccgtttttgtcctaatgcccggatttttttttaattggttaggacctggatttcgagatataccgactcggacaggattccggagaattgtgaaaatgtggttttgagcagttcagtgttgtattcggggattttcgagggcgcacgtcacaaaacttacatccattccgaaacccgaattcgtttttttcgttttttactcaaaaattgttcgagtttgagtttgtggttcgaaattggtcgaaccggggcagtaattgtaacgataagcaatttcatcttttttttcatttgctataattcaaggatttgactctgtttggtggcccactgttcaccggatcgtttgttgctaaaatgagcaacgattggctggttggggctcagctcaaggccaacctggaacagggcactgttggcccgacagcaatttcgattgggcgtaagacggcggagtactcactgcactcgcataccaccgacgggacggactttggtgcaaggtttgtatggaatggagttatcaaatttttgtcagggttttaaatgccgaagtagaggcctaaaacgtatacccaagattgtaaagtgaaagttttaatcaaatttagtattatttttttccattgtattcttttcagtctgtaccatcgggtgcaccaaaatttggagtacggtgtgcagatgggttggaagatgcgcgacgccctggcgagttgggcgattgccaccaagtacaacatgagcccagaattgacccttcgtgcaaagatggaccacaagtctgttctgaccaatccgttttttaatctcttccaccctttttttttagtctctcgtgtccgtttctggaaaatttttgattttttttttattttttgaaaatt

SEQ ID NO: 33669 - DNA, 952 bp, Heterodera glycines
aaatttaaaaatacccattaattgtttatttaatgttacttgattttttaaataatttagactcgaatttcaatataatatatatttgctaaattatatcactttcaattttttttattattattctctctataattttataagataataaaaagtgtacatagatcgtgtatattcgaacgaaaactagagttaattctttagatactttaaattcatttttctattaaaattttaaactatccggccaaatagatataatttatattatagtcattttctaataaattatttttgaatttttcttgtttttgttttactgtttttttttattaaaaattatcattaatttcaaaagttttccccattggtgtcgttctaaattattgtaattaatgaaataaatacaatatttatatgaacttgattttttttttgtctgtgatattgcgtaaaaatcaaatggaaaatttttaattgcaaatttgtaaaatattttcaaaattttactcaaaattctcaaacctttcccagaagtctcagtcccggctgaaaaatgcagaccctagtgatatgcacagtccagaagtttgggtatattaaggatttaaaaataaaaaatattttaaatgtgtaaaaaatgtagccgtctaatttaaatagtaataaattttaagaattaaagtttttttaaagaattgtccactacattgactataaaatattgaataagaactgaaaatcaaaacacttaaaaatattggcgaaaaagttgattatgaaattttggcccaaaaaattaaatgaaaactaaataatttgtaacaaattcctataatataattagaaaaaaataatttttaaattttataagctttttttaactgttcataatcaatttacacttgcctaagtgatttaaattgtcaaaaaataaatatataaaaaaata

SEQ ID NO: 33670 - DNA, 1019 bp, Heterodera glycines
tgatcagaagcgcaccaaactttgcagggatactgaaaggaagagaaataacctattttaaatattatctagtcagttcatttaaataatttttatccaaaaaatttttttttgggttttcggggcagtccccctgaaccgatgcgcccagatttatggggagaccgaatccttcgggaatagcttccctatagtctgtactttaattctgcgttggagttttgctccccataattgtttgagtaccccaaacggacacttgaaaaaatcgatttttttgttttcggggcagtccccccgaaccgatgcgcccagatttatggggagaccgaatccttccggaatagcttccctatagcctgtactttaattctgcgttggatttttgctccccataattgtttgagtaccccaaacggacacttgaaaaaatcgatttatttttgttttcggggcagtccccccgaaccgatgcgcccagatttatggggagaccgaatccttcgggaatagcttccctatagcctgtactttaattctgcgttggatttttgctccccataattgtttgagtaccccaaacggacacttgaaaaaatcgatttatttttgttttcggggcagtccccccgaaccgatgcgcccagatttatggggagaccgaatccttcgggaatagcttccctatagcctgtactttaattctgcgttggatttttgctccccataattgtttgagtaccccaaacggacacttgaaaaaatcgatttttttgtttcataaatatttttttcagaaagtgctctaaagcgcaccaaattttatttacaacttaattttagcactctgatgctttttctatcaaaaagggagatgaataaatttaaaaaaatttttaattcctttttaaacaggccaaaaattttaagcttgtgtggtaagtgtgaagaactgtgttcctccaggcaaaaaatctaagaaaattattagcatttgaagggttctcagcagtttccct

SEQ ID NO: 33671 - DNA, 982 bp, Heterodera glycines
  unsure (1)..(982): unsure at all n locations
taaaattcaacgtaaaagcaacttaaataaaataaataggaatttaaaaagtggaatatttaatgaaaaaataaagaaaaagcaatcacaaaattaaattgttaaataaagaataaaaatgaataaattttgcgggaaaatatgaataaatttaaaattaaaaataaaatgccaataatgcaaatcaacgaatcattaattagtagtagggaattttttaggcaaatgcctaaaattttgtgcaattgatacgtacagataaggatggaaaaaagcattttccgcttagtttggggagtcaacgattacttttataatgattatttgtgcaaaattcgggatttttgtgcttaatgtgcctatttcataatttcgaaaaattccttaacaaaaatgcaacaaaatcgaaaacacacccctaagaaatgatcagaaaaaatttcaaaaaattgaccccaaagaaacgaaaatattctctcaaaaattgaccgccaaatttaataaatttgtctttgtccttattcgggaaaaaactccaaaaatttaataatcgcatttacaatccctatggcggctttttttggaaaaggtcgggattgggaccccgacaaaaccggcatttaaattccggtaatcctatcccaatcccgaatcccgggcagaaataataaagtttgaaatttctataacatttgcataaaataaaaataaaagtgtgtttagaaaaaagaatttgaacatttgcactattttggaaaaaatttactcagctcaaaaaggcatatttaggttaaaacctttcttcattaaagagtattaaaacaatttaaaaaaagcaaaggataattaacaaaaaataaaataaatttagtaaataattgatcatttanaacatgaaaaaacagacaatttaaacattctaatgtaaattgatggtaccgtgctgngtcgtttcataaaatagattttggagatgaatttt

SEQ ID NO: 33672 - DNA, 819 bp, Heterodera glycines
acagcaaatattcacgagtcgtgtactgcttcactgatttcttcacaatttatccttttgatagcatattatttaatcgacgttttcgaaattatattgggtaaaaattttaaaaaattaaaatggaagatttaaaatttaagtacattaacttcacagtaaaaattgcttataactatgctctaaagcagccgagtttttaattcttgatatcattcgatagcaagtgttctctatttgcttgcacaatttcaaaaattagttaatattcaaaaaagttatgacgaaaattttcaaaaaagaaggaaatttttttgaaattttgcagactgatagagaagagttagtgctatcaaatgtcagtcattaaaaacaaaaagtgcccgctgtgagggccctaagttagaatgttgcataaaagttaaaaaaaaatctaggcctctagctctaaccccctgggctgggtgcttctagaactttttttgccaaaagtatacagttcagtaccaggtgaatgccgcgccaggatttgatctgagcggggggtggccagcgaacttattgtagagctttgtaagctcaattttttgaaattttaaaatttcgaaaattttcaaaatttttcgagctaggcctaaaaaacggttttcgggttcttgaattttatgattttttagcgaatttttcagggaaaacggagaccactttcaagcaacagtttttcgagctctatcgattggtgggatttttagaaaattttcgattttttcccggaaatagaaaaaatttttggcctgagcgggacatttgagtcccggg

SEQ ID NO: 33673 - DNA, 1418 bp, Heterodera glycines
  unsure (1)..(1418): unsure at all n locations
tgatcatttcttcaaattacttatatttcatccaaataaataaaattattaattgttaatttttcataatgcattttgaagttttggggtgtccagatcacaatgaagaagagatcagaaattgatgtaaaagactttttaatcagtgtaaaaaagaaggcagaccatattttctttaaaaattaaacattatgccaaattaataaaattcaatgaaaaaaaaattccgttttgttcttcagattttgattttcaagatggacagtgaccgagtttaggcgggaaattttgccattttatcaaggacagatcaggctattaaaataaaataaaccattttttttcaagccaaatttgagatttttcaatttgtcaaaaaacgacacataattgtgcaccgaccaattaacattttaaaatgtatttatttgacaggataatgaatttacggccaaaagcagtcaattttgacgatgtgtggtcaaagctacgtgaaactctcgaggcgatcatttctctcaagccaattgagcgtattacctgggaccataattttaggtggatcatttagttttttttcttctattttcacgccttttagcgatatatactttgtttgtgtgagcgttcccgaggcccaatctcgacgactttatacggcggtcaaaaactcgttagaactacacactatttcaatccgagaggttttgccctctgatttgtcatttcatctttaccacattagtctttgctccgtttgtccggtgaccaattgctcagtgcgtacaacagcgaatgggaaaaatttcacaaaggcgccatttatttgcataatctttacgggtaagaaagcgaaaatcatctaaaaaatatataaatttccccttaagttatctgaacaaacaattggtcaaggaaaaaatggacgcggagtcgcagcatccttttgtggtggataatgacagcgacggtttataccctcatttgggagttggcgacgtgaatttcctcttttttaaaattgttttatttcacttttcccattttaattcatccaaatttgaaaatattaaatttctacagcttgccttttcaatttggcgaaatgagttgctcatgccgttggctgctcagcttgtggcccatatcattgagctgctcggtcggattcgaaatggtatctctgcttcatttggcattcgaatttcggacctccgggggcgccgtcctctcttttggtcgatgtcaatgaatccatccatcgggagcaaaagcacagtttttgtgcatgtccattggtatccgacaacagaggtgaggccctgctgaaatccgcttttcatttaaaacatgtcagntctacgaagaaatattcgagaaacactttcttggagcatctganaatactaccgacacta

SEQ ID NO: 33674 - DNA, 558 bp, Heterodera glycines
gtatgaatttcaattttttaaagcaaataaataaaataataataaatacagaacgccaaaagaacaaatacaaacagtagacattttattttacccttgattttatgaaatttttttagcttataactttttcaataatagaccaaacaaaaccattttgtgctcattttgaagggaaaattctgaagaatatttcttaattagtcaaaagtttaaaaaattgtttattggcaaaaaaatgaaccatgtgttattttatatgttagagacatggaaatagtgcgtcaaaatgagagaaaacgaaaaaactttgccctgggaaaaaattttttcctgtgggtaacttttcttgaaattttgcctaagtgaattttttggtcttttctatcgaattctcttttgttttttgaaagtttcttttctaactcgagatcggctcttccatttttacaagggaaaatccccaataaattttaagttttgcaaagttttggcgttctgattactaaataaataataaacttgtttgtacttggagcccaaaattgactcgccgtg

SEQ ID NO: 33675 - DNA, 719 bp, Heterodera glycines
ccatttatcagaagtgtcaaaaaatcgggtgctcattaaaatgtcaggtgaaattacaaaatttaaacatatatttatttgaatttgcattggcggaccaacctggcccggccttgagctggaagtagcccaggttggccatcacaatggtgtcgaacagtgccggctcagcgcgcgtgcccagcacaaattggagtccacgcggcggattgcccgatgggtcctcaaaacaatggccgtccagcaaaatgtgccgaagatgaaacaccgcaacaatgtccttggaggcctggaaaagtggcaaattttgaaaaatttggatgaattctttgatcaataaattttgaaaaaatcactaaaattttcgaagagttttattttaagaaaatttcagtttttaaattaaaaaaatcgttcgggagaaaaacaatgcggagggcgcaccccaatgaccatggtaaaaaaaaaaattaagttaaaatttttccctatgaagcctaggacaacaaataccataaaatggtaaaagatttcttaaaaaatactcatctttttcgttaaaattttgtttttttttgtatttcagaaaaacccagtcaaaaatttttttgaaaattttcagcaatttttggaaaaatttaaattaaaaatcgctgaatttttcaactattctttcttaaaaatttcttataaaaaaatttctaaaacatctcaaccga

SEQ ID NO: 33676 - DNA, 609 bp, Heterodera glycines
tgtggggcacatgttgacactaatttgggattgataggaacgaatattttttcttaggcccatcggaaacttattcaggaatgatgacacaatgacagatgggattttttgggttagactgtcataataaatcactggttcatccattcccttcgcagaaattgcacaccaatgagaccctcccttgtaatgtgggtcccggttcacaattagcgctgcgggatattgtagagtgaccggaggcggtaattggtcactggcgaagcagccccgaaagacttgtgcggtcccccggttttcgctcaaaattgatgtgatttgcacgctgtccattcttcagccaaaaaatagagcaaagttgatggagaaccaggctaacaataagcatcaaatacaatgcgaacaccgcccagcaaacggcttgttggaataaattcccctcttctggtcgatctttgcacaattgaatgagtggtgtgagaccagctgacacttgctcttcaattaacttgtcactttttgggggagaggaggtggtggtagttgatgtgaccgtaaatggaatcgttgttgtggttgtggatgtaagcatggcctttcttcttatat

SEQ ID NO: 33677 - DNA, 1006 bp, Heterodera glycines
agctgtaaaaaaattttggggcgatttgaaagaggaatagaaagaaccaggtttcgatgaagtttttgtaaaccaaaaaaaaatccaaacatttaaaaatctataaaaaaatttaaaaatgagaattcatgcgagattttctggaaataagcttaataggccctagttaagctgtaaaaaaaatttggggcgatttgaaagagaatagaaagaaccaggttcgatgaagttttggtaagccaaaaaaaatccaaacatttaaaaatctataaaaaatttaaaaatgagaattcatgcgagattttctggaaataagcttaatagggccttgttaagctgtaaaaaaaatttggggcgatttgaaagagaatagaaagaaccaggttcgatgaagttttggtaagccaaaaaaaaatccaaacatttaaaaatctataaaaaatttaaaaatgagaattcatgcgagattttctggaaataagcttaatagggcctagttaagctgtaaaaaaaatttggggcgatttgaaagagaatagaaagaaccaggttcgatgaagttttggtaagccaaaaaaaatccaaacatttaaaaatctataaaaaatttaaaaatgagaattcatgcgagattttctggaaataagcttaatagggcctagttaagctgtaaaaaaaatttggggcgatttgaaagagaatagaaagaaccaggttcgatgaagttttggtaagccaaaaaaaaaaaatccaaacatttaaaaatctattaaaaaaataaaaatgagaattcatgcgagattttctggaaataagcttaatatcgcctagttaagctgtaaaaaaaatttggggcgatttgaaagagaatagaaagaaccaggttcgatgaagttttggtaagccaaaaaaaatccaaacatttaaaaatctataaaaaatttaaaaatgagaattcatgcgagattactctagagatccccttaatagggcctagttaagctgt

SEQ ID NO: 33678 - DNA, 804 bp, Heterodera glycines
aaaattttataaactgaatatttcggctaaagaaaataacttatctcattttaacgagtttgaagcattcgcattagagaaattatattagctttattttattacttttctatttaccaaagtatggaaattcctaattttacatgatgagacaacaggtgaaaaaataataacaactgttaactatattacattgcatattattatacctattgtataacaacgtattaggtctagaataggaatttgaactaaaatttaatgatcttgaatataaattgtagtagtttttgccagtatcaagaatttgaaaaattatttattctaattgaacaaaatgatcgcaggaattatataattagtattattggtgataatttgatgaatgattgctttttatttaaaaaatagagattattgaataaatttaaaagttatttattattttaattataagttaaaagtttattttattatatttattataaattaaaagttattttatcatttttaattttaatttataaatattattaatttatttaatttaaaatcataagaacttatctgcaaatatttattaattgaaatttaaaaggactttgtacaattatttggaaaaataagtaaagggtacatattttaaagtacataatattaagcaaaacaaaaaatgtaaaacaagacaaaaaataattaattaaaattaataaatcattttaataacaatgtttgttgttcagtttaataatttgtttaatttttttgaaataaaataaatagttaaaataaaaataattatat

SEQ ID NO: 33679 - DNA, 867 bp, Heterodera glycines
tacaggaccagaaactcaaaatttctgggctctaaaaagaaacacatattgataaacagtaaaaaatttttttctaaattttagacatgggtaattccggtttcaatgccccaggcgtttactgtgtgcatgccaaagtttgtggataaatgaatagcggcgattaatggtgcaaaatttgaccagcaatgacaaaattcatgaataacctcgcaatgcttatgaaattcttatcagtattttaataaaatttattacttcgaaaagtgtaaagttttaatgaaattttttctttttttttctctatctcaacttttgtcaagaatattcgaaattcaaattgagaaaattaagcgataagtttactgtttaagctttttttgatttttaaagtaaaatggctaacgatgttaacaaaaacaaaacctgaaatacaccacggcaaagaaacaaacaccaaacaatcccattttaagcaagaaaatttcgccatttatttgctcaattttcactgatttattttccattccaattttattattgtacacattttgtttgttttgtttgtttgtcgtcgtacaaaaaataatagtgcgaaaaatagtgaaaatgaacaaaaagagatttgtcagctcccccccccccccacactttagaaaaccaaacaaaatttgttagtgcaaaaaaagcaacaaaaaactacattttttgttggtaataaaaaaactaattgagaaatgtacatttttaaaatcgatgcttcaaattttcataaagtaagctcattttaatagaaatgaaaaattttcagaattaattcccaaaaactttacaaaatttgaattttgaatacgaccctgccaggcc

SEQ ID NO: 33680 - DNA, 934 bp, Heterodera glycines
  unsure (1)..(934): unsure at all n locations
ccttcatgcgaaagaatgaaaaattgtgccattttatcaacaaaagttgcaaaaaattgtcttgtgactcgatgattattccttcattatttttatatgcgaataaaaagccgaattcattttgtgccttttgttgcttttggcgccatcccgcaattcatcagtggtcatgagcttggcccacttaattaaattaccgacagcacttccatcatgccaaactcggccataaaaagaaaacacgcggaagcattcaaccgcaacaaaagaatttttacgtttcatcaggcaattaaagttttaaatattaaagtcccttgggggtgctaaaattttagtcatttctggttaacctaaaggaaggaagtgatatgatcacagtggttttatttattttttatccgtatcgaattatatttgtatgaaaaaattaaaccattttgatttcgcaaagttccttatattcattaagcataatctaaaaatctatgtgagcatcattataagtaattaagtgcgcctagtttgtaatgacaatttctcagatccacaatgtctcacaaattttaactaaaactcaaaccccatgaggcagataagttggcttgaacccctcataatacaaaggtctccccgggataaaagcttttaagaaattcacgcatcattctccttcatttttttgttcatccattttttatgccgtcacccactaacggcgccgcgttgtcgccggcaaaattcattcgcataaaagtaagttggcactggcaaaaacaattgcatgatggaatgttaccaaatacaaaaagtgacgaaaacgaaatttgagttttcagcactcgaaatgccgaaaaatgacctgtacaatttcttaagattnnnaaaatatataaaatgaaatcaaattcatgtttttgcagatttcactaat

SEQ ID NO: 33681 - DNA, 840 bp, Heterodera glycines
tgacaaaacgcccaaaatagtgatttttaactattttactgacgaaacgccaaaatagtgatttctagtgacgaaaagtgacgtccaaatgaaaaaattttaacgcagaaatgcgttttttgagctcctttcttcaaaacaattgagcaaaaaaaaagttttttcactaaaagttgctgccctaattattatattataaaattgaaaaattaatttatttcccattctctgtttcctctcttttcatttttttgtttttaaatttaaaaattgtcatataaataactcatcgccgaaggaagcactcgaccctgttgcaataatgttcggactcgatgtcacctacattattctagctgcaataaaaatcatcgaaatttaatttcatatgtttttatcagttcaataatgttatgcgttcacttttctgtatattttcgattattttaaaatgggcataaattttgctcttaattttttactcttttcttaattacatatttaaagactatttaattggaaacatttttatttgaagatttgcggaattaatatttcatttcatacgagctgatatttaatatttattttataggttttaaattttcgatataataaaatgcgtattttaattgggttcatgtttgtggtatattgtagtcagtatacataaccattcctgttggctataattcaacatcaaaacgggagagctaaatattatccaattgtggattacatttagactgatcgcttgggcacatttgtgcataactagacttgcgcctcacgagtataaagttagctgtatccaagagaatattaaacttttgtcgcttt

SEQ ID NO: 33682 - DNA, 1230 bp, Heterodera glycines
atataaaaacgcaaggaaaaactatttttgaaatttttctttataatttttaaaattattcttcttttagagaacccacacttatttgttagtaactatttgaagctaacaagaacataaaatgtcgtaaatttgaattttatttttggttttttgaacatttgcatatttataaaaaaataattacattaaattaaaagaaattaaatgttttaaatctaaacatttaaattattttgtttaatttattaagcaattaatctaaaaatcaaaaatgtcttgaatttttcataaagtgtcctggttttgaaatagtgaataaacaggcgaaaaatttctaattaacgtcatcaaatttatagattaatattatttcaataatatatattcgatattaaacaaattctgccaaactgagtaatttttttttgataaaattattataattcaaaaagaattcatttaattgtataaattttgaaaatattttaaaaccatttagactgtcattgcataaaaatgaaaggatgcttattaatttcttcattatttgcatttttgattaccatcttaattagtaataattatgttggatcagaaaataaaaaattggaacagaaatcatttgatgaaatatttggagaaaaatgggaagaaaaaagaaacgaagaacagaaaaaaagagaaataattggaaaattcaataagataaaagagaaaattaagcaaaaaggaagaaaatattcagcaaaagaatagagtaaaattgaaggaaaaatagcaaaaaaattgtgcacaaatcgccgatatattcaaaaatggatcaaagaattgggattaaatcagagaataaatcattcgagattaaaaactgatgaagaaaaactcgaaattattcgaaaattcaatgaaatgttaaatgaatataaacaaaaaggaagaaaatattcgaaaaaagaatgggacaaaaattatgaagaaatttgtaagaaagtcagagttagccttttcataattagaaaatggagaaagcaattttgaattagccgaaaaataatagcggcgaaagaaaaaatggagaaaatgaaaatttattggcaaataaaaagagaaaagccgaaaatgagtgacaaagaaattggaaaaatgatgaaagttcatagaaataccattggcacttggaagaaacaatttgggaaagaaaaaacggaggaatgaaaaacggatgaa

SEQ ID NO: 33683 - DNA, 1109 bp, Heterodera glycines
cttagggatttgttgagttacagttaaattgtcgacttattaccaaaaaaaccggcaaattctgccatattactgatcactaccatggtgaattttgtacagcattctgtcctgtcagggctctaataaaaatacaaacatttaagactcaaagttattttttaattgaattttaattcttacttcaaaatatattaatatatcaccaaaaaataattatacattaattttaaatatttaattttattaagatttatttaaatttttaattctttaaacacaatatccctttttcttagactgagcataagatctttaaaaatatttgtacttaaaatagagcactgcacgcacctctcataattaataattgtgtgtttttgctctgcgctaggccaaaaaagtgcataaaattatttccgacggatatgtttaatttaaacacactaattttttattgtaattttttttgttgaaattaaaaatcaaaatgtccaatattttcgctttttaacaattgcctggctaattaaaaatgattgggcgctgaaaagtgaattattattttggacttactcaatttttccttattttagctctttgttcctgaaaacatgtcacataaaattgttcctcaataaccaatctgaaatctcaagaaatcgacttttaaattttcaaaaaatttttttaaataaattcagtgtgtaaatttaaaattgggacgcacgtttttcgggaatttggccacttttcgtgagccgagtttttaaatagggccaaaagcctaaccaatttgggcagttttatcacaaaagcccgaccttcgctatgtcttacggtatatgtacttggggttaaatggatgcttgcgtataaatagaatttgtaaaatgtataagttgtgttattgaagcttaaattttttcttttctaattccgcagatcggattaaaaaaagttaccatataaagtaataaatagggcgcgggtctttaaatttttacttattttttctgcggctttaactaggcgagaaattttccagtaaatattttttttttactttaagggaattttttgtaatttattttctttcttatcaaaat

SEQ ID NO: 33684 - DNA, 791 bp, Heterodera glycines
  unsure (1)..(791): unsure at all n locations
ataaattaaaccgccaaatatttttgccctttttaggttctattatttatttcactttctcggtcgaaaacgagaataaacgacaaatttaatttattttaagggtcaggatcgggatcccaaaaaacaggattgtcccgggcaggattcaagttccgccaaaattgggattttaatctcggcaatccaacccaggctgcaagattccaattccgaatccggacccgtcatttttgtattatttttaaatttaaatatccttttttctattgaagtgatttttaaaatttttttacaatttaattaaaaaaatgcatcccttaaatgtgatttaaaacattgattaattttatggttgtcaaaaacgagcaaacagaaaattttcccacggtaacatttttttattttttaaaacctttccacttcatccaaaaaaaaaattctttttcggaatttctatgatacattaggatgaataagttcgacccaatattcacgaaaaacacacttaatttttctggttggtcataacaaaagtaaaaatgaaaaaaaataattaaaaatttgagtttttgtgatcagttggatgggaatttattaatcgtgaaaatattttttttaatattattaaataataatattactaattgcgaccaatcagtagagagaaatctgtcaatatttcactttannatgtgtaggttttagaagagaaaaatataagaattcgtttttgagaaataataatatcattcattattattgcctttcatttctgtctattaaataaa

SEQ ID NO: 33685 - DNA, 1218 bp, Heterodera glycines
  unsure (1)..(1218): unsure at all n locations
caaaaatnaggaaaagcatcaaaaaattatatatttaatccattgagagttttttcctacatttaagtgcataatttaaaaaaaaaactttggtctccagtttgtaaaagcggggttgagattacgtgccgaactgcttcgatagctcaatggtagagttttggccatgaaaagagtgcttgagtgggttcgattcccacccggcacctaacattttgtccctttcttattattacatgatcaaatcgaacattattataatacacacttttaacagagctgttaatgatttattataataaatctttatgcattttttttttgattttatttgcatatttgtcccaacatattagcataggaatttctttctatttttccccattaactaaaagtggtggctgaattttatttatttttccatttattgcttttggtctattaaaataataaagtgatgatcattcgatcaattctcgtaaataatttctttaacttttttaaattaattttaaaaaaattgggacttttatttacatttttttggattttatacatattatatatatatatatatatatatatatatatatatatatatatatatatatatatatatatatatatatatatatatatatatatatatatatgtgtatatttagacacatagaaaatcagcgccttcgaaatgtaaagaaagtaaaaatgacccgcaagcgtgcataagtgggcgcgcgcccatgcgaatgcgatgcgcgcgtcggggcacgcgaatgcaagcgcgaatgatcctgacacccggcgggggaagagacgtaaaatattgccgtccttcgacctgaagcagacaggcatctaacaagcattgattgtgaatataattaattaatcgtgtattgtcgaccgctgccctcccaatgtggtgcaattgcggaactgttcggaggagtcaaataactgaacgaaatgtccatttggcgagcagacaagagaactgaccattttgcaccgacaaacgaacagaacaactcctgcacaacatcgcacagataccaaatgtttgtcgtcgtagcactgtggtcggtcgaattgtgccgcccgtccccgcccaaaatgtcccccaaacggcggcggcagtcgctcgttcaccgtcggcacaatctagggggccgtcggcacatcattttcatatagagaccagttcacatccgtgcc

SEQ ID NO: 33686 - DNA, 653 bp, Heterodera glycines
agaagaggggagagagagagagtgaaagggggaaaggggaggagaaaagaagggagagagagagagaatgaaggggggaaaggggaggagaagaagggggagagagagagagaaagggggaaaggggaggagaaaagaagggagagagagagagagtgaaaggggaaaggggaggagaaaagaagggagagagagagagagagtgaaaggggaaaggggaggagaagaagggggagagagagagagaaagggggaaaggggaggtcaaacttatcgaagattgattgtgatagtacggttttgtgagacgaaaacaaatcgtgatagggaacgggagaatgacacttatttgcacaccgaagaattaatagaaaaatattcataggactcttaggactggtaaaagttggtatttcttttcgggattctcgagggtttacgacccttcgtttctccctacctgagaagaatacgcgccattatccctcggccatttggagcaaattttgtgctctttctaatctttacaatcgccttccccggaaattttttccaggcatttaggaatttattagcatgctttctttcacattttatccagcgttacaaacttatatggcgtcaaaattttgagttttatcattgtgaaatcc

SEQ ID NO: 33687 - DNA, 1008 bp, Heterodera glycines
ggacattccaaagaatttcatgccatcaaaatgcccattgttaagctgctgctgtccgacaaggcgccgatgcgttggacaaaacgacggtgcgcatgcagaagatcgcaacggcttacggcgagctgaacgagtgcctgaaaaactttgtgaatcgggtggacccgaagtgcgactacgtggtcaccagcccacagctaatcgaggctttgctcggcttggaactcagcgacaccagcacaattggcactttcaggaggtaaactgtgagaatttttcgacccaaaatctcagaataaattctcgggtctggaaaatgccgactcttgaggcgacttgtgtatagtattagccctaaattacgtgccttactcctccgatcactgatcaaagcccgggaggggatttgttcggcgaatctcggcgagcgataccgtcatcgtgttgttcccggcaattgttattttggctttgttcggtttggccattatgccctttttccagggaccgctccgagtgtgagtacagctccgcctttctctacgagtgagcactgctctccgctgagttggccctgttctgtttggtggatttgttctggcgccacagattgctcgccgcctttgtcacttttttgctgtccgccgccgttcgccacacggtcaagctgtacttcacccaccaattggccaagagcagcatggtggacagccgatttctgatctgatcagaccacttctgctatcagaattgctgatctgccctctttaaattgcagtcccagttaatgggatgtgtcaaactaattgatcaattatcacttttttattaattttaaatacaatagataaacaatcagttaaattccgagtttccaaaaaggaaacattttccgtgccattttcactgtttcctccggcgttctcagccaattaatggtcacattgattttctgcatttgatcataattgccattgatcagttccaactgttcctttgctgtgacaa

SEQ ID NO: 33688 - DNA, 647 bp, Heterodera glycines
  unsure (1)..(647): unsure at all n locations
agttanagctgtaaaaaaaatttgggggcgatttgaaagagaatagaaagaaccaggttcgatgaagttttggtaagccaaaaaaaatgcaaacatttaaaaatctataaaaaatttaaaaatgagaattcatgcgagattttctggaaataagcttaatagggcctagttaagctgtaaaaaaaatttggggcgatttgaatgagaatagaaatagccaggttcgatgaagttttggtaagccaaaaaaaaaatccaaacatttaaaaatctattaaaaaaataaaatagtgaagttttaaaaattaataaaaatttttaaattaagagttactggcgttagcatcatagcggtgcttttccttgtctttttgatgcccttgcaaaatctggtgcgcttctgatcagtttatataaaaaaagttaagcctaaactttttggcctgtttaaaaaggaattaaaaatttttaaaaattttattcatctccctttttgataatataagagtcagagtgcctaaactagcatgtaaataaaatttggtgcgtttcagaaccctttctgaaaaaatatttaagaattaattttgcaaaaaataaataaataatgaaccctcctccttaataattttcctgcgcccaaggta

SEQ ID NO: 33689 - DNA, 203 bp, Heterodera glycines
  unsure (1)..(203): unsure at all n locations
gcctgcannggtccggacaataaaataatttattaattccatttttaatcattttaatatcaatcgccaaaaaaaccacctatatagtaagaaataaacttttaaaagtctgagatttctatataatttaactaaaacaaaaattgacataatttaaaaatatattgatatatttgaaataatgatgcatactattgtgactg

SEQ ID NO: 33690 - DNA, 953 bp, Heterodera glycines
catttcaatcactgggactcaacccaccagcatttcaatcactgggactcaactcaacagcatttcaatcactgggactcaacccaccagcattccaatcactgggactcaacccaacagcatttcaatcactgggactcagcccaccagcattccaatcactgggactcaacccaacagcatttcaatcactgggactcaacccaacagcatttcaatcacttgaactcaacccacagcattccaatcactggcactcaattctcctgcatttcaatcactgggactcaacccaccaaaattcaatcactgggactcaacccaccaacatttcaatcactgggactcaacccaacagcatttcaatcactgggactcaacccaccagcatttcaatcactgggactcaacccaccaacatttcaatcactgggactcaacccaacagcatttcaatcactggtactcaacccaccagcattccaatcactggcactcaattctcctgcatttcaatcactgggactcaacccaccagcatttcaatcactgggactcaacccaacagcatttcaatcactgggactcagcccaccagcatttcaatcactgggactcaacccaacagcatttcaatcacttggactcaacccacagcattccaatcactggcactcaattctcctgcatttcaatcactgggactcaacccaccatcattcaaatcactgggactcaacccaacagcatttcaatcactgagactcagcccaccagcattacaatcactgggactcaacccaacagcattccaatcacttggactcaacccacagtattccaatcactggtactcaattctcctgcatttcaatcactgggactcaacccaccaacatttcaatcactgggactcaacccaacatcatttcaatcactggcactcaacccac

SEQ ID NO: 33691 - DNA, 873 bp, Heterodera glycines
ttatgtaaatgctttgctattattgaaaaaatagaatttctttaattctgctgaaatttaaaaattaaaaccaattaaaatttatttattggaatttatataattatgattatatttatttacaaacgattgaaatttatttattctttatcgattctacttgccttgtataaaattatatgatcaaatagaattaaatttataaaacatttatctaagaataattgctgcaataccatggagaattgcaacattatttaaacgaataatacgcatttagttgagcttcggcacaaaagcaatctgccatatcggctcagccatttcaaaccaacgaacatgcctgttttcgtatgcacagaaaaaatttgtgcgaaacttggaacagaaagtttctaaaatttagaaaaaacaaaaatatagggatttgattttaaaacaatatggacaaataatataaagtcctaaaggagtatgctacttatgatgttatataaaatcttagaaccttatttgttaaatgaataacaatttaattaataaatttactaacaaaagaaaataaataaataaatttcaattgaaaaaagtagggttagacgggtccgggtcccggacccggtttttaaaaagaatatttaatttttattgtaaaagtaattcatttattgctcctgtggcctagtggatattatgttggattcatttggtatttctcaggtgtttaatttttttttgcaatatccccataagaaattttgaaaatttaaccctatatttcttgaaaatttgaacatttttggtagaaattctgtaaacatattggataaaaccacaaaatttggtcattttttaataaaatctgttaacaaa

SEQ ID NO: 33692 - DNA, 986 bp, Heterodera glycines
  unsure (1)..(986): unsure at all n locations
atttaattttcataaaaaaacaaaagtaatatttcttgattccatatatttaagtcattattaaaaaatgacgctaattgaattttcctcaaaaccattggggtgacccttttgtattagaaattatttgccataataatttttacgcaaacttccgcagggattttgagtggctgatcatctccgaaatcatttttactattctgaatccctaagctaaatttgaacaaaaaaccgaaattcggtaaatttgaattgccaatttttcgagttgggacccggattatgaattagtcaaattgatgttaaattcgtgacaacgagcgaaacccctgacaaaatttgttttttttatatttctttactttcttttgataagccatcttaaaatattttgtttaattttatatggatactgtactgtttttattagttaatttattttgcttcatttctattttttaatttgttgtttaatttttcttcgattattttgaatgcatttgtgcctcaacaacagcttgacacatactaggataatctatatttttattcgtcaaattttcaaaagatcattttattacatttaaaaaatttgaaaattttttacattaatattagtggcattacgtttaatcactttaaaatataatttaaaaaggttgaaaaaatcctataggatacttttttttatcaaatttgttaacattaagaaaaattttttgtttatttgagaaaaaatcattcagctacgaagtttaaaaatataatataattcatttttttcatttatttgttattttttcagtttttgcctgaatccaggtcccggggagcctggattcttttctctcttttttctatcactttaattgtccggtacttcagtctttcgcgcacaaatttaattttcacatttgaacttttctcccatatttttagcaaatttgattatccaaatttattttttaantttatttttaaaa

SEQ ID NO: 33693 - DNA, 850 bp, Heterodera glycines
  unsure (1)..(850): unsure at all n locations
ccccctcctccgcttccgcttcctccctccgatggatggcaaaacagcaatttggtgggtagcagaatcaaaatgacaacgcgaataaggcagttggaagaagacagcagcatttcaaaaacaaaaaagttaaattgaaaattaaaagatatcaatccgaccgagtttaacaaattaatttgatcacttcaattattgcctctctctctattgagtacaataatatttttatttaaatattattttttctgatcactgacgccttacaaaggagaattttcattggacaaaaacggttaataaatttatacaaaaggcgtataaaaagacaaaatgactacaatttataggcggaatgatcacagaatttgcgggggaactaatttgtaaggttaaatattgaaacgaaaaatgcaaaaggacagaaagaacaatgattaataaaattattcataaattgggctggcaattatgtaaataaatattttttcctggattattcatggtctaaatagtaggaaaacattttcttttttttacatatttcggggttttatatatatttggtatatatttttgattttttaacattttttaaaattttttgagaattgataagaaattccttgtgaaaattttaaaaattttggtttttttcaaaaaaggagataccaaaaaaaaaataatttttanatattcaaaaatgtgattctaaggctatttaggtcattttatggtattttgtgcctatttcatcctttgcaaaaaaattttttccaaaaaataaccattttcaaatttgcgtacatattttgaccactttttgtacatatttttgccagccctatta

SEQ ID NO: 33694 - DNA, 822 bp, Heterodera glycines
  unsure (1)..(822): unsure at all n locations
atttccaaanntttgttttggtgttatattatcaatattggtagttaatttatctgttttactcatttctcctatttataaatacataattaattttgcttctaatttttgtaataatataaaaaaactttgtttaattaaaatttaatttactacattttctttcccttattaataatttttagtttttattttagcaaatccattaaaataattcacaatagattttaaaaatatttctataaattatcgaaatgaccgcaataaatattttaaatctggttgtttttattccgtgtaaatcggcgcaaaatcatgtcttaatctgacgccctaaaacgctttttcgtgctttaattttttcttaagcttttattttattgctttaattcttctattttttgtgtataataattaatttcactttctcaaattaatattattgtgaaacttttaataaaccgttagaaatggatttttaatattttgactttgattagagtcatcaatttaaaaaggccccggctcgagcttaaaaagtagcgagtttttttattttaattttttaacagcttcaaattgcttcttaatccgaagttaattactattaaaaatcttttataatttaataaaacattaggcgcatttttaaaagagtaatcgtaaatttaacaaaggtgggacttggggccacaaaaatttcctcaataccgaatttttatttttgcggagccattctccaaatttttatgtgagaggatggttgacatcgaagaaattttaagaatttaagtgtaattagaattggccttttttaattaa

SEQ ID NO: 33695 - DNA, 899 bp, Heterodera glycines
atatggctatacctgttgtcggaggtagaattaaaaacaatattatttctatatttttattcactataaaaggtttccatagcaaaaataaattcttaatgatttttaaaaataatatcgtgcatcataatggcacaataaatactgcagattaaatgcggggcctgatgaacatttgatctagttcatattattattaactctatttctcgttacaaagtaatttttaaaaacgaaggaccaggtaaattcaaattttttactcttttctaaaattcacgacaaagcctaaaatcattttagaaaattaaatgatatggctatacctgttgtcggaggtagaattaaaaacaaaattatttctatatttttattcactataaaaggtttcaatagcaaaaataaattcttaatgatttttaaaaataatatcgtgcatcataatggcacaataaatactgcagattaaatgcggggcctgatgaacatttgatctggttcatattattattaactctatttctcgttacaaagtaattttcaaaaacgaaggaccaggtaaattcaaattttttactcatttctaaaattcacgacaaagccttaaatctttttagaaaattaaatgatatggctatacctgttgtcggaggtagaattaaaaacaaaattatttctatatttttattcattataaaaggtttccatagcaaaaataaattctaaatgatttttaaaaatcatatcgtgtatcagaatgacacaataaatactgcagattaaatgcggcgcctgatgaacatttgatctggttcatattattattaactctatttctcgttacaaagtaattttcaaaaacgaaggacccagtaaattcaaattttttactcatttct

SEQ ID NO: 33696 - DNA, 927 bp, Heterodera glycines
tgtgaaatggaaatgaaatgatgggattggacaaaacctttaactcgaaaatgagatttcgagatttttgaataaccggaattggacaaaaacaaaaaaaaatgtgaaatggaaatgatatgccgagatttttcggacaaattcaaattgggcaatttaaatgtttgactgttcgaagatgagacttcgaaaatttcagtccaaactgaacttgattgccttttttgggaggaggtgggaacggaaattaaagcactgattaattctggatgagaccagattaatcagacaaaggtcgccagttgtccggagcacgtcttggtagatggggttggccggcgcgctgagacgtgcaccaagacagtgcactcaattggtcctcgatgcgtcaattgtccgatgcgtccaatgtccaattcgatgcgtccaatgtccgaattcgatgcgtccaatgtccaaattgccaatgcgtccaatttccaatttgttcggctcgtccaatttgcaatttgttcggctcgtccaatttgcaatttgttctgcgcgtccaatttccaatttgccaatgtcagatacttttcacttgtaaaaggggaaagcaattatgaaattttgatgagacaaaattaattgaagtaatttaggctggaaccggttttccgccaaaatttgaaatcgagcagtttagttttgtgtggcggaaaacttgctcagaaaacctccggtttgctggttgcaaaacacaaatttcaatgaaattccaatgaagaaatttaatttcaaaaatgtgatgagaattgcaaaaaagcggaattgtcgattaaaaacaattttaagtgaataatgtaagagagcgatgggaaaaaaatgaatggcttaaatatggcggatgagaccgccgtcaatttgcaagagatatgtgtcgga

SEQ ID NO: 33697 - DNA, 882 bp, Heterodera glycines
catcttattttttggattcagggagaaatttagatttttattgataatttttgaaagaaatgttttttgaagcgaattaatatgcaaaatcttaacaagattcagttaaatattcaaatttttctttcttattctcttaaaaaattagctcaaaatcgtaattttgtcattttttgaacaaaatcgttaagaaatcgcattaaaaattacaaaaatttttccggcggcgcctattagagcaggggtgtatctgttcttatttctaagaaatgttctgatttggggtagtgtcttattttcatttaaaagaggaaatttctgaaaaatttggctattcctaacaaaattcattaaaaattcttaaaattttcccccagcggcgcctatcggcaccgccggcctcccaaaactcctattttttcttaaaaattagcccaagatcgcaaattttggtcattttttcggacgaacttgttaacaaattgcattcaattaaaaaaaaatttccctcggcggcgcctatcggcaccgccgaactctcttccctcacccatacccaaaacttttcggaaaaatgcgccgaaaaaattgttaaaaatctgttttttttattctaaatgcactgaaatttaccaattgcttatgttcgacaaaattgttaaaatcttataattgattttcggaaatgtataaatttctcatttctaagccgaaattgctcagaaaatagttggcggtgagtaatgcttgattttgttgaataaaaaagcgattcaaagttttggaagcgtgttttaaaaaatgtccttatttttgaccctaaaatcttatttttgaccagcgatgctcttatttcgggaaaattttgaagggtaaccctga

SEQ ID NO: 33698 - DNA, 1282 bp, Heterodera glycines
tttgttaccaggatgttcaatgcgccagaccagttcgccggcctcaccatcgttcccaatgtacgcgtactcgtcccccttgtccttttccgtcatccgttgcacgtcgcgggacgaatgcaacagactctgataaccggtgtaaacacgttgcccgctgaaggacggcaaaaaatttttttgtattgtaattggggataggtctcaaataattcttcgattaaaataaatttttcttttaaaaaaatttatgggaaaattgggtagattttggtcccttaccattttatgcaaaaccattaaattttaaaaaattgtttcgacaaaaggcgctcgaatgaaagttatttgaggatataaattcaatgaattgttgacaaattttttgggatgtttggacaaatgataaaaccatagaattatccgatttaatcccctctaaaagagatttagaataccaaaaaaatagacaccaattttaatgcctaagtaattaaggtaatttatttctgacatcaattatgatgcacttgcctgaagttgaacggtcgaacatattggtcacgggcacagtcgtacttgagcaggaagcaacgagcggcggacaattcgtccgcggacacacccaatttggacaccattttatagtcaacagcagtggtcagctgggccatctgtaaaataattttgctaaagtatcaaagcgattgaaaaatcgcatgtaatttttaattaacctaattattcgattgtactaaaaatgtaaaattttaagacaatgttaaaatacaaaaaaacaatagttaaaaaatataataaaaaaacaaaaaaaatagaagaattggaagaaaaaaaataaagaattaatgcttgttcgccagaaaggtcggatttctgactactgctcttagttttattttggtttctcgaaattcccaatggatcatccattaaaagtattcccgtaaccataaaatttaatgagcatctctatatattgatgtacttttgaatgattataattcaataaaaccaattatttacctgttttgtaatctgtttttcctcataaacggatgtgattcgctcaagctgtctgatcagtagcagatcaatcagttgctcaaagtcggtgaggtgctttttcagtgcatcggccagctcaataccgtacttgacgcggaccaattgcacggtacggtagcgctaaaaaaggatttgtaattatattttaatgttattgaaattattaaaattatttattttataattttcaccattg

SEQ ID NO: 33699 - DNA, 1151 bp, Heterodera glycines
  unsure (1)..(1151): unsure at all n locations
agtaaaattntaaaaatagaaaaaaaagatttattaaaaaaaatttacccagaaaaaccttaaannaatgtgcgatattcacaatcatacaataaaaagcttaatttctaaataaatttcaataagttagagaataataacgttaaaagcaattgaaaaaattatgaaaatgagcactcaaaataatgcttcgaaaattttgaaattcttatcattaaaatagaatttaagagaaataaataatggtttctcaaattatatgacatttaacttaattatgtgcatacatttgattctgagtttcgctttatttcttctcgtccttctaatggacatgctgtgggaaaatgaacaaaaatgtgccatttgttcattagtaaattccggcacatgattttctcaaggttttgccataattttcacacgttaattcttttttttagtacaaacgaaaataaatttgataagccattcaatggttttaaaaggtgacacggaaaagcacaatttggggatttaaccaaataataagcgaaatgaaaaatattttggtaaattgcgtgtataattggtacatctcaatcgcccggtaaaaagcagaaaatgtcgaataatttttttaactttaaaagtaaatataattattaattatgaattattgatattttaatccgaatttttagtgcatgaaaaaatgattaattgttcgtaagtttttgcgtgatgtttacgtttcttaattacgccatcctagttaataagttattttttaactttttttcatggcttttttttgtcataaaacccaagaaggcggtgtgtaaaccttttgcagttccttttctttttcttattataataatcatttacgtttttttgcttaatttcatagtgatttaaataattgcgtattttttggtagcatttttgaaattgggcagtaccgtcgggagaaatgttggcattcgttaaatattttgagacctattgtccctaaaaattgccgtctgagttagtcacaacagaagcatgcagtgaatgttgctattctggggtcaccttttttcccattttatcccgccgtttaattgtcttatctgctcttttttctcggtgtcgttaattgctttgctttaacactctcttaaacg

SEQ ID NO: 33700 - DNA, 960 bp, Heterodera glycines
  unsure (1)..(960): unsure at all n locations
atttttgaatcgcttttaatcgtctcttttgcgtccttaatcttcactctgagccgagttactgcggtctaaacacgtttttggtagaatgcgggccagaatttaaaaatacagtttgctatggcttcgcatcacccgcttcaacgggtgctcagtgtaaatatcgactggccattcaaattctgcctttccagccttatggaaagatattatggaacttttggttccatctcagttgtcaacgccgcgactgcatcgttattatatcagtcgatagaattttcgaatcgcttttaaatcgtctcttttgcgtcccttaatcttcactctgagcgagttactgcggtctaaacacgtttttggtagaattgcggccagaatttaaaaatacagtttgctatggcttcgcatcacccgcttcaacgggtgctcagtgtaaatatagactggccattcaaattctgcctttccagccttatggaaagatattatggaacttttggttccatctcagttgtcaacgccgcgactgcatcgttattatatcagtcgatagaattttcgaatcgcttttaaatcgtctcttttgcgtcccttaatcttcactctgagccgagttactgcggtctaaacacgtttttggtagaattgcggccagaatttaaaaatacagtttgctatggcttcgcatcacccgcttcaacgggtgctcagtgtaaatatagactggccattcaaattctgcctttccagccttatggaaagatattatggaacttttggttccatctcagttgtcaacgccgcgactgcatcgttattatatcagtcgatagaattttcgaatcgcttttaaatcgtctcttttgcgtcccttaatcttcactctgagccgagttactgcggtctaaacacgtttttggtagaattgcggccangaatttaaaaatacagtttgct

SEQ ID NO: 33701 - DNA, 956 bp, Heterodera glycines
  unsure (1)..(956): unsure at all n locations
attttggtttctttgtgtttacatgaattcgaaaagcgtatcataataccaaatttcgaattgcctatcaaaatagaaatgagtcgttagtccgctttacctggtccaagtcgccctcctccgcctcgtattcgtccggctcgtcgtcttgcgtctccccgtccgaatcggagccgacgtcgtcgcccgacaaagacgcttcgtcgtcgaacagattgacgctaaacaaaaagcaatgtttgctttggtttagctgtgaatggcatttaaattcacagttttctgttggtggccgtgtcgtccgttggcttttccttttgctcctttaaaccatccgctggcactttccttctcaccaatacaattccctcatcccccgactcatagtccacttcttttcccatcatttcttcctcttcctcctcgtcctcttcttcactcatttcttcctcctcctcctctgtcaccactccttccttctccaattcttcgttttcatcgtcattttcctcttctgcttcattgttctccacttcctcctccgccgcttctttttcccattcgtttccctctcctcctccgccctcctcattttcctcttgttccttctccccctcttcttcaaaccgttcattttctgcattccacaattgccgtcgccgtttgtaagatgccatctgtctaacttcaatcattttagctaaccttttcttctcttcattataacctgtttttgaattaaaatgttaaattatgcaatttattcattttatcttacttttcctcctttgtttgccttcgtaatttctaaaattaaataaccaatcaaatttttgtgattgtaatccgtccttacttttttttccgctcagaactttgaatggacgggcctaatttgcggtggaaccattggngtcgtgcattcgaacactcggagctgcnggaaacgctttttt

SEQ ID NO: 33702 - DNA, 930 bp, Heterodera glycines
  unsure (1)..(930): unsure at all n locations
agactggtgatgaggtgcccatggaattgactgtttcggcctcacttcctccgacgctttcttcggaaaaagagggagtaggcacaagactcatggagtgcgaaacgatggaaggcattcgacaacagcttcctcaaggcgaacaacacattcacttcactcccacgactatgacggagatgctagcgactattgggcaaacgccccgaaatgatcttacggcatcaaacggtaatgacacggaaagtgcccgtggagggggatgcaccaccgatggcacgtcgactacaactcccgcttctaacaacaacgacccatcgagtcactcacaacaacttgcatattcacccacaagcaaatcactaaagcgggagtttgcctttggaaacaacgcattccattcagctaacaatggcgaccatgctctaataacggttgggcacgttgacaagcgatcatagagatgtctcagtttttttctttttttggccatgacttttagcggatttttttaattttaaaagttattagttatcaatcgctttcgaaaaaaacaaatttatttgcagcaagaaaaaccgtgtcatgtacaatcgaatgccgacgaacccccagggggcacttgtgtggtcacaaatgtgatgccaaaattgattgggcccattcccgggctgaacaacggcttcaaagtcagaaataatgcagcggaagaggaggaactttcaactcgaagttgcttaaaatacgggggaagtgtttctgcnaaactttgctggtggtgctcaggtgacggattcacttccttattggtaccatttttgtccgtaaatttgcagggaccttcagggacaattttgccttacttttgccaacaatgcgnaatcgccttcaaagacgcgtgagtttccccctcaaattgctatttccttt

SEQ ID NO: 33703 - DNA, 948 bp, Heterodera glycines
  unsure (1)..(948): unsure at all n locations
aaaaaataaaaataaataaattaaaaagaaaaagtcaaccttttatcgaactcatgacagaaagaaatgtcaaggttgatgcaccgaccaatacaccatactacactctttatttaaaaatttgtgtaaaatgattaaaaaattcaaaattttgtgttaattttttgctttttctcccacgaaaatgccattgtttattttaaaaacccaatctttaggggtgtacttttttttcgcttaaaagccaaaaagcgaaaagcgaaacttgcaacatccccgataagaacctctttctgaattagtcaattcattttttaaaaggttcaaatacttaaataattttggaaaattacccaatccataaaataaacatactgtaatgtaattggtttattgtaagtttctttccattatttaataccgtaaatagaaaaaagaagtcccttgagaattcagcagaaaaggccggcaaagggtttaaaacttttttaggccttaccgtgtcgacaactttggcaccgccgttggcaccgggacaattagcaattcgcgacaaaatgccaagaattcgcgaaatccaaggagaaccgccaaaggcagaaacaattcacaaaaaaggcacaacaacaacaacaacaaaatgccctgctggggaaaaacttaatggcacaacaaaaaacgaaaatgtgatgacaaaaaggccacagaaagcagccgtaattcaccgaaaaaaaagtggcggcacgcggcgaaagacggcacggagaaaaacgacggcacaaatgacgacaacgacgagaacgacgacgacgaaggcacatccgcncggtggtggcacaaccgatgccccaacaattcgcagttccgcagggattggcattccgaacagcagcagcactgatcagacattgatcgggaggagcagagaaggacaaacattttgatgag

SEQ ID NO: 33704 - DNA, 1437 bp, Heterodera glycines
  unsure (1)..(1437): unsure at all n locations
gaactctccaaaaacatggtcgggcgaatgtcccttgcggcgacgtgctgaacgtttgcgaggcatagcaaattaattattttgcttttgaaaaaagaaaaagaaattatttgttaaaattaaatacaaacgtaaggttaaaacaaaatntaaagtcatcaataattgaatgatatgatgaatggacgaaagaaggacgaaaaataatgcctaatctaaatatcgcgctggtttgttaagttttgtacgatttcttaaagcatattgaggcaattgtgttggttcgcttgtatcattctctatgttttgagtatcactaaccaggtcattagcatggttttgcgcaggtaactctatttgttcttttataataattggatgagaatgaccaggtaaatcagcaatttcttcgctttctgcttccacaagagcattattttcttcgggactaagccagggagaagtgcaagctggtcctaggatttcaacgcatttcttaagttgattaatgtgaacgcggcgcgggttgctttggggcgaattgcaacttacaatggtaacataaataccgtcaattttaattatcctaaagacgcccttccacggcaactggaattttttggatgtatttatttttcccgcataatttcttagcaaaactctatcaccttactttagcttaggcgttctcattgttttgtcatactgtattttcattttttcttgtgcatctgcatgcacttctgaggcacttttccacgctctccgaagagagatcactagtttttgtttaaattcagtttcgtcagtaaatgctatcgggtctctaactttagggtctaaaatttgatctatgcaaaatatcggatcgcgcccaaacattaaaaaataaggggtctcgttagtagaagaatgaactgatgtattataacaaaaattagcataatcaaggaattcgtcaaaatctggctgttctttcgtaatgtacttagctaaaatattatgaaaagtcctaaaggtacgttcagtcgcagcattgccttgagaccaatgggatacagcatattttttatttatatataatagtgaacaaaattctcggaaaaactccgatgtaaaggcggtggcattatcactgactaattcagtgcagccaccaaattttaaatagcagttctttaaaaaggctatcgctattgtgtgtgatttagcgtcaggtaatggtaccgaaatgacatacttacaaaaccagcaaataatattcaaaatatatttatttccactaatagtcattgggaagggcccggccaaatcaaggcctacgcgagcaaataaagtatttgcgggaaccatttgcatttcagctctaaaagctggagatggagaatgccttaattggcaagtaatacattgtttgtaccaggataaaatatcaga

SEQ ID NO: 33705 - DNA, 960 bp, Heterodera glycines
ttgttgtcatttattttgttggctcaccagcaggctatacacctaaggggcttcaatttaacaagcccacttatgagggggaggggcttctaatggaggggcttttattttgaaccctttttaagaataacaaaaagttttaaaaataaacttctcgtttttactttttattgccgaatttttgtttggttcccagccatttttattaaaatatttttaatttcttgttttttgtgaacttttattgaaaattggggaatgatttgagaacaaaaatctcgcgctttggtaaaactcaggccaaactattttattatgcaactcaaaatgcaaaaaaaaaagtgagaatttttatatttctttttacagttcgacattccaaaaagttaaaaaaaaattaaagtcgtcaagaactttcgaatgataataagaatttaaaaaattaattaacattgccataaccacagggctcggatttaattttttatatgtttttttttgttgttgctaatattttatcgcatgaaaagctcaaacttagctttttacgagttttcttttcaatcagagcgattttttataaaataaaaaacatattttggacattctattaataaaatattttggctcatcttttggcgatttaaaaaaattggctttttcaaaaataaatttttggcactcaaatccttttgtaaatgtatgttgaagttaaaaaaaccaatgcacaatggaatctttaatgttttggatggcattgtgttagcaaaatggataaataagcagacttttttttgagaaattcacttattttagagcagttttgtttcagtttttggcacatatttggcctttttttggcgtttttggcacatataattcggccctgctggccataatttagcgctgcttaatgtttacctttttcatatgtgtcaattctctgtccaattcattgtc

SEQ ID NO: 33706 - DNA, 1037 bp, Heterodera glycines
aaaaggaaaggtcaaaaaatccagacaattatgccggttgattcagtataaggccaaaaaagggagagttgttccacatggacacccgacaaggtgtcccctttatcggcattcatttttgccaaattaaaatttcagttagtgagatttcaatagttgcacaacaagtgaacaaattaagcatcaacaccgagtttgtgctggagaaggttgcacaaagtatttgtgcaagtacgtgatgaagggagcggacatggccttcatcgaagttaagggcgggccggaaaagcaacagaaggtggattacgatgagttccatcaaattcgccttgctcgctacatcacttcaatggaggcctttctctcgctaaatgggacgaagcttgtgcgccgttcacacgaagtagctctattataacaataacaatgtaatattaattatgataaggtcgatgagctggatgtgcatggtccaagtggacaccggattgctgtggaatttggccttaaagatgaggaggaagacttgaatgcagtttgtgaagcagcacaggcggaagaagaccggagggcaagaggcgaagagcgcgtgactcagcttacagcgtactttgccttcaacaaagacaatgcaccgcttggcctgacatatgcgaagtgcaacaaaaagttgtggtacgacatcgcaaagaagcagtggaaaccatatgtgggccgagttgttccgaagttctgccgactgaagactgtttcgcctaacaatcgcgaactgctggtgataaatttctttctttcagcattagtaatttttcttaggcaattcgattgctccttttggtggtttgcgacccaactggctgggaagcactaaggacgcatgatggcattgtgcacggctcattcgttgaggccgcaaaggcccggggtctgctcagcgacaatgatctgtggatgaacaccattacggatgctttccaaacaaagaagtccatccgccagagaatcagatggctcgctgtgttcttcgcgactgcaaa

SEQ ID NO: 33707 - DNA, 683 bp, Heterodera glycines
  unsure (1)..(683): unsure at all n locations
tgacggagggtcgaaatcgaacaaacgnggggaaacaaacatattgccaatcagcgaaactgtattttttaatttggctggcaatgccaatggaaaatggcctatgcgcgtacttaatgagttggcttgagaattttaattggctaaacttttggcatttggtactgatttggccgcaaatagcactgaataccgtaccaattaacaaaatttaccaattaacaaaattagtgatgtatcatgaaaaatgacattaaatgacggctttttctataggtgaaaaagccattgaaatcccaaatttatatgtcgtaaaccgttttcggagaataatcggccaagggacttagccaacatttagctggctttatgatgtcagttttctttggcataaaatcggattttgggggcacttgagaatccggtgattatgacgaagcattcagcaatttatccgatttagcgaaaaaagaaacaaattcgtcggccaatggctcctttttataataaatttggctttttcatcttcaattacatagtccttcacttaatgaggtgtcctaatcacttttgtgcctttgatttgtcctttttttgtcccttttcccattttcccccgattaatcactcttccccccttctgcggatatgctatgaagaaatgagcttaaaaatagcatttc

SEQ ID NO: 33708 - DNA, 934 bp, Heterodera glycines
taaaaatgggtaaagtaaataaaattatagagtggcaagatttcgtatttttcatgattattttttgaaaaagatttgactataaaatttttacacgattttttaaaattttttttcgaaaaatagtgggacaactaaagtaggtatatgccattttttcattttatttttcattttgcttcacaattattaaaaatatgcgatttacgcaaaaattagatcgatttttacacgtattttgaaaaaaattttcaacttttttgttcgaaattcggatcctgggttcgaaattgggaaaatcagagtccaaattcataatcagcaccctcgaagaccccggaaactgatttatgcccaaaataaaaaagttaaagggacccccattctttaggattgccttttttgtcagaagtgcttctccattttttagtcaaaatcagatcagagactcatttaaaaacctatttgttttcaactgatgcaaaaaaaaaattagcaatgggcaaaaaatttctcgaaaaaaggtgtaaaattaaaattttgaaaaatttttttaaaccatgaaattttgaagagagttttttttacagatcagttaatacatatttggcaaaaaattcttgggggaaagacgaaaaagaaaatagtgttaggaaaatgacagagaaagaggcagacgatgagagtgtacaaaagagcgtgggctaatgcaccattataacaaatacagagtcaaaaaaagaacccaaagagaatgccaccccatccaataatttatcttttactagtattccaaacaactccattgtttggtgcctgtttttagtgctatctcgtttcgtaaatccgccaatgtgggcattttgtaaatccgccaatgtgcccattttgtaatccgccaatgtgggcatttcgtaaatccgcccaatgtggc

SEQ ID NO: 33709 - DNA, 957 bp, Heterodera glycines
tttctgctttaatttttttgttttagtgaaggtttttcgtggtttctggtagtttttaaggcatattttagtgcatatttgagcatttttcgggtttttaaggcatatttaggagggttttaagcaaattttatgcacatatttggaattttttttagtgcatacaacatatcacccaaataaatcccttttatttaaataaatataaataaatttccaatcttttcagaatgatcagtcacacaaattttgtgtgcacacccgcaggggagattttgttaaaatgatgttgggactcgaagaaggaacctacggagaaaggaattgatttcggatttgaatatttaaaggtgattcaaatgatgaattatctttcttaatttttaattaaaaatttaggaaaaatttgacaacatttccatttctgttgttttgcttggagaagacaaacaatttttggcgaatttatcattcaatcagcaggcaaataaattaacataaaattaattaaaataaattccctttctttttttgtcttttgccaatgtttacgtgccgaaaccaatgccaagggctaatgatttggcttttgccgtgttgggatgcgattctttgtttatctcggctcagacatcgacattttcttggttgattgcttatttgatgccggacgatgcgaccatttttttgcaattccgattttcttccgggtcagctttttttattatttcgttgaattttaaacaatgagtaattccgttttaggtcatcatacacgggaccattttttgcctgaatggattccgatcaaactgatcaatgacataatgactcgcgattatcaagcggagtgaaatggaagcgattttgaaaaattgttttaatggaagctggaaaaatgctaagaatgttatcccacaaatttgtacacaaaaatttaaatttgttatgctgatt

SEQ ID NO: 33710 - DNA, 1182 bp, Heterodera glycines
  unsure (1)..(1182): unsure at all n locations
agagtggtcagacatgatgtgggcgtgcgacgatgccagcaaagcttgtgccagtgcgggaagtgagtggttgcgcacgcgggtgtgtgtgcgttgtggtgttgttttgcagcattgtgtgttggtgagggtggtcgtaggtcggaagtgtcagtgtcgtctagtggttaggacgtgagcttaacacgctcaagatcgagggttcgatcccctccattgatacttttgtccttttctcctacccacgtatacctatcgcaacggcgattgcttctaccactgctgcactacacacgcatggccaaccatcgccacgcgtgtgcaaacatatcaactcgcagcgcggatctgacccgtgggtcgatttcgagagcagcaaccacacactgcagtgcacaccgagtctgtcgacgtgcctctacagctgcttgtgtgcgccgttgtcgacacggttacttgttgttgtgttggatagtgacacaaaggttggttggcatgtcaggttgcattggggtcccgtatccacaccagcactgccccccaggtgcacgcaagggtggaggcaaggcgcggatggcgcgtagaagtagcaggtagccgtgcatgggcaacaagacgctctgatgcttggcgtcgtgtccgagtggcaaccaaatggtacaacaaggtgtgtcggtgcatgggcggcgcggcgccactagctgacagcttggccgagtggttaaggcgatagactagaaatctattggggtcacccgcgcaggttcaaatcctgcagctgtcgaattccttttcctccaccatttgcacatgacccacacacagctgtctcgcatgctggtggcggttggcgccgttggagtaggtgcgtggggtggtggcgcagtcgtagatggtacctgcagacaccttgtgcgagaaaggaacgagagtggtcagacatgatgtgggcgtgcgacgatggccagcaagcttgtgccagtgcgggaagtgagtggttgcgcacgcgggtgtgtgtgcgttgtgctgttgttttgcagcattgtgtgttggtgagggtggtcgtangtcagaagtgtcagtgtcgtctagtgcttaggacgtgagcttacacgctcaagatcgaggggtcgatcccctccattgatacttttgtcttttctcctacccacgtatacctat

SEQ ID NO: 33711 - DNA, 660 bp, Heterodera glycines
cggccgaatatcccccataaaatttaaaaacgggcgcgaagcgcccgtcctgaggccgcgaagcggccgaatatccatcacaaaatttaaaaacgggcgcgaagcgcccgtcctgaggccgcgaagaggccgaatatccaccacaaaatttaaaaacggacgcgaagcgcccgtcctgaggccgcgaagcggccgaatatcccccataaaatttaaaaacgggcgcgatgcgcccgtcctgaggccgcgaagcggccgaattaaaccttagaatacaaaagggcgcggagcgccctttgagtcagcgaagcggccgaatgagtccacaatatttagaagcgcaaagcgcgcttctgaggccgcgaagcggccgaatgtcgccttcaaaaattaagaaacggacgaaaagcgcccgtctgaggccgcgaagcggccgaatgttgccttgaaaattaataaacggacccaaagcccgtctgtggccgcgaagcggccgaaaattcccaacaaattaaaaaacgggcgcgaagcgcccgtttgaccccaacaaaatttaaatcgggtggaagcgcccgtccaagcccaacaaaattaaaagacgggcgcgaagctcccgtcctgaggccgcgaagctgcaaatgtcgcctttaaaattttgaa

SEQ ID NO: 33712 - DNA, 1135 bp, Heterodera glycines
tgatttataataccatatttaaccattttaaaaagctttactttgcatttagcgaatttgaagaattttgagaaattgtacctcaaattggaaaaatttatgtccatatttttggcattttatgtccatattttgcaatttttggtccatattttatggccatatttcgcgcttttatatccatatttttaccagccctattaatgactagggatgggaatttaagtcaaatgacttctttttttttgctgactctaaatgaccttaaaatgactgcaaaagtgttctacactttgtttgaagcttctaacatacattttttgtgactttttttgacttttttacactttgggattttttaacttttttgcgttttgtgactttttacaatttttaaggcaaaatttaacttttgtgataaaaattccgaaaaatcagtcaatcttagagacggaactgaaatttcttataccataaggactcaaatgacgggactgaaaaataaaaaataaaataaaaatctggcggtgtaacacttttgaatattttttccgttaaaattagtcgtttttaaattactttttcgaagaaagtttaaaacggcttttggatttaattacatttggctaatttttcaggacttttttggatttattttgtgcttttttggtatttttaggtgcctttttggttattttttcatgacttttttgcatattttgttacttttggcattttttaggactttttcatgactttttggcgatttttctccgggctttgtgcattcataaagtcgtatccatttccggatgctgaaaaccgggaattcgggtctggactcgctcaataacgaagaatcattgaataggatcttaaagacgatttttccatgtaaattgactcttaagtaaatatttttacttctttgtccttttgatacttctaatgctcactggtccaggcttcgtttgcacagattaatttagggatttaacttgtccataaatttaatgggatgtgttatttaattgctttttattatgttttgaatggatttgatagatctggtcagaattgtttaattatttaatcattcacaaaagtttggtgcattaggaaacttgcactttct

SEQ ID NO: 33713 - DNA, 1040 bp, Heterodera glycines
  unsure (1)..(1040): unsure at all n locations
ttttggaaaaatttatacgttacaaagcgctcgagcatgatagggagggcggtgcgcaatcgccatttaatttcacagagaatttttaaatttatcttatatccaagaaaaatgactatctcttattttgagaaattttatacgttacaaaagcgctcgagcgtgagagggagggcggtgcgcaatcgccatttaatttctcagagaatttttaaatttatcttatatccaagaaaaatgactatctcttattttgagaaattttatacgttacaaatgctctcgagcatgataggaagtgcggtgcgcaatcgccatttaatttcacagagaatttttaaatttatcttatatccaagaaaaatgactatctcttattttgagaaattttatacgttacaaaagcgctcgagcgtgagagggagggcggtgcgcaatcgccatttaatttctcagagaatttttaaatttatcttatatccaagaaaaatgactatctcttattttgagaaattttatacgttacaaaagcgctcgagcgtgagagggagggcggtgcgcaatcgccatttaatttctcagagaatttttaaatttatcttatatccaagaaaaatgactatctcttattttgagaaattttatacgttacaaaagcgctcgagcgtgagagggagggcggtgcgcaatcgccatttaatttctcagagaatttttanatttatcttatatccaagaaaaatgactatctcttattttgagaaattttatacgttacaaaagcgctcgagcgtgagagggagggcggtgcgcaatcgccatttaatttctcagagaatttttaaatttatcttatatccaagaaaaatgactatctcttattttgagaaattttatacgttacaaatgctctcgagcatgataggaagtggcggtgcgcaatcgccatttaatttcacagagaattttaaaattatcttatatcccagaaaatgactatctcttatttgagaaatttatacgctacaaagcgctcgagc

SEQ ID NO: 33714 - DNA, 916 bp, Heterodera glycines
tttggattgggcgccgtccgcccgccccattgggccaatgctcccaaccctccctcgggcgttggcatcgccgggggggatggcccttcccccgagggccaaccggcgcagtgttacgggcggccctcgcccaactctctgctgccacggcgcactttcgacggtcgccggccttcgccctcctcttcctcacgtctcgttgtggtgcccacacatcgaccaaattgtaccaccgatgcggcaaagcctctcccgcagccattacattcgctcctttcaattggcccaaaaagagtttggcattggcactccgtcgccggaggcaaaacgaaaattagccgacaaaagcctttttttgattgctaacagagaaaactgatttgggaagtgttgtctctttgggtcttcacttctcatccgttcagtctcttttctcacgtcgattcacttcccccccattcccgacgatcttttcaatttaatgtccatttgaccaccgtcgcccttttttccacaataaaaaattccttttcatttatcgcttctttttttaaaggatttattttcaggaaaatgaaggcgaattgtgcttccgactcccagaagaagctcccttccgcggatttgtgcaatggccgctgttcggccgagcgacggattcactgccgcgaattggccaaatggggacggcaactgacgacactcgtcggttggttaccaccgggtcatccatctgctgatagtggtggccatcagttgcacaacttacaaacaatgcaaattgatctcttctcgcccccccccccgaccttagcctcgggcattaattagtcggccctttgagtgtcgggcaaaggcgccggggtttggaatggagatgagaggaactctctccgactaagccatccctcgcatg

SEQ ID NO: 33715 - DNA, 435 bp, Heterodera glycines
atcattttaatagattttgggacaataaaggttgattttagtgaaaaataaattttcggcttttgttagaatccgggtccggggttcgaaattggtcgaaatgggtgtcatattcgtggtcagtgaccccgaaaacaaaaaatatatatagccattacgttggcaatcaatcctataaaattggcttactgatttgaaatttgtgaacaagcaaatgttgggttcgaatactctttcagcatattttccaacttcaccgctttgccttgggcgctcaccatcgctgggccggtacatttcgccgtgtcaatgtcatggtgggggacttcatcatccctatcgaatggcgtgatgtgcaggccaggattgaaggactcttgcaatgggtcaacgaacaggaggcccgaatcaatgagcggaacggcgctggaattt

SEQ ID NO: 33716 - DNA, 619 bp, Heterodera glycines
caacgaacagatacagcatacgtttttgatcccgggagagactatatgccgcctcagtgaggtcgtttgactggacgattcgcgggctatttttacgtttcttgtgattgataaccgctgtttccgccatgacagatccatgtgaagtgtgacaagtttttagattgtcacactaaataaaaaagagtcaataagcagggataactttgtgaaaaaacagcttcttctgagggcaatttgtcacagggttaagggcaatttgtcacagacaggactgtcatttgagggtgatttgtcacactgaaagggcaatttgtcacaacaccttctctagaaccagcatggataaaggcctacaaggcgctctaaaaaagaagatctaaaaactataaaaaaaataattataaaaatatccccgtggataagtggataaccccaagggaagttttttcaggcatcgtgtgtaagcagaatatataagtgctgttccctggtgcttcctcgctcactcgagggcttcgccctgtcgctcgactgcggcgagcactactggctgtaaaaggacagaccacatcatggttctgtgttcattaggttgttctgtccattgctgacataa

SEQ ID NO: 33717 - DNA, 962 bp, Heterodera glycines
  unsure (1)..(962): unsure at all n locations
aggtaatctaaaattagagcatgtgaatgagaaaaagaattttatttttaaatttttaggtttcttttgaatttcaaaataggtatttaaaattttattctctttttcttttttgcttttacgttttcggcttcacaatttttaaatttaaattgttccttcttttcaagattttaattctttcttcaataataatttaatggacaatcccggcccatcaaatgggattgacttaatcgaacttggagacagtgacgatgaaagaatggaaaagtttgcatttggtaagtaaatcccctcaaaaaagtatttctttttcaaatggcactgttttaggtggcaacgacacactttccctgatttcattaaaggtatttgtacgacatatggaatttaaaacttaatgcaatttaataatttttcagacggactttgaaaggccaccgaaggaagaagccatgttaaatttagtcgacgcttcctttgagctcatcgaccctaacccgaatgtccacgaacttttcgttacttttgaccaccaatttttctcgggaactttgaattcgaatgcgtgtgtcgtcgaatggagcaaaacgatgacatcgtttgaccctttttactataatttatttgaatttcccatttcttggtttagttgcgctggcatttgtcggttcagtgtcgggaatcgcctttgttcaattcggctcagtgaacctttgctcaaacttaggccgagacgcgatttagtcgaaactcttttggtaagaattcgttttctttcctanatgaaacctcggtttacagcacgaaatgatccacgcctaccaattcgttacggatggcattcaagacagagacggtcattcatttccatcattggcactcattttttgtactatctgttccaccccaatttaggccatggccccgacttccgtttgcatatgcatcgcatcaac

SEQ ID NO: 33718 - DNA, 1061 bp, Heterodera glycines
  unsure (1)..(1061): unsure at all n locations
ctgcannggtctggcaatgggtaaaattgaatcaaaaaaccatgttgaatttggcaatgaaatttaaaaatacttactcgattaccgttgagatagtaaattggtgccaatttgcaaaatttcctccttttttgtagtttttattgtctgtccgttacccaattcccaatatcaaaacaccgatttctttgttgttttgcgtggtttctcttcttcaattcactgataatatttatctgtacatgataaccatctcaaagcactttcgtcattctgtcttcatttaacactctcctccttttcctctccttttcctctcctttttctcctccttttcctctcctttttctcctccttttcctctccttttcctctccttttcctctcctttttctcctccttttcctctcctttttctcctccttttcctctcctttttctcctccttttcctctcctttttctcctccttttcctctccttttcctctccttttcctctcctttttctcctccttttcctctcctttttctcctccttttcctctcctttttctcctccttttcctctcctttttctcctccttttcctctcctttttctcctccttttcctctccttttcctttccttttcctctccttttcctctcctttttctcctccttttcctctcctttttctcctccttttcctttttctctcattgtcagctaactttgtgctgaatggctaacttatgctccgccaaactcctcaaagtgttcgtcctcctcctccttctcctcctcctcaattcccttctcgttctccccgctcgcattctcgtcgctcttgctcccgacaacaaaagtcacctccgttcgatgctccctttgatcaatcggttagtttctttttggccacttttttaccttttttttacccccccccccaatgtttctgatcagattggcttcatccggtcactttgtccacgtcttttccttttcctctgagaaaatagaagaaaagtttgcaccanaatgtggctttgatcaccgttcctactgaattaaaccgtga

SEQ ID NO: 33719 - DNA, 1044 bp, Heterodera glycines
  unsure (1)..(1044): unsure at all n locations
atcggaacgtgtggccgaattcagcaatttggtggaggagagatatagtaagttgaattgggtcttctatcaattaaaaaacgatgggaaaacccaaaatttataatatcactcatttgaggaaattgaccgattctgaaccactgattaagattcaattggacattttgcgctatttggtgttggacgaggcggacaaactgctgaaggcgagaaatccgaaaagaccgaaaacaataataaccgttaaaagtatccccttaagaatgaggatttcctgaattgtgtccaactgatcaaaaaccatcccaaactcgtgcgtctgtttaaattagtcaccacaatagccaattgacttttaattttcgaaatcttctctttttactcccccctccctttctttattttgtcagtgcccttctcaccgttgtctgatgttttctgccacttttgaatctggcgctcagaaattggcgcttcaatttttccgtgatgactttttctttgtcaacatcggacgactgaacacggccaccgatttggttgtccaggagttcaagaaggtctcatggggaaattcggaaatttgaaaaattaataatgccaaccgaatttaaggtgcccaaattcaataagtctgacactcttgtggagtttcttttgggtgagaatggtgccggtcggcgggaattggaacgaacgaccgacggaggttatttataaattaaaacgaaataagtattaaaaagacgaagcgataatgcccaaaatcataaatttcacaataaattctcatctttttattanatatttggcagaatattggaagacgcggaaaacgcttgtttttgtggagcgaaaacggagctcggacatgttggcaattgcacttcgacagaacaacatcagggcgtgagcatcaacaggtcgggaaagagttcgacaatttgccgattttccctttgtttcagtgaccgaactctgaagcagcgcctgggcgctgccgaagacttttgcctcggggaaaatttcttgttcgggttg

SEQ ID NO: 33720 - DNA, 964 bp, Heterodera glycines
atggtactgtgtttcgcataagtgtgaaggtactgtgctttacataagtgtgatggtactgtgtttcgcataagtgtgaaggtactgtgtttgacataagtgtgaaggtactgtgtttagcataattttcaaatccattttttttttttgctttttatgcaggtcaattatcaaaaaatcatttattaaacaaaatttttattttaaatttttcattcaaaataaaacaattacattaatcataaagatataataaataccaatagatttaaaaaaataaaataaaaaaattattttataaacaacattttgatatttatttagcataaaaagcaaaaattaaaattaaaaaaggaatttgcatgtaaaggattcgaacttttgagttaaaaacgctgattaacgcactaccaaaacaccactaaacactgataacaactaaaaaaattattcaatttgtttattcattaaaagtttgacacgacgtaactcagcgcttgtaagttttttctttgttttagttcaagagcttttttgggtttttgtaaaacatttaaattataaatttatatcattttaaataatagaaatagccataaaatgcttcatcattaagacgatcgattagttatttttatattaaaaattattttataaaatcacgaaccccattacggcacattctgcaacaagtgggactgtttttccttatcgatatacgtataataacatttgataaatttatattattatttttttttttttggtattatgtggaagaaaagtttcgccgataaacattttgaaataaattaaataactttggtgagatatttattttcacttcaatgttttaagaatttatatattatattaagtattcaggaaccaaaactattcttgcataaagagaaaaagattcttccaaaatttttaaaaaatgaattcatgttttattgacttt

SEQ ID NO: 33721 - DNA, 947 bp, Heterodera glycines
taaactttaaatttactttcaattatattagtttattacaaaatataaagaagaatatgaaactttaaaaataaaaacaaaaaataaattatttgtaatattcattaaaagtaagcataatcagacgatctatcacacaaagacgtcacgacttgaagaaaagcgtgaaactccatcaaataagtttacgaaagttgaaaatagatttgaatgaagaatcactctaaatattaactatccaatacaaagaataaatgactctaaataccgtaactatcaaaaacgataaatattgctaacattatgaacactcaatctaaatatttatataaacatagccaaaaacacgaaatatttatcacaattaaataatcaaaaaattaatataatgataaatgataaattatttacttttattttaagaaatgcatcaagcaaaagcaaaaactacaatcagaaaaaataataaataaacaaaatgaaattaaagaaaatcataataattccccaactatcaaaagcattctgatagattttaacttggtaaataatcaattgtaattaactataattttttcttcctttataaacactaatggcattgggaaagaaattgaaagattaaagctttatgttgttttggcataatttgcataaatctaaaagaataaaaattaattacattatattataagtcattaatggaaaaatggcggttaaatttaaaagaaccaagccccgtatcattatcgggctctgcttccacatacaaagctcaatttaggcatagcgaattacggttaattttatgcaaaaaaatcataattattaattggatttatttaaggaaatacttattatttaaaccaactgaggaagggtatttttgatgggaaaaatttatctaaaaaagaaaaagaaaacatagaaaatatttgaacattttc

SEQ ID NO: 33722 - DNA, 955 bp, Heterodera glycines
  unsure (1)..(955): unsure at all n locations
ctccaaatatttcatcaaatgggacttttgttccaactttttattttctgcttcaaattggtcaaatttgatgattaataaaataaataaaaaaaatagcgggaataatttcattctttataattctttggtaaaaacttttaaattagcaattttgtaaattaatttattcaatttaatgattgaatttaggtaattatgctgctttatgaattatttatgaatgtatttaaacgttacaaatgagaatttattgctttgtattgattataaatatggattaatttaaaagtcaggaaattattcggctaattcagattatctaatgcaaattattttcaaaattatttattcatagtttttcagatattttttaaggaaaatttcttcaatttttcttaaaatccctcatttaaaccctccaaaatctcttttccaaattgttttttccattttgaaatgctctttctatcaattttcatcattttggcaattcccctttgattctttttttggattttctctttttatttgccattattttttcattttttccattttctgctatttcattaccacgaaatgccaaattctttctttaatcttttaattacatcataatttactcaattttcttacaaaaagcggatttggcaaattttatagaaatttataaatttcatcaataaaaaaaatggcataattttggttttatttgaatttttanatcgtttttttttttgcagaagtatttttttcctttttttgattaaaatttttttaatattatttctttaatttaaaaaatgttctttttttaaatttatactgatttttcgcatttgtcctgacgataaaaaaatttatacccaattttttaatgaaaatttttctgccatttgtcaccaccaaaatatgataataattatgttttttttaaattttcctgggtttg

SEQ ID NO: 33723 - DNA, 1704 bp, Heterodera glycines
ttatgtcattttctcaatttcagatggttttttggccattttgctcatcactttttgctcatttgtcgtccatttatttttcctttttctttttgccgtttttcctcccaaaaagtgccgtttctctttgtttgcctatgcccttctctttgcttatgccttttgctttctttttgccattgcccccggctcaattcgatttggtcaaaaggtgggcaaaaaacaattaaatatttttaaattataatttattgtttagcaacaaaatgagttggccatcccaatttatgacgagtcccaacacaaagtccaacttttgcctttgtctgttccctccgttcgaacatttttggagcaaatcgaaacgaaagcttatcgaaacgaattaagtccattgttaaatacggtggaaaaagtcaaaatcaacgaaatgctgaaggtactgaaaggaccaggcgaaacggaatgatcacttctgatttattctcttacttttttgttcagaattcgttcactttcgacttaaataatgtccccggggaatcgtccgatgattttgttcgcgagattaatatgttggaggacaacaaacacgtgaagcgaatacacgaatggatgatgaaggtgaataaagctcagtttgtgatgctaattgatggaaatgggaaggggacaaaagccatttgaaaaggtcatttgaagggcaatgggacacgtcgcgtgcttttgttcgggaacagccacgcccaagtcgcgtggagagaagtggccgaggcattcaaaggcgacttccgctggttgcgcgttgtgtcggtgccaggcaagtggcgattcaatttcacaccaattgattttaattgggcaaaaatcaagtacggtagctatacggtaatataggtaacagtacaaagaataataatatgatagggaaaatgactgtaaatgggaatacctaattggattcgagtttttcaggatgtatgccattgtttgagaacgattggcgcaccatttacggcgttcggtgtgccgaaactgtgaagggaatggtcaaaatgctgcggaagacgcggcccgaccttctctttctcatttttaggtgaatgaaatgctctccaatttaaatttaactttcgaattaaaatgccttcagatggtacgacgacttccaaccgacgcaaaacgaaaaaataaatttgggagaagacgccgaattggaagcaatgcaatcgctgatggacaaagtgcaaaagttggtcgaaacgcgcattttcatctcagcgccaaatttgcaattcgacaccgaaatttcgcaccaattggcaaaaagaatttggcagaacactccgctggaagggctaaacaaaaattattcggtgaggcaaaatcggagggaaataagcgatgccaagcaaaaaatgaaagagaatggctaaaagaaagccaaattccgataattgccaaaataaatttttattgacgaattgtccgtttgcaattgcactcatttacttcccatttccaaattgcagaagcatttggaggagaacagaatccattacgatcggttgggccgtttgcgttgtgccaaatgttcggtgttcgatttggcggaggatttctgctgggagggaatttgtcatgcgttcgaaccaaacacaaaattggcctatttttcggacaaaaatcatatgtcatttttgg

SEQ ID NO: 33724 - DNA, 724 bp, Heterodera glycines
ttaattgtgacaatgcctttgagttgtgcccagtgattgtgccaatgtttaaaataatggggacactacgaaaagcgctcggacaaactggtcatccgccgaatggcaatggcaaaacccgcaactaatcagaaaagctacgacaaactgaaggaaactattcgcgactgattggacgggcggatcaatggatctttaaaattctacgatagataggccccgatcaaaaatgacttaggcgcctttggcgtacgatcaatcgaaagaccatcgattggatattggctaactgatgatgaaaaacatttaacgaaaaaacaataataaggaaaaaacgataatgaaatacagtgaaaaacataaattatcaccattgggaagggcagtagcaaatgatcaaatgataatgataagggcgttcgtccgatgggttttgggtggataaatcgaattgcattttgcttctcccaaagctcgaaaaatgtcctcacttctgctgttggcgattgttttggagagcaattgtggagtttgaagtttaatgggggggggggagaaatgaactgataattaaggagataaaattgtgggaaaatggggacaaagtgaaagcggggagagagagagagagagagagagagagagtgtgagaaagaaataggaaaaaagagagagtgagtgaaagggaaaaagagagagagagagagagggaaagggagagaga

SEQ ID NO: 33725 - DNA, 983 bp, Heterodera glycines
  unsure (1)..(983): unsure at all n locations
gggcgacactgtacgcataagcaaggagaaaggagagcttacaaaaggctattaccccaactttattgacgagctattcaaaattgtccaggttaaaccaaccaatcctccctcatatagaattcgcgatttacaaggtgaagagattaagggtgtcttttacaaacaggagttggtaaaaaccagtgagaaggacaaacccaccgggttgaagtgttaaaatcgcggacccgaaaaggattaaagaacaccttgtccgctggatagggcattccgatcagcataacaagtggattcgggacgctgatcttgtaaaagagcgcaaagctaaataaaaaatggatgaattttatgtggtactacgatccaattcacctggaccagggaacacgacctcaaaattcactgtcaggcttccacacacgcttgagctggacgcaaactggatggtggcactttcatcaattatatacccatattatttccatccgtcggaattgatgatgacgacttcattagcattaaacttgtaaatccaaattttacattcgcggatgacaaacgttttgtggatattgaactaaaaataccgagcatgcaattctctagtgttggccatttaaggcaaacattaaatgacataatcaaggatgcatataaacaacggtttgggctctcaccacagaaggccgccggaacaacggttaaagcgaaacgccaaattgacgttacggaccttttttttcacgatcaccctggtgattattgggaaaaaattgaagagttggaaaaaaagttggctgaattaaaagaggagattatgacgaaagagagggaacatggtgccaaaggtacagagcagaaaagaaaaaggaacttgaaggtgagttgcaaattttaaggcttcgcctcaagagaaaggatgatgagctggaggagcttaagcgngcagcgaagcgtcgcgatgacgacacccctgagaa

SEQ ID NO: 33726 - DNA, 318 bp, Heterodera glycines
tcaatggcatttatcaaacatgttgcttttgagagaatggattaattgttgggcggggctttcggcctttggcaatggcaaaattcgttcattaataatggtaattaagaggggggggggggggttaatcgagggattaaaaaataagcatcaaggattatcaattaataaggtcgcgaattgggcttaatttacgttagattaattcccaacttttttggcttttccgttcattttgtcgataattgttgctaaagtcagaagctttccccggaggacgacgtccatttgccaatttaaattcagacaatgccaaag

SEQ ID NO: 33727 - DNA, 1146 bp, Heterodera glycines
  unsure (1)..(1146): unsure at all n locations
aaaactaaatatatctggccatttaaaaaaagaaatttttagaggcttgcggtatacgtgaaaaggggttaatgggttgatcaagatttttaagggtcagcagaaggttggagagagatcggcggacaaattattaatggggtcaatccataattttaacgattttatttttaagcggattcttgcggggtctatggtgagaaacgactacgacctatgttggatacacattaagtggcgataaaatcaaaaaagatgccattaaaactgacgaaattgacgcgtttttacaaaaagaggaagactcggactattggtaagccaatttaacaaaattatagaagacaacctttgaaaactggtgtggaggcaataggacagccaaaaacaattgatgtctcaaaccctataaataaaacctatggaagagggggtgaattgtgacgcccaatgcaagcaaacactgtgatttgtcgaacgcagttgtgagggcgtttctgaaaatgttactaatgctgaccccaccttcttctgagcgcaattcaataacaatatagtgctatcattatcgcttaactttaaaaaaaagagttttcaatattaaggcgtaaggttttcgaccgtcagtcgggtcagcaaatggcactcactgaccaacaggtggagaaactgaatgccattgcggacaaccggttcccggaaataggtatcaaagagtgctcattgtggggcgacgaagaatgccttttttgaggttacaatccctaccctcctttcttggacattttctcctccgttcgcgagattcacccaatttccaatcgaccccccgacaaacgctctttcgttccgagtgccgatgaacgtcgaattgtcggccgaatggtccacgccattaaaatgggatggctaaaaaggaaagagccccccaaaggctcagaagaagaggaggagccgaggctttacgacctttgggacgacgagggggacgagcagcggaagagcaaatcgcaaatggcacgcgtccgaatgcatttgccggcaccgaaggtcagtcgtacataaaacaaattaagagcaaaacgagaaagtcaccattaatttgcaggtgaaccaccgnagcacgncgagtcgtacaatccccca

SEQ ID NO: 33728 - DNA, 1004 bp, Heterodera glycines
  unsure (1)..(1004): unsure at all n locations
ccgacagggatttcaattagatcaccaaacaaatgaaaatcggattcgaattctccactttgtatcaaatataactttattataaatcacatttacaaatgccttgttttgattggtggtcgagaaggacaatgtccattctgttaagaaactcgagttttttgaggatttgttacggacatatcacattcaaaaacttgtaagggatacgcattcaaaaattaaattggcaagcatttggagaggaagaatggataacatgttcaacaactggcaaaaaacaatctccagatactgaaaaaaatttcgggtttttttttattttcgttccttggacaatgggtctttagctccccctaaccgctggccatggcaatggtacacaggggatttaatcacttacattaaccatataattaaatgattgggtttgccagagattaacgaaaacaaaacaagagtgactgatgtggttgacatgagttggttagtgctgttgagcgatttcagagaagaattgaagcacatccccaatggagaaatccaattcgatttttgaggcgccgtaacaccgcgagatcagctcttggtaatgtttcacctggttcaagaattcttcctgaactttgtcaaatgtgaaagaaatccgtggttttttttgcctgcatttgtcgccacacaacgaccagaagaggcgagcccgggcagagatgtttctccactttcttgtacagattgtcaagtcccttcttcacttctttggccgggtatgacgaaatggcccgtttcagttccatccgggagaattgctgctcgtagctcatctcttccggctttgcgccattttccaagtgtttttctatcctctcgaaaaatgtctgaatttcattttttgatttatttttccctgcccattcattcacatgaattttgtccaatgnacggcccatcgattccctcacatnaattccgagattttcttgatacaaaagtcgaacattctt

SEQ ID NO: 33729 - DNA, 1107 bp, Heterodera glycines
  unsure (1)..(1107): unsure at all n locations
aattttgtaatagtgcgtaatcttttaccataataactcacaacattgaaagataactaatcttatttccaaggacaaggaaatttggtgaaacccaatgatggacaaccaaaaaaagggggagggggagcaacgaagccttcaggcgttgcgcaatattatttccgagacctaaatacaaaaattattggcaaaatatcgccatatgaatcagattaattgtgtgaattttcgtacatttttattgccttttttataattttgttgtgtgatcccaaaacagtaaagtacccgaaaactttccaattgaaaaattaaaaaaattacaaaagtaattttgattttgaaaagatagaagcggggtaaagaactgggcggaatttgcaccttaaaaaagatttttgtggtcgcaattccgaaatttcttaggggtcacggaattttccatccttctggtgcggttacacgcgaccatggcacccaaggaaaataagacccctcaaaatagttttttatttgaaaataagaaaacgaggatatgaaattatcgaaaaaacaggagaggatggaatttgccgattaaagagtaaacaaaacataaattaaacatccaaagtattgtcgttaatttgtctttaaatgtgccaaatctcgaaatctaggcattattccaacctcctcttcctcatcaattccatcaacgacatccgcgccgtatccgccgcagtcgcagtgccaagacaaatgggcaccgaatttgtgcaatttttacaaaattacgggaagatgccttcaaagtggcttcatcgtgtggcttatgatcagttgcaagtcgacctgcggactgtgcactgctcaaattgtttcaattggctaatcaaacggagggaaagtgacgaaaaagtgacgtatttttatattattttactgaaaaaccatcaaaataaaattttaatcaaaagcaacagaattttattgtatcatttgttctaaatattcttgaaacccgtggaggccgcgaatttcggtcgcgtccatcctaattcacatattatttatcggtgaaaatcgncatagatacaaaagacaaaacaagcataaaaaggg

SEQ ID NO: 33730 - DNA, 1031 bp, Heterodera glycines
ttgcgataaaattaattttaaaatttttttaacgcttcctaaaaattttgcatattgttattaagtgaataattctatcctttatctaattttcacttttaaaaaattaatttcaaatttttttttattttgaataaactatctattatactaaacgattaaaaatgacacgttctcattgaagtgataatataagctcagttttgatttttggcattaaatgaatgaagaatagaaaatatttataattataaacagaaactccaaaattcgttacattaatttatttgcttattgtttttatatttatgaatttttatattaacatgaaaaatatttccctgtaattgcattttttttttgtttcctttttgaaaaagcgaacatgtctttcattgtagccaacacaaggcaaatgtttcacgttttggcggttgtattagtaaaattgtatttttaaaatgctattttattactttctattatattaatttgtctttgacttagagatggcttatttttatttaattttctttattatttcttcactcaatttcagaaaataattttgatattaagattcataaatcaaaaagtgagaaacaatgatttcaacgcataattaaaaatcaccgtaatctttacatttaaaaataaagttattcaaaattcaacatcttcttccaaaattataagtagcggtgtcattttatgtgtaaatacatatttttttcctggcttctccatgctctaaatagtaagaaaaagatcttttgtgtatttgcgaacaaagttgggacttttattttgttttattaaaatccccaaatatcgggttccataaatgtcgtgtccccaaatgtaaggttccctaagtatcgggtaaacgtcgtgtctccaattgtcgggtcctcgggtccccaagttgcaaaaccccaaaattcgggtcgccatttttgacagccctaattataagaaataaattgcaaaacaaataatttattctgaaatatcaatttaacatttaggaa

SEQ ID NO: 33731 - DNA, 894 bp, Heterodera glycines
cagtccccccgacccgatgcgcccagatttatggggagaccgaatccttcgggaatagcttccctatagcctgtactttaattctgcgttggatttttgctccccataattgtttgagtaccccaaacggacacttgaaaaaatcgatttttttgttttcggggcagtccccccgaaccgatgcgcccagatttatggggagaccgaatccttcgggaatagcttccctatagcctgtactttaattctgcgttggatttttgctccccataattgtttgagtaccccaaacggacacttgaaaaaatcgatttttttgttttcggggcagtccccccgagccgatgcgcccagatttatggggagaccgaatccttccggaatagcttccctatagcctgtactttaattctgcgttggatttttgctccccataattgtttgagtaccccaaacggacacttgaaaaaatcgatttttttgttttcggggcagtccccccgaaccgatgcgcccagatttatggggagaccgaatccttccggaatagcttccctatagcctgtactttaattctgcgttggatttttgctccccataattgtttgagtaccccaaacggacacttgaaaaaatcgatttttttgttttcggggcagtccccccgaaccgatgcgcccagatttatggggagaccgaatccttcgggaatagcttccctatagcctgtactttaattctgcgttggatttttgctccccataaatgtttgagtaccccaaacggacacttgaaaaaatcgatttttttgtttcataaatatttttttcagaaagtcatgcgcacccgtccgatctggcaagttaagcaacgatgctgatagccaaaaggtcg

SEQ ID NO: 33732 - DNA, 343 bp, Heterodera glycines
tttattaaattaaaaatatatagaaaaatttataaagaagaaatttgaaataaaaaaatcttatttttgagtcaaaaatcagaaaattttttcaaaatgcttaatttttataattaattcgaacaaaacatttattaactttatatttttgacttgcggtgtatttcttgaaaaaactttttggtgaccaaggaggaggagggaggccggcggtgacgggaaaaaaattgaaaattttaatacaatacattggtagattctgtacaaaaatgaccaatttttgcaaattgagccagttttttaagagaattaaagatattaaggatccggcgaggccgatagg

SEQ ID NO: 33733 - DNA, 692 bp, Heterodera glycines
agagtgggtctcgtcagtatggctcgtccaattgaaaataaatgttagtgcaaggtgtttaggccaattatcatagcacagaaattcatattttttataagttttgtaattctttatatgcattttttcttgttttaattatgtctgctttttggtattctttcttaaattcctttttaatcgagtatccctgaagataataaccaacatagtcgcttgatagctttaaaaagatgcaaattttctgctgtatagttgggatttttgtttaaaattttattttcctactttagtctttaaaataatctgactaatagttttataaactcataatataattttattgtcccttcttatattgctaatttatttaaataactgcattaaataatttatagccattactccgaaggtggaccgcaccaaaataatagtaattgtgaaaacgaaaccgaatttccagggcataataaataatatttaaattttaattaagtattcaattaaatttgtattaaactgatgattttatttctttttcaaaattaattaaaagaatatttaaagtttaaaatttaatatccaatttttccttttaaatgtaatttcctacaatttatgcatctattcttcagatgtaaagccggttgctgatgagatattatttttttattcataagtttcttatttcc

SEQ ID NO: 33734 - DNA, 1192 bp, Heterodera glycines
tcaaggacatcacaacgggggagaatgagcacaaaagcaccaccaccgacagcagcaacgccaagttggagcagtacacgatggaaaagcggaggggaaacaaacgacgcaaaagagaacaaaaaagcacatgagacaagccgaactgcagcgacagaacggacggaaggcaatgttaacttccgactgctcgcaatcgccggaatcattgcgggttggtcctttcgaaccaaaaatgattattatttaccacttaattcctttaatttttgcttcagtgttgtttattatggttggaattggaagcatttgcacgggacggtacgtgcgaaagagtcgtcaactccacggcaaatacagggtcggcaataaattaaagatcgattagaaataaaccaatggaacgagtggaaaagtgggggaggggtaataaagaaagaatattcgaccatttcgctttgttttagcccgccgcgtacgaattgcagaccactcgccccccgcctttgaccagctcttccatgactttcgcgccttccaatcgcatggccaattccaatgaattgcagcagaatcggcatttcgagtttggccaaatccatcaaataccgccgccagttcattgtcctcatcagctcacaatgaatgggaatgactgtcgtgaggaaaggctaatttaagcgggacaataacctcagttttacctaataaagaaatcgaacacactcactcaatgaaattgtattcgaaatattctggaatgccagtcatcgcgtttttttcatttttgaacggctcattatttttttttggtgtttatgttgcatatttatttcctcacatttgtacaatatttcatacacagatttttacttcgttttcaattgtctatgtacgagtataaatttcaatattaattgtttgaatcggggatgggcgcaattacgcattatgaaatttttggatcccgtaattacgcagaattcgaaaatcgcaaacccctctgcaatgtataagaacctgtgcttatcattttaataccatacagaacaagttttttaaaaacaaactttattgtcgaaaccaatcactagggcatccaattatatggaaatccatatttttttcctggactgtgggaggcatgaaacgcacgaaaaacatgtttttagcttggtttgaagcttctagg

SEQ ID NO: 33735 - DNA, 472 bp, Heterodera glycines
actcactcactcctcttttttctttctttctctcactctcttactcacttcctctccatcttctcttctaactctcctctctctcgttgtctctctctcccactctctctcaatcactcactcacttcttttattctttcattcactctactctttgtctttctctcctctctctcgatttctttctttctctctccctctctctcttactatatcccccctccatcttctcttctctctccatctctatttctttctttctctcagttcaattcctctctttttctttcgtacctcatcactccctctttttctttctctctacttatttctctctctgcctttctttctctctctctctcactatcactatctccatctccatttatctctactttttcttctctctctctcttcctctctctctctctatctctatctctctctctctctcattcctatctctctcttt

SEQ ID NO: 33736 - DNA, 965 bp, Heterodera glycines
  unsure (1)..(965): unsure at all n locations
aaaacggaaaataatgtcttaattcactacgttggagcattcgaaagtttaaaacctcaccatagagcaaaaagggaaaatgagaatgggataagccaaaaaagagggaatgccccaagagaaagaccaaacaagaagccaaacatacggcgaggacaaatcacaatggaaacaacgacaattccattaataattcgccccactacaactattattccaccagcaactcgcactactacaaccgctattccaccaattactcatactaccacaactgctatcccaccgacaactcgcactatttcaacggctattccaccgattattcgcaccaccacgacggctattccattaataattcgccccactacaactattattccaccgactattcgcattaccacaacggctattccaccaacaactcgcgctactacaaaggctattccattaataattcgccccactacaactattattccaccagcaactcgcactactacaaccgctattccaccaattactcatactaccacaactgctatcccaccgacaactcgcactatttcaacggctattccaccgattattcgcaccaccacgacggctattccattaataattcgccccactacaactattattccaccgacaactcgcactactacaaccgctattccaccaattaccacaactgctatcccaccgacaactcgcactatttcaacggctattccaccgattattcgcaccaccacgacggctattccattaataattcgccccactacaactattattccaccgacaactcgcactactacaaccgctattccacccacaacccaggctanaacaagggaaatgccanagggtacaattgaaaccattgagaagctcatcaaaaaactcgagaaaatgacagaaatacggangaaaacaaagtgaaccaacaacattcctga

SEQ ID NO: 33737 - DNA, 958 bp, Heterodera glycines
  unsure (1)..(958): unsure at all n locations
attttaaaaaattcccgaattttttaatgaatttttagcattttttctacaaagcggaagtgcacaactgtcaagtgttcacttactttggagctttgggaaacgcaaataatttcgagtaattttcgctttttattattttttttttaattataaatcatatttatttgttaaacgattttagaaactacaaagaatgcatggcttactgtaaggacgtttgagcgaaccctgacagtacagtatacgaatctgttttgctctttttataagaagtgggcgttaattgactcaccgttttctaaagatattatgacgtaattaaagccactattgtgccattagcttctgcccagtaataattcaagaatttaaataataaaatgattattttaagttgcctgttgagcttctgataattttgccagcatttttttattatgggtcttatttttctctcacaaaatatgtgagaaattttgtcggagttaatcgtttgagacagccggaagtatttggtgacgaaatcgcattaatttgcaaaagaaatcgaggcggaaatggtcaaacaacgacaaagtgtcgtgtgggaaattaactcaccaattggtcgattttttggtatttcaaaataaaaaaagaaaagaaatcaaaggtagaacgcgcataaattaacgcgtttaattaattaattaattaactaattaattacttaattggttagtttataaatgattttccgcctaattgaacacaattaaaaaatggtgtaaaaattgagagaaattgcattattatgggcttcgaagaacaaagaaaaagcatttattattgaaaaatgacaaaagacggaagaaaaaagacaatgaaaggacgacgagccgaaggaagtgaaagaaaaggctntttcttatgaaaattgacagttccaccgaatgagcngaaatanaagggaaaa

SEQ ID NO: 33738 - DNA, 279 bp, Heterodera glycines
ggaggaggaggaaaaagaacaaagttggagggggaggaggaagaacaaagttggagggggaggaggaggaggaggaaaaagaacaaagttggagggggaggaggaagaacaaagttggaggaggaggaaaaagaacaaagttggagggggaggaggaagaacaaagttggaggaggaggaggaggaggaagaagaacaaagttggagggggaggaggaggaggaggaaaaagaacaaagttggagggggaggaggaagaacaaagttggaggaggagga

SEQ ID NO: 33739 - DNA, 154 bp, Heterodera glycines
gcgaagtgctgctcaacttcgtgtttttctggccgctgttcatgtccggtatctggatcgccggcggcatctatttctggctgcaccgcgagcgccactggcgctggagcccggacatgcccgcgccggtgctgccgggcaacccgttgatcag

SEQ ID NO: 33740 - DNA, 885 bp, Heterodera glycines
aagcgaagagagatgccgaagaaaaggccaaaaaagacgcagaagcaaagaaaaaggaggaagaaatgaagaaacaaaaggcaaagcccgaggaaaagcccgcggcacctgcagaagccaaagcactagtgccggaacagaagaaggcagaagagacaaaggaaaagctgaagcaggaagagaaagctgcggaagtgccgacctcacctgaagaaaagaagagaaaggaagcagaagcaaaagcgaagagagatgccgaagaaaaggccaaaaaagaggcagaagcaaagaaaaaggaggaagaaattaagaaacaaaaggcaaagcccgaggaaaagcccgcggcttttgatgcaaatgacttcgtggcgcttttttcttcctattcttcaataaatttctctgttaaatttccaagtcagactgctcaaattgaagttgttctctcagattgtcttcttgagaacggtttgttactcaaacaaatttaatttaatttaatttaattttattagttgactcaattaaaccttcgcgcgaaccggcgccgctgtacatgaaacccaaatttgttagagggttgtcaaatgtgattgacctgatggcgctgaatgaagccacgtttgagtgccaattccaaggatttccagaaccaaatgttttatggttcatcgatgatcaacctttgacacagaaagggtgtgtgccgattgacattgtcacatttacccatttgtgggatatctgccatttccttccggtgcccccccccccctcccccgttaagcatcgcttttcttttgagatgtgaccccatcttccgttagaatcagagggatcgattggtggatcaacttgctcttctcacattcccgctctcatgaa

SEQ ID NO: 33741 - DNA, 797 bp, Heterodera glycines
  unsure (1)..(797): unsure at all n locations
tttttcagtgtccgntttggggtactcaaacaattatgggggagcaaaaatccaacgcagaattaaagtacaggctatagggaagctattccggaaggattcggtctccccataaatctgggcgcatcggttcggggggactgccccgaaaacaaaaaaatcgattttttcaagtgtccgtttggggtactcaaacaattatggggagcaaaaatccaacgcagaattaaagtacaggctatagggaagctattcccgaaggattctgtctccccataaatctgggcgcatcggttcggggggactgccccgaaaacaaaaataaatcgattttttcaagtgttcgtttggggtactcaaagaattatggggagcaaaaatccaaagcagaattaaagttcagcctatagtgaagctatttccggaaggattcggtccgcccccccnccccgcccttcaaaattttgaaaaataaataaaataataggagactcagaattttgaaaattttttataaaaactgatgacaagctaatgtgataaaacaggttatttctcttcctttcagtatccctgcaaagtttggtgcgcttctgatcagtttctgaaaaaaaagttaagcctaaactttttggcctgtttaaaaaggaattaaaaatttttaaaaattttattcatctccctttttgatagaaaaagcatcagagtgcctaaactaacatgtaaataaaatttggtgcgtttcagaaccctttctgaaaaaatatttaagaattaatttgcaaaaaataaataaa

SEQ ID NO: 33742 - DNA, 699 bp, Heterodera glycines
  unsure (1)..(699): unsure at all n locations
atatatatattattttcacgtttggaaaagttctttgataagttagagcagactttggatcagctaagatcatattaataggatcgtgatttcgaaagattatgaaaaaataggaaaataacagttttgagccaaagaatttgcaaaaaaagtaaatattcaaagtttagcaaagaaaaagaaagtttcattattttaacaataattaatttgaacatatttattgattaaaagcagggctcccagatgtgaggctttagcctcattttgtggttttttgataggtcaatgaggctaaattttcaaaatgaggatttgaggctttttgtggttttttgagaaattttgaggctttttgtggttttttgagaaattttgaaaatttttgaggtttttggggaaaattcgtaagattttttaaattttgatttttttgataatttggcataatgtttgacaattatttagtaatttgggtttttaatagagcatcaaaacgaaaatagaaccaattttttccaaaaaaaaccaaaaattaagaatattttcaatgaaaatctgctaaaaatatgtacaaatctatntttccccccctgtggggggcgcctatcggcaccgccagcccctaaaagtcctttattttcttaaaagttngctcaaatcacaaaatttnggccatttttgtggacaaatacttta

SEQ ID NO: 33743 - DNA, 1230 bp, Heterodera glycines
  unsure (1)..(1230): unsure at all n locations
atttctatttttacatgtaaatatnagagcacacnataggtcaaaatattaggcatcggctgggagtcgaaccaattcctacactcagtcaatcgcactgaactgagtcgaaccctgttttacatttattaaaccactaataaaatattcaaacaataattttttaattgttgtattaattaattctctcaaaatatcataaataaaagacttcccatttgttttgcatttgtttgttcgaagaatggagaatttgtggttcggcagatttctacttaccagcagcttttgaatgatactcaagatgtataattttgtgggaaaaagtttggtgtcgtattttctcagtgtcggattttccgccgctgtcgcatttttcagtgtttaagactgtaagctacgaatatggctttttattgtaattatttaatagatgcttttcatcagttccttattattaaaatgaatttaaatgaagcgattgcccaaagaaaagaagaaaatgaattaatatatttatttgaaatactttcatttttgttggggaaggacggggggagagatgtaagccaagaggggggagagatttcccccgcgcacaccgaaagaaaaaagaatttttttaattgagtaaattttttgaaaattttaatttaattttattagcaaattcttttaaaatgcccatcatttttcctcggcggtgtctatcgaaatggccggacctccattttgtcaaagtttttggaaattcggctagaaaatggcaaatttaagttttttttgtcggaaaatggctaaaaattctttgaatgagttggtgatacgtccaaatttgtctaaattggttaaatttcatttggcgaaatggcagctggcgaggtctctagttgtctaaatgtccgcaaaaaattggcatttttatctcggcacttgggcttaaaacaactttcatatttatacaagaaatttacagcaaatgctaaaattttattttaagtacaaatcacttagacttttagaatcgtcgaatttttttttttgcattaacgaaaacttctgcctagactttaaattataacaaaatgaattgtattaattataggttaagcaattatttctattgaaataagccgcctaaaaaaggcagtcataaccgtcttttttgaattagcaggcaaaataaattcctttttgcgtttaaacaattttctataacattggcaaggg

SEQ ID NO: 33744 - DNA, 951 bp, Heterodera glycines
ataaaacattttgcggaatcattttttttgttataaactattaatgaatctccttaaattttaattaaatttatcgccattttggctgaatgacttgaacaaattccatccttcaatgtttttcaacaatttactatcaatataaaaattttacgatttttagtcaattccaaagctaaattttttcacctttaaatgccatctcatcggatcttcgggatgacaacactaaaattcattcattaaccattctctcaataaatttctgtttataaatttttttaattacttaaactaaaaatcaatacatttaatttttgttataaaataagtaaaaaaattatgtataaatttatttttttttaaatatttcgcatttaatgaaattttaatgttagaaaccaaatttattaatttatttgttgcattatttgaaatagaaaaagccaattttggcaaataaaagcggaaaaaacttgatgaaatttttggaacggatgggacaaaaagaaagaaaaaatgcacaaaatgaagaaggacaaattggacaaaaagacgaacatgtaaaagtgatcaaaaggaaaatattgtgcaaaatagagaaaaagaagaggacgaattgggataaaaagttatcagaagaaggcaaaatgagaggagcattttgaaaaagatattggaaggaaggaaggaaatgaatggaaagaaacaaaaaaagatcaagacggaaacgcacaaaatttatgaaaaagtgaacaaattaaaatgttggaaaatattttcaaacaaaaaggaatttacttgagagagggaaaacattcgcgaaaagaatggcaagaatttaaagcagaaattaataaaggttttggataatttcaaaatgggtcaagtaatttgacaaaagaaattttaaatgtcaatttttgaaaaattttaattaataattgttgt

SEQ ID NO: 33745 - DNA, 886 bp, Heterodera glycines
ccctgtccattcactgtcaatcactttccccaaacaaacaaaatggcaccggaggaccaaatcccaaagccccaggcggagaaggaaaatgttgagccacaggcggacccagagaaacaacgcaaacggcgatcaccaccggcaccaatcatcagcgagctggcccgaatgatggatcagctgaaggcctcaatggttgcggaaatccaggactgtttggagcatgtgcgaaatgcgatgatggatgaggtccagctggcgttggacaatttgtgggccaaaatccagccggtcatggtggatcatgggcgctcgattgcggctttggcggatgcatttgatgaaatgaccatgaaagaggccaaggacaaaatggagaaccccacggagggaggtcctggggtaaatgacccaccggctaacagcccaccagagagtggaggccaaaataaccaggctgacaataacaacccaccacagagtggaggccaaaataaccaggctgacaataacaacccacaacaaagtggaggccaaaatgttcagttggctaatcagtttgagcgacccgcccaatggcagggccgagggtcgcgtggaacttggcgtggtcgtcgcgggttcgagaacggagggcctggtcgagtgagctacttgcgacgccagcttgagcgggagtccggcggtcgagtgcgcatccagcacccctacttggaattccgccgtggccgtggttatggaccgagtggcagaattgatcgcgcatttggacaatatggaggacaaaactctggggggccaagccgaggacgccgtgggaactgatgctggcaaaaatctcaccaagaaggaaggaatgttggatcccttcgatgcctgtctgttt

SEQ ID NO: 33746 - DNA, 880 bp, Heterodera glycines
atgaagcactaaactcatttccacccaccgacaaaattgttcaccaaattcaatcgctcaaaaaacaataccctcatcttttcaacaaatagttctaccagacctccaacaatttcttcaaataaaaatatccctcaaaatttctctaaaaattttacccaaaaaaaaaaaaaaaaaaaaaaaaaaaaaaaaaaaaaattttttttccctcttttacaacccctaaaaaaacaacaacaattttccctttgttggaggtctgacttttctaatttctgcttcttcattcaaaatttcaattatcttttatcactacctttcatttcacctcatttccgccaaaagtataaggggcacatgcccttcttttggttatttttatttttatttttgaataaataaataaatattttttactttttgtcgaaaaacccttaaatagcaaacaataaattcaaaaatatgttgtccttgcccggtttacctcaaaattcctggtcccgaccaccctattatttatttctcatttgacttaattttagtatattgttgtgaattttcagggaatagaggcaataatccttcaaattttttaattttttctaaaaatatgctaaaaaccttgtcctccaccccccccccccattttggcaaaaggattttctctgtaaatcgccctgactatttgtataattaactgtgcacagtgtattagaataattgtaaatcaatttataatttttattttaaaatcgtaatatgaataaataaaatatagttcttattcaaaatcatcaaaaagtcatcatcaataaatcaatatggacaaatataaatttatatttttagggccctctgattatttcttcacacacaatgg

SEQ ID NO: 33747 - DNA, 899 bp, Heterodera glycines
agagagagagacagagagacagagagagagagacagagagagagagagacagagagagacagagagagagagagagacagagagagagagacagagagagagagacagagagagagagagagacagagagagagagacagagagagagagagacagagagagagagacagagagagagagacagagagagagagagacagagagagagagagagacagagagagagagacagagagagagagagagaacgggagagagagagagagaacgagagagagagagagagaaagagagagagagagaaagagagagaatgggtattctacaaataaaacaaaatttgaccattttaatacatatatataataaaatgtataattaaattacaatttttaattgcttcggagatggaaaaattcccaaaaattatgtgacagcggccgatcgcttttcactgttctcatcggcacttttctgatggtcaacgaaatggaaaaattgcaacacgaactgacgcgaaagagtgaacactttgaggaaatggcaagtgaaaaagtggcagaggggcgggggcaattaacaaaatagccaagggaaaggctggtctcataaaaaattcaaaaaacctaattaattaaaattattatttaatgatttttatttgaatccgttacgcagaccaacaagatgtgagattttttgatgggacaaaacaaaatcatccgcacggagaaagccaacaatcgaaaacggcggcaatgttaaacattagaaaaaacaaaaaaaatataaaaatgagattaagacggcctttttggtgttgacactttcgccgtttcgccttcgacgtgccaacaaggggtcaagggcccgcaggggatcgcaggagaaccaggcac

SEQ ID NO: 33748 - DNA, 1412 bp, Heterodera glycines
  unsure (1)..(1412): unsure at all n locations
tttttataccacatgaaacataaaattattattaaaaaaattntttttcggcccatctatttttttttttttgctaattaattaatattgaaatatgttattatttttgtatctttaattttgattatttcgttcctcaaaatatgtttttcaatttttcatttttatttacgttttgaaatgcttttgcttatgctttctgggtattcatgttctttatagatcgatatgccaaaagcaggcactttttggccttttttttcttcttcttttgaagagatcgcttcaattttgatcaaagagtcaaaaatgctggaataataattaaattataatattataaaatcatttagattttatctttttgaaaaaataaaaatcgcttggaaatgattgaaaatgtttttaaatctgatgtaggaataattacttaacaattttggtcttgggtttttcttataagggaaaagaaattcaaataaaacaaaaaagaaattaaaattgcatttacatttaaattttcacctaaatttgttcgccattccggaaggtcaaaacattttgtggcagcaataaatgcttggattctgttgtggccaatcttttccgatttttcatcaatttcgccgttggcatttgtgccgtccgctcttttcccatggacatatgccacaattgtgtcccaaattaaaacagcaaattgtacaaatgccattcattcgcatatttcagtgggaatgcttcgctttggtattgttcacttttctcgaacacagcgttggggtcgtttggatcctacaaaatttttgcaattttaaatattctttatttttttattataattttattttattaatttgtaccgtttccacaatcgacggtaagcacagaatgcttagaaaaaggataattggtgagaaaatcatttttcggggagtagggtttgggtttgtcatgggattgtttcagctttttttatgaagtgtgcttttgttgagcatcgtcgggtttaaatagcattcactcatcagtaagtgcaaacaaactacagatcagtgtaactacagaaaacaggcaaatcacaatgatcagaagaatggaaattcataaaaatataaaattatattttaaaaatttaaaataaagcataaaatgacaaatcacaatgctcaggagaataaaaatagaaaattataatgataaaattttaaaaataaagcataaaatgacaaatcacaatgatcaggagaatggaaattcataaaaatattaaaaataaaataataatttaagtataaagcacaaaaatggtaaatcacaatgatcaggagaatggaaatcataaaaataaaaaaataatttcgattgttttgtgtcagctgattttttnnggagatctgatatgctgattt

SEQ ID NO: 33749 - DNA, 991 bp, Heterodera glycines
  unsure (1)..(991): unsure at all n locations
ttgcatgctctgcannggtcttcattgttttcatcacattaataactatcattgttttatcactttatttttataataatttttatttttatcttgttttatcttgtttttatcactattaatttcatttttttatcacattaataactatcttggttttatcactatcactttattttatcactatcaattatcattatttttatttttatcttgtttttatcactattcattgtttaaatcactattaaaatttcattattttatcactgtctgaaaatatcattgttttatcactttatttttataataatttttatttttatcttgttttatttttatcactatcaatttctttatttttatcacattaatgattatcattgttttatcactatcactttgtttttatcactattaattatcattattttttttatcttgtttttgtcaatatcaatttcattgtttaaatcactattaaaatttcattattttatcactgtctgtaaatatcattgttttatcactttatttttataacaatcaattgccatgttttgtttttatcaatatcaattaacattgcttttatcttgtttttatcactatcaatttcattgtttaaatcactattaaaatttcattattttatcactgtctgtaaatatcattgttttatcactttatttttataacaatcaattgccatgttttgtttttatcaatatcaattaccattgcttttatcttgtttttatcactatcaatttcattatttttatcacattaatgattatcattgttttatcactatcactttgtttttatcactattaattatcattattttttttatcttgtttttgtcaatatcaatttcattgtttaaatcactattaaaatttcattattttatcactgtctgtaaatatcattgttttatcactttatttttataacaatcaattgccatgttttgtttttatca

SEQ ID NO: 33750 - DNA, 796 bp, Heterodera glycines
atcaaaaatcgcctccctggcccccggagagtccgccgggaaattcccgaccattcaacggcgcatccagcggcgcccccaattctttttctttgggccgggacggcggcgtggtggcggaggatggtcccgagcgcctcccccaaaacggtcttcatcatccgacgatagctctcgaggagtcccgtcgttggcgttgaacaccaaaaagccctggcccgtgattcccggccctcggtggagggcgctcactcctttctttcctctgccattctcgtcgctaattttttttgcgacaagcagtacggtaatatatggcaccaaaaataaattcagaaaaagcaactttcacagaatttttatcaaagtcattagcagtacagtaatatatggcaccaaaaataaattcagaaaaagcaactttcacagaatttttatcaaagtcattagcagtacagtaatatatggcaccaaaaataaattcagaaaaagcaactttcacagaattgaattgtttaaatatgatgatgaacttattgatgatagaaattaacatgaatcaaattcttgaaaataataattaattaatttttataaaataatattcattctcaatttcggtagtaccatttcgttaatcaatttcgcttgttgttgctgatgttccgattgtttcaaatttgaatggttgtgcccttttctcatcattggcattgtgccttggtcaatcagctcaagttggtgtgctttttgttgttgcgcgtttgcatttgctttctctaatgccgacccccgg

SEQ ID NO: 33751 - DNA, 710 bp, Heterodera glycines
ttttctataaccaataggattaactagccgaaaaattaccctttaaaatgaccagcataagcggatgttttttgataattcgttaccccattttgctggaccattggcaatggtatcaatgggagaaagaagcgattgaatggtaaatcaatcagaagggagcaaaatttaaatttttgttttatatttttaaattttcgatattttataatttttgttttatatttttaaattttcgttattttataatttttgttttatatttttaaatgttcgttattttattatttttatgtgcaattaatttgcgatgagattcaaagtaagtaaatttatcgagctaattagttataagtcataaattgaatacccattttttgggtgctgagtcgttatataaaaacattcaaaaaagggcgttatataaaaaaccatcgaatggatttcaaccaaaaactgcacataacttttgttaaggtaaacagaattaaacattcttggtattattcgatagccctaacatttctctattagttcaccttaatttcaaaaaatttggtcaagtttaagcaaagttatggccaaaagtacccaaggcaccgggttttcaaacttttttggccataacttttttgaaactaagccaaattttttgaaattttggaggctaatagaggacacatagggctatcgaatgatagcaagattat

SEQ ID NO: 33752 - DNA, 920 bp, Heterodera glycines
gagaagagactgagggaagagagaaaagagaggggggtagagagagggggagacagagagaagagatagagagagagacagagagagaagagaggtctgttgtccttttttgtttttgctcttctggcgttgtgctcccccttctgtcattcgtttctctgttgtcccatcaaataggcggtgtggtgttggacagaaaagttgtccatgaaggaaaggtccaattgctgaataaattttgctcttttatgctcaattaatcacttgcccttgcccattcgaatgaaaagtgatcagtgttctctgactgatatcagcaaaattcacctgcatcggtcgctgatcggcggccattcgttgtccgatttgtaagccgccgagaagactctccacgttgggcgcctctaaatgattttggctgagcatcgacacgatttcgtcgcttctgaagggcaaacgaactgatcacaaattgcataaattggaggacatttccatggaattgccctgctgaatgtcccccggcgaccattggttggacattggcgaaggcgaatcgctcccaagtgccgagcacaatttgctgaatgggagagaaggactgatcagagcggaaactgacctactggagtggattttgacaaattaacataattaagacatcaattaaccatcaaaccccccccccccctactgaccttcccgtcgttttggccaccatcacaatctccgattctatatatccccgtcgttgattcgttcgctcgcagccgctgctcctcactttcgaagtaggcaagcatttcttctttgtcgaagtccgggtgcagatatctgatcagaaatatcaatcgatgctcattaattgccaaaggctccgtgggtgggcagacacaaaatgccaataattcaaaaaatgc

SEQ ID NO: 33753 - DNA, 1031 bp, Heterodera glycines
cagttttcgcctattctcaagtgttggcagttgcaggtattctaaccgatttaggtatggaattggtggaaggctgcatttaaaaaatacccttttggtgaaatatttttgacacttttctatttgttaaatatttttttgtagagacggattccaaacctccggagcgtattccaataaaggcctaatataagttttatataacgtaatccaaatcttagatgatttggatttaattattctaaacaaggaactcatacgtaaatacgcattccttgttatttggttaacatgaccggtcacattttttccatttataattgcctcgtaccaatcttccacaactgttattagttgacttgtcgtagacctatttctaacaaaaccaaattggtattccgaaattttattgttttttaggaggaagttgtaaatattttggctaagaattctttccataaccctgcaaagtgagcaggttagagaaataggcctataattttcaggattagatttatccccttttttgaaaagaggtaaaactattgattccttccaaatatctggaagagaaccagaatctaaagaaatcctgaacaggtcagtaataacagttgccaatgaagaatggcagtttttcaatgttttatagcttatatcatccggggatgtaccatttttattcgggagttttttcaaaagtttttgtgtctcgatgatgttaaagtctatatctgatataaagcattgattagcaaaagttgtacccaggctataacagcctgggtcatcttcagaattattaaacgaatttacaaataaattggcaaataattcacatttttcagcaccatcatgatagcatttggtttcaaaaactaaattaggtatttcaaagggattaacctcgtatttctgtatatatttaaatatggaatttcttccctttgaaaagaattttgagaacattgtttggcactaattttttctgaaaaacaaaatcaacagtaaaaaatttaacaaacgaaaaa

SEQ ID NO: 33754 - DNA, 882 bp, Heterodera glycines
ttttctgaaaaaatatttatgaattaattatgcaatcctacatgaaaacgaaagactcagattttcgaaaatttttttcgagccagctagctcggcgctcatttcagtgtaagttagtcctttaccggggagtatccctgcaaagtttggtacgcttctgctcaattagcaaaaaatatgagtgatcgaattttcactaaaaaagttaagcctacattttttggcatatttaaaaagcaattaaaaaatttttaaaatttaataattttcctgcaccgaaggtactcactcggcctcttcgcggcctcgtggtgggccttcggcccactgccacccttgcaaataaataaggcaaacgaatacacggacttactaaaagaaatgagtgctgagtatgattttccatgtagtcatatttagcactatattcttatcacctgtgacttaatagcatatgcttgatttatttttattcattatgtattactgtactcgcttagtatttttcgatttgaccaaatgtatttgatgttttcttttcgtgaccttagacgagcacacacgtgcctctgttgttgctcgatgaatgatattatatcaccgacaacaattttcaggaactatgtccctttttgacaattgccaagagtttttttggaatgggaattgtataaaagctattgctcaactatcctatggcttgtctatatgaagtatgctatacactccgagtcagaaaacgatacatgcgtctatatagaaagagcgcagagaaacattttttctctaccttttctctccttttgacagactatctaatatcttcattattaggaaagacaacatttacttcgctaggctttgtttcttttttatatgtta

SEQ ID NO: 33755 - DNA, 883 bp, Heterodera glycines
ttcaattttagtgtcaaatattctctttcagaaagattccgctgctgataaaaaaattggcaatgggccgagagattaagcaaattagcaaaaatttggcacttgccgccctcccctcaaatgtcttacaacgataaactctgtgaatagaagggcaaaacaagtcaagaaaacagttttagtttttaagagccataatatttttaggcggcgcaaaaatagactgacagcatttctttgattacaaatgcttactaaaaaatgtctcactaaaagtgtggtaagcggcggggccgggaaggctcaacagattttcagggcggagtgaacagtcacaattttcagatgggaaaatgtgtaatggaaaaactttaatcactgctaacgcaatattgccttcgcctaatctatggacacaatcgcaatgaatacagtttaaaaatacatttttcaatttgttttgaattggataaatccatttgccttatcgtttcaatctgtccgccgttctccgcgtccaacgccgtgggaatgaatgctttggctgtttggaattttttaaggattgggcaaaacggcgcttttgatctccattttttcaccacggcctcctccgttcaccgcctccgccatcagcgacagcaatttgcatttgtgatgtttttatgttttgtagaacgaaagaacaatggaaaaaattacaaaaaaaagaaaccgattggtacaaaaagaaaggaaaattaatggggttttattacatgtggcggatggcacaaaggtttggcacgggctcaacactttgtattcattgatctatgcttaatagtcaatttaattagctttgtgcaaagaaagacctgcctttagatatgtaatttaatta

SEQ ID NO: 33756 - DNA, 953 bp, Heterodera glycines
  unsure (1)..(953): unsure at all n locations
ttcacgtccctaacgatcagtcacggaacaaaaaatttttgtacgcgttacgttccggacaaaaatttacagtgacgacggaaaaatagggtttttcatttcgctttttccattttcaagggaaaataatcacaatccgagttgaagcagtggtcagccaaagaaagcatgccctgctcatatttggaaatatcgaccccgtgttgaaggtaaatttcaaatttataacttgaaaaaaattccaacacaaaaaattgtttagtgtcgcctgcctattctttagacaccccttgaaaaatttttttttattgaaaaaaaaaattttttttttgaatttcaaataaatgatgcagaaaatttacggtttttctctaaaggtgaccaaacttttcggcttttttctaaaatagtaaaaaaaaaaaattatttttttacgagtattttgaatttattatttttttgtttgctcttttccgctgtgcacaccgttaaaaaatcggtctcggcctttttaaaaacctaataaatttatgaaattttccaaactaacagagatcatactgtaatgctattaaaatatagtagaaccaccaattgacaaatatgaatgaagtttagccttgaaactggggacagagttggggaggggaaggcggaacaggaaaaaacttcgccgccgaaattatttttaatttttcaaaatgagtttttcatgaaaaaatcatagaaaattcttaacgaaaaggaaaaaatttataattttttaccgctttttgaaattttatgacgaagtattaaatttatttattcggcgaaacaaaatttcggcgtcgtaattttgtttcggcaaaatttagtccttcggccgagaaaatcggttatggtataaaataattgggttttttggggcctcatctgcactttaaggacattgttaganaaaaaattttttt

SEQ ID NO: 33757 - DNA, 924 bp, Heterodera glycines
  unsure (1)..(924): unsure at all n locations
gtataaattataactaaatttgagatttttatgtgccaattgctctgaaatatgtaatataaaatatgcaaaaaatgctgaaatatgtgctaaaaccaaaaaaatgcaaataaatgtgctaaaatatgattgaaaactagaaaaaatagccaaaatatttacgatatgtttcggagaaaatgatatttttggcttctctcgatctctttttttccctttactccgctcaaaatttttccatcctatttgttaaataaaaattctatttttatcttattatagacttgacagatttagtcatattttgacatttttctttttttttagtccgtactgtaatttttttttaaattgagcccccggggctctatttttgaaccccatcccccaccttaagggaggaaggctttaatggagggggtctattttaggggaaggagctatgttttcgtaaattaggtattaaattttttgcgtttttaaatacacgcaaattgacgcacaaagaattcaaattgcacatattttaacatttttggtgaatgagcacatattttggtgacattttttggcccgtaataattctaacgccaattatgccactccaaaacacttttggcaccctaattacccgcttccccagaccttaattagtgcaactgtttctctaatcacagactgccgatgataatatgcttctccgttccttcgtgcaagatcgaacaaatttcgccgaattatgcaagaaattggaaaaattggatttgatgaaaatgatcacttttgtaaccaggcgccgtggcaaggctgtgtacgatagtggggaaacggtggaatatttgaggcagcaattcgaagcataccttggcgtaatgcatttgatgcgacaganatgggcctgtgagcattntgagaaagcaaagc

SEQ ID NO: 33758 - DNA, 517 bp, Heterodera glycines
gttttttgaagttttctagccataccttttttgaaacataatgaaattttttgaaattttgcaggctaataggtgactcttgaggctattgaatgataccaagaatgtttaatgtgtatgcttctaaagaaagttataatgcattaaatttgtcaaaaattttttatggtcgtgtgaactgcaatagagcccagcttttaaccaaaatgaaatttttgaacaaattttccacaaggcctcaaacaatttcacaacaccacaaaaatttctggattgacagctcaaaacccacaaatgagaagggataatcccgcacaattgggagtcatgaaaaaaagattaaccccaagttaaatctttttcaacaactcttggcaatattttttttggttatttgcaaaatgattcagtgtcggtcgatggccaaaaagaaacgagtcgggtcctcattttactattggaattattaacgatgacaaaaaatggcctttttattcgccgccgttcgtgctttccg

SEQ ID NO: 33759 - DNA, 1083 bp, Heterodera glycines
aaattgaaactcttctcctcatgaaaacgcatctttcaattaaaaaggaaaaactgaataaaattgtcttttttacttattccaaattaaccgcaaaatcacgcgacgcgcctctcatactgtaactgtacatttggtatcactttctgcatactgtattttcggtagtcgtccgtgaggaattcggagtgaaaatttcgcattttcaccgacgcttcgttcgcttcgcgttcctttctctgccgcgtattacgcataaagatggaagtggccaacatcagcagcagagaaaagcggacgaaatcagcggaattggccgaacagaaaaaaaagggaaaagaaaaaagaaaagaaaagggaggaaaagggaaaagagggggaaaagaaaaaaagaaaaagtgaaaaggaaaagaaaaggaaaaggaaaaaggaaaaaggaaaggaaaagggaaaagggaaagggaaaaaagaaaaagtgaaaaggaaaagaaaaagtatgataatagggaaaatgagtgataagaagtgcttgatgaatacaagttgattagaaagaattcacatcataaacaatgacttccctaaacaataattaaaatgtttaatttgttttatttgtgcattttttttatattcgttaaatgaattttatggattttggcggtttcattttatgttattgccattgtatcgcagttgtgtcgagtcgattatcacttattttcaacacattctccgcttgaaaagcgacgaaatgcgatgctttttccattgggggaggggacaaaaccgaaaagacggaaaagccaaagccaaagaacgaaacgaattgatcggagaatgaatggcacaaaaacaaaagtagttttattgcatttgataacatcaaaaggaattcgaaaagttggcacaattttattattgcaaaaagagagaagacaatgaaatgactgactaatgatttttcatttgttcagttgtgtgtgtccaccccgaccgagaagaaacggcacatccaatggaaaatggactttttggggaaaaaaacaaaaaacagtgccgccctttttttttggagggggg

SEQ ID NO: 33760 - DNA, 898 bp, Heterodera glycines
  unsure (1)..(898): unsure at all n locations
aaaaaagtttgtccccccatacatcaaaagttttccaccccccnccgtccttatcaaaatttcaaaaagtttccacatgccaaagccgtcagcacttcaaaagcgactccgcctccctcactctcagaccagagtgcctgtggcacacgcgcggtaaaaccatgcgccgcctccccctcactctcgcacgcacccctccctcccgcacgattcgactcgcattcgttacgcacgctctccaggtgtttgttcaaattaagtatatataaaaaatagccctattcagggatacccattcaacccttgcttgatgggaacgactgttcgcgcgagtgtgcatattcgacttccaaagatcagcgcaaatcacgacgacttcaagtccatctgtgaggagttgaaattgcagatccgcgggattcacggcgaacattccgagaggtaattatttattgttctgtttttgaaacaattgtcctttatttagcgctggcggcgtttatgacatcagcaacaaggcccgtcttggtctcacggagttcgaagcggtgaagcagatgtacgacggagtgaaacacctgatcgaattggagaagaaagcataatgggaggaccgatctatgatgatgactttatattgcgtaatgtggagatttgctagttgttctgaatctcttaggctttaactatttaattattgtcccaaaatcgtgcttcatccgtatgattatttccgtgcataaatttgttcgtgttctgttcgagtattgaaccccttcattgcaagtggatactaacaagcgacacccactaatttttattgattggtgtgttaaaaattggttaggaatcagtaaaatggttaaattgatggttcggcacccatgacttatgccgc

SEQ ID NO: 33761 - DNA, 1292 bp, Heterodera glycines
ctcctacgaagtgaaaatttttctcaaaaattcatttcctacctgagaacttttaactttaaaaattatttttaggtaccttttagggtttttgtctttaaacatcccagtcctactcatttgcaactgcaacaagataataaaattatttttgcttaatttttggctaaaattatgtcacttttcccactgttttggcatttttactcactcactattttaattaactattttgagattttcgtcactaaaagtagcgaccctactaatagctatttaaataaaaattactttatcatgtatttcatttggttttcaactgtttgggtaaaccactgccccgcttggatagcccttccaaaacggtcgttttcacaccgaacaacgatcacattaattttcttttctttgatttcattttctccgtccaaaaagaaatagtgactttgtgtagcaaggatcgccaactgaaatgcgttactccaatttgggaaaacgatgactgtgtgaaaatatctaaatttaagaaattacaaagataaaaacgaaattaggcattttgaaaaatgaaccagtaatactttggatggtgcccccccccattttttggaaaaatattttttgttttcaaaaatcatgaaaacatgtttccaagggttgttttatttaaaaaaagtctttttaaataacttggggatatatcaaatccaataaaccgtaaatgtttaaatttgaaatttattacttacttttttgggcctattatatcaagcttttcctttaccctctgcgctacttttttatactcggcttcactctcaacaatagccgttgtaccaattttattttttgcatatgcgcgcgaaattgttggccaagtgacttcctgaattcaatttatatacgaaatgaatgcggtttacctcagtgtgggccattacggtagaccggcacggttgggccctcaactttgggccccagaatgtttttgcactatatatatttttctttgtcgaccaaatcaaaaatcatggtacctttcgaaaacttaacatatttagaagattttctagctattgctttgcgattaaaaaattgataaaaaggttataacatcaaaaaccaaaaaaggtcaaaatttttgaatttttttttatatactagaaaatctttttgctttttgtaaggcaaatagagcacgtcatgatgagccgaagttaccaaaagtataaatgattgaaatatttaaatttattaattattattaatttatttgttatataataaatcat

SEQ ID NO: 33762 - DNA, 671 bp, Heterodera glycines
ggtgctatgacgttagtcaaaaaccatcaaattaaaatattttttgatataactttgctcaaaagcaacaaaatttttaattcttgatatcaataaatatccctaagtgatttctattatttaaaagaagcaattgttgacttttataaaatttatatagtttaatcattaaaattataatattattattttttccacattatatacttaagcattgacaaaatttgttaaataaatattatttttgttacacaaaacggatgtataattaatttaataatttttcaagatcacaatactataaagaaattcattttttaatattagaagtcatggattaaatgctgaattgttttctcagtttattaccttttcatttttagaggaagaaaatttttgtcttttcaatttactattttatggattgattgaattttgtaatcatttgtttaaactagagtagagcgggaccgggaattttgggcaaaaccgggacctgagaagccgggacctgagaagccgggaccgggacctcggattttgtccgggaccgggaccgggaaccgagaccaaccgggaattttaaaaattcaaaaaaattttaaaattaaaaaaaaaattcaatttttttttatatcaagggaaataatacaaaattatttggtttttat

SEQ ID NO: 33763 - DNA, 616 bp, Heterodera glycines
aaaacaacaaattgctgctctctaatcagcatggtgagtcataaaaccgcaccaaaattaactcgagactaaagaccaagaagagaatgtcaaaaaaatttagtggatgaatttttaagagaagttttaaattcttagtggtatttttgaaaaaaaaattcaggttgattcttagggatgtaacaaaatcgcaaaaagaagtggtgaaagtgactgcaactgccggttcaacactggcgtcatcaaattgtacgccatcggcagtagttccaacatcgatcaacaaccgaagcaaataattgtcttccggcatttatgggttcgaattccgttttctaatttttgaacagccgtcggaatgccgatttccaatctgcatcgcgcttttttcaaaaattcacaatctgcctaagtcgaaccagattaaaaatgtaaagttcaaacatcaggcgggcggcatgaaaaagacattttaaaaggattaaagataatctgaggctgtttataaatgctgttagttaatgcatcactgttttataaatagttgatcatcacaatataaagtctcattttattgatcctcgaacgggggctcacacgcagactattgagaggc

SEQ ID NO: 33764 - DNA, 901 bp, Heterodera glycines
ctgagaaagccctcgacagttgctctaatccgactcattgtctgcagtcgctacaatcggtcgctggaggaacagctgatcggtttcacgaagacggaaacaaaaagacatcagccatggtcatgtccacgggtgggccccactccaaccttggcctgatgagcagcagcggtggaccgcactccaaccttggcccgatgaacccacattcggtccagaatccactttctgtgcagaatcctcattcggtgcaaaacccacaatctgtgacgggcattgccccgggctcagtgaaatcgtacaatgatgatatgcagcatcaaatgcaacagcaaaaagcaagtggaagtaaagaggaaggggcaaatgaagaactgacagttgtggagcagtacaacgaatccagggaccagtttatgaacgtatgcgacaacattgagcgcaacatggtatcattgacattggacttttaacaatagagtgtaccttagattatttttgggtttttgtgtcggaaaaggggtccgacgtaccgacacgcgaagttgcaagggtgggggataccgagagaatggaccggactattccatactcattagaaaattttcagcaactcatcctcgaagtaaaccgtcaacagagcaagctgtacaatcagcagcaaaattctgcagtcgcgtgggttgaagtgacatcaatgttagggtgagccactaattttaactcgttcattcaaaaacgcattttcaagtgttcacaccactacgctgcctcaggtactccgcggttacactgaacttatgaacgccgacaaacaagcaatacgggagaacatcgatagcctgaacagcttgctgacgaagttaggtggtgtagaacacaacaacggacgagcagcaaa

SEQ ID NO: 33765 - DNA, 85 bp, Heterodera glycines
tccactgacgcgcgctacaccgaacccgctcaactggccgccagcaacgatcccgaacgcatcgaccgcgacggcaccctggtcg

SEQ ID NO: 33766 - DNA, 993 bp, Heterodera glycines
  unsure (1)..(993): unsure at all n locations
attaccctttccattctacatatttgtaaatggcaaagcaaaacataatagagaaaacggcatattgccaatgtgtgctgaacataatgaataagcaaagagcggccccgaggacggataacgacctaaaaaaagaatgtttcgccgattttggctaatatgggaccagtgatagtaaacgaaacgaggacgccaattgggagcacccaaaatggaatgcaaagcacaaatgatgttaacgaaggcgtaacacatcagaaagaaaaagtcaagcacagccgcaatagtgtccattgcgcccatcaaaatgccaagttcggcgatgagagtagtgagcagcaagccgaagaagggctgaaattgtcgaacgaatcaacaaaatcacaaactgttatcaaaacaatacctcattgcttttggtcactttggcgaaacgtttgaggaagggaattacgttgtctttggcaatgctctgcaaaagtcgaggcgcgcctatttgcgatgaaaaaggtgagaacaaaaaacaaagtttcatactgcaaagacactgaagagcagcaccgaaggtagaaaggaaggagccgaccagaaccacccattcagtaggccatgccaactgcgcaacgaccattcgcccgtccaatgagaggccggtcctttggacgagttaagcgtaaatgggaagtgggcctacccccgaacaattttatccaaacattcattcgaaaaatgaattgcgtttaaaaaaggacgcgggggagaaaagcagcgagagggggcgagggaatgaaattatttttaggtttttacctattttcccatttttagcacctatttttgcagtttttagcacctaaaaatcgtatccccataaatgaccatttccccgccctttgtccacgctcttctcccacatcgtcctgagaaatcgctcatgaaggtngaatttcagtgaatatatctcccactgtctctgatcagttcgggtttgat

SEQ ID NO: 33767 - DNA, 284 bp, Heterodera glycines
aaaaaggtcaattttcaaaattaaataattcttttgctatagtttgagtaaatttttttgtgttcgttttatcagtcattttcggcacattttcgaatggtttcccaccgtaaaaaaagcctaaaaaggcaaaaggtaacaatgggaaggaatgggcagggcaaaaataaagtcttccattccgttctcaattttcttcgtcctttcccaaaatgcatacaaagaaatgacacgacggcacacatttgtgggtgccgcgtcgggggggggggtgaattaattat

SEQ ID NO: 33768 - DNA, 1136 bp, Heterodera glycines
tgttcaaaaatggaaggagcaattctagtgcacatttcggtcttttcaaaactgctcaaaaagtgaatatgcaaatgtgttcaggtgacaattattgtgttttcgcgttggtactacaaaacggagttattggacgaagacatgaaagagaagctgaggaactcaatggaccaccgagaccgatactatcaggttggacgggaagagaatacaacgacaatgagtcgcaatgatccaagacaggcctcgttacctagaaaattgttttgggaggggcacccgaaaacttttttacttcgacgttatggggaaaataggaaattttagccaattttctccaaatttggtatttttgagaccaaattttgtataaaaaagttttgaatattgggacccggtggtcccaattggcgccgtggggaaattttcgaaaacctgacccaagagaagggtaaaaccctgggaaattctggcgatgccgattttaacactcattgaccacccgtaggatttctattggctgttggtgcaaaacgaacattacaatgactggacgcatattttgtcaaaagtgagcctctgaaaagcctttgctttatccgtcgtttaagctcaaactgaccttctacaattacaagtcgtctattgagaaatacaacagagaaacttttccggtaattgctttttgttttgttataatccgttaattgagtcattaatatttttcttttttaatagacatacggaggagaaacctcattttatgtgcaaactcacgcactttgctcaattgttgattcatttttattcttttcatttttgtttttaataaagattaatattttcaatattaaatgtgttttatcagtttatcaaataaattgttttaatacatggtaatattcgaaacagtcattatactcttatccctaacatttacagtaatttgccaattgattgacggcggtcattgaattcctgttatttgtgttgtttctatcgtttttttgtgacaaatgaaatacgcccagctaggtgagtttggctttatcagttcgcttcaaaagttgtcaattcgcaatgcttttgactttttcagttgtcggccccgccggcagtgggaaggtaaaaagaaa

SEQ ID NO: 33769 - DNA, 213 bp, Heterodera glycines
tgggattatttttcaacctcctcagaaaggggggcataattggggacagcgggattaatggagacagggccataattagagaatatacggtatgtagatttgatcaatcaattaaatgcactcctggacatgacatgaggaatcgaaggaattagcattgacgaaaaccgcttttcgtgacgcgctttttccaaaaacttttgagaacttggg

SEQ ID NO: 33770 - DNA, 1236 bp, Heterodera glycines
  unsure (1)..(1236): unsure at all n locations
ggtttcctataaagaaaatatgatccctcatagtttttttaaaattgatacatattttatcatttttaaatgaaaatcctaccaattgagcttataatcccaaaaaccaatcttttttgnttgaaaatctgttaacaaattacacctaatttttaaaatttctcacgacggcgcctatcggcaccgccggaccccttctttcccaaaagttttttgaaaaagcgctccgaaaaaaagtgatgtgaaaatcaaatctgaatttctattaatattcgatcatttagtccaaaaatgattaattgtttgaaataattgaagaaaatttgtttggaaattttcattaatttaatttagctttaacttttggattttattaaataaaaaccaaataattttgtattattttcacttgatataaattaaaatttgaattttttttttaatttttaaaatttttttgaatttttaaaatttcccggctggtcccggttcccggtttttcttgcggtcccggtcccgaaaaaatatcgaggtcccggcaagtcccggtcccggttttggcaaaattcccggtcccgtgtcactctagtttcttcccatttttctccaaatatttctgcaaaggttttttgttcctttttttctgctccaatttcaattagagtaattaaaaatgcaattaaaatggaaaataggcactttgggacaatttttttctaaatattcaagttgtaattaaactcacaaaatgaattttttgcgctaataaatcctcgacttttaagtgagttattgacagaattgtaaataataaaaattatacaatttctctctactaattagtcgtatttaatatatgtaaataaaaaatatttttaattaaataaaaggggagagagagagaagaggagcgatagagagagaaagagaaaaaaagaggagagagagagagagagacggggagtgaaaagagaaagaaaagaggagttgagagagagaggtagggagggagggagagaaagagaagagcagagagagaaagagcaaagaggagagagagagacggggaatgagagagaaaaaaaaggagagaggaaaaaggagagagagagagagagagacgggaagagagagaggagagagagagagaaagggtagagagagacgggaagagagagagaagaggagagagagagacgtgacaatatgaaagaagggtaatttagttttcaaatc

SEQ ID NO: 33771 - DNA, 258 bp, Heterodera glycines
ctcaaagccaatgctttctaccggctttgccaagaacaaggatgctgacggcctgagcatggccgaacccggagccatggccgagcagctcaacgccgaagtacgcacccacacccgtatcagcggaatcgaccctggtcataagcgcctgtggattggtgaggagcaggttatctaccgcgacctgattctggcttggggggcgcaaaccgtgcaggtgccggttgaaggcgatgccggcgatgcgatttttccgat

SEQ ID NO: 33772 - DNA, 868 bp, Heterodera glycines
gttcaagaattatcgactattttttaaaattattattgttttttgtcaacctaccaacaatgagcacggcacaagccaaatcacgcctgtacaaattcatcagcaattgcaaacgctgcgaatggcaaatggtgctgctgctgcttctgctgtcattgttgttgtctgttctcgcgctgatgccattgttgttgttgttattgtcacaattgttggcacaatgccaagcggtgaacgaattaacattcatgttgctgttgatgcttctgtccacggtcagcaagtcgaccagctggttgcaggtcaaaattcgcgcattgtgtattgtctttagctgggcacctgcaatggtttattagagtgaatgaacatcgattttttttttttgaaaattcatgcaaaaatatattaattttatagacgaggaatgaattttctgagttcccgagactttaagctttcgtttggtaccatgaatgtgtgttttggccaattaagaaattgaaaatattggaacagagccgaatcgcatacccgtcgaaaatcggttcaaaaagaaattttgttaatttcaaattttgcaaaatgtttgataattgattgtattgattagcaaattccgaggtattccttcctgcttaagtgcctgatgatgtcaagaaaaaaaatttttttttttttttggaagtttgtacttccacagaccaatgcaaatggtgaagctctcagaggagactttggatgttgcaacgggctgacgatgaatactgccaatgtcagaatgttgtcggtgtacggccataattttcgaatcgcacgaatgtgacctaaaataaaaagtgcaacccaatttttttctactcacact

SEQ ID NO: 33773 - DNA, 285 bp, Heterodera glycines
atccagaatgtagccatacagactgaagcagaacatcgccggagcgtaaccaataaagctacccaacgccatcgccgcacctgttttattttcagcaatttttgcttcgccgataggtgcaaaaaatacggctcgctgtgtaaagactatcgcgccaaagcccagcgtacatgccatccctaaatagaccggcatactttcgtgcggcagcataatcaacagtacgagcgcagcggtactaatgataaaggtgtagcatagatatttacttggcgatttcaggat

SEQ ID NO: 33774 - DNA, 298 bp, Heterodera glycines
taataacgctgcggacatctacatttttgaattgaaaaaaaattggtaattactctttctttttctccatattgaccatcacactcatactccccccacccttttcttcttccgccacccaccctttctcctccttcattttttttcctttccttctccaaccctctcctccctctcttgatagcttaaactgaaggcgggaaacgacaatctgatccccatcaagctagcttctgcaggtcctgctcgagcggccgcccggggatcgatccccgatctagtaacatagatgacaccg

SEQ ID NO: 33775 - DNA, 1573 bp, Heterodera glycines
  unsure (1)..(1573): unsure at all n locations
tagttttttaaatggggattttgaaaattaccgtgaatataaagtcaatgagtataatttttagaaaatggcgaaacgtcatagaaccgaaaggaaagagggagaagaaacagaagaaagggaagagaaagagaacaaagaaagggggaaagagaaagagacagaaaatgaacaggaaatgagggaacttggccaaatggaggtcataaattaattaataaagaaaagtcaggaatttgaaaattcaggatcagatttcgggtgggagccagaccgggtcggattttactaataaaacattgtttttcaagatcctgatccaggtcccaaacttttgaccctgaccacgatccgtttctaaaaatgcctaaaaaatttaattcgagaaaacaaaattattgaggcgtcattattagtgctcgactttttgaaaaaagactgggcctggatttgttgggcctgagcctggcttgcgtggacaaaatttcggaaaaacaaggtccatgagaaacccaggttgccgaaaaaggcccggaccttgcttgacctggatctaggaaaatccagacttggacccaattccaggtcgagctctatcaactttattatagttaaactanatgtacttgtcaaaaatatcttgagactcccggtaaaattatcaaatagcctcagcactttagcttaattattttctttagcatccgttgccgaattatttgttgccagaagacaaaatcccggagtataagctgcacaaatgcacacagtgtttatgttcattttattgggccaaatcacttcaaaaacactcatgcaaaggccaacagacggagaaagggacagaagaagaaaaggaagcggtgatcagtgattgattgaaaatgaatttataataatttaaatggattaattaaatccgaaatttcagaaacaaactgttactgatgctaataacccgggagagcagaaggaggcaagtcaatccgatgcaaaagcattgggtgaaaaacagcagaactgttatgatgaggtaaatgggttttccagatctgggattttccttatctgctaaaagtctgtaagaatttgcataaaattagggtttgctgatttttttgcttttttgaaaaactttacctgacgctgtctttttttatgaccaactgaaacatgatcagcgtcagacacatgaacaagctataaaatatgtaaatagaaggggaaaaatcgaagcccgacccggacttctttcttcgacccaacccgatttttttctccacccgctacaatccgggaagacattatttttaataaaacgttaaattaattgttactttttatttcaaatttaacagaaaaccaaagccaatgctgagaagcaatatgaggtgggtatttaattgaatgagaattaattaactactaattacttccattcatttacaatactcaaatgattgttgtaatatttgcataattaattttttanatttttaatatttctanattctgttacatggaaaatttgtgtttataatttattagtgtgaaattttgcaaaaacgctatt

SEQ ID NO: 33776 - DNA, 996 bp, Heterodera glycines
ctattttaatattatctagtcagttcatttaaataatttttatccaaaaaatttttttttgggttttcggggcagtccccctgaaccgatgcgcccagatttatggggagaccgaatccttccggaatagcttcactatagcctgtactttaattctgcgttggatttttgctccccataattgtttgagtaccccaaacggacacttgaaaaaatcgatttatttttgttttcggggcagtccccccgaaccgatgcgcccagatttatggggagaccgaatccttcgggaatagcttccctatagcctgtactttaattctgcgttggatttttgctccccataattgtttgagtaccccaaacggacacttgaaaaaatcgatttttttgttttcggggcagtccccccgaaccgatgcgcccagatttatggggagaccgaatccttcgggaatagcttccctatagcctgtactttaattctgcgttggatttttgctccccataattgtttgagtaccccaaacggacacttgaaaaaatcgatttttttgttttcggggcagtccccccgagccgatgcgcccagatttatggggagaccgaatccttccggaatagcttccctatagcctgtactttaattctgcgttggatttttgctccccataattgtttgagtaccccaaacggacacttgaaaaaatcgatttttttgttttcggggcagtccccccgaaccgatgcgcccagatttatggggagaccgaatccttccggaatagcttccctatagcctgtactttaattctgcgttggatttttgctccccataatttgttgagtaccccaaacggacacttgaaaaaatcgatttttttggttttcgggggcagtcccccccgaccgatgcgcccagatttatggggagaccgaatccttccggatagcttcctatagcctgtatttaattctgcgttggaattttgctcc

SEQ ID NO: 33777 - DNA, 1281 bp, Heterodera glycines
cgaaaaaatttcaattaaattcaataaatttccaaaaatcaaaaaatgctgaaaaataaatttttaggggctggcgggatgcattaaaaggggctgatgggtcgactaagatttttcgattggatccgacggtaaaaagtagagtgccacgggaccgggaattttgggcaaacccgggaccgggaccttttcgggttgaaaacccgggaatttttggctgggaaaaccgggaaaaaaccgggactagtcccggtcccggtcaaaaccgggaccttggtactcagttgtccgctaccaggtcccggtcccgtggcactctagtaaaaagttgatcggaaatcaaattattaacggttcataaatttgactatttttttcttttcaaaaccacttttttgcggtgcaagaaatcggaaatttttcaaaaaatatacaatataataaaaaaatttctaaatattttaataggctaaattttttaattcttaaccaagtaaaaggtatttcacaaatgtttttagtatattcgcttgaaaaaattattcaattattttatcaaaatctttttttgtcatttttcaatattttagaacatttttgggaaaaggagtgactatttacacgttttttacagcgcgattttttcaaaaactttttgggaacttggaggaaagtacggcggtgccggtaggcgccgccgggaaatttttaaaaatttcagttcaatttattattagaaattgtacaaaacttactagttttttaaaaaaaaattaaaaaatttacgacttttcatcaaaaatgtcggaaatcggaagtctttccgtgccatacctggtgcatatcgacatctgcgagaaattttatgaaatttaatgcgatttgttaacagattttgtctaaaattgaccaaatgacgcagtttttgactcaatttctacaggattattaagtaaaagcctatccggcggtgccgataggcgccgccaggtaaaatttcacaaattttgaatgaaatttgcgatgaaaaatgagttaactttaattaaatttattatttaatttatttaaaaatatttggcattctgtcttagaaaaattttcaaaaaaataataaaatcccgcataatcccgcacaaaaaatcaaatttccggatcccgctgcgggattggaactcaaaattctttgcgggacgggatcccgcgggattaatcccgcaaatcccgcattttccaaaaatgcgggattgcggactgggatccgcaaaatcccgcgcggga

SEQ ID NO: 33778 - DNA, 1114 bp, Heterodera glycines
accgccgtcaattcgacgccgaaggcaaagcattttctgttgcctttcgtccatccgttccatttgaaaagccgcgtcgacaaatggaagaatgttttggcgcttttccgtgggcaaaagtgccgagtcaaaggacagcaaagccgagcaattacagtgtctaacgaaatctttttttaattgaaacggcaaaaaatgagtgcctgcagaaagctttcaaatgggcacaaaaaagttccaacagatgcacgtcagcccacaatggggaggacaaatccgtaatgagaagccgcaaaaaattgtcattggactcagcgaattggcgatggattttggaccaaagatttgcgagcgatggctgctgttggtcgcattcaaaaacaatgacacggcctaaggcaatcagccgatcaatgtccaagtggtcatcgactcgagacaagtcaaacttaaattgtgctgttgataaatggacatttcatcacacattaaaaaaggtgggggtgaaaaaagggaagagaaaagagaaggacacacctgaattgcatgtgtggcgaaagggaaaggaaaagaaagggggtggaggttcgagtccgttgtgctacatgaaactttatttatttttgtccaaaaatttaaaattgcttttgaataactttctagctaacccactttttgctcctaaaaaccctccattttgtccgtcattttttcctctatcgatatgaaaaattaaaagaaatctagagggaaaaagtttcttagagcaaataaattgtttctgctctattaacagagacaaagaaatagtacgccaaatgggaggtgtgtttccccgataaccgagcccccccccttttttggattttgccacctttgtcgctcctttgtctccgttttgttcgccttttttcaatggtcctccaccgatcgtcgactcgtgcgtcggtttcgtttggtatctccacgcgattttgagccgttcgttcgattccgccgtcccttcgtcaccatccatccccccttttgtgctttatgatggcacttttcccaaaagctttcgcattttcccgaaaagggactcgctaagaaaagcttctgtccctcatccaat

SEQ ID NO: 33779 - DNA, 991 bp, Heterodera glycines
caaggtccatctcctattcatcataaaagtgtgcaaaaatcgttgaaaaattaaaaaaaaaattcttggaattttttatgaaaaatttagatttttttaaatttttgacaattgtaaaaacaggaaaaagtacactcaacttgagtttggaccgaccaacccaaaaatggatttccccatttgtttttttttgtatccgacaatccagtctcgacagacttggacactccaatcccgctgccaaaactcaaattgacgcaaatgccgtctcttatccagaaaagaaattttttcgtgggtgggtggacgacaaatagacaactaaagacaattaatggtccgctggagtcgaaatatgccgctttggaaaatttccgaaatattgggaatttcatggaatctttaaaaaagacttggtttatcccccccatacgcaaaatttaggtctccctgttatttgtggtctattaatttttcacttttttcagtacaatgaaccaccggaagccaaacttcccaaactccgctggcgcttatatccgttcaaggtaaaaacaatgcgttttcattttgaaattcagccagtttttttttcaaaaataaattcaatgccatggattggcacaattttacatttctcaaaaaaaaaataaattgtttttcactgatttttcctgccttcctaaatttgtgggtccggtgacaatcggtgctctgtcacttattcattcacttctccccagggtgacgatactttaccggtgttttacatacatcgtcagtccgcttatctgattggtcgtgatcgcaaaattgccgactttcccgtcgaccatcccagctgctccaagcagcacgccgcgctgcagtaccgctcattgcaatacgagcgctcggacgggtccatcggacgggtgagagagagtccgtgtactcgcccaactccgccctttttcacttttttacgagaaaatttcatgaatggttgaaa

SEQ ID NO: 33780 - DNA, 550 bp, Heterodera glycines
taaaaatccttaattttcttgaaaaatttgctcaaaatctcaaaatttgaacaattttttgaaaaaactgttaacaaatcgcattaaaaattacaaaaatttttcacccatgttccctaaagtttttagaatattttagatttttcaaaatttccgttttccaacgtttttggggtcggaatcccgatttccgaaaattttggagcctcggaatgccatccctggtatgcaccacgcacttcttttatctcctctgtcattttcctcaattttttttaatttttcaaacagaaatttcaaaaaagcgtaaaaaaatttttccatgaatatctaagttaatcaaaattaaaatttaaaaaattaattcataaaaaaaattttttttttaattttgaatttataattgaagaggtctttttttgcgcctgaagtgaaatatagccgaaatttaacatttgagttttttttcgattttggggttgaaatacatgtgagaatttaaatttttaccaaaccggttccgggcccggcaatttgaaattccggtttt

SEQ ID NO: 33781 - DNA, 530 bp, Heterodera glycines
ttattttttaaatttattgttttttattatttaaactttgtattatatcaattaaatgtgactcttttgaaatactaccaaatatatttcaaaaaatttatttgtttgctaaaatttgtaacacaatttttgatattcatcgagtttttatattttttaatgtttttatttttggtttcagtccgttttaactcaactcaattttttttatccttgtctaatgaaatcccagttttacaatggtggccgcactttaggtcaaattgataaatactaaaaaaataatatttaattgactaatctttaatcataaaatgagatataattaattgttatatttacatataagaataaaaattaaataactttaatttatctttatgtaaaacaaatttttttttcttaaatgaaattattcttcaattattaaattagggtgttgcaatagttttgcgccaaatttttgtttttgctttttgtattttaatttgaaaacgaaaaaatttacttatattgatccttgccttttt

SEQ ID NO: 33782 - DNA, 990 bp, Heterodera glycines
agtaataagatctgaattattaattagatttttaaccccaatgcacggcttttttccaaactcgattttttttgcctgagaacatccctaaacgcacacaccggaagtgtccaactccgaacggtcgtaggacttctggaactcgccctgaccaggctggaaacgctccttcacgttcacctacaaaaaaaaacggaaaatgtgagctagggcaatcgatgcaagccagggaaaacttttttttttgaaaatcataggccacaacctcctcaaaggatgaaatttttttggaaattttgtaagtcatggggcaggcaaacacacggacccctttgagcgcctccaattcgtcgcgcattgcgctgtcctcttgaatgtccgcgccctccaagtcgccggtccgccacttctgcttcacctcgttcacctggcttttgatctcctccagctcgtccttggtggcaccggctgaaaaagaaaatcattttttttgggggttttaaaatctaaatgtcaaacatttgggttcatttttttgggagtttaaatttaattgtcaaaaatttgggtaattaaaaaatggtgggccaatcgcagcctcaatggaaaattacggtacttacagtaaagaaacgatgccggagttgccgtaagcattttttgggtggtgttattattaattagtagttaaaaaaaggaattatatttgatggatattttgggtatttattggtaattagttggctaattaattaaggcaagtctatgaaggaccaaatgatgttgggaaaattattgcaaatacaaaatgtatgccaattccaaaatacttatgctatatagcagggatggagttccgaggcactaaaaattttcggaagtcggaattccgaccccaaaaatgtcggaagtcggaactcggaatttttcaaaaaaaaaaatataataaatttaaaaaaaatatttaataggctaaatttttaaattttt

SEQ ID NO: 33783 - DNA, 658 bp, Heterodera glycines
taactagggtataaattatattgactaaaaaacgtcaaatatggacataaaatatggactaaaaaagcccaaaatattgactaaaaagctcaaaatgcccaaatattgactaaatatggactaaaaactgtcaaaatatatgttctaaaccctccaaaattcctaaaaaggtttatatattcaatatttgcttaaacagacttaaaaatacgctaaagactgccaaaatggatttaatcataaaaatgccaatttttattaaattctcgcttcacaattgcaaaccaaatacgtctcaaaaaatttttaataatctattctgttgtcggtgaaaaattttcggaatgaaaatacctaaaaattttcttaaattttgaaaaaatcttttttaagggtgtattttttaaaattttccaaaacagtcgaactttaggggtgtatttttcgcttttttttgcattttttttgtgaaaatttgccaaaaacggccgaaatatggactaaaaaggcaaaaaatggcgaaatatggatttattccgaaaaccccccaaaatttggatttatatggactaaaaaccttcaccaaatcaaaaaaattttaacgtaaaaatgctatttttgagccccttacttcatagcatatgcgcagaaaaatatg

SEQ ID NO: 33784 - DNA, 1254 bp, Heterodera glycines
aaattaaaatttatttaataattattgaaaatgaaaaatgctttattaatatataaataacattcgcaacagcttctagttcagggagaataattaagcaaaattaattgttaaaagttaaaatacgaattttacacaacaagagcaatttatttaatttatatttaattataattaaaaataaatacatttgataatttatagaaaacacaaaccacagccggatcagagtgtttacaccaagaaaatttattaagcaaaaacaaatttagaacaaagcaatgaataatatgcatgaactaaacagagcaattaattaataaaatttaacaattttcatcaaaacatttataaatattgtcgcgatttaaataaacggaattgctattatttcttcggggcgatagcagcgacttttcttataattaacgctgcgatttatagttgctaaaaactgccaaaataattagtttttcttatgtaaaaaatccaaaaatggttgctaaaaatgggaaaataggtgctaaaagtttcaaatttaggggggtgtaaaatcgaaaattttatccaaaaaggtaacaaaattaaaccaaatcagtattgagacaaataataaaaatcctcgtcaaaaaaaataataaatttggagatgtatttttgagaaattttccccctaaaaacatgttttttatctagttatttgctgtccaatactaataatttattaaattaataattaatttatccgaaaaaatagcataataaccaaaaaataatatattagagggaagaattaacagcagtaagacgaataaatttttaatttacaaaaataaatgaaaaaagagatttatggtaacaaaaaatataatcaaattaaaaaattattaaagaaaaatattattttagatttttattttttcccgaaattgtccgcaaatgtccgtccgcaagtgtccgtccgcaaatgtccgtaaggcataaatttatcgattaaaaaatcaaaatttgagatattgatgaaaaatataaaaaaaatttaaattaaaaaaaacttattaggaaccaaaaagcattaataaatcatcattaaagaataaatagtaaaattcaattggtttgggaaattaataaatatttgttaaataaatataataacagtagttaccctacacctatcgtcgtcaggcgtgaaaacgattaatgaccgttaggcctttgatgtgccgccccgcccgcgcggggtttaccgca

SEQ ID NO: 33785 - DNA, 1095 bp, Heterodera glycines
  unsure (1)..(1095): unsure at all n locations
aaaaatacgctaaaaaatgcccataaatggatttaatcttaaaacatgccaattntaattaaattcacgcttcacagttgcaaatcaaatacatatcaaaatttttgtaataacttcattgttttcagcgaaaaatttttggaatggacaaaatacctaaaaaaaaatttccgaaatttcgaaaaaattctctttttagggatgtatttttcgctttttttgcatcttttaaaaatttgccaataattttcgggtttgtttttcttttttcaactccaaaacttccaactcgagttcgagttttcgaatttccaacgtcaattttgcgtcctccttttcaagcactttgagttgcatttccttcagtgttggcaattcagcagcagcagcagcagcagtttcacaaatttttgtcgtcaacagtgccgtttcaacttttcgcctttttgcttcaatcttcactgactttgaacgaatcggggtcaaatcagtgaatgagagcggaaacgatccagacgccttgggatcagcagcaacagtagcagaacttgatgatggtaggccaccagcatcggacaattgctgctgcttcgccggaccttttttttaatatttatgttccaattaatttgttccgtttgcacctaattccaaaggactttcacatattcctgcaatccggctgtcatctgccataaatcggtcaaatatctcataaaatggttttctttccggcgcttttcctccgccggttgggggattttttttttgtatcgctgtttgatttgctcaacatcgcgcactgatcgcgcatccttaattaatagggaaccgactttttagtgacgaaaaatcccgaaatagttaactaaaatagtgatgaaaaagtgccaaaatagtgacaaaatagtgaaaaaaagtccaaaatagtgacgaatagtgaccaaaatttttcagccaaaaattgagcaaaaaatcttttattcccttgattgcagttacaatgaggtacattccttttcttaattttttttacaaaaatttgaatttttaaaccaaaaattttgtaagaaaaaaatttgggggaaaaaattt

SEQ ID NO: 33786 - DNA, 784 bp, Heterodera glycines
acccgacatttggggatcccgacatttggggacccgaattttggagacccgacttttggggacccgacacttaaagaacccgacatttggggatcccgacatttgggaacccgacttttggggacccgacttttggagacccgacacttagggaacccgacatttggggaccggacgacattgaggatcccgacattttggggacccgacttttggagacccgacttttggggacccgacacttagagaacccgacatttggggacccgacttttggagacccgacttttggggacccgacacttagggaacccgacatttggggaccggacgacattggggatcccgacatttggggacccgacttttggagacccgacttttggggacccgacacttagagaacccgacatttggggatcccgacatttgggaacccgacttttggggacccgacttttggagacccgacacttagggaacccgacatttggggatcggacgacattgcggatttcgatgttttggggcatcatttgtgacaaatatttacttagatattatgaatatgcgcgaaataagaccaaattaagctggtgaagtgagcgatagggatatagcattttaggggaaaagacataatagggatttctagggtcggataggggcgtgtagacgaaaaattcccgaacaaaaaatgtgctcttcgtgcatttctggtcgagtatacgccgtacaaataggaaaaatcttagaaatcctaatccaactcatatgtaataag

SEQ ID NO: 33787 - DNA, 995 bp, Heterodera glycines
  unsure (1)..(995): unsure at all n locations
tggcccggcaataaaaacatgaaaatccacttaaaacaatattttatntggcgtaagaaccagggctagcaactgaaaattttaaaatcggcatttgacgacaaaaaatcatcgtttgggctcaaaaatcagcatttattattcaaatgaaaaataataaaatgttttttgtagtgcacttttttcaaaaacactttttgatcatttttaaacagatttcaatgaaaattaaaattattaggtcgattttgcgctttgaaaatcatcatttaaaaaatcatcaacatgtgaatcatcaaaatgatgataaatcatcacatctgatagccctggtaaaaactgaaattgattatcaaaagtatttctcccatccgccgattttctccaacaattgtgattggacaaaaagtttaaaaagaaaattaatattgaagggattgttttaattttcaaattttttccaggcggcaccttcgggaaacgccactaaaaaaagtgacgcaaaaataaaaaggtcgtcgcccggaggctgtgcaccatccaagcggaaatcctgggaagtcccttgtttatttatttttctacaaattcaagtcatgctgacaactacgattaatatttaaccaattcaattttggcctcgtagctattgtttggcctttctaacgacaccaaaaacccctcctacccccccccccttcatttagacttacctgacttaaaaattcttaaccaaatttagaagtgaagttttttttttaaatgtcgtccttaaagccgacgaatttgaaggatcggatgaagcatttgttcagttcgggggatcattcggatgtgcactttttggttggagaggaaaaggaggcaaatttttatattcattttcgaatttcttttttgggttttttatttcctttgttttaagctgtttcgagcacacaaactgattctgaagtcaacttctgaagtttttgaggcgatgtttcgttttgact

SEQ ID NO: 33788 - DNA, 1299 bp, Heterodera glycines
aaatgcaagaggaaaaaattaatcaaattaacaaatttttgttgggtttttcatttgatcgattttttctgatcatttttggcgccggagccaaaaaagccgaaaatttacaatagtaaatcgactatgctccccccgataaaagtggttttaaagcgatttggacactcacagttcgcgatgttcccttgtaagctgttcataatttttattagcatccattgaaatgtgataatgataatggcaaaatttgaattatgtattttattacgaaattgattttactggtgtaattggcgcttatatattttttaaatttttatcaattaaattatgatgatgataatgatgatgatgtcaacattttgaaattacatattttcttggaattaattttaattagtgtaattaggcgtttcataatcatagaaattttatccattaaatgatgttagcaccactcctccttcccctcctccaattgcacacccaacttgacaagtgattggacaaaatgcggctcgtgttgacgttgaataaagtgaacaattgccattccgcgcccatgctggacaacttaaatgttgttttattttttttttgattccgcttcttcttaaaacaacaaaatcactaaaggcttatatcttatgacaatttttaaataaaacgcaaaaaaactaaaaattttaaaaaatatttttaaaatctgtcgacgaaaacattttatttttaagtaaatttcctaaaattaagccactgggtgcttgatttttcagcccctttctaaatgagggctttatttaagagagtgggtctaatttaggggggggggggctatattatagaaaataaattgagtaaaaataaaaaatgtttgcaaaaagattagcttttaaaagggacgatattttgagatttttaaaatccacatataatcaaaacaaattatcaatgactgagatttgtcatttatgtatgtgccattgaagtctcactctaaaaaatccttgcaatttctgtttggaagcggcggatctaaaatttggggtggccttgtcggcacatttccatccggtgggcatcggttacatgtccacgggcattgccaactcattaagttaaaatacaactaaaaaattcaaattttcttcaattgaatttctttgagcttgtcgattctcattttttacatattaattaataaattacattctattatttttgattttaaaatagaacatgtaattatctattattttcttaagaattagaattttatttactttgaattattat

SEQ ID NO: 33789 - DNA, 1323 bp, Heterodera glycines
atgcagtaatttgcacctaccggatttgtctcaataaattaaggcccatctaaataatttccttaatttaacttttatagtacgatgagcttgtttaatacacttaaattctttattcatttgtaaacatgatacaaatacacgtatctaaaattggaattcatcagtgagaaggtcagtggaaatttgcaaaaaagtcattctgttagaggaaatagcccagcaaatgcgcagcacccaaaatgcgtatttcaccctcaatcacacgcaaaagttcgcagaagcatgtccgatcgcaggggttggaggacacagcgcgcggtaccattgcactgataaaagaaattggcaatgatttagacatcattatataatttttgattgatgtcgaaaatgtcataatcatcaataagcgtgttgagagccctgtcaacttatcttaaatattcgcgctcacgtgaaggcgaacacgagaaaacgtccctgtccccgttatttatagacgtattgaacccaattttattttctttgaataaaaattcaattttttgactaaatcatgaaaatttacaaaaaaaagaaaaaaaataaaaatttaccagaaattcataaatttttggtgaaaatatgttacaaaatagaccttaaatttcaaaattcacccggcgctgcctatcggcatcgccggcgccacaaaaaaacctattttttcttaaaaaaaattggcccaaaatcgaaaaaatctatcattttttggacaaaatctgttaacaggcccatccaaattttcaaaatttttcacggcggcgcctatcggcaccgccgaacccatttctcctaaacgtctttagataaagagcgccgcaaaaaaaagaccaaaaaaaaaagatttatacagattttcgctgaaaattggccattttaaatgctttaggtatgtgtttttaattaattctatacaaaatatttatgataaaaaaatacataaacgaccatatacttattatcatgaaatttaaatatttcgtagcaacaactcataacgcttcaagattagttgactcagaatactcattgcactaccaaggactcatattcggaaacgatgctatgattcgcattatcgacacatcaatttcctcttatctggattaaaaagaagtttattattgtgcttgaattatgtacgttggacagtatacaaattcttccgccgatgatatagagattattgatgactttttaatattaactagaaactgataatgaatttacaaaaatatgaacaattgaacgctaaattctgctatagccgctaaaatg

SEQ ID NO: 33790 - DNA, 299 bp, Heterodera glycines
  unsure (1)..(299): unsure at all n locations
tgaaaagttgcggggattagttagctgacttaatggactcacaaattattatttggaaatgaatggacaatgaacggaattgcggacgaacagcagcagacggagggaaggaaagaaggcgacccttctccgatcagtggtcagtgggggggggggggggggnggatcgaagcgaaaggggcggagggagcggcagagaaagcaccgaccgatggacgcccttttcttggcccaattttgtgcccttttgctgccaatttccctttttggcaacttttttcgcacaattgcaggggcct

SEQ ID NO: 33791 - DNA, 923 bp, Heterodera glycines
ttattttattaaaatttataaattctaacttcgtttttccaaatttttgaacgcttagaacggagtaacaaatggaggaattgggaatttgcggggagaacgaatttgcgataaaagggaccagggacaaaagacacaaattcattgacaagttcgacagggagaggacgacgacggcacggcattttaggggacaatatgtaaaactaggaaagggccacgctaaacggaaaaagtaaactttttaaggatttgcattattttgtgaagtaaaaaatattcataatttttagacaagattatgaaaaaaaagaatttaaacaatacagaatattgcgataaattaaaaattgggcttttagtatagaattgagctcgattaaaaacagtcaaaaacgcactaatgacatctaaccttcagaaaaacatttccgaggttcaaaaatagaaacaaaaaacagtttaactatcggttaaaaatgttaagaaaatgggcaaaaacactgcatcacatcaaattttatgaattaatatttaatctcatccacaggtgcgctggtttttagcacaataatcaaaactcataatgtttaaatttagccagttttgccaatttttcacgtgttgaattagtttaaaaaaacttagacgcttaatttttgaacactcaatttcggtaattttgaccgattcaaaaccgattttttgatttttccgtaatttttttttatgaagattagaagtcattatagcttgattggaatagtagtgatcaaactatatgataaagaatgacttatttgaacaacaatctttggcttttttgtccagttagcacatgagggcttttagtacatatcagaccttactaattactagagttgagcgggaccgggaaatttgacaaaaaccgggaccgggac

SEQ ID NO: 33792 - DNA, 609 bp, Heterodera glycines
tttttcaaataatcattataatatttctcgtctgtatatttatttatttaggtctttaaattattaaaaattctaaattttatttttttcttaataaatataattttttcttctatcattataggctgttaattttttgtgctaggtacttaaatttggtttattggtaattattcatttattacgattttatttaaatttctttagccccaagttttaataatttttgtttcttgtatgaagaactcaaaaatatatagaatgatcttttttaaaaattttcatggtgagtcccagtatttttagcagagaatcaaaccaattcctcatcattaaattattgattttagaatttgtttttttgtaacaattaatattcaatatattaaaacttaatttaatataataaaaatgaaaatatataaaaactaaaataaatggtaaatatgtatcatttggaccaaaatcaaacaatggaaaaatttggtatcgttcgagagcttataagagattacggaattttgagtttttttcagaattaaatagaaaattgactgcaatcgggagatttgaagaaatttttaaattattctttaacatactaagatt

SEQ ID NO: 33793 - DNA, 1036 bp, Heterodera glycines
tcacttttgcttgcgtttgaaggcccataacttttttctttaaactctgatcaaaaaatgcccgctgcgagggcaccccgccaaagggtcctctacatgctggtattttttatttttttaatagagccaccccctggcctgcagaaaatggcaactgaagcgtgctcaaaaagtacacttcagtaccaggcgaataccgcgtcggcgtttgatctgagagaaaagtgcccagcgaacttattgtagagctttgaaagctcgatttttcaaaatttaaaaatttcgaaaattttcaaaaattttcgagttaggcctaaaaaacggttttcgggtttttgaattttaggattttttaacgatttttcccagagaaacggagaccacttccaaaacatagtttttcgagctctatcgattggtatttttttcggaaaaatttcgattttttcccggaaatagaaaaaaattttggcctcagcgggacatttgagtcctgggcccataactcgtcaggggttggttttagcgaaaaattgtattagaacatttttgtagagaattttaaatgctatcgaatggtgtgcttaatgactggaaaatttcaaaaattttcgagctaggccccctagaaattttcggaaattttttttcggacgaaaatgggggtgaaaaatatttttctggggtaaaataaggtgctgagtacgaatataatgtctattttaagtttcataatttttggaattttttaaaaattctttattttttggcaattttttggccttggaaatttgggttaatattggaaaattcataactcggtgatggtttcatcgatttaactataataaagctttaaaaatagagaaaaataaggagaattttacgggatttatttgagttttttatttcaaaaaagaaaaaagttatttcagaatttctggaaattttcgatttttcagaaaaaaattcgtagctgccttctgaaaagctattcgggaaaagtaaaatactataaaaatcccgcaattttttt

SEQ ID NO: 33794 - DNA, 889 bp, Heterodera glycines
  unsure (1)..(889): unsure at all n locations
ttcttttttatttacttaaaatatgaaattcattatattaaaatatttaaaattaattttatattttattaatttacagattttattgaatcgaagccttccgcactgtcattcagctgaacaccatagaaattggtgggcagaaaaaatttgttctcaaaaaatttcagaattggccaattcagcgcaattcgggtgtcctttcgaagcttaaataatactaattaattaattaattaaatgataaataataatttaatttcaccttttcgctgaaataggcgtcgtaaaaaagttgaaccggcgaattgctaatcggacaaagtgccatccgtgcgcaaatgtcgttgccaaaatggtaacttccgtccggcaattcgaccgtcatattgtgcagaatggcattcattgtgccctgaaattgattaaagcatagattttgattatttattccaatttaaaatttgtccgcctgaattgcgttcgccacttctctccgcagcatatttttccaccacgggggcgaagcggcgccatttgctgcaacattttgctaaacaattaattaataatgcaaaagaattggtatttacaatgaatagaaaaattttaaaaattaacagaaaatttaccaaatttgccgcgtcttccactgatgagtcatcgacacccgccaaaggcggtgccgcttccaatgcgatggcaatgtaagagctgaacaaaaagccaattaatgatcaaaataaaagcaattaggggggggggagaatgacctgttgacggagtctccgctgaattccttgtgaatttggtattcgaaacgggacagcgaatgttcgggcgaatacaaaaagcgcaggtcgtcctanagcaaattttagaaatatcc

SEQ ID NO: 33795 - DNA, 924 bp, Heterodera glycines
  unsure (1)..(924): unsure at all n locations
gttaatccctaagaaattcaaacatttttgcacaaatcggcagacaacaatttattgtaatatgtgtaaaatagtaaaatgttgtatatattgtagaacaatttaacaaaaacacaaaacaggaggacgacgataattttcaatcaaacactggatggaaattgtgatctgtgtggagcaaaaatggatgaaaatttgttgcgcgcgggcataattatcaaaagaatttggaccatttgaaaccagcgccccctttgtcttcgccgccgccaccattagtgcccttcttttttgtgcctgctgctggcatttcttccggctcttccgcttggtcatttgctgctgcgcctcctcctttgccgccaccactgtccaacccgtccacggtgccgcgccgtcccgcttccaacttggcaaactccagcatcagtgtacgttgacgagccgttagatgcctgtggtgttaaggaacatgaggcgccgcaaaaatcagttgacaacggacgatcaaatcaaaacattccatttttataggatggagaggggataggaaggggcatctttttgctggtggtcccgaattttcagccccaggggtcaatgaaaaatagtgaggaaatcaaatatgtccaaatcatcatcaagagccactccaaatttacgcaaaaaaaaaactcacttcggcacattcactttgatgttgagtatttggtcaccatagcccggctgctccaggcgtttaattcctttgcccttgagcaccatttgcgcatgngaagacgtgccggccggtatgtgcacccgtgttttgccatcgttgttggtggatatgcttggcacgtcaattgtgccgccaagcgttgcctgcacaatgagagaaaagttacacatcatanaaaacgagcaagcgctccccccactagg

SEQ ID NO: 33796 - DNA, 962 bp, Heterodera glycines
aaatctcctcaaggttaggtgttttccaaaatgcaccaatttctggaaaacataaattcgttggtaaaatcgtcaagatccacgctgatttcatgatcaccaaccgtgatcttcagtgggaagaagactttcaaaacctcagtatctgcatttaagaaatatgccatacaatatatagcctaatttttaaggctgcaatttttagtcacttcactatttttacggaaaatgcacccctaagaatcgaccgccaattaagattgacactaagattttcaaatagacacctaagaaatgaaaaattttcttaaatccatctcgagaatgaattttttgataagaatttgtgtttaaaattacttttggcataaattattacatttttgggtaaattttaatgttgcagccctaataattatgaaaattacacacgtttttcattgtttttatgcacgttgtatgcaataacgtaaccaattgcaacagacccgaccacaattggagttaagagcgttgcgatcgctgctcctattgctagtgccgaaagcaattctgccgttttggtatcaaaaattataattccttcatctctatttctatagattacccagcttaaacatttatttttataataacttaattagctattaattcaaagaaaattaacttgtcatcctttgacaatggtttatttaaagctaatttaattgctccttgtcttgttaataataattgtgcaggtatctcataaggatcagttgaaattccatgtttttgttgtcttcgtctattataggctcgtctaattgagacaaacgttgggaaattatatgttaatgattcttctgtttccgtatcggcacctgttgcatcaaattcctctgctttagggggaccctaaacctcggtatttaaatttaatttgtcaataaacctcacgccacaaagtttttatattttct

SEQ ID NO: 33797 - DNA, 803 bp, Heterodera glycines
  unsure (1)..(803): unsure at all n locations
ttttgaattttatcaaaaactaaaaacaaaaggggggacccttttggtttgcaaaatttattaatgtatattcatgaaattttattcaacggggttttcggggttcccgatcacgaatctgtcaactattttgatcaattcccatttcctaacctaaatttgaacaaaaaatcataaatcgaaaaattcaaattttgatttttgttcgggtttagaaattggtcaaaatagatgtcaaattcgtgatagcgaccctaaacccccggagaacaaattttaacggttttttatcacaaaatttttttgcaaaacaaaagggtccctcccccctattgtttttgataattttcaaaaatgtccttcttttaactagtgccaaaaataacagcaatatttaatgaagatacacaacctctttaagctgcttggtagtcatttcatcaaaagcagtctttcgtcttaaaaccgacaacccaaaagagtatgggaacatgtccttaaattaaaaaaatatttaaaaataataaaattacaatttcctgtacttcatactccataagaatttcagtaaatcccaatttcttaatgaacggtaataattctttaatataatgtggctttggtgcagctcctttcagatcgaaatggacaattaccttaaaattgtagttaatttgcaaaaaattagtaatttatcgtanatatcaccttttcgagaatgaggaaggggtttttggttcaccataagcatttatgctttaaaagtgatatncaatttcaattggttataanataaaaatacg

SEQ ID NO: 33798 - DNA, 1275 bp, Heterodera glycines
  unsure (1)..(1275): unsure at all n locations
tcaggtcggttaattgctgatcagtcgctgtgcctttttcccttctcaacncctcccattttcagatcggtacttcatttctcagtgtccatcttccgcccattttcgcctttctcctcctcttctgttttcttcctgctcataattatcgcattctcgccctttttctggcatttctgcacataaattcggcgcttctccaagtccgatcaaaattagccatttgatcattcctttctttagatctttctattcgccccctttctcgctttgctttgtcatcgaaattccactcgttttcgattcgaaaatggcaattcgaatgctccaatgggtttaagtccgaaggaagaattggtgaaaagcccaacgatcagcaaagaattgccaaatgttgagccgaaaacgaagttaggcaaagagccgatccgcgatttgggcacaaatggaattgggagagaaaaaggacagcagcagaaaggagggagacgaaacgccaaacggacacttcgccaatgttttgcatgtaaagcgacccgtaaggggacactttaaatagagaggaaccaatcaaatcagttaccttccgtccgtctgattactgatcaacccactttctcttccgttcttcagaccctctcggcgtctttctgtcgtccctcccgggcaaatgcgtggtcctttgtgcttccgcgcttctcctttggctgtctttggcccgcggcgtccctcttctgtccaatggcatggattaccgtcgccttttgcctgacgattcggcggctcttcgcggctttgatcttatggacgcagttttgtctattttctttgaatttggtaatttgtcattcacagatttggatggattttctccaaattctttacataattcgtcgaccaccaaactttgaagacgcagagcaattttcgaaatttaaagtcagaattggctatccatttgctttaatcaattgttggtgccgttaaggagttcctttcggatgccacttccatgccgcaggcaattgccccccgggcccatcagtcttggctttttgattactttcgcgatcagctcggctccgaccttttcacgcagctttcttcttcccaacgttccttcgaaagtggcgtcaacatgaccaaatttggctctttcatcaacggatttccttaccgggcctggcgcagcggtgtccatttcactctccgcgaagggtggccaaaaaaataccggggggggggggcacggggaagtcgatcgattaataatta

SEQ ID NO: 33799 - DNA, 708 bp, Heterodera glycines
cttttaatttgtcatatttgtgtttaatggtcttaaaatgcccttaaacagcataacaaatattgaaatgggatttattcgggcgtgatcaatgcactaattaattaaaatattaatgaagtaatcataaaaatgataaaaccactctttttaactgccccctttaaatgctggaatgcaacactttcgatgggtttggcggtgttttcgcgtaccatccacccaccttttactgctgaccgagaatgatgatgttgttgttgatgacgcctctctctctctctctctctctctctctctctttcccttacttttgcccttttctttctcattctctctccactttcttctttcattcattgattgctctcttttctttactggctatatagttatttttcaagctctctgagttctctctctctctctctccttggatttctttctctctcactctggctctctctctctgcttttactctctctctttccttctaacctccttttggtttccaacctctccccttcttttattttcccactctctctctctctggtccctcgcatcattttctctccttttcactcctattttcttttttttatcacatttgtatatttgattcccccccccccatcctcttctcccttccttttatcacttgcattatttttggtttccatcattacaaaatcagcgccgcagtt

SEQ ID NO: 33800 - DNA, 731 bp, Heterodera glycines
cccccccccccccccccactgccccattgtccatgtatgatgaaatggacgtacgttgggctttggtggtgagatttggaattggatgaggccaatcttcgccttctccacccgcgccgggcctccgtggcccatcgacttctgatcgatcagcgctccctcaatgagctgcgactcctccaccgtttcgcccaactttttcacgactttgatcagcttcagattgacacttgagtcctccggtgaactcatcagtttcttcactgcctgcaccgccattggggccaaaagatgggaatgttgcgaaacgacctgaaaaaaggaaaatcgaaggaaacaatgggcaaacgaaagaaagtgaactgaggaccttcgagttcaaactcgtcatggcgagcttcaccaactcgtcgtcatcgttaatgtcaatgggtgtggccatttcctcgagaactttttcagaaaatgtggccgcccgttggaatgagtcggaaatggtggtcggatgaattcctttaaaaacaaaagtgctaaaatttggcgtataaacgagtctaagtgacctttggcaagaagtttttctgcagcgtccaacaaggacccggccaacaccacaacagttgtggtcccatcgcccgcctcaatgtcctgcgctttggacagctcgaccaactgaacggtgcaactcataaaagaaaacaagcaaatctcgccatttttgcggagggatg

SEQ ID NO: 33801 - DNA, 918 bp, Heterodera glycines
ttatttattttatttatttatcgaacaaaccacaaggtgctatgcactctaacagtggcgtaaaaacaaaataaaatgaaaatcaaatcaaataaaaacataaatggtagtcaaaattcacaaaaataaatgtcaaattaaacaaacaatagatataaatcaaacaagtcacaactctcaatagggaaaatatgcattagtgcttaattattccttttgctatttctcggaattttttggggtcatttatttccataatatttttcggtaataaattccatgaattaataaccctaaaggctttcaaaaaaaggtcattctcatcattttcgttctactaatttaccatttttcgttctcccatttgccctttttcttcctatttcgttcattattatttcgccagtttttcgtccctaaaaattcgtgccttaattactcatcactctctgcccccccccctccccccttttatttaaattcgctttctgtccatttttaaatttaaattgcttaaaccaaatttatgggagcgaaagcaatcgaagatttgagagacgggtgagaggaaaagcagtgactgtaacggtcattcattgtcagctccacatttcatccgccccatggctttcattttcattattcatctcatccaaccgccaccaccaccgtcccagccccaaacccttgtcttgtctgtgatcctcgccctccattcatccctccctcctcctcatttcttctcctcccttcccctcctcttcttcctcccccttatccgtctttcctctctttctcgtccttttccaccttctttcccttctcgctccctcctttcttattcattccctcctcctatccttttcctcttcctccccacttctcctcccctcctccactctttttccccctctctct

SEQ ID NO: 33802 - DNA, 825 bp, Heterodera glycines
  unsure (1)..(825): unsure at all n locations
ttcacgtaactcatgtgaaacacgctgttgctaaaaataaatgtcatattcgtgatcagcgtcaaaaattaagctaaaaaaaattattagaaaaaaaatttgaggggggtgacaaaacctagaagtaccaaaagaaaaaggtcagtgattaatatgactgaactcccccctttcgcaaatttaatttgacgcaacttacaaaatgctcttatatttttgaccggcgatgtccttttgagtctaaattccattaaaacattcagaattggtcgaaatgattgtccgattccgattcatgatcagaagggctgctaattttatgtaaatacatattttttctggattctccatgctctaattaatcggaaaaacactttctttgttttgtgtttgcgaacaaaagtgggacttttatgtacatattttggacttttagtacatatttcgcaattttttcgtacattttatttttattttttacatattttgggattttttgtgaatttataaaaaatttcttaagaaaaatttaaatttttttttgaaaatttacccctaaaaaatcgttttttccaaaaatcagatattactaaaaattgattctaagcctcttttggtcctttttatggcattttgtgattagttcactttttacgaagaattttttccaaaaaatgaccatttaaaaattttatttacatattttagtnacatatttggaggttttttacatatttcataactattttagcatttttatgcatattttatttacataattcgcaaattttctttacataaaaagaagccctagtaatacataat

SEQ ID NO: 33803 - DNA, 970 bp, Heterodera glycines
tcttgatagaaaatggataaagaaaaggtggtttactgtaaaaaatggtgttaattcgcgtgcaggatctataaataaattaatattattttaatcattaaaaatattttagttatataaatgataaatcgaaatttattaatgctatgataaaaaaatcatttgataatggattcaacagaaacggaaaaattagcactttgtggaaaatattttacttacagatttgaaggtttcagacgcggtgtagaatcttaaaaaattaatattatttaaatcttttataagatttacgcgatacaaattaaggaaatagtaaagttcaagtgattttgatagaaaatggaaatgaaaatgtggtttattgaaaaaaaatggtgttaattcgcgtgcagaatctataaataaattaatattattttaatcattaaaaatattttagttatataaatgataaatcgaaatttattaatgctctgataaaaaaagcatttgataatggattcaacagttcaaatgatgcgacgtttttcgcccgaaaaactgcaaccggcgataacagaagaaaagaggaatgaagtgaaaaatgttgggaatatggcaatggaagagggctacgaagaggaactgatggcactataacagtgaaagaagcgccaggaaaaccaccattatggtcccatttgttgttaatgttgttgtttatgtttattgttatatataaacaaataataatatgagaaaggcaacagagatggacagcaaagaacctaaatacgatatgacaaatgccatctggtccctcctgttcgcagcgtcacaagaaacgcaaggcccacatgccaagcacaccaacggtcaatccgaacctgaacaataaatttgtggtattacggaagaaaaaacctatgcttacaattagcgtctaggaatttgtcattaatttttgcgatacaattaaatatttttc

SEQ ID NO: 33804 - DNA, 975 bp, Heterodera glycines
  unsure (1)..(975): unsure at all n locations
ttcgaagtcataattcatgagcttcaaactccaacgatgaagtcttcgtgccgcaaccacgggcagctcgccttttggtccaaaaatcctttttaaaggctcgtgataagtctgtagaatgaattttctaccgtacaagtactggttgaatttctccactccgaagattactgcgcgtccttctttttcgatctgcgcataatttctttcggctgggctcaaagttcttgaagcgtacgcgatcacgccaaactttccagttgttccatctttgtggaaaaggatcgctccgactccgtagtcagatgcatccgttgccaaataaagtggctttttgggatcaaaatgggccaacagctcgttcgacgacagcataattttgatctgttcgaatgatttttgctgttgttgtccccaatgccatttggtctctgatcggcgtagctcgttcaacggctccgaaattgttgccattgacggaatgaacttgcgataatacccaaccatgcccaagaaggatttcaattcctttaagtttttgggggctggaattttctgtatggcctcaactttgtccggcgacgttcgatcccttctttgtcgatgatgtgccccaaataagcaatttggtttttcataaaggaacattttcctttttgacacgcaatccaaatttttggatgcgttggagagtcatttccagccttttcaaatgttccgcgtcgttgggggctgtcaccacaatatcatccaagtagacggcgactccgtcgattccacgaaggacgtcttccatcacttgttgaaaaatggctggcgctgacgcaacaccataaggcatacgcgtaaattgntataagcctttatgcgtgcaaatggtcaggcattccttggctttatcgtcaacatttaggtgaagatccgcctccttcaaatccagctttgaagatttgtcgcttccgttcaacacgctga

SEQ ID NO: 33805 - DNA, 970 bp, Heterodera glycines
  unsure (1)..(970): unsure at all n locations
ttgattgcctttacatttattggaaaaaacatttcgtctttatattaaaatattttttaaatagttttccatatgaatttattttaactagatttttaaaaaaaatttttattacatatttcataaaattttcatattaaaattcttgtaagaataatttacctgatgcttaatcatttagtttattttctacatttaaatatttgttttgagatattatgaataaatattattagtaaattaaaattatttatcgatatatttttataaagcttctttgtttccttcaataattaagcatgaaccccgacaccgtgattggtatttcttcgtaaaaatttttgtttaaataattattacaaattttaacctttaaactttatcataaaaattattttattatttgaaattcttcaatattgaaaatgattatcaaaatttataaattatcagctattaaacaaactatatgtttgttggataagggaacaaccctattgattatattttccctttcactccctctcttattgtctctcgccccgccccttgaccagccccataaatatgtctccctttccctcactccaggcattctcccattcattccaccatttcattattttattttatttatttatttcctgctgtcctcctccatatttatttgtttaataaattatttatttatttattggacaacatttgctttggttaaaaaccaaacatttttattgttgtagtaaatacacaacaatttggcgcagtcagaaacaaaggacctgctctacatcttcgggtgagaaaaggcatcaaattttgtttaaggaccaaaagccgatacggcaaaacaactcatcaaaaagccgggattggctctgagtttttgtaagccgagtcggccatttttcaaaaagcagtaaaagaaactgctagcgtctaaagccgagtncgctcatcaaaattcgtc

SEQ ID NO: 33806 - DNA, 1060 bp, Heterodera glycines
gggaaaaattcattccggtgaaaaatttggaaagctagtttttccaatgtaagccctggctgtccctttttcatgaaatttgttttaactgatatatcagggatgttgcaaaaatgaaaataaaatacgagacacgagatacgagaaaaacacgagacgagaattcttttatataaattaattaaaaatttttgattgttcttcttatgggaaaatgatcgggccggaacttttatttcaaatgggccagaaataaaacgacgaatttttccaaagaaaaaaattaattaatgatttttttcaagttaaaaaattatattgacataaaataaaagcgttttctttaattttagaaaacaaaaaacaaaaacaaaatccatcttaaaatttaaccaacaacaattaatccgaaatcagtttattttctatttttatatcaaaatcaaaaataaaaaaatcaatttatttaaaattttagtttgttaaaattccttacttttgctgagatctatttctggcgcagtattttttcaataattttgctgagtaaaaaaagggtccggcggtgccgataggagccgcctttttttgaagattagagtgcaatttgttaacagattttgtccataaaacgatacttttctggctttttggttttatttgtttttgttagttggattttcataaataagttttcaaaaaatatctcatccgttaggagaaattcgtggaaagtcggtaagcagcatttattaacacaaattcaaaaaaaaaaatgatgtggaaaattgaaaataaaaatttcctaaaaacgggttgtccctccgtcgtttctcctcctttttttcatccaatttctggttttgcgccgttcgtccttaataatacccggccgttggcaccacttttgcattctccggcctcaccaaatgattgtcggcccatttgctgccacaatgcgattatcattagcaattgtgctgttggtcaacagccattttttggcccattttggcacaaaatcgccaacccaaagttggccgaaatgaattgttcgccc

SEQ ID NO: 33807 - DNA, 1454 bp, Heterodera glycines
  unsure (1)..(1454): unsure at all n locations
actcccattttgcgcaacaggtgactccgaagtgcagcgcacaatgctcgaattgcttaaccaactcgacggttttgagcctaccaaaaacatcaaagtgataatggcaacgaatcggatcgacattttggacccggcactgctcaggccaggtcggtgccaaagctgccaatgtttgtataattttatgaaattgctaaggtcggattgatcgtaaaatcgaatttcctgcacccgacgagaaagccagactggacatcctgaagatccattccagaaaaatganatttgatgcgtggcataaacatgagcaaaattgccgaaactattcctggcgcctcgggggcagaagttaaggcgagtgtggccatgggggatggctaattgatacggctaatcactgtaccttcgtcccttcccttttaaggccgtttgcactgaggcgggaatgttcgcattgcgcgaacgtcggatacacgtgacgcaggaggacttcgaaatggcagtgggcaaagtgatggccaaggacggggagaaggacatgtcgctgaggaaattgttcaaatgagcggagaacaaaggacgaattcgaaatggagagaggagaaaccgaacgatcggaccttttgacctaatggatgaatgaatgattctccgaaatttacgttttgtaagaaaatatttttttcccctcccacccaacccagattggctcttccagagagggaagataataatacatgctgtattcgatgtattactgtcgcaagaatattgtcctacattaattcatctaaaataaatattctactcaaaatgcttttcaggataagagactgcagatcatcggtcataagtatgaagaatataatcaggcatatgccagtaagttatgaggtacacatcgatgttgtatctcaaagttggtcacgtcatcatggtgaagtggggtacattggtaagtgaaattgggataatcatattaaaattatatctaatgtttcctcccagataaagagttcggtcgctttggggctgtcgcgactcatcaccagagtttcaagtttgcgggctgtgcgtcagtggagagaactcggccttaatccggtcgcagagaagatatgcagagtgaggagaatgtgggagagttgtcgatatattcaccgaggtaatttgggtctcagagaggagtctcgggtgccaagcaatgcttgaaatcttcattccttaaccattattcttacccaagcttcaatattgtaatgcaaagatcgtcttggatttaatgccgaaataaacttcttaggtctcgcttcttatctcagcgcattcccgaaatggttagtctgtgtggtgattctgcggaagcggctgcggaagcacttagtcgagtgggacatcgggcgcgataattattacatcatcgatctatttactatctccatcatgagtag

SEQ ID NO: 33808 - DNA, 872 bp, Heterodera glycines
gtccgccagattaaacattaaaaaaggcatttccatatttaaagctattatattaaattggcttaaatgatgccgtcttatgaataatattatttttttttcatttttatgtcattggatattttatttgctatactaactgatcgagactctttctttgtaagtgttcttctgcttcttctctccctccagcagcaggggtttcccgtccatcgtaagtctctgtccccgagaccgaatcggttggggtcgccctttgtaccatgaccattggacaccaaataaagactgctattgttggatattggataaataagttaagatattggcaatattatgtccttgggcaccccgcccccctgccctatccaaatattcacaatgtttcgaatcattcatttaaaagtaaaatatgttatttggctgattagcgtccattagttgaaagataaggaatttaagtatttagtgagcgtaaccaaataataattaacaataattaatcagttcattaaataatttaatgctttcggaaccaaaaactgagtcttcaagtcagcaattgcttttcattaactataatttcagctgagtctgattctttaggtccgatcacttctccggacaacatttctcagctttgcactccgtcaaacccctcaccccctcagggcattttaagccttccggaatttgccaattcgtaaaatcaaacattctctcatcataatacattttctcataagctaccaattggacattatctccgcgttgcgaggcaatgagcacgatttcctgtcaaaggcagccattgcggacgcaattcgagcagttcacagtgatgatgacaatatggaactacttgatatcat

SEQ ID NO: 33809 - DNA, 1216 bp, Heterodera glycines
taattaaggcggggatttttattttgcttaaaaatcccggaaatataaattctttcggtattttgaaaataaatttttaaaaaattgattttaggaagtataattttgcatttttcttaattttttttacccatttttcttctaaatacccaaaatatgtcccaaaccccgaaatatgtgtgatacatttttatgtgccaaaacaccaaaatatgtactcttatctaattcaaaatttttcggagaaaatactattttgggcttctctcgacataattatatcgcagaaaaatatgttaaaacataaaaatcccatccctaatagtaatttagcactctattataatttatcaaattcactttaaatatagaatttcttaaacatgcgaaagtgatgatattttaatacctgttgtatatcgaataagcggtttgttttttgcggtctgaaacccggcccggggggttctgaagtggtggaagggtcttacaactttttgaggagaattcgggaaaactataggtttttttctccgagggacaactgagtcccagcggctcgaaaactgactttgccgtcagtctcagtgttacgaaattttttgcttttgctttcagagcttagcggaccccaaaagcgaaatgccccaactatggcctacaactttgccagcaaaaaatttttgatcagatcaaaggcctgacctgtaggttaggcaacgtaagaatcacttttttggacacttcagtaccaggcgaatagctcgtaagggtttgctcggagcagggggtcgccagcggacttattgtagagctcaatgagctcgatttttccaaattttaaaatttcgaaaattttcaaaatttttcgagttaggcctaaaattcggtttttcggtttttgaattttatgattttttaacgatttttccagggaaaactaagaccacttccaaaacatcgttttttgagctctatcgattagtgatgtttttagaaaattttcgattttttccaggaaatagaaaaattttttggcctaagcgggacatttgagtcccggaaaaataactcgtcgggggttggttctagccaaaaattgccttagggcaaaattgtagagcttttaaagttctaaagaatggtgtactaaatgttcggaaattttcaaaaattaaagagctaggccccctagaaattttcggaaatttttttt

SEQ ID NO: 33810 - DNA, 1206 bp, Heterodera glycines
attggatattggccgaccttatggccaaacttggaaaatctagaaggaaaattagaaaaaatttgcttatatatattttggttattacctaccgaaaaaattggaaaattaacgcagtaaaatttgtaaaatgaactacctcacctcacacatactttctcaaagtagcataaactggttaaggcacccagccaatcaattaattaattgtagcaaaacgatcaagctaattaattaattccagcaattccgccaagccaatgccaattaattaattaattccaaatttagatgactattattagcatccgtacacaactgttcttgctcgcatagcccaatgggtttttcaattaagacatatgaagaataaaagagagagaaaggaaaaggaagcgcaacaaaagaaaaagccaagcggcggagataatccatccacgaaaagccgcgccgcaaaggcccctgagcggaaaaagcgtgcgactgccaacggcaaactgccaatgaaagtgatccctcagcctagcagagggcacacaacataataggcgagaaattggatgtgagaactgagagagagagatgaaggcagatgaagataagaataaataattggagatattgaaatgttaatgaaagtgtgtataatagtatagagcatttattgggtaataaaatgatgcggcattcattcaacgagactcaggcaaatataaaagataaaaaagtgaaatttcgtaaaaatgccaattttacagatttttcaagaaaaattcgtcatagctttttttaaaaatatagcgaaattaaatatttttgatatagctcttggattgctctattagcatgaaaatctcagaaaatgttatttaatttttgtttccaattttattatatttgctttcataaatattttttttctagttttaatagaacctctgacaaaatgagttccgctgctgctgctggcgcggctgtgatgatgagcaaattcattttttggaactttgaaatgcctacattttttaattaaattaattacttgaaatattaagcccctacaatcttgcaattttaaaatttattttataaataatttttggttttaataaacgcagatttcattttttttcagtcgaatcatttttgttattgaaactgtcaaaatagaaaaaaaagtttttaaaataagtaaaaaaatttaaa

SEQ ID NO: 33811 - DNA, 1347 bp, Heterodera glycines
cttaggcgaaatttgtcgaccatttgtcgctcttcctccagctcctgctcagatttgacctagaaaacaaaatgttttttttttaaatttttagcgattttttcaaaaactttactaattgtaagccataataaattttaaaaaagtcgctgaaatttttttttccttgaaatttcctaaaaaaaatttctagtatttttttaaacgatttttaagtttgaaaattaaaaaaaatttttaaattcggcgacgaaattttgtactgaccgtggaaaattaatcattgttttttttgtttcttgccccacttcaatgacgtcagtgctttgacgggccaaattgttgttgaccattttggtgctcatcatcacattcttcaaaatggactccaaatggaagtgcttgtccaacagcgcgtgctccaacccgaaacatccctcgcgaacgcgtcgaattcggcggggactcgccatggtgtgcagacagcagccaatctcatgcacaagcttcctgattgtagatgaaacaaattttttaattttccgggacttttttttttgcttctctccgacctttgtaatatttttttcgccgtgattttttttttcaaaaatttttgaaggaaaaaaactatatatttttctatattttcctttttttgttaaaaatttcatttttcggtttctggggagtggggctatagaccactcattgaaaaattataggaaactgaaaaaatttcgaaaattttttaaggcctcaaaaaatgcaaaaatttttcataaatttaaattttttaaaatgttccgtacacatattcacaattatagtctctttcagaaaagagaccatatattttgaaaaggaaatgaatttggaaaaatttgcttttgcattcgctccttccgcaactcgtcatcataaaaattggacgaattgggtacacaaattgaatgcagttcgcccggtgggactcgaacccacgacccatccatatcgtggaatgctctaaacgactgagctacacgggcactccttctaggaggttcttccacattgtatatttttttgaacatttaaatttatttttttaagtgctggcatacgccaagggtaaaaaattgtaaaaaaaatcgtgatttttttttttgtagagggggggggggggttggctaggccctgatgacacgccctggcacaattaccgcatgaatgggcattgctcgccagtgatttgcacgttgattttgaagtttggcgaccgaaaatggaccaaattaatgtcataaatcagcgggctgccgagcacttttggccgaggggcgccccgtcgggccaactcaaagg

SEQ ID NO: 33812 - DNA, 615 bp, Heterodera glycines
taggggtgtattttttcgtttttgtaaacctcaatatttaggggtgtattttcgtgtgttttttttaattgaattgattgcattagacgcgttcaattgtaaatgatctgtttttttcatttcataaactcgtttgttatttttacaaaaaaaattaatataatatttaaaaaaataaataaattttttttcaaaaaattctgatttcggggggggttttctctcatatcaccactattttcacgcatacattgcatacacacttgctaaagctgtatttatgaatcattatattttgttgttgccacaattattattcgtaggttgcagtcgagaacgaagaatgtcattgaaattgagttaagaataatcctagaataattatactgcagatgctatataaatacactattatgacaaatccttctgcagaattagtattgaagtacaaaagtcaatattgtatacgaaccattaatgttgcaaaaacaaaaataacaaacgaaagcaataacgcgaaagcgaaatgaccaaaaaaagcgaaaaaatgaaaaggtgaaattattttccaaaaaattcctctggtgattgtgagacaaatgtaaggatcaatta

SEQ ID NO: 33813 - DNA, 980 bp, Heterodera glycines
tttcaaataatcaacgcctttttccatttgtccttgcttttccctaccaatttgtctttgcgttttccgttgccttttgtccgtttttcgtcctctttgtctttgtgctgttcccttttgtccgattgtccaaatgatgcaatgttttgtgctgctcctcctccctcttccaatttaagtgttgtgtcttcgctgaatgtgctcaattcattttgcacaatttcctcgtaaagtctaaaaatataatttaaaataataattattattatttaatttattttatttatcattttcattttctttgatcacctgtatatttcggaaacgagttcagaagtgaaaagaatccccgtgtgaaggccaaactataaaagggagaaaataagaaaaaacggaaaatgtgcagaaaaatgaacccatcgaagcgcaaaaacgccgccgttttgagaaaattcgccaacaaattgccaaaaatctttttctcccctaagggtactaaattttaatggggttcttaaaacccaaacggaaggacctcttcctacttaatttttgcaaattttgctttgccccaatttttggaaaaaggaaattaagttccaatggctgggccccaaacccacgggcaaaatttggggaaaatttaattttttacccccaaaaaaatggaaaaaacaaaaaaaaaaccctttttttggggccccaaaaaaaagaaaaaaaggagagggcccccccccccaaaaaggggcccccccaaaaaaaaaaaaaggagaaaaattttttccttttattttgaaaaaaaaaaaaaaaaaaccccccccccccctcggggggtttttttctccccaaaaaagattttaaaaaaaaaaacccttgtgaaaaaaattttttttgttttgtttggctggtgggggcccccccaaaaaaaaaaaaaatttttttttttttttttttaaaaaaaaaaaaaaaatttatttttt

SEQ ID NO: 33814 - DNA, 111 bp, Heterodera glycines
attccagactcagttccagtctcacggctatcctagcccctatgcaccaagcccaccccacggtatgtgcctcctccctccccgctgctccctcctccgtcccctctccct

SEQ ID NO: 33815 - DNA, 1026 bp, Heterodera glycines
ttttaatttttaaaattacgttgatatttaagttgacggtgtaatgtttgttgatttaaataaatatcaacattgaggttgattctccgcaaaaaaaatatttctaagtgaaaaatgttgatttgccattctctagagtggatgcataaattcagtctctcaaaaacagtgatagataacgacgacgacgacaacattaattaacaaagtttttttcactttataatttatacaaagatattttacatttatattttaaaatattaatgtatcttattaaaaataaattgtaaaaaaagaagatcttttaaatatatgggattttaaaagaatattaaagaaagtgaaataaattaaaatccaccaaaaaaaattttaaaaattttaaacattaattacactcaaaaatcatcaattcgaggaaatactgttcagtgaaaattattttaaaaaataatattatttaacaagcatcaaaatgggaaaaataataatgaagtaattctttaatacaaattaattaagaagaaaattttgcaaataatgaagaaataccttaaacgtttgcatcaacggctcgccttggaaaacgtcaggaattattttatttctaaatttatataaattaaattatttattttcaaataatcagctttttaaagtagaaaaaatattccttatttacaaaaataccagctaaaaatattaattaatgatatattaatgcataaatctttatcaaattaattttaattaatcatgtaaaactattgctttcaaagattaaatattaaaaaccaacatatataattcacaaataaccaggaagccgaaaacctgaaaaaaatgtaaaaatattctgccggtcttcggttttttgaaattttatattttaaattcaacaaaacgtaattatcactcaaaataattaattaaaatatctttttctgttttttgattgaataaattaaaaaaataactaaatagcaatatcaatggtttttagagttaaatttattttaattt

SEQ ID NO: 33816 - DNA, 778 bp, Heterodera glycines
tagggatcggatttatatttgtacttattttttctgcggctttaactcgacgagaaatgcacgaaaaacacattttttgttcgaaaactttgcgttttacgcccttattcgaccttagaaatccttattttgggtcttcttcctttaaaatccttgttttagatgttcaccattaaaataagtttttgtccttatttcgcgatttttttaaatttttcatataaaattaacaaattcttgaacaaaaatgcaattaaaaaaatttttttgacgcgatcacattttttggcaaatttacaaaaaaaaattcaacataaatttgtttttttgttaaccaaattttttgtaatatattttctttcttgatcaaattttggtttttgaaattttttaaattttagaaaaatgcatacaaatttcgaatatttttaattatttgcattttaatcaatgaataaaattgtttgccttaatttgaaattattttcatatacattaaaaaattatacccttaaatatggaatttttcgaccttattttcgctcttatttcgcacttttttcgcccttatttacggccttattttggactttttcgcccttaaaaatccgatccctacggataaatctttaaatatttcaaaagtttaatgctttttaggccagtgttgtgcttattgaagaatttccaccctcttgttgcgctaaagcatttacataatgaaataataatatttctcgcggattacagcgattgtcatcaacgatccgtctttttt

SEQ ID NO: 33817 - DNA, 839 bp, Heterodera glycines
tgtgaagttatagcatccaaaaaaagctaatctttcaaactttgttttgaaatttaaatgcgaagcgttagaaaaaaaagaaataataaacgtacagaatttctgaagacatttgcagcaaaaaaatgaccgggaaatacaggaagaatacctaatgagagaatggaatgaggcggaggaggagaaaaaaacacatttttatactaaaaaagttacaaacaaatacaaatgttaaggtgctgctgcgcaaaaaatttgacgaaattcattttcaatggcacagcccgtggaaaaaaagaaaaagcattcctccgccgaccatcgcttcatttgtgaagattccgcttgggggtggggttcccaaccgggcaacgactttttttgcaccacttttttgcggcatttttccaaaaaaacttttggggaaaggtggggtccggcggtgcccgccgagaaatttttagtgtttttaatgcgatttgttaacgaattctgtccaaaaatgacaatttagcaaattttgcaccaaaaaattaccattttatgcttttaagccaaatttttaaagaaaattatagacgaaagggaaaaagttgattttagtcgatcgtaatttgtgtttttttttaaaccggcaaaatttttggatttttctatcccctcttctcttacgatcgacaattttcctcacaaatcggtattagtcgaccctaaaaatttggaacttttaatgaaatttattaagaaataaggcaatttttcggattgccaatgaaaaaattttatagagtttctgttttcatattaacgatcgactttttcgcagactttttgttctc

SEQ ID NO: 33818 - DNA, 761 bp, Heterodera glycines
  unsure (1)..(761): unsure at all n locations
tagcatcaaatcaaatgtcccacagaggtaatcaaatggtcggtcctttcttcttnttctcaatggccataggttcacaaattggcgcctttttcgctgttttggtcggcgggcggagacaatggcctaaaatttgaattcgaagaataattagttaaataaatttttgaaaattttttttgaataaaaatcaaagagcggagaacccgaatctgatattaatttcgagccacgtcgaatcccgaacccggatttgagcaaaaactcaaagttcaaatttatgaatctcgcatttttgggagaagattttgattcacccccaccgctaaacaattaccaataaatttaattaaataataaaaaatagggtcaatggcaactcgtacgaaaatcacttatatatgtattacaacctagccaaggccagagcaagccaaagccaaggactagcctaaagcttaggcctaagcctaagaaattgtatgagttgttgcattttgggtactttcctgtatttaaaaaatcaacaaaagggcgcataaaaggaagtgaccaccaataaataaaatgggtgatacaagccaggggaagtcttgaagaccacttcgatcagtcaattcccacaccaatcgaatagattcattcattcatttcttctgctgatcactcggcccgggagaagcggcctcgagaagaagactgaaaaaacgattattattctattgcaaattaaaagtcaatggcattttatgagtccaact

SEQ ID NO: 33819 - DNA, 950 bp, Heterodera glycines
ggggcggggcggtgggcgatcagttcaatttgggtaatgggcaaacgctgaaggcatttccacgcaccgccgctcatttggaagtgcgacgcggcgaattggtggaacaaatgaaagacgtgagagaagcgaccgatcggctgacagatcgaattgaacaagcacagaagaattacgcgtactttcaggtgggccaaggaaaagcgtttggtcaaatggtcaaataaacttttgccaatttgaaaatgccataggaatttcgtcgtcttatgttttggtctcgccaaatgtttgcgacaattaccggcgaattgctgccgcgcgaccccccggggtgcgaagcgctgttggcacggcacgcggagtacagacgcgagttggagacgaaggaggcggaaaaggcgaatttcgtgcggaaaggcattgaaatggtcgccgcgggaaattcgctgggggccgaaattcggacgcgactcgaaactttggaaaaaacattcacacatttggcacagacatggacaaaacggcaaaaggcaccacaaaatcaatgggaaaaccattgtgactaattggccatttgaggtgtacgaagagaattcggacgtacaaaaatggatggcaaatgccaacgaattggagcggtggctgtcagagagggagcaattccttcgcgacgattggcattcgggcgcgaccgcagaaaatgtcgaaggcgtcgaacttcggattcgggttggccctgggggggggggggggggggcggtcgtcactttccgtggaaagcccattcattcctttgacagcactttgacgactttttggccactcttgaagcacaacaatcgcaatttgatgggttaaaacgaatcactttaatcgaagagaaattcgaacggatgagagaagaggaaggacgacggaagagaacgcaaagtgcggagataccgccg

SEQ ID NO: 33820 - DNA, 718 bp, Heterodera glycines
tttcgcattttcgcatattttggctattcgcatttcgctttttttttcatttcgcatttttcagtttcgcaaatttcgcttttcgcatttcgctttttatttttcaatttggcccatccctgaaacactccgtcttatttataaaatttattcttcgattttcttctcgacgaagaaatctgatttttaaccatcaaaatcaatgagtttttaatgaaatatgtagcaattctatagcaaagtttatgctctttccaacgataaagttccaaaattagtttccaacgctatagtttttttccgaaaatttatccgagtttcaacttattttattattcgtgaaaatcaatgtacctgtttaatttatatgttaaaattagggctccaatttgtaggctctaaaaactgccaaaatatgttttttttttcttaggggtgtatttttgaatatttcaggctcgattcttagagatgtatttttaagaaatttttcgggtcgttcctcacaaaggaggggtcgtcaagtgaccgtgggatttccaaatgaaatttggtgggagggtaaatcacccctaggttctattgtgaaattttaaccatttttgccaaatgagcatgagggccgagatatgacgtgccaaagtttttacgctttttaaattagaaaagatataattctttttgggcaagaaagaagccattggtggagaggaaggga

SEQ ID NO: 33821 - DNA, 1346 bp, Heterodera glycines
atatatattaattgttatgtttaattcttttcaggtccttcattatgcggaggaaatttacgagggtatgaaagcgttccggggtgtcgatgatcggattcgactttttcggccggaaatgaatatggcacgaatgaaaaagtctgctgctcgtgctgcaatgccggtttgaaaatgattttcaccaaaaatgccaatttttgcgattttaagccaaataatttgtaaataaaatttaattcatctatcaaataatattatttatatttattaattttttttttgaatgccagattgcttcttgggtggatatttatcatttcatttatattataaaggattttgatgcggatgagttgctgaaagtgatcattgagctggtccgccttgatcgcgattgggtgcccgccaagtcacccgcttcactgtacattcgtccgacactgatcggcaccgacccagtcagcccggtggacccgccacgatcagtcaaaatgttcgttttaacaggtaatttgaaaaaaatatattgaaaggtcccgttcccaagaactgagaccaataccgaaagagtcatctagttaaacttgtaaattcataagtacaatatctttatttttaattaaaaaaattggaaattttttggagtttttaaaacaaaattttaaataaacgactatcgcgaccgatactctcgagcatctattactcaaattcatacctgtctactatattcaggtcacggtaaataaaaaagaagtgaaacttttttagaaaaaaatttgcctaattaattttttgactgtttttaacactttaattattgttcatggagtaaacatgaaatttaattaatttttggcccggtcggcatgtactttgccgtcacacagcccgtgtcactgtatgcggacccaagtgttgtccgggcattccctggcggagtcggtggctttaaaatgggatggttagttgaaagtttcaaattttaattaatgcgaaattttcggggtctgtgcattgtcggggaatggaaatttacatcagaaaaaatgcattaaattacatagattattaaattcgaggccaagatggagatttcgagagtcggatttgttcaaaaattaccaagatttacggggtattgggtgtgaaatatgagatttctgccaacaatggcgaaattgtcagggagccgtcagagacggggacttcaagaatcgggttcgggcatttagccaaaaaaaatgacgaaatttgtcaaattctgcaggagaaagatattaattatcttggatttaccccccattggacgtaaactttgtgaatccggaattacccataaa

SEQ ID NO: 33822 - DNA, 911 bp, Heterodera glycines
caaccagcagttgagcacttttggcacgttgttttgaagtggagtgaaaagccatttggccaccgattgtccatccgatgccgcggcaccgtcatcgcatgggaattcggcgaagagatcaccggcataaaaaatgacaaaacgaagtgatggacaatcgctaagaattgatggcgccatttgtcgcaaaagatggaaaaatgaggcggacatttcaatgtcatggatgtttttcccgagcattggccaaatgttgcgcaaaatgagttccgagatgcgatcacttctcatactgatggacaaattgatttgacaggcggcgaaaagtggacgaaaacggcggagaaaagcgatggcattttggtcgatgtaactaaaaataacatgaattgagcctaaattgtttcttcataattgaccaattttacttgatatcgatgcgttcgaatccggtgactttgcgtggcatttcaatttgcggaattggcaatggtgtccaatatttattgacaattttcattttcttcgtgccattctctccaattttgctccaaattcgaataagtcccaatgtccatttgcgcgttttgaagtgttcgtcgacgtaaaagtcaaaacggtggctgatcattgaaatgccaaggccaagttgtgacggctcaagcaaatcgaagacacaaagccaacagtcggcggagatgaaactgaaaaattaaattaatcaaatttttgaaagggttatttttatttttacattttcttttttggctttttgaaacggtcccaataaatccaaagaatggcacaaccgccgacaaacattggcactccgaacagactaaaaaatgagaacgaaaaacgttaaatgtcgatacaaaaaacgtacagaatcattttttaagacattgtca

SEQ ID NO: 33823 - DNA, 993 bp, Heterodera glycines
  unsure (1)..(993): unsure at all n locations
gaccctaatttaccccagaaaaatatttttcaccctcctttttcaacccaaaaaaaatttttgaaaatttctagggggcctagctcgaaaatttttgaaaatttctgaaaatgaagtaaaccgttcgatagagcttaaaaagctctacaattttgctcttaggcattttttgtctaaaaccgacccctgacgagttatgggcccaggactcaaatgtcccgctcaggccaaaaattttttctatttcctggaaaaaatcgaaattttttcaaaaatatcaccaatcgatagagctcgaaaaacggttgcttgaaagtggtctccgtttttctgggaaaattcgttaaaaaatcctaaaattcaaaaacccgaaaaccgttttttaggcctagctcgaaaaattttcaaaattttcgaaattttaaaatttggaaaaatcgagctttcgaagctctacaatagtgccgctggccaccctgcgctcaggtcaaagcctaatgagttattcaacggggactgaactggacaaagttggtactgaatttttgtagaagcacacagaccagggggttagagatagaggcctggaattttttttaacttttagccaacacttcaacttagggccctcacagcgagcattttttgatttgagttttaggaaaaaagttatgggccccaaactgcgagaaaaagtaagaaatccttccctgggactcagtcgtccgcgctgaatttttttctatagttttcccggatgcgccgtgaaaagttgtaagaccgatgcacaactttcagacccctaccgatagccgttctcgagattttggttttaaggatgagttgccttgtcaatataacatatatactagcgggtgcgtgaaccgtcggctatttagctgggaaaaagcgcttcgcgctttcggagcttcgctacctaggctgttacgggggaagaggtacaaccacgggtgngaaggtacaattgtgatc

SEQ ID NO: 33824 - DNA, 921 bp, Heterodera glycines
tttttcccctattggtgtgaaaaaagaagactgaccttttcttgaatgaactgatcattttccatcgaattgagtggcaatacgtttttcgagagagtattgtagtttatatgcgtgcataccgattttattgtttgtatttcaatttggtattaagtattttccaattaattactcaatatttgttgtaggagggacaaattaattttgaatttctcccatgtgcattttaaacataacgaatgcggtctttttgcacgagtaattcgctgagtgttttctccaaattttcgtttcattcaaaaattggtgagagtgctatatgacaatttcttgcgctgaactcaaattttcagctgtctgtgctgcgaaaagttgcaggaaaatgtcatctgagtcaaatatggagaatttccccgtcaaattggacatggattatatcaaacggttggcacgcatcgaacggaccggccctaacacttttaggtttctttgatgaaaagggtttcgaaagaattcatttttagtgccaattttcttgtggcaggctatcgtaaggcggtgaatagggacgttttcgggggacaaatgttcgcgcaggcaattgccgcggcagaagcaacggtggacggcgacgaatttgcaccgaacgcggcccattcgatgttcattagaaaaggtatttcattccggacttttcatttccccaaggcctttgtctttagcattcattgaccatcccatcgaatatattgtcaccagaacgcgcgacgggcgttcattttgcactcggacagtcgaagtgcgacagaacggcgaaaccgttttctgtgcgcagattcactttgcgttgtgcgtttacttttccgccgcaaaaccgcgacttttagaaggacgctcttcattgacacaaacagaatg

SEQ ID NO: 33825 - DNA, 1517 bp, Heterodera glycines
  unsure (1)..(1517): unsure at all n locations
aaaaagttaagcctaaactttttggcctgtttaaaaaggaattaaaaatttttaaaaattttattcatctccctttttgatagaaaaagcatcagagtgcctaaactaacatgtaaataaaatttggtgcgtttcagaaccctgttctgaaaaaaatatttatgaattaattatgcaaaaaacaaataaataatgaactctcttccttaataattttcctgcaccgaaggtactcactcggccgcttcgcggcctcgtggcgggccttcccccccgcccttcagagcacgacaaatatttcaacaaaaattttgaaaaattgactatagcaatcgaacgctaacggacgacctaatggaaaaaaatccccgaaggagagaatttaattaaatccattccttcgagagaccgtgccgcgtgccgcgatttaatcattgctgtttcgatacatcacatgaccgatacatttgcttagaattcaatcagaggattaattgttcatatcttacggtggatccatgaatcacaatgatacaatttcatctatacggttactgatttactcattaaaattccaaaagccgatttgacggatagaatttctaaaaattcaacaaaaggactaactattatttcttcccgtgtatccaacaagagaagcatagaatgtcatttacggttactgatttactcattaaaattccaaaagccgatttgacggatagaatttctaaaaattcaacaaaaggactaacaattatttcttcccgtgtatccaacaagagaagcagagaatttcatttacggttcctgatttactcattaaaattccagaagccgatttgacggataaaatttctaaaaattcaacaaaaggactaactattatttcttcccgtgtatccaacaagagaagcatagaatgtcatttacggttcctgatttactcattaaaattccaaaagccgatttgatggataaaatttctaaaaattcaacaaaaggactaactattatttcttcccgtgtatccaacaagagaagcatagaatgttatttacggttcctgatttactcattaaaattccaaaagccgattcgacggatagaatttctaaaaattcaacaaaaggactaactattatttcttcccgtgtatccaacaagagaagcatagaatgtcatttacggttactgatttactcattaaaattccaaaagccgatttgacggataaaatttctaaaaattcaacaaaaggactaactattatttcttcccgtgtatccaacaagagaagcatagaatgtcatttacggttactgatttactcattaaaattccaaaagccgatttgacggatagaatttctaaaaattcaacaaaaggactaactattatttcttcccgtgtatccaacaagagaagcatagaatgtcatttacggttactgatttactcattanattccaaaagccgatatgacggatagatttctaaaaattcaacaaaggact

SEQ ID NO: 33826 - DNA, 705 bp, Heterodera glycines
atatctttgccatcatccgctcgtccgtctcgtggtccattttggcctaaatccgtgtcatcaacagcagaacggtccattcggccttctccccgtcgcttttggcctttgccttctctcacttttctctccgtcctcctcttcctcctcccgctgtttttgccctccgtcggctgttcgtacttttccgatggccatgtaacaaccaatgcttctgaatcgtccgcttcgtctccaccgtttctcgagggttcccccgccggcgtcaattcgtccgcccctcttctcaatgccaatgtctcactcttcgaacttctcgtcggccctaaccaatggaatcaaagcgatgccgactcagtctctttgccgttccttcgtttccgcgtattttatccgttaattttcgttttaactgtttgccttgccttagctctttacgctgaattggcagcaaattgccactccgtttggtgtgtccttttggctccttttggccagttttgccaaaatccgtaagactctcccaattgccctcctaattggctaattaatagttattaacctttccctcagtgttcaacatgaacaaaggcattgccgaggctgtgcccgactcggcgctgctcattgcgctcggtttggtgctcggttgggtgttgcgaacgatggacatggacggggcggtgttcagtctcgagtccgtcc

SEQ ID NO: 33827 - DNA, 516 bp, Heterodera glycines
ttttttctgcggtggaaaaatacgttgatcacgaatctgagttcaggttttgcaaaatcattgattttgtctatgacttttcatcaagtacttgattttttccaaaatttgttggaaataaaaactattcaaaggagttgtagaactgaaaaagagcttttgaatgagctacttactgagtgtctggagaattcaagattttagttttttatgaatttttcaaatttaaatactggtccttaggggtcacatgaaacggggtctggagttcgagcccgcttggctgcaattgtttttttcatagacaaaatggtggcttttgtaaaagctgcgggttcttatcccttttgtgaccccccctgaaatttttttattaaagaatctgagactgtttataaatgctgttagttaatgcatcactgttttataaatagttgatcatcacaatataaattattgatcctcgaacgggggctcacacgcagactattgagaggctttggagggctgcaaaaa

SEQ ID NO: 33828 - DNA, 946 bp, Heterodera glycines
  unsure (1)..(946): unsure at all n locations
gggggtgcggcggtngcgataggcnccgccggggttaaattttgaaaatttgagtgtaatttgttaacagattttcaacaaaaaggacttgtttcttgggattattagactcaatttgtacggattcatttaaaaaaggataaaatatgatcaattaaaaaactatgaggaatcatattttgctgataagaaacccatcagtatacaaaaagaaaattcaaaattattttttccctttaactccaattttcatctctaatttttccctcaaacccccattcttaccagtgcttgtttttcccggttgccctagcgggaccggaaaataaattttcaaaatccgggaccgggacctcggaggaccgggaattcccggcccggtcccgctcaactctactaataacttttaaatttaaggtgtataaaatctaagttttaaaattttatatcaaaatcaacaaaattacgccaaaccagtatggagataaatcatttttaaattccaccttcaaatcgaaaatattggcctgggcgtaagccaagaaaacattgcgcaatttggagaaggaaatttgtaaagatgggccgtcaaggccaggaatgttgtacttattggctaaataacaaaataattaattaattaattaaaaaataaatccacccgcgtaaagcactgccattgcgttgtctccattcaattcgctcaaatcttcaatgtaaatgaagctcaacatcgggtgcttctataaaaagttatggcattgatcataaattgatcatttatggtgatcaataaccccctagggatttcgaaaatttccccgattttcagtgtattcgggtgtcccggtcactaggaaggagtgatctgatcaaatcggtgtaagaaacttttttgatcagcaccaaaagttatgcaagcgtgaattatttcaagtttttaaat

SEQ ID NO: 33829 - DNA, 662 bp, Heterodera glycines
tcgaacaatagctacgaaaagaaaacgaaaatcaattaaaagggaattaatcgccatgtgaataattcgtgcattaatgcatcaataatatttggcccccccctccgtccttcaaaattttgaaaaaaaaataaaataataggagcctcagaattttgaaaattttttataaaaactgatgacaagctaatgtgataaaacaggttaattcttttcctttcagtatccctgcaaagtttggggcgcttgtgataagtttgtgaaaaaaagttaagcctacattttttggcatatttaaaaagcaattaaaaaatttttttttgaaatttttttaagtgcaaaagtggtggtgtctgcaaaaaattttcaccgggtttaaaaaatctaggaaaattagtaagcatttgtagtgttccgatacgtatccctgcaaaatttggtgagcccctgatcaattacaaattatttatggacgatcaaatttttagaaatttttatttatttttgcataattaattcataaatatttttttcagaaaatgctctgaaacgcaccaaattttatttacatgctagtttaggcactctgatgctttttctatcaaaaagggagatgaataaatagttaaaaatttttaattcctttctaaacagcccaaaaa

SEQ ID NO: 33830 - DNA, 517 bp, Heterodera glycines
  unsure (1)..(517): unsure at all n locations
ctgctaaatcaacgcagagacgcctttccttgacctttttaggcccatgcaaaacctggagcgtttctaagcactactcgaaaaatgagtgatttaattttcactaaaaagttaagcctaaacattttggcctgtttaaaaaggaattaaaaatttaattcatcttcctttttgatagaaaaagcatcagagagccttattaacttgtaaataaaattaggtgcgtttcagagcactttctgaaaaaatattcatgaattaattttgcaaaaataaataaatagtgaaactttaaaaattcttagaaaatttaaattcataggtactactgctaaatcaacgcagagacgcctttccttgacctttttaggcccctgcaaaacctggtacgcttctgagcactactcgaaaaatgagtgattgaattttcactaaaaagttaagcctaaacattttggtctgtttaaaaaggaattaaaaatttaattcatcttcctttttnataaaaaaaacatca

SEQ ID NO: 33831 - DNA, 935 bp, Heterodera glycines
ctcgtggccacccaattgattggtttttcactttttaattatttaaacaatttcaaactaatagcaattgctttccacttctgtttctaaaaaataattggcatgaaaatattacaatgccattctgtgggatgccattgccaaaactcaggaacccggcagggttaaaaaaaaaacttggcacttccccttttcaggcaaaatggcatccctttaattcatccattatctatattttaattatgtttatttatttctttttaattttcaataacataaggcactgaatccaggctggtccgatgaacaactctttcagacaacacgacaaattgtggtcgcgcaattgcaacacatcagtaattcattttattaaataattataattaatttttcataaatatgcccaaaattttaccgtccgtttttagcttatgaggaatggcttccactagtgttgggccgggaacgatggcttcgaagcggactcagccaagagaaaggccaacaaaagggtgggcggggagagggtaattaaaaaattaattaattaattttaaaatttaattttgaattcactgtttctgctggcgccaataagagactctcgaaaattggacataaagaaatttaaaattaattataccaaagagcagagagtaattaaaaagtaccaagtgccataattagtaattttgctatttaattgaatgaatattaattatttcatttggcaccggcaaatggctgagtattaaataaatccttgttaatccactcaatctctccaaacatttccatttggtatccaaaatcctccccaaaaaaggatgggcttatgagagaataaatttaagaaaatttaaatctttcagcagatgccgacaatgactacgacttgaatttggacggcacacactgaacgaatcgcagca

SEQ ID NO: 33832 - DNA, 950 bp, Heterodera glycines
  unsure (1)..(950): unsure at all n locations
ttcggcgacgttgacgaatcgacttgcttaagtcggtaaagccgcttgtgcacagtctggccttcgtacaacagttcggcagcaatgccggtcgaagccatgggaaggaagttgatgccagcggacttggcgattgctctggattttgagcagctgccctgtcatcaggagcaggtggacgtcgccgatagcgcgggtaagcatgttcgttgtagacattgtcgtacgaaaatggcttctaatttgaaatgcttgagtacaagaaaaggcaagtaagattttggctaaccggaaagcgtttgacacatttgccgtcaacaaaacatcttcgcgctgagcacgtgtggatgtgcttcatcctcagcgttttgtaaagctcacgcttcaacaacaagtcggatgagcggcccggtgggttgtccgggatttctgcagagatgtactgctcgatatagtcttctggcgtgttgatggtgccgccacttcggattctgtcccagtccaaaatcagtgcgaaatggacatgcgggaggccactaaaaatgactcataaatattcaaaaccaaaggactcagtttaccgtttctgatgctccaatgagtagaaccagccacggacgggccccatacctccttgacggtaaggtcatgacgcagctctttgaatttgtcgacaaagagacgacaaatcacgtccggacggtcgtaccactgctggcggtggccatctgggtcagttggcagcatctcttccagttcatcacattcgggatccatcgtcagagtgatcaaaaggtccggctttccacttctctgcagagggtcatgcagttggcgtactcgcgctggtagtactgccgnaaccccgcgaagntgctcgtcggtcatgtagactcngncaatgtctcccttgtaccctaatagcagctatttgattataaactcgaaat

SEQ ID NO: 33833 - DNA, 857 bp, Heterodera glycines
atagatattctcagaaaatggctatctctttttttctctccgttgtacatgtgggttttccccaaaaacgcattactatctgcggttgagccctacaaaaggtcgggttgaaaattgctttctcagaagaatagatattctcagaaaatggctatctctttttttctacaccgttgtacatgtggggtttccccaaaaacgcattactatctgcggttgagccctacaaaaggtcggtttgaaaattgctgtctcagaagaatagatattctcagaaaaatggctatctctttttttctacaccgttgtacatgtggggtttccccaaaaacgcattactatctgcggttgagccctacaaaaggtcggtttgaaaattgctgtctcagaagaatagatattctcagaaaatgggttatctctttttttctaccccgttgaacttggggggtttccccaaaaacgctttactatcgggggtggagccctacaaaaggccggtttgaaaatggttgtctcaaaaaaataaatattctcaaaaaatgggttttcctttttttctaccccgttgtacatggggggtttccccaaaaacgcattactatctgcggttgagccctacaaaaggtcggtttgaaaattgctttctcaaaaaaataaatattctcaaaaaaagggttttttttttttttcaaccccgtggaactggggggtttcccccaaaaacgcttaatttttgggggtggaccccaacaaaaggccggttgaaaattggtttccccaaaaaaaaaaatattcccaaaaaagggttatccctttttttctaccccgttgaacttggggggtttccccaaaaa

SEQ ID NO: 33834 - DNA, 581 bp, Heterodera glycines
aaattgttatttttgaatagggcagtcaaattgtaactctcgcaatatggaactaaattgcaaaatgtagggctttctctattgcacaaagcaactcaatttgggtctgttcgacaatattatttttttaaagaaagaacgccaaaattttaactttaatttggattttgagcgaaatcaaaaatcagaaaacgaacgtatgcattttgtcgacgaaaaggagagtactgtgataatttcataaaaaaatcaacaaaaaaaagtcttgctctcccccatgccctttttcctctttctctttcatttccactcatatgctcaaatacatactatacaactaaatgcttttacatttttttaaatgatggaaagaagacaattctagttgtcctccttgtctttggtgttattgttttgataatactggtttgtttgcatttgtttccttaaaatttgacccctaatatctttaggaggccagatcgaatttggcgaccgacgaagagggagaaggtttggaggagcaccggcgaatgaaggaggagaatcggaggggccgccaggagcggatggaagctaat

SEQ ID NO: 33835 - DNA, 866 bp, Heterodera glycines
tgaactgaaaaaaagatatcaaataaatgcggatggaatatgaatgagctgaatgaagaatttaagaatttttgggtaataaatagtagggtttgtcacaagtttgaaaccaaacacatgaaaatcgaaaattttgaattttcgacttttgttcgaattcgggtccggggctcggaattggttgaaaggatgccgaattagtgatcagcaacctcgaaaaccctttataatatattttcatgatttgaaaacaaacaatatttttttcaaaaaatgggggggggacaaacccatactacctatcaggggtgggacaactctcgcctctcgtctctcgccaactctcgccatttttggtactctcgcctctcgtctctcgcctctcgttttttgggacgagaggcgagagttgaaaatacacccctaaagattgaaattttgagcaatcagaaaaattttcaaatttacgcgaaaaaatcataaatctctttttctcattccttaatgtcttctctatttttggataggttcagttcaaatatggtctggtggctaaaccttcttcctttcattatttttctcttgggttcaattccccaacggtacagaattttttttataatttctttaaattatttttcaatttttcaattgaaagatcattttttgacaaattctgttaacaaatctcactcaaaatttcaaatttttttttccggcggcgcctatcggcaccgccggaccccgcacccgcccctatgtaaaacagcgtcacaaaaaaagcgagttacagactaaaaataaagttcgtttgtataatagatatatttcatgaaaattttattttattttcatgaaaaatttta

SEQ ID NO: 33836 - DNA, 828 bp, Heterodera glycines
tcgagaaacttagctgaaacgggtttattttagccattagtggtaatatcttttgttaaacttacttcccattttgctgacaatataatttaagtcatccttcaatttaaagtggggaataaatcaagtctaaaagaaaaggaaattacaaattaagtaaagcttgaaataaaataatcacagggactacgatcaaaagaaaatagatttaatttatatgctgtaattgtatgtgaggaaagaaggaagaagcaggcaaaactgaaagcgaatgcgcaaagcattgggcgtagaggaaaagctgcaaaaactgcaattttttaaagtgattaaaaaaattaaataaattcaaaataaatttatttgtaaaacaattttttgggctttgcatacatttcaggtgcttccgctcccgggaataattgaaatcttggcaattccttaaaaagattttcaccaaaatagccaccaattttgccttatgtattcggtgggcacccaaattcaaaattggacctttcaatcgttggatgaacttgagcagttgcgcatttcggagaatgccaagcacataaacaggccctctacgccctattcaatcccattttctgtatatctttgcagttcaattttcaggtttcagtccgtgttggctgaacgtccgggcattgtcagcgacgactttttgactgcccgagaggaaacagtaatttgtatgaattgtaagcgaatccgggataaggtgaggattagttatttattcacccagtaaaatcatttaagatctggtgacgattttaagccgagaaatgtgaccatcgagtgcgc

SEQ ID NO: 33837 - DNA, 1599 bp, Heterodera glycines
ttatccttctttttaaacgaaaaataattattaaggccgatattaaacaatgaatttggaccgcaaattggccaagaaataaaagaaaaatgattggcataaaaatacactatttgcttttttgtaaagaagacagggtttctatcgcgaaaactcaaaaattggaataaaagtttatagtataagattgaatttgtgtgattttacctattctgccttttctaggagaaataattttaattcagcatttatatacgttacttttttttacaattatttattttttactgtatgttttaaaaaaacaaaaaaaaacacgagaggatcggcggtgccgataggcgatgccggaaccaaattgtaaattttgttcctatttctgatgagtcaccaacaattgtcaattttatggatttttatatcaaatcttatgtctattaagtgaaaataataattcaggcaaacccaataaaaacccgacaattcaaaaaaaccgggcacgggtccccaagtttacacacttattcgaaatctcgaaacagtgatagtataagatgcattttgcaaatccataagtaaaatcattttattcatgttttttctgcaactctctaccgttgtgtagagtcgtaataccatcgagtgaccgccggaccacataccgcaccttaaacaatacttttagatatatacagtttccagacgaaatccggtgccgcctagctcggcacggtaacgcaccggcgcgggttattggccatttttaaacataccgtacttacagaaatagacctttcaccctgaattagaccctcgtccctaaaatatagccagctcctctcatcctccctggaggtcgagggagggggggggggtagaaaaatagagcccccgggtggttctaattcagtaaatacggtatattattgaaaaatagagcccccgggtggttctaattcagtaaatacggtatattaccgcaaagttttacctccctttgccggtagagaacatgtgtaggctgtaaaagtgtaaaattgttttttttccattaatttaaaacaattattaacttgatgcagatttagatatttattcttttgttccaaagtgctgaccagaattaaataagttttttaaaaagtagagaattttttaatcaataactaaaaaatcaattaatatattaaattttggtgttcggggccatagttcatactataaaattaacaaaattaactcattaattactacataagtaattgacgaccgaatcggcattgatcttcttggcaacatttttaataagatatttcttgttatttttaaagtgaaaataattttattaattgaataaatcaatcggaataaatgtgaacagattagatatttaattgtaaaaattgcaaaaatgtcgaattttacgaaacgcccgaaggtggcgaattttacgaaatgtcccagcacggaattttaccaccattttttgcggcgctctttttcaaataaaaaatttggggaacaaagaggggatgagcggcggtggtgttaggacccaagaggaaaattttttttttgaaaatttgcaatttgttacat

SEQ ID NO: 33838 - DNA, 950 bp, Heterodera glycines
tgagcttttttgtggaacgactcaccacgcaattaacgaatttgcttagcggtgacgccaaaaattcttaggctttttatgatttttctaaaattcgaaaaaacaccacttaactcttcaatttaatgcccatatttgtttctagaaaccctattttgtgaaattttgccttaaatttgggccttttgcattttttttgagtttcgcctctattttggcctttttgaaaaatttctttcatgaaaatgaaccccctaaggatttctttatatcctttgaaaaatttataggttttttaaagttttgcactaataatttgctatttcgtcccgttttttgccatttcatttgcctttttttataaattcagtcggcaattacattgtccaaaaatgtgtgccggaccagccaggggccagaaactattgcaaagacttcaacaacatttgccaaatgggctttttcggcatgccaattcattgctcatcttgtaagggtgatctgtgcaacgaagcgcgtaattaacaaatgatgagcaaattagtcaaattaataaactaattaattaattaaactggaataaagaaccgattttcaaattttatgtttgataaattattttatggctattgttgtattcaaattcaattcaattagaataaaaaaattgcccatatttttttgtattaaatttgtttggctggttaaaaaataatcggggaataattccctcgtcggggagtaatttttcgtaaaaaaaaagtggaaaaagattaaaataaattcctttatcagggcttaaccctaagattagagcatcgaaaactttcaaaaattttatggcatttgcgcccaaaatggcattgcatcaaaaaggacgcgttttttgctgtttattttcggcgggagaaattctcgggctttttctgtctcggagtcgattttgaagg

SEQ ID NO: 33839 - DNA, 1292 bp, Heterodera glycines
gatgtgcctaggtttcgcttttcgcctttcgcattttttggcgtttcgcatttcgcttttttgcgcgaaacgcgacttttacacccctaagaattggattaaattcccataaaatttttcaaaattttaccaaatatattcaaaattgacagccagccaagggcaaaaaaggtgggccaagcaatcaatcacctgccgcgggttcaacaaccagcacagcgtgttcaacgccttggctcctttgttgccgccacttttcgggttgacgaacaccagcagcggttggatgggcagcggctgcagttgggccgcggttgcccagcggctgtacccgttggcgacgccgtgcgcctgcgcggacgaacagcgcgaggcgggcggcggcttaaccacaaacgcacggtatttgctgcgccgtcgggaccgtttctgtgccacgtttttcgcgtaacgttgctggaatgacaaaggccagtgggtcctgcacgtcgacgtttcccagcaactttttcttctcatgccgcatcatttcagtcaacgcattgttggagctcatggcaacataggcttcatccgttgctgatcgcctcactttagccaaaagtcgtgtgggcttcagacacggctcggccaggacactttctttgattttctgtcgccttgactctgcctttaacaaagcattaattatttggttttaaatttatacaaacttgttgtttctgaggtgctgggaggtggttgtgttctttttgactcaaggttccactagctccggtttcgccgttgtttgtgatgtttatatatgctgagcaacttgatttgtgcatcttcagggatttggtgagaggtgtgtgagacaaatcctgaatagtatggaaactaaatttattgcggcgcattagtcataagatttgaatgtgtcctattttggcgttatgtcgagtgaggatttgagcagttgcggttgacatgtcgataaaattgtcggaaaagggaagatcgtattggacttttcctaagaaagagtctgttgagttatcgcgcgagttgtataggataagattcgggcatatggcatcgattccgacaaaaacagcaaaattggagttaaattttgagttcaaatgatagacagaagtccatatttgattcgcagtcaagcagcaaatgaacgtcttgtggtgaataacgacagcgtagcgttcaagcgcaagctcctctcagcgatctgaatcagaatcaacacggcagttacccagtcccagaaaacagcccgcctttatttcatt

SEQ ID NO: 33840 - DNA, 885 bp, Heterodera glycines
aaagacaatgtaaaatagacagtttgccagctgaagagtcttacagagaaatgggtgaatgaaaatatggctatatgagagcacacattgttgccaagtgtaaaatggcatggataaagtgcattatgagaaaattatatttacatttacaaatttgaatataagtataatttatatatttttataatgtttattttaaattttaatttgtggttattttgaaataacagcattaagacttgccaaaaatttctcgaatttcctagggcgcgcatatcttcgccgccgagatcacctttcaaatttttgaagaaactagccaaaggcagcatgacaatttcacaagaccagcagaacaggttggtgggccctctaaaaccctggtaattaataagaaaattgcacaattatttgatgaattcaaaaatcctaaaatggattttgaataattttaattttataaaagctttgatgaaataatttattcaaccataacttaaataaaaataaattcattttggcctgaaaaccactattacgcttatgcactttatttttaacatatttggaccaataggaatcaaatttttgcgcgagtttagaagaaatgaacaatgaaagatgaacaaaatgatcaggaggaagccggatcccatctgattatgatgtagagctggatggagtgggagatgacgatgaattgctcatttgttagcattttttactattgtgtttttaaaaaaatggtgtaataaataaaaattccatttatccccacggggggataaatggagacggcgggattattttcaaacgcctcagaaaagggggggggggctaattggagacggtgggattaatggagacgggggataaaaagagaaa

SEQ ID NO: 33841 - DNA, 1072 bp, Heterodera glycines
  unsure (1)..(1072): unsure at all n locations
cgtctcacatctgtgaanacaatgcgcgacccctttggctcgtcgttgcgccgttcgaagttcaaacatgtgatattatgccaatgttcaagtgccaattcgatgaccctttgttcgcgaagtgcttaaatgggccaaaaaggcnaaagttcgcttttgcattgcttcgcttactgtgcgacccgtcgaaactgtaaacgatcggcttcattacatcccaacgacggacctaaaaacaaaataattaatgcttttaaatcaatcgcttcggagatgggcaattaatgcccatatggaaaatgacaaaagtaaaccaatcgtctgcaattggtcagctgtaattttgagggtttttcgtttttttaaatgtttttaattgattgtcgtctttccattgcccaccttcgacccaatgaatttccttttggccctccgtcgtcgtgcaaatgtttcctcgagaagggcgtccgcttggtccgcacttagcacgatgtcccctggccatcactgttccataaacccttcctcattctttcctccaataaaagaggtcctcccctctttcatataaattttataggataaattgaaaaatgcccaaaatcaaataaatttgagaatgccatccctcgtccgtccgtcccctccgtttgtcccccttcccctctcaccttcgaagtgtctcccgccttcctccggccattcatcggcgccccttttctttgtcgcgccgccatcgtcgctgactctgcgggcactccattcgcgcaactctcgccactgctcgtccgtctgaagttccgtcccttctcttttcccttcccccctttaccatttcttctgtttcccctcctttcgctgttccttcgccatttctttgattctgttttctttgaatttttccgttcattttctcttcttcctcaattccttcttttaatctttccattgccaagcgaattcttaaaatttattttttattttttgcattttaattttatttatttttctantttcaaaacaaatttcccaatccttttccgtgccacctttccgtctccgcttcgctttg

SEQ ID NO: 33842 - DNA, 856 bp, Heterodera glycines
  unsure (1)..(856): unsure at all n locations
ttgccaacgaaagtgaggacagatcgtgcgatgcgcgaagtcccacggagcgcctttgcctggccaaccaaacggcggtgctcggcggctttcaccatttgacgcacgactgccattgcgtgcagccgtgcaccggtacggtacatgccacagtaggcgatgccttaggcaacccaagcgtcttactgtaggcaagaaaaaaagatatgcaaaccgtacccagaaaattaacaaacgaattacccatttgggatgtactgttgccccgttcagagcatgtcttcgagacggcgtattccgcggccgcgtggcccgcgtcgaattttaacattggcggcgacgattgtgccattgttttgggcgcgaattttacgagagaaaattgcaccaaagtcaaaaaaaggggagagaaagggaatcaattggcattccgttcagtatttcgccaaaaacacggcactcatcgagatttactatgaacaacttaactatgagaaactgaaggaaacgccgggctatacggtaactaagggaatcaaaagggtacggtaacgaggggcttttcctgtttaagttggtcaatttgttctccgacttgggcggcaacattggcctgtggatcggcttctctctgatcactgtgatggaagtggtcgagctgatcttcgagtgtttcaccttcggctgttcgaatttcactaaagccattcattcgccgattcattttttccttaggtaaaaagtgcgttttccgtcctttgcgcaaaaaggcatttgcccaccggcaccacgacgatgccgaaacggaagaatttacgacggnagatttctggctcatccaccggaggcaaacggc

SEQ ID NO: 33843 - DNA, 217 bp, Heterodera glycines
tataataacgctgcggacatctacatttttgaattgaaaaaaaattggtaattactctctctttttctccatattgaccatcatactcacactcttgacagtttaaactcgaaggcgggaaacgacaatccgatccccatcaagctagctcgctcgcaggtcctcgctcgagcggccgcccggggatcgatccccgatctagtaacatagatgacac

SEQ ID NO: 33844 - DNA, 1235 bp, Heterodera glycines
  unsure (1)..(1235): unsure at all n locations
catgtgtggcaaaagactcgtcgttcttgaagcgtcttgtgacgagtcgctaaatagcaaatcgtcgggataagtnaacggagttacactctgtgcctggtgtggacgaaaaggagcgcgagctgtgcaagccgaacagcaagtcgggccttgtttcgcccgaactctctccgccggtcctttcgctgtccattccgccgattccgatccaaaatcacagcaaaaggaaatgcacaaatttcagtggcctctttcccttccctttccgagtcctcttgtcccttctcaccatgctaatgcgtacccacgagtgaatgcggttgaagaagcggcccaacatccctccgtccccctcctccgcttcctccgcccctttcgctttttcctgtcgctgttcgcttggcctccgcgacggcgtccgactcagtgtttggcccattggcactggtgccgaagaagcattcgtcggatggtccaactgctggcgttgtgttggcatttccctgcaattccaccgaatatttcttcctttttcggtgtttttcattcgcacgtttttttggccatttgcgtccctttgctttctttgtcgtttcgatgctcttttgctccatacttttcttctccattccgccagttttgaacttcttgcgcgggttgtgccgaaatgggcgacgagttcgacctgttccgatggcactctttcaaatttccaactgccattttgccaacatttcgcccattttcgccattacgatgagagttcatcgaagaagcatttctctgaaatgttaagctgaagttaaatgtcaaatccttttttccatctgagtaccgtaaccccatctttgttttgaatctcttccccccccccccgccaattaccattattttcaacggttctcctcccccctcttttttgcccattgttttccggtttgcgattatttgtgaggttgtgtccgatgccgaaatgtcagcggaaggagaggcaattgccgaggggctaaagtggagaatggaggaaagactttcttcgttgaaggcgccggtgcttagcgaagcgatcgcgacggagtcgaagggatcctcgtgccaatcgaattcattctgttcgcaaggaaaagcccataatgaaatgccaagttcttgttgacgattcttttctgttctcacaccatttaaccgcccccccccctctctctctctctctctttcctcctctctctctctct

SEQ ID NO: 33845 - DNA, 863 bp, Heterodera glycines
ttcgtaagacaattttactttttgttttttggttgcaattgggttagccatttctgaaaaatgtccaaatcagaatgtacatcaaattggttaactattaaaaaataataggatttggaataagtaaaattgtaaaaaatgagcgaatgttaattaaacctaacttatgccaagtggcgagggatccctcaggcttagtttttagaatcttaatttttaaaaaagcacatttttcgatttttgggttggggcccaaacgaccccggggcccaaaaacgggggcccaaacgaccccggggcccaaaaacgggggcccaaacgcgggggcccaaaaacgggggcccaaacgctctggtccctccggcgggggagaaattgaaattttgaccatttaaagttaaagacattatgccaaatagatatttttcaaagaaaaacgaacaaacgtcaaggttttttggttgagaccaagccggaccggatccggtcaaaaattcgccggaccggaccggattggcattttcaaaaatgaccggattcgggatccggtcaatctatgtaatccggtcaatccctatttttccaaaaaatcgccggaccggattccggatccaggaaaatccggtaccggatccggtccggtccgctctttagtaaaaataatgatttttcattgaaaatctgttaaatatatagccaaaatttcaaaaaaatttcccggcgccgggtatatatggaaccggccgaaccttaaaaatctttaattttcttaaaaacttgctcaatttgcaaaaattggtcattattgaacagaatctaacaatgtaatgtattaaaattttcaatttttttcccggcggcgc

SEQ ID NO: 33846 - DNA, 487 bp, Heterodera glycines
taattactctttcaatttggcggccaaatgccgtggcgagtccccgtgcgcattggtcacgttcgggtcggcgcccaggcagagcagcaagcgtgtgacctgcaggttgcacttggacaccgcaaaatgcagtgccgtcattttgccactgtccgctttctcgccgaggccggcaccgtaggagagcagacacatcaccatccctggaagtggatgaggataatggcaaatgattgtctttttaatttttagctcaaaaattgttaaaaattgaaaatttttagaaaaaaaaaactttttttttgaatgccaattttaaagaaacctcataaattccgtgcgttcttaccaagatcttcacgcatcacgaactgatgcaacggggtgaagccggccttgttcttgacgttcaggtccaactctttgtgcttcagctggagcaggctcatcaacgaggccttctggttggctgcgtgcaaacactgtt

SEQ ID NO: 33847 - DNA, 428 bp, Heterodera glycines
aaaaaaaaaaaaaaaaaaaaaaccccccccccgccccggggggggtttttttttttttttttttttttttttgggaaaaaaaaaaaaaaaaaaaaaacaaaatccccccccccgcccgccctattttttttttttttttttttttttttttttttttttgggtggggggggggggaggaaaaaaaagaaattatttatttttttttttttttgctttttggttgggggggggggggggttttgttttttttaataaaaaaaaaaaaaaaaaaaacaccccccccggcggggggggggggggtggggagaaaaccccccaaatctttttttttttttttttttttttttttttttttttttcccccccccccccccccccccccgcccggcgggcggggaccacaaaaaaaaaaaaaaaaaaaaaaaaa

SEQ ID NO: 33848 - DNA, 1441 bp, Heterodera glycines
cagaaactgtcgcaagtccattcgatactcgaaactgccaattacacgcatttgcctgacgaatacggtcagtctgacaatgacaaacggagtttaaccaaacaatttgttttccctccattttcattgtcagatgtttctgatttcgtcaaagagttgatgctttgcgctgtttttgttcaggcggagatggcccccttttgtgcccatttcgcagaacaagtaaaaagaaaaaaagagccttttaaatcactcctattttaattaaactcaatttttcactggctttaaggttttggctgatattgtcaaagtgtctctggaacagctctttggccaactttcgaaagtggatttgtcttccacggagcgcaccacccaaaccatcgttgatctaactgcttttgaggaagcctttcaggaattcatcacaaccgaaatgcggtgagtaattgcggaaatacctgaataattcggctaatttgcccaacatataatttttcttttcagttctgccttgaaatcaatcagagctcgtttaatgcctcgaatggataatgagtgagttgaatttttattttcaatttataaaaatataaggaagggattaagcgcattcggataagaataatctgatttgacataggattttccgaaatgcgatgttcaacttccgttcggggatgatgatggccatggaaagtatacaacagtacagcaataactcaaaacaaaaagatgctaattctgaagtcgacaattctgttcaaagcttaaccactacaaaacaatgattgataatttgacactgtcaccataaaatattgtattatattgcaataattaatcctgttaagactattttaatcaaattttctttctttttttaaatttttttttgcataatttccataacaaaagacaatgcaaaataaaaactgagtcaatttagtcagtctcatgactcattggattgatcaacaaaacaaccgaagattggtgttttggtggggggagccgaaatgattcaccattgccactacccttgcaattagtccttttgtacgaccatcgattcatttaagagaaatgaaatggattttctgcttttatttttcaatgatttttggatcggaatgtacaaaattttaggaatgtgatgggcaaaaattccattgaataatttaagcgtttctttgagaaaaaatcaaataaaaattttttggtcaaaaaatatttaaatgggaattccatctaaaataaataattaaatttatcaaatttaattgattgattgtttttgtttgatgatgttcttgtaacagctgattagtgctttttacatatgaaacataaaaattttagctttttcattaattaactaacaattcgaattcgttttcaacaatttatttgcaatggtcactcaaatccgttcatt

SEQ ID NO: 33849 - DNA, 1457 bp, Heterodera glycines
  unsure (1)..(1457): unsure at all n locations
aatttattttactaaccacactaggaatattgatttttaattaccctaattaagcaacctgttcaaccacaacaacaacatgcactcattggaatgttttcaagtcactttcgctggtaatttttgggcacattggcggctttcttctgatgtatgtcttcggcatttttgtgatgccaattttaatgcaaaattcactaattatgacttggtacggcgtcatattttgtgtggttccgttgaatatcagttccatttcaattgcacctcttttgttttttactaggtaaaatcgcataaaaataaattttaatatttggaatttaattattcttataatgaaaaataatttttttttttttttgaattaaaagaaataattaattagttaaaaattgatgatagacagaaatgttgttaataatttttctttaaacaataattagttttaaattaaaataatcaactaaaaaaattaaaaggccttatcaatttatttaattactttattttattaattataatattaaaatgccaatttttagcactgaatatcacaatgcttttacaaaagaatgggcacgattacgtgctttgttcgtcgggcttcaaccgtcaaacacaatttttgcaacaactgtacaacctttgcagccgatgataatgaaaatgaacaatcaaaatcaatcgccaactcggattgacaattttttaccaaataattaaaaatcatttagcataaatagggctaaatgtatgataatatatataattatattttgtaatcattaatgaaatgaaacatataaatatacaatttcttctttaaatacttcagacttgatgagattttctaaatgtgttgatgagttattttaaaaagcgataagacgaaaatatcatatttatttatttataacaatttgtggtttttcaataattggtttaagccaataaatattttataaatttgtcaaaaattgaaattggatcattgagggcatgtgcatttgctttcatcaattccataatctttgcagcactgaacaatgcgagaaggcgaaggtgcaatccaactcaattgactaaataaaaaatatgaaattatattaaaatacaaaatattaattagaaatataaaaaattcgaaaaatctgtaggttaccaagcttttccgttggcattcctcaaatccgccangccttttttggcacagagtttgcaaacgcttaaaaatttaaaaatataattatattttcaaaaagatatattttanaatgccttcntttttgatgngaaagcagaagatagaaaaaggcaatanagaaaataggcgcatattanatattctttttaatatattaaataatttatntttatgatgaantattattnntgtaaaagttttgccttttaaagaattaattacactttgtgaaataaattttttcatcatt

SEQ ID NO: 33850 - DNA, 926 bp, Heterodera glycines
  unsure (1)..(926): unsure at all n locations
tgaacgcccgactttggtacttcactaaactgaagaaatcttataaggagagnagaaaaatagggaagaagatgattatttctaagttgacatataatcagcatttcaaggaatttaaaagccatcgttttgattcttaaattctttttaaaatagggaaaaatgcatggcagacccttcattttcagaatcaaccgtttgcataattctgttttttaaaatgctgaatgcctcccaacaatttttgtcctccatatccatcgagcgcatttgagaagcccaccgcagcaacacaggataaagaatagagcaagtgtttatcacctgatcatataaatatttaaatgctgaaaaataatagtgacacttttttctgcacgataactccgctcgactggtcaaccattgcccaatttaaagtcgctatcgctcttttgaacacttccgtgtcttttttgctaaatttcactttaatcaattaattaattattttacagttaagcaaaacttaccaagccttttcaataaaagaaatcacaaagcaacggactttctgttctcgttcatggataaattgtaccatctcgtcaaggaaattgtcaagaatagaagtcccatcttgtttcagaattaattcctccgctttggccaagtggataagcctttcatccaacggttttcccgacacttgtaaaccctcattaatttcacgaccaatctgttaattcgggaattttcaaaatatcaataatttgaaaaactcacttcatcatatgctaaatttcctgttccaatgtcatccatctcatagaacaaagctgaatggagaaatcataaaaaaagaaaagaagaaagacgaaaagaatttgaaaattcaagatttttgatttcaattttcgaaatagcattttggtcaaatcagttta

SEQ ID NO: 33851 - DNA, 1513 bp, Heterodera glycines
  unsure (1)..(1513): unsure at all n locations
aagcgggggaagagaagacggcaccgatgccgaccttccgaaaggcacctcaaaaggggggagacaaagatacgacgaagaggaagaaaatagtgggagagacgaaagacggagagagctcaaggacgagtgataaggctgaagggagagagacagagggagataaacacaagcaggaaaaagagggaggaaacgaattgaaagagagaggtacagaaaacagagagaaacgagacagtgttgaaaagagtgacggtgatcagaatcagcagactgagagggaaaatgctgatcagcagaacacagagacgacgaagcagcagcaaaagggaaaagagagtgtggcaaaaggggagaacaaagaaggcagagacagcgagacagaaaaagtagacgaaaaacaaaagcaaacgccgaataaaccatcgacggtgagggatttgatgggcttaaacaattgaaaaacgaagtcatttaaactccgatttttaatcatttcaanatttggtttcagttctccgatcagaacaacggacaaaatttgttactaaatgaaattgcgacaacaacaaccgaagggcaacagaatgaagaacaaatgccaacaatgccatcgatgggaaagaagcagcagaagacgaccaaatcaaaagcaaaaacggaaacggaaacaatggcagaaaaaacgaacggaaaaagcggacattcgaagtcgaaaccgcaacagaaaaagacgacaccgacggcatattattcatccacggcatcggcacaggcacagtaccattatcagccgaacaacaataatcagcaacaacagcaattccaacaccggccagcatttgtcctccatcgttgtgcctccggcgatgggcggcggagtgtcgtcgccatttggcccatccaaattcccttcgcttcagcaatggttgctgcgtatgcgccatttttgcagaattttatgcagaacggtggtgcggcaacaacttccgcttatgcggacgcatccggtacaatttttgcactgctccaacaacagaggcaactgccgacgccgcagcaccagcagcacaaaattggccaaatgtttgtcggcaaaatgatgggaatggcatcggccgctgccgcaaatgccaggcaggcggagggaaagtgccgacgacgacgacagccgcaaaaagcaccagcaacggcgtaagtaacagcaacgaatggcactagcggcagagggatcagtggggggggggacggagcggaaacgggggggggcgacaatccggagaattttaattgtagaaaagcgatgccatttcatttagcttaaaagttaaaaatgctaaagaaatttgctgaggttgagtcccagtgattgaatgctggagggttgagtcccggcgattggaatgttggtggattgagtcccgttgattggaatgttggtggattgagtcccgttgattggaatgttggtggattgagtccccactgattgaaatgctggtggattgagtcc

SEQ ID NO: 33852 - DNA, 918 bp, Heterodera glycines
ttcgacatattacatatgtacatattttttatacatattttggactttttcgcaatttttcgtacatattttacaatttttgagaattttttaaggaaatttttattaaatgcccccccccccccaaagtctaaaatttcgcaattggcacatattttgcgcatttttgaaaattaaaaatgggttatttttattgcattttatgcctatttcaccctttacgaggaattttttccaaaaaataaccgttaaaaaaattttatttacatattttcgtacatatttgggagtttttgcacatatttcatacatattttagcattttttatacatattctatttacatatttcgcgatttttcttacataaaaatggaatccctgctaattaagcttttgcaaaataatatatattacatacatatacaaacaacaatatgcaaatcggcgcagtcgcaggtcatccacaggcaactcatacacagtaactcatccacatttctcacggataaaattaaaattaatgggttcaaatcagggatgggccaaattgaaaaataaaaagcgaaatgcgaaaagcgaaatttgcgaaactgaaaaatgcgaaatgaaaaaaaaagcgaaatgcgaaaagccaaaatatgcgaaaatgcgaaaagcgaaatgcgaaaagcgaaattttttctacaactttttaatagttaaaatcataaagcaaaaatcattttttaaaattttattccaaatttaaaaatcaataaaacgcttttttgaggcgcactttttccaaaaaaactttttggaaagagggggcaggcggcgccggcaggcgccgccgggataatttttgaaaatatgattaagatccgtcgacagattttcactaaaaaatgaaccaatttttgtgatttttatcatt

SEQ ID NO: 33853 - DNA, 995 bp, Heterodera glycines
tggcagggtcaaaaatggggcaaatcagcaggcagcggtaggaagaacgcaacccgaccccgccggttttgaaagcggcaggtggcaggcactcggcacaacagtcgagtttttcgcttttttcggtttgcggaagagaatttaatgggacggaagtggcgagcattcctatgaaaacaaaaatgtatgtaaaaaaggcataataagaataattaacagaggggtaagaacagaaaataaagaaaaaaaaacaaaaaaagggggaaagaaattgattcaaatgatttcggcatcgctggacgacgacgatgaatggccaatcacagaaacattgtcatcggtttggtaaatgaaattatggcgctgttgcaggaagagaaatgactgataatcggggaaagtttctgatggaaagtcactgctcggaaagccgaaattcagcggagaaagggaagagttgtcgactaaaagacgccatttatttgcgaatttggaagagggaaaaggaaaaaaatgggaggacaaaacggacagacagtgaaaaagacaaattgaaaaaacaaagcatggccaagggaagcgaaatgtactgaaaaagactaaagggagcccacagaatgcccttttaatccgttttcagctcgcaaacaaatgcgaattgaattgataagccaaaaaaaaagtgaaccaaccgtaagggtcggtgatggaaaagccacagattgtttcgatctccgtccatctttgaatgcattcgtccaacgcaatttttatcttctccattcgtgctcttaaaattatgaaatgtctcgttttttagcatggaatgtaaaaaaggagcggggcgggcttacaattagcaattaaaattcaacgacgtacaaaaacatcgtttttacacacaattaaaaagactaaaaattaaccattcaataagtaaaaactttgtttagattttaaattcaggccgtgaattttctccccccccccctttc

SEQ ID NO: 33854 - DNA, 731 bp, Heterodera glycines
agaggagagagaatgggaggagagagagaggagagagatctttaggagagagagaggagagagaacgggaggagagaaagaggagagagaacgggaggagagagagggggcgataaagagagagaaagagaacggaggggagagagagagagagaaagagagagaaagggaggagagagagaggagagagaacgggaggagagagagaggagagagaacgggaggagagagagggggcgataaagagagagaaagagaacggaggggagagagagagagaaagagagagaaagggaggagagagagaggagagagaacgggaggagagagagggggcgataaagagagagaaagagaacggaggggagagagagagagagaaagagagagaaagggaggagagagagaggagagagaacgggaggagagagagaggagagagaacgggaggagagagagaggagagagaacgggaggagagagagggggcgataaagagagagaaagagaacggaggggagagagagagagagaaagaaagagaaagggaggagagagagaggagagagaacgggaggagagagagaggagagagaacgggaggagagagagggggcgataaagagagagaaagagaacggaggggagagagagagagagaaagagagagaaagggaggagagagagaggagagagaacgggaggagagagagaggagagagaacgggagg

SEQ ID NO: 33855 - DNA, 961 bp, Heterodera glycines
tgaaataatagcaaatcatcaccttctttttccgctaaccccttggccaaccctttccccgttttattttccttggccaatcgttgggccaatgcttcttccacatttccttcctttcccccgtttttctcccctcccccggtcattatttcgtcatttcgttttctcttcccattattcacacgtcgacagcattcggcggttgaaattggaggtcaatgggctgccgacggtcataaaaaatgggcgcctgcaacaaaatccaagcggtgccgcaaaagcagcaaagagcaaacagaacgaggaacaaacggtccaaaacactgaaagggaaaatgggaaggaaaaagggacaaaaaggaagaaaaagggaaaaaatgtaaatgatggaacagcaaaacatatggaaaaaacagcagtcgaatcgggcaaatgaatgggccgcaaaagcaccgacggaccgactgacctggccacgtatttccagtcctgggccaccttttggtcgcggtcctttcgccgcagcaattccgccacaaaacaaacgttttcaaaagccttctccacttttgggcacctttcaaatgcaaaggaatggcatttaaaccaatgaaaagagagggagaataaaactgttgcgattggacagtgttaagccaaaagaaaaacagaaaaagtgaagtccgctttttgtcggatttaaatacgattattctccattcgaaatggaagtgagtgccattccccccgttctcttcaccggtaaagccttctcagccgctcgtccaacggcggacggcacatggcctccagcggagaatgacgaagcacgcgaattgggcccagcgaatggtccaaccgttggtgaagctgagcgactggggaggaaaagcaaccgaaaatgaccgaccaatccaagccattttaattttaattttgcacccgttcgattctctctttt

SEQ ID NO: 33856 - DNA, 939 bp, Heterodera glycines
  unsure (1)..(939): unsure at all n locations
ataataaaatttaatattaaaatcttgatttttagcactccccctcgaaaattctcaaaacaaaattaattttaaaagaaccttattgacttttgccaataaaattttttttttttttaattaaaattaatccaaaataaattttaccaacaaaataaatttatttaaaaatattattttcattttaaaatatatatatttaaaaaaaacaatacattccacagaagaacaggccaacagtggtgaaaaatgccgcgatggaaagacagttgatgaaggtgaattcgccgtggaatgcgtcaaacatttttgcaaattattttatattttttgccgtcaaattttggatgtcaaaaatggtcaaaaaattctgctcgtgccgaagtggccgcggtcagtcgtgaggacggtgagattgaaaaagttgtgcgttgtacggctgagtactgctcggcacacactttttggtcgcgagttgcgaacaccgaacacactgtcggaggctgactgtgtctggaaaattcaggcaaattttaactggggtaaatttttgaaaatttacaatacagtaaaattaatttgaaatagggatgaagtggatgaaaagcaattaatccaaaataaaagccaaatttctaaagcgcgatgcaattaaacaccgtttcattttcctcggcacatttgaaaaaggattaattcaagttttgcaacttttttgttgtgggtaatgaagaatttatttgatttaataggacataaatttggagtaataacgtgatctgattgcacattgataccagcaaaaaacgttgggggaaagggtcgaaaaagaaatgaaccaaaattatagtcgagattcgagaccggatttgagtgnggttaataatttagaaggagaccagtttagcccagaacaaatcgaaattgctttgatcggat

SEQ ID NO: 33857 - DNA, 724 bp, Heterodera glycines
atattatgaaatctctgtccagctttgaatgaattttctgaatttttattggcgctaaaattactataggatttgctattaaaaatgattatacacttaaaaattcatttttatgttagcaatatttatatattttgctaaaaattgtaacggaaattgaggatggaatttcgtcctctgtggcatcaaacattcattgcgaaatgctcaaaaatttaaaaataatttcaaatgaattttgcctatctgtttacccgagtaaataataaaatttctttagcatattattcaaagcttttttgtaaggttttctttttgttctgcggttgtttggcttagaaaatgtaggaggtgaatagagattaattaattaaattttcatcacagttatttgaagctgttggatatacgttaatattatgaaatctctgtccagctttgaatgaattttctgaatttttattggcgttaaaattactataggatttgttattaaaaatgattatacacttaaaaattcatttttatgatagcaatatttatatattttgctaaaaatttgtacgtgaaattaaggatggaatttcgtccctctgtgtgcattcaacattcattgcgaaatggtcaaaaatttaaaaaatattttccaatgaattttttgcctatctggttaccccgataaataaataaaatttcctttagaatattatttcaaagctttttt

SEQ ID NO: 33858 - DNA, 1419 bp, Heterodera glycines
ggttggtgagtgaatcaatcaatttgtgtaatcatatcgtgcttttgatgtgtccatgtcgagcagttttggtggacggcggttacgattcgaccgtctgacttcgttctgattgtgctcgtccgggaccggttgctcttcaggttgttcgtccgcgaaacgcacgtgacgctgaggagtgttcggttctgtcgcgggttcttggtgaacaatttgaagatgttgctgctgatgatgtgaaccttgagactgttggggaattaggaaaaaagtgacgcatttgattggtatgtctacgcacaacggcgtttaagattggaacatgaactttccaaaccacacctgatccttcaacaactttaccatgtaaccacgttgttttgttgttccgataattgattatcagaacgtcgtctccaatcgcgaaagttcgacggcgaactccattttggcgattgaactgttttgccatgttgttggcgtagtctttggtgccgtttgttgggtgtgaaacagttggtttcagcaaggaaagttctgtgcgtggaggacggccaagaaaaagttcggcaggaatgcgaccattcaaagcgatgtttggcgtgttgcgataggcaaacaaggaattggtgacccattgtttgtccttgcctgcaccctttttcatctcctttttgaaaatgtccacaaatcgttcggcttgtccattgctcttcgggtgataaggcggacaaaaactttgctttattcccttggtcctgcaaaaatgggaaaaagcatttgaatgaaaaggtgggccattatcggtcacgatttcacatggaaaaccgtatcgcgaaaatagccattccaattggacaatgacgttgtcggcggttgtgctcttgactgagaatatttctggccatttgctaaaagcatccacgacaattagatagagacgtccatcggaacatggtccggcaaaatccatgtgtagacgctcatacactttgtttgtggaaggccatggacgaagcggcgcttttggcggtgcttttgctgcaagtgcacattcgtcacagtttcggacgcacctgtcaatgtcgaggtccatgcgtggccagtacacgtgtcgctgtgcaagtgccttcatccgaacaatgccaggatgagtgaaatggagcgcggacaggatacgttggcgcaattctgccgggatgatgacgcgctctccaaacataagacatccattgacttccgagagtttgtaccgatgtgtgaaataagctgccaattttggggtaatttctttggccaaccattttgacaaaattcggaaacttccctgagagtttcgtcgagttgcttttgttcggcaacttctttggtggtgacaagagagttgatcaattgttgccatgaacacatattcgacag

SEQ ID NO: 33859 - DNA, 348 bp, Heterodera glycines
tacgactcactagtgggggcccgtgcaattgaagccggctggcgccaagcttctctgcaggatatctaggatccacgaattcgcaaatagatgagcctccctcgtacgaggaggcactaaagcaaggcctgcccaccacccgtcccatcgcgcccatggctaccggagtgctgggccagcacacacctgtaacgctggacctgcctccccccgctgacacccagcagaaacctgtgctgccagggccgtccgccgttgttgtaacccgccctagccgcgcgtccctgcgccgtgccgccagcggtccgcgatcgaccctctagtcaaggccttaagtgagtcgtatta

SEQ ID NO: 33860 - DNA, 744 bp, Heterodera glycines
  unsure (1)..(744): unsure at all n locations
ttgaaaaaatcaataaattgcttgggaacatctaaaaatttctaatttacaataataatttgtttttaaatatatttaatcattttttgaaaacttgaaaaaatagtcacttgaaataataaattctaaaattttgtccaggaaaatccaggttttttcctgttttgcctggacctggatttttttcacatttgacctggacctagatttcctggacaaaaatccaggtttccgaaaaatggcctggacctaggaaaaatccaggcctggatccaggtccaggccgatctctaatttttagtttcaacttttgtggtcaatttgccaagaagagttgaccatcgacgccgaattggagaagacacgcaaacaattggtggaaatgcgcaaaaatttcgacgctttggccaaagcgataaaagtgaaggaaaaaacggagggaatggtaaaaaaaggaagtgggaaatgaaggaatgaaagtcgtaatttaagcaagaaatgcgaaaaaagaacatcgacgaacggaagaaacatttgctgacggggacgggcattggcgaagaccaaatgaagaaggcgaagcgggagacggacgaagcgacggcggaatcacaataagcactttgaccacactgataaacccccacaaaccantttcaatgttncaatgcttctccctcttttcgttgtttggttttttatcttttcattttattcatttgcctccctttttgatgttttttt

SEQ ID NO: 33861 - DNA, 670 bp, Heterodera glycines
agaccatataattagaagtgtcaccggtggactcagaaataatgtcaattttggtgccatcataagacttaaaaaaagaaaaacaattgccaaaagttataacaattatcagatttacccatgaagcgaatttcatcagacaattttggaaatcgaaagggtaaaaacggacatcttcaaaacgaagtgggaattgggcacaaattttgaacagattgtcctttttaccgagttcgcaactgcttttgaaaatgccggctatggaaagactctgcaaaattaaaaattgaccattttatttgcctcttttgtctttacaatatttccgtcgtaattaagcttgcgtggtaaatttcttttacccatagaacaaaaaagaatatattaaaagctataaaatgaattttattgaaaaaatcggatgtataacctaaaaaaatatttgatacgttcgatgcagaatttttttctctatcgatatgcaaaatttggtgtgtatttaacgtgcaggaaaaaagttaaacgtcacgaagtgaatgttgtttttcctaataatgaaaatattagatagtacgccaaaaggagacaaaaaattagagaaaaaagataatgtttttctctggcattctctatttattggtacacatctcgttttttgggatggtgtgta

SEQ ID NO: 33862 - DNA, 912 bp, Heterodera glycines
tttcagcaattagcacttcaattagtgtttgtgttccacctgcaccaccaaaacgggcacgccgcactgaacgtaagcgaccaattcgagcagcgaaacgagcgaagcgccgcaaaacagcacaaccggaaggggttgccgctcggtggacggcgccgaaggcagcaaaatgggactgatcggagcagagagtggcgtttgaggggcggcggacaaacccgcggaggacacgcgttcctcaggaacgccgatcagaaaggctattgaggaggggcgggggaggggggagatcagagagaacagcttgaatggggctttgctttgttgttttgctttgatcagtcattccctcagtgtttttcggcttttcctttgtattccctccgttttcgctccctttttggcacctggcggcggatttgccaatttaattgctgttgctgtgcggaacaacagcatttgttcttcgggcggttcatttctgctccacagcacataaaatgtgttcagacgcgcgtcggtcatcgacggagacggccgaacgacggcggcggaagggaccaacaaaggggcggcatttgagatggaatggcgctgaaagggaaggcatgccaaaatgggagtggaattggacacggaacagaatcactgaccacgtcgacggagttgaccacgatcagaagagtctcctctggggaatcggactgaaatttaggtttaaagagcgtgggggtaaagacggacaaaaaaggaaaagcatcggggaatggggaaaagagtgatcagtcagtcgtgatcaaagggcgaaagagaggagacggagaagaaagagaggagaggagaggggagatagattatgtaagtgacaactgatcttagataaaagtcagatgattttcaaaatctgagctc

SEQ ID NO: 33863 - DNA, 1042 bp, Heterodera glycines
taataatttttaaattgaaatattttttattaattaccttttcaattgaaaaataatttaaagaaattatttaaaaaattctgtaccgttggggaattgaacccaagagaaaaataatgaaaggcagaaggtttagccagcagaccatatttgaattggagctatccaaaaatagagaaaacattaaggaaggaaagaaagagatttaagatttttttttcgcgtaaatttgaaaatttttctggctgctcaaaagttcaatctttaggggtgtattttcaactctcgcctctcgtcccaaaaaacgagaggcgagagacgagaggcgagagtaccaaaaatggcgagagttggcgagaggcgagagacgagaggcgagagttgtcccacccctgatatatatattattttcacgtttggaaaagttctttgataagttagagcagactttggatcagctaagatcatattaataggatcgtgatttcgaaagattatgaaaaaataggaaaataacagttttgagccaaagaatttgcaaaaaaaaagtaaatattcaaagtttagcagaaaaagaaagtttcattattttaacaataattaatttgaacatatttattgattaaaagcagggctcccagatgtgaggctttagcctcattttgtggttttttgataggtcaatgaggctaaattttcaaaatgaggatttgaggctttttgtggttttttgagaaattttgaaaatttttgaggtttttggggaaaattcgtaagattttttaaattttgatttttttgataagttggcataatgtttgacaattatttagtaatttgggtttttaatagagcatcaaaacgaaaatagaaccaattttttccaataaaaaccaaaaattaagaatattttcaatgaaaatctgctaaaaatatgtacaaattctcaatttttccactggcggcgcctaaaagtcctttattttcttaaaaattgctcaaaatcacaaaatttggccatttttgtggacaaatcttaaca

SEQ ID NO: 33864 - DNA, 301 bp, Heterodera glycines
aaaatgattgctttctccctttagtgaactgatgacgagtatgctatgtcccaaactgcgctcgttccgcccccacgtctacagcccagtccctacggtcacgtcgactgctctctctttggtttagcttttccttccgctccccctttaggcgcgtgttcatccgccgcccttcttcccctcctcttctatgccccctttcgtttgtcccactccgtcccaaaggcttccgtttgcttccgccaccctcggccgtttgcctccgtccgcttccgcgcccctccaacgacggcatttgttt

SEQ ID NO: 33865 - DNA, 69 bp, Heterodera glycines
aattaaatccatcagtgtgttcattaagttacataatcagagagtaggacagtgaaaatgcgacctgca

SEQ ID NO: 33866 - DNA, 956 bp, Heterodera glycines
taaataaaatacaaccaaataattaaatttgagatgggacaacttaacagaggacaaactcaaaagactttgatcagttcgatgatcggagaaagtcatccacgcggaaagtttggggtgaaaagttacggaaggggcgaagagaggcgggagaccgctaataagaggtcattcatgcgggaaagagggcgaggggggggggggcaatgttttgggagtaattggaaagactttggaaagtccgatcaggaatattatttggatattttggtattatggaaaaggcaaacaaaaaggagaaaaaaggggacggaaagtgatcagagaaagaattgcactgaaagtgatcagcagacccttaaaagaaagagcgtccggaccacataaaagtgtctgccatacatacaatttctaacccggttttagttttatttctctcgctttcctctctttctctatgttttcattatctctttctatctctatttttatatatatttttttaatgactgattaatgatgtgaaaaaattatggagtgtcaatgaaattgaaaatagaaagggtgagaaggaggacgcatcggtggccgtctgctgaatgacgccccggggaatttaaaaaaaatggtttaaatgagaaaagaaaaggcaccgcaaacgacggaaggagaaacgtttaacatttttaacggttaattgaaaaaataaatacgaaaaaacaaatcactgtaagagggaggaaatgagtcaatcggcggcaaaagtgtacgctgttggggaaaaggggaaatagtgatcgagtgatcggttagcgtaacagggaaagtcgaatgcattcccgaactcactcactctcgaagcaattcaattcaatatggtattgattattacgtttttcaacaaacataaacagaaggggttaatggaaaacaattagctttcccccaatgaattt

SEQ ID NO: 33867 - DNA, 1019 bp, Heterodera glycines
  unsure (1)..(1019): unsure at all n locations
ttggcaaaatgatcaaaatgaataaanttcggagatcaaaatngcnaatgancagancancgaccnaattcaatgataaacaaaaatgtgaaattgttcataaatttgacgcaataaaagaaggaattaagaaaagaggaaaatattcggcaaaaggccgtggtaaaattgagcaaaagattggcgtaaaattgggaattaatcgactgaaaatttacaaatggaaaaaagaatttgggttaaatttaaaaaaagataaacattattatgaaaagaaaaagcaggaatttgttgaaagaattgaagaattcaaaagaatgtacaaaaatggaaaacagaaacaatttgcgaaagaattgggcattcacaaagaaacatttattaaatggaaaaagaaatttggcattgaaattggcaaaagtaattttaatttaatttttaattttaattttaaatatttcaggatattctaatgaagaaaaaatgaacaaaatgtatgaatatttgaaaatgaagaaagcaaatccgtctttgagtgataaagaaattgccgaatttttgaaaatcactcaacgcaccctaatacgatggaaacaaatatttgtataatttttttttattttttgatattagcatatggattattgttttgttttatttgtttttctccttttatgtgtcgtctttttcctttttaattgtcttcttaaagcattcgataatgttatttctgaattttataattttgtgccgaccggtaaccataaattcggttttggtttttgttaacgatcagacaaattttccattttttttttattttggaggagaactgaactaggattgctattttagcatattgtctttaacaaatttttggaaaattcagtccttaatattataaaaattcccaacagctctccgttaagaaatctgtgtcgcggatcgaggtaaaattcattttttatttatgctttcaataaaactgaacgaatatttttaataatttaaatcaggaa

SEQ ID NO: 33868 - DNA, 945 bp, Heterodera glycines
tgctggaacgtcgtcttcgattgctggcacttcgacacatccgaaacaccaacatcgtggacatggatctcaaataaccggcacggcatctgcttctaagcgtatgtttgatgtaccaaatttctatttgatcattcaccattcgtttttaaggacgccgtggcactgtgcgcactgctggaacgtcgtcttccattgctggcacttcgacacatccgaaacaccaacatcgtggacatggatctcaaacaaccggcacggcatctgcttctaagcgtatgtttgatgtaccaaatttctatttgatcattcaccattcgtttttaaggacgccgtggcactgtgcgcactgctggaacgtcgtcttccattgctggcacttcgacacatccgaaacaccaactcgtggacatggatctcaaacaaccggcacggcatctgcttctaagcgtatgtttgatgcaccaaatttctatttgatcattcaccattcgtttttaaggacgccgtggcactgtgcgcactgctggaacgtcgtcttccattgctggcacttcgacacatccgaaacaccaacatcgtggacatggatctcaaacaaccggcacggcatctgcttctaagcgtatgtttgatgtaccaaatttctatttgatcattcaccattcgtttttaaggacgccgtggcactgtgcgcactgctggaacgtcgtcttccattgctggcacttcgacacatccgaaacaccaatatcgtggacatggatctcaaacaaccggcacggcatctgcttctaagcgtatgtttgatgtaccaaatttctatttgatcattcaccattcgtttttaaagacgccgtggcactgtgcgcactgctgggacgtcgtcttccattgctggcacttcgacacatccgaaacaccaacatcgtggacatggatctc

SEQ ID NO: 33869 - DNA, 895 bp, Heterodera glycines
  unsure (1)..(895): unsure at all n locations
tctaactggtatttaattgtatgaaagtttttgtttggggaatcgcgtgaaaaaggaaaaataatattttatattataaatgaaatcactagttttatgaaatttacaaatttgagtcaataaaatatgacatttttcaaagaaaataaaaaagtcaattagcgacaaacggacaaatggccaactttgtttttttacgcactaataacgaaaataaaacccagattaagcccgaaagcacaagcaataaatcaaacgcatcaataaaagacaatgaaagggccgcttgatcggtgctgaaaagtgcggcaatccaaaggagtcaattattttgggatggacagtcgaactttttggctaatattgattatgtaaaaagcaaaaaaaaagaagaaaacagcaaataccaaattaaatacgaattgaaatttcatatggacaaagtgaaaaaaatatgtgctgagtcgatccaaaaaaaaaaactcagtgattgataaaataataaatttaattatataaatcggtgtcaatgaattgatttatatgattaatatttaaatataaattcaaaaagaataatataaattcgcatttttgttcaaaatttttagcacaactatcttttgtcatccatggacggaaaatggaaaaaagggtatgcttacagcattccatctccgatcaaaaaaaatattaccgatacgaaaaatttcaatcacctctttttgcagtcaacaagttcatttgtataagggattatatttttaagatccattatccatgaaaaatccgctggttaggccttaataagccgtataaaccatgttttattcaattccctaattttaccggttcaagaataacctcgaagtaaataanaatttttattcatttc

SEQ ID NO: 33870 - DNA, 896 bp, Heterodera glycines
  unsure (1)..(896): unsure at all n locations
agaaaatgctctgaaacgcaccaaattttatttacatgctattttaggcactctgatgctttttctatcaaaaagggagatgaataaattttaaaaaatttttaattcctttttaaacaggccaaaaagtttaggcttaacttttttttcagaaactgatcagaagcgcaccaaacttagcagggatactgaaaggaagagaaataacctattttaaatattatctagtcagttcatttaaataatttttatccaaaaaaaatttttttttggatttcggggcagtaccctgaaccgatgcgcccagatttatggggagaccgaatccttcgggaatagcttccctatagcctgtactttaattctgcgttggatttttgctccccataattgtttgagtaccccaaacggacacttgaaaaaatcgatttatttttgttttcggggcagtccccccgaaccgatgcgcccagatttatggggagaccgaatccttcgggaatagcttccctatagcctgtactttaattctgcgttggatttttgctccccataattgtttgagtaccccaaacggacacttgaaaaaatcgatttttttgtttcataaatatttttttcagaaagtgctctaaagcgcacaaaattttatttacaacttaattttagcactctgatgctttttctatcaaaaagggagatgaataaatttaaaaaaatttttaattcctttttaaacaggccaaaaattttaagcttgtgtggtaagtgtgaagaactgtgttcctccaggcaaaaaattctaagaaaatttataagcatttgaagggttctcagcagtttccctgcaaaatttggtgagcttctgatcagtctagaacgttgngtgataaatg

SEQ ID NO: 33871 - DNA, 1012 bp, Heterodera glycines
tttcacacttagaaaattatcaaaaaaaaaatcataaaatttttgaaagaaaattcaaaaaaaaagataaataaataaatctcgtaaaattccctcaccgttggtgtaaaaagaaacatttaccataaaaacttttgtttttttcacatgctaagtccccccacctcagaatcgttgtgatgccatccgccggggaaatattttttgaaaagcgccggaggcacaaagtcgtccaaaagactgtctaaaaatgagtttttattacccagtggtaatcatgggcaatccaagcacataatgttaaagttagccaccgattttgtgctgcttccgccacagcaacgagttcagcgtctaaaatgatttgaagcattgaaaaaggcataagtgaaattatacaaaatcgaaaaagtggaaagccaaaagttggcatttgtatgagattttacggcacggtctattcaacattaagcgtttttaccagttgcgtggccttttgcacgtcgaagtcgcgggcgcgcagaaaacgcagcaaatgcgcgtcgttcggcattttgcccttgtgcatgctttgcagaccgtacttcagttcgcacagccgactctcctgggaaaggtattttcagttttaggcactggtggaaaagcgcacacaaaaaaccacacaatggcattggggaaaaaagagatgagaaaaatggcaacaaatttagtgattagattgggcaactaaaaaaaatctccccgatttatggccataattggttttagcatgcaaatggagaatatttagaggaatcgaatgatccaaggttttcaaaaattatacacttttaaaatttaaaaatgtgacgtcagagctatgatatggcggaaattgaaataggccctcctggttaatggcccggttactgtaccaattgtcaatgaatgtaccattgttactgtacctcgagcggtgtcagttggcccgaaaaaggcgttggatgtactcactttccagcttcgactc

SEQ ID NO: 33872 - DNA, 262 bp, Heterodera glycines
cctcctcatcgtccggtgtccgttgatgttttgctgttttcattggtggtgggggtgtagaaggaaaaagacacctttatcaccacaagggtcacttgtcggacgatgtctttggagaattctgagaaatttatggccatagattttcttagtgataattattatttcaactggtttttgatagtgattagctcgactgataaatagagacgctcattttattgacacatctgaataaatatatactttcaatactgtaaaa

SEQ ID NO: 33873 - DNA, 1009 bp, Heterodera glycines
tgggttgagtcccagtgattgaaatgctggtgggttctttcccagtgattgaaatgttggtgggttgagtgccagtgattagcatgctgttgggttgagtgccagtgattgaaatgctggtgggttgagtcctggtgattgaaatgctggtgggctgagtcccagtgattgaaatgctgttgggttgagtcccagtgattgaaatgctggtgggttgagtcccagtgattgaaatgcatgagaattgagtgccagtgattggaatgctggtgggttgaataccagtgattgaaatgctgttgggttgagtcccagtgattgaaatgctggcgggttgagtcccagtgattgaaatgctggtgggttgagtcccagtgattgaaatgctgttgggttgagtcccactgattgaaatgttggtgctatgagtcccagtgattgaattttggtggtttgattcccagtgattgaaatgcaggataattgattgccagtgattgcaatgctgtggtctgagtttctgtgattgaaatggtggtgctctgagtcccagcgttttcactgctgattaccccaattttaatattgtgcaccgcttttttcctttgtgtctttttacgtcatcatgttgcgttgagtgcaaccgcctccgacgatgatgagcagaggaacgccgagtgacttgacgatacggacacattccctgatggaatgaatgtggaagagtattccaaggcaaattgtgcagatggtttggccatagactttttctcaaccactctctcctttctctctctctctcccccttttgtgccattctacacatacccgaggccgtcaaagctgaggttaaaacagacaagccgatcggagcccaacgaatcagcgccacattggagaacaatcaccgaacgattgaatttgtccacgacggtctgtatgacgggcttaaaactgaaaatgccaattttacaaattgccaattttgataaataaatttgccattacc

SEQ ID NO: 33874 - DNA, 1825 bp, Heterodera glycines
  unsure (1)..(1825): unsure at all n locations
cccgtgccatgtcccaattcattcgatgggagctgaacctgaccgaacttgtccgacgaatgaatctgattggatacggacgggacgnaatcatgctgatcactttgcactcggctgatcagctgaacgcgccgggcggcttacgcagacatgcttcaggcagaagaatggcagagacacccgtttccttgaccaggtaaaattgtaattctcgtggcttttaccataatcttgacctataatctattggccaaaccctaaaaagtatggcaaatactcaaataatgttggaccgactccanaaatggcacagacagaaaaaatatggcattctccccatataaatgtgtattagtgccatactctgctgagcgggttctacaaatattttacattttccacctcttttggcacagggaggctttatgggctccgcacgcgttttgcccctcgcacaaatggcggcacgccgtttgcatttttggcgtcgaagacttggcccgactcgtcaaattcccgcaccttttcttcaataaattttggcccgccttcgattttggcgctttgttgtgtgtgtacgaacggttgttcaacatgacccatttgcacacctgcggggaacagttggccaaaatggcaccggtggtgaacaaatcgtttgtccaacaactgcccaatgtccgttggtttggtgttggaaaaaagagtgaaatacgaaaaaagggaaaaaatttctttaaaattttccaatatattttttccttaaaacacttttaaaaaattgaggacccccaaaaaaagataaattttagaaataagaataatacgaacgatgaaaaagaaaaattatttatttaaaaaataaaatggggaaaaattctaaacatttttttttaattttaaaaatttttcttatttaggtgcgatttcaacaattcaagaaggaaatattgtgtgaacgaagtaaagtgcagataatttctgatgaccaattgacatttaatgagacaatgagctttaattgtgatggtgaatgaggagccgaaaaagaagaatattttttaaagtttattataattttatttatttgtaaaaatatatttattttcattttattagtaacatcgagattagtttaacagcctgtctaattattaagaagatcgctcaaacagttatttttaagaattcctatcaaaatattccaaaaaaaaaaactatttttatgaataggaaatacatattgcaaattgtaaatttaaattatgaccaaattcttggaaatcatgggcacgaaaaatggagattgtatgccatggattttgcaatatttcataagttgcgtgatcataagtttatttggtagtgtttttaacaattatgtgccgattttttgcactctgctcgtgatggtaaaactcaccttttaaatcaaacagatcgccattcaaattcgacatccgccttctccgtccgtcatacagttgtaccatcacaattctttacgtatttctcctcacaacaataatagcagctgcacttcgttttcattacgcaatgcttgccgaaatacaaattggcacgccgcaaagttttgattgccggggccgcatttggcatttgcaataaatatttcccaaattatttttttaaattcccatcagcaggtcttaatttcatattactttcaaataaacttaaatgagcaacgttggcatcatatgaaagcaacagtgtcacgacgttagtaaaaaaaccatcaaattgaaaattttgtggttttttgcctaaagtcacagcaccaaatcaactatatactgtatgt

SEQ ID NO: 33875 - DNA, 677 bp, Heterodera glycines
ttgccacattcatgctgagctttcgaaaattcgttgccaagtttggctccccgtccagtgtttattgcgacaatgcgcctacatttcacgcatttgccaaattttcccaatctcattttccccttaaatggcaattccgaaccccagcagccgcgtggaaaggcggacactacgaaaggctggtggcccttattaaataccacctccgaagagtcctttccggccaccgccctcgtgtgctcacaagggaacaattgggcacaataatttcagaaatcgaaacagttattaactcccgcccgataacatttgactcatctaatccagcggatccccgcccactccggacaatatactttcttcacccacttggccaccattcccaaatttatccgttactatatcgtccaaaatacagcgccaagaattttccacctctatcatgcattcaattttgtgcgattgtacattcgcgtttgcttaccttgacgacatgatcagtgaccagtcgatcacatgaggagcatcgaaaacactaaagaagttttcaagcgaatcggaaattttggattcctgatcaaacccgagaagtgctctttcaatcagaagaagaccaaataccttgggatacgtcatagaaaaaaacaggaaggcgaccggatccatcgatagattaa

SEQ ID NO: 33876 - DNA, 1813 bp, Heterodera glycines
ctccgcacctcagctcaaagtcctgctgagcgccaagcacgtgcattgatgtgctggtcacctccacccccatcaatgacatatgtgcgcgttcgtttcgtcaccgttgcgcgatggggcgacttgcgcagctgcggaggcgccggctgaaagtcttcagcagacggatggggtcgcttttgctttagcgggtgttgttgttgctgtttttggtacggaggccgtacaacagccgcagcagctgttggcgggagagattgctgttgttgttgagctaaattttaaaagggggttatgaaattttgtacctttgaaacctaagcccgtgaatttttaacagattttgtcattagaaaccaaacacgcgtcagcgacggtcacaggatttgggattttcgggcttattgttagaggagtaaccgctggaaaacaatgttttttgggacataagtcggcttttccatggcaaaaaaccctaaccattcgtcctctgtgttctattttgatagtgtctacccctgttgttgttgctttttggggtggcgtcaaattgagccggttcggccatgtgtctggcgagtacggctactgctgctggtgggggtgggactacggcacgcggcgttgcgtcacagtcgtagtccaccggtggctcgggcggtggcaaatcgaacggttcgagcggttgctgctgttgttggtcaaaggacgattgatggtgggcaatttctgctgctcttttcatccaagacagttggtggtgaccatgagcaccgttagcctgcacaatttcgtttttaaagcttatggctcctaaatagggataaaaatgactttatcctcacattttttgtctctcgactgccgcatttgtggacgatgacgacaacgaagaagctgaagttgaggcaattgccatcagagatgcagcggatggcgcgcgttcggcatctgttaaaaaaaatgaatgccattaaaaaaagaattaatggcgctgaacggaacgctccaagtcaccgtttgataatggaattaagaataaaaatatttccaacgccggtccgcttggaaatggaaaaaagggtggagctaaggtacgggacaaaatctcgccgtccgaaataattaaaaattttctaacataattttttttgtttataaaaaatttcggagcgaattttggggtgccccggggagctagccattttttttcttcatggcatcactttgcacttgtgacgacgacggtggtaagaaattgaccctgtcgtcggaaaaaataatattttgttgttggaaatcatcgtcgttttcgtcgacagatgtggggcttcttttagaggatgtaatttcattaattggtatatgatttttggtgagggaatcattggaacgagcggaggaagaggagtggtggtctacggtagatgccgccgatgtgttactactgtcaccgtggctattgtcattggcattaatggctgcttgtggttgttgttgtttttggagcagttcaccaccacccgcgccgttcggcatggcggacaaaaccgtactttgttgcaccgagacggtggttgtgctattgatggacacggtggtggggagaatgccattgccgcgtatgttcgtcaccacgccctttttgtcctcgctgctttttgtgttgttgtaattggcagcactgttgctgctggacatgctgctgctcctcgtgctgctgctcaaccgactgccgttgctggtcgtgtgccgcctcctctgttgctgttgtagtgccatttcgtctccctccaacgccatgcgcagcaat

SEQ ID NO: 33877 - DNA, 891 bp, Heterodera glycines
ctcggcacttgggagggccgtcccgaggagaaatggtcatccttgtgtgttcactgcttcaggtgctcatttccatccaggtaatttgtcaattaaataattgggtaattaagctcaattcatttgcccattccctataatttcaatttgaaattattttcaattccccagggcctcattttcgtccgccatccctacttcaatgagcccggctttgagaagctccaagggacgagtcggggcgacgaattgtcgcgcaaatacaatttgtgcatcgaaaacgccacacttaattatgccatttatgagcagtggaagaacggatcgccgtattttacggtgagtcaattaaaaaaagtgactttttatatccccaatccaaggggaaaggcaactgacgcaaattaaacgacggaatatgccaaaaaaagaagcaaaatccattttgccaaaaaaagaagcaaaatccattttacaggatgtcattcgacggcacttttggctgaaacggcacgcggtcattcggcaggcggaacggtggctgaaggaagtgacggagaacgtgcggaacagcggaaagatgcaattgccggacaccgacggaatggcggacggcgttttgtccagccaaagccttcaggtgggaaagaatatcggaaaaaggaaaatctgatcaaaaagatgcaaaaactgatcaaacaaattatagcgtcaaaccgtgcgcaaattgttggaagaatttcggaaaatggaaaaccctttgaaggaagcggaagcggaggaggcgaaaaagggaggaggacaagcgtaaaaagggaaccgagcccaaaacggtcgcaatttggcaatcactacactaatcatcttcagacagacaggacaaagaaaaga

SEQ ID NO: 33878 - DNA, 524 bp, Heterodera glycines
cccaggcacccacaaagacaggcagcggaccaagacaacgcggaccgcagacgccacaacccgcaaccccaaccaacccaacggcagaagaaagcagcccgcagccaagcccacgcagggaacaagacaccgcccggccaccacgccgcccgaccgcgcacgggaagaacacaccacggcacaaacggcaaacgagcgaacgaacaacggcacggaagccgcgcaaggacaacccgcagcaaaaaaagacaccggaaaacaccaaaccccgggaaccccagcgagagcgcaaccaccagccaccacggagcgaccccacagccgcaaccacgaaggacaacaacaaacagacggacaacggacgcgcagaacagcgccagaaaagcacaaaacgacgacaacggcacgacaccaaagaacaaaacgcggagcggaaccccgacgaggccgacgacgaaccgcaagaaggaccgacaaacgcccagcacccgcccgggagcgggacgcaaggacaagcggaggga

SEQ ID NO: 33879 - DNA, 819 bp, Heterodera glycines
tttaatcacttattttaataaaatgtttaaaagtgggctcctatttccttttttccgttttttctcaaatttcccaaattcctccgcttcccatggcccttttttgatctgccattggatatcgtcgtcagaatgtttatttttggcacattctcttttcatgtgccgttttgacgtcaatcgttttttttaaactatgccaaatggtttttcccttgagaatttttaataaaatattaaatatttttgtgctttgttcggcaaaaattgtttattttcttggcttttcttttctctcttttgacaatttttccctttttattgataaattggccattttttgcctgatttggtctaaaacaacagctgccccccccctcgggaatttctttgtgtcttcaccaggcaatttgtctttcctaattttttctcactcccctcccccctctctcatctctcctgctatttctctctttcctctttctccctctccccttctctctctctctcgtcctaacttttctctctctcctctttcccctatctctctctccctctcgctctctctcttcctccccttctctctatctctctccccccttccccctctcactttggcttactttcgcactctttcgatttttgcgtgggacgacgatcattttccgatcatttttgtccgagatcactctcttccccggggcaacttaaactgatcaaacagccagcagcaaagtccatccgcttcgattggcttttgcttgaacgacacaatttctccgggagcaatgaatgacgaacgattagtctgccacgcct

SEQ ID NO: 33880 - DNA, 822 bp, Heterodera glycines
  unsure (1)..(822): unsure at all n locations
caaaatttttattggaaaaaaccgcaaaaaaacaaattaattgactttttgcatttggaataaattttttcaaaatgctgatttttgaccctaaattctgatttttttgttagcataaatgctgatttgaaaattttcatctggcacctctgctaatgcatattactgaaaaaaaacaattgtcaaccataatgtttttcatcattccagcatttttgggtgaaactatttacagatttagtccaaaaatgggcgattttcgaagtttattacctaaaaaagtcaggcggtgccgacaggtgctgccggagaaatttggtggattttagcctgatttgtgaaaagattttgaactaaaaaaagcaaaaattcaaaatgccaaaatgtttattaaaatattgataaaaagatttaaaaaatttgtaagtattttatttataaaacgcaaaatatttttatatttatggaattaacgtttttaacgtaatatttatgctaacaattatgcttttcgtgtatttctcattacataatgcagaaaataaattaattggcgttctctctcaacaacaattaatccaacgcatttagcaacaagaaatttacaaaaaccccgacaattgaaataatttgacaaattgtttaattgctcgcacagagcactaaaacttgtgaaaaaaacaatgagaatttagggaaataaaaaataaaaaacaaagatagtttatgaaaaactctgttagacaaaaatataagnggagagaatgtgtagaccagagaaagatatcgcttccttaaattttaaaatctaatttaactcat

SEQ ID NO: 33881 - DNA, 614 bp, Heterodera glycines
aggcaaacgaaccgcctgtggaaaaaatggtaggtaaacaaaaaaaagattgatggcagagttcagaccatttattctaattttgtacaagatgaaaaaccccatcataccgacagttatcagtgtgttaataacggcgaccaaatgacgatttgcttctctcatttcctgggagatacgaaggaattagaaaaatacatatattccaacacttggcttacctttccaaagtcttgcattagtgaacgatttcgtgaaacatcgacagactttgtcatctccgcatatttcaaagcttcctggaaaaactcactttagaattgtttttcattgcaaatttcctacttgtctttctcgcaactgttcaagcctttcattaaaaatcctttttgcctcccgttgttcctcctctttctcttcagccgtttcattcggtgagcatggccgaagtgattcgacaaatcggaagaattcaatttcggggggcaaactgtcgtaaattgccgacacatcggctgcactcaaacgattgcgctgtttcaacaaaattgtgcttttctcttttcaaccaattgtcaccttgcaaatttcttcgatgctcctccgatttgttg

SEQ ID NO: 33882 - DNA, 603 bp, Heterodera glycines
atggacattgttgaccgaccaagggctcgaatttaaggcaaaagaggttcaggaatatttcaaaaataagaacgtgaaaaacttttttatgtacacctcgccgcgaattcacgcagggatggcagagcgggccaaccgaaccatcaaagaacgcctttatcgctatttcacggaacggggtacccaaaaatgggttgatgtgataccggcgattgtgcgtgggattgaacacttgctacaacatccgtcattgatggcgagaaggtggtcggaaactcataattgatggagagagcgcccaaccgatcaaagtacgaattgtagtaacaaatcgtgaccttctgtacggcgggagtggaggagactcggacgcctcttctggtgcaattgacgtggcttccgatgcaatggaatgttggtggtggctcgggatgttctgaggcgaatggacaaattccttgagctggggaggcttgaacgcccaggaaagtgacaaggatggccatgatcatggtcgcggtgggaggaatcgcgaaaagccgagaattttgtcgcgcaagaatgccgctgcgcttactgaccagcggatctctcgaaagtgaa

SEQ ID NO: 33883 - DNA, 254 bp, Heterodera glycines
tataataacgcatgcggacatctacatttttgaattgacataaattggtaatcactctttctttttctccatattgaccatcatactcatactccccccacccttttcttcttccgccacccacctccccctcttgataggttaaactgaaggcgggaaacgacaatccgatccccatcaaactagctactgcaggtcctgctcgagcggccgcccggggatcgatccccgatctagtaacatagatgacaccg

SEQ ID NO: 33884 - DNA, 601 bp, Heterodera glycines
cccccctcctcattagcaaaagatgatgctgttttggttctctacccctcactttgtgcacaaaattttctctgactgtctgtctccccctactctctcactcatttgtttgtttcttctctctctctatctctccctccctctcaccgtttcactctctcacttttcccttcactctcttctctttctccacgcgctgccgtccctcgctgctgcgctgctgaccagcagccccccccccttccatacaacaaatcatcaatcacccccatccttagataaagctttatatgctcaagaagccttataattaacacgaaataattttagcaatataaaaaagtaataaagaaataactttaatattttgggattgttgggaattattgtgtgataaatattcattataataatagtcaaatagccacccaatacatacaaaacagaatcttcgaaaaatgttaaaacttactaatgaaatgattacaaattaaaacaaataaacaaactaacaatcaaacaataagaggataacttaaacttattctcatgaaagtgcgtgcgcgtaatactcaaatgtcttaaaggaatgaactgaacc

SEQ ID NO: 33885 - DNA, 953 bp, Heterodera glycines
  unsure (1)..(953): unsure at all n locations
cgtaagttcntggatttatggtatcagtaataggttctgtatttggagagtccaaatttaacaaaataaaaaatgttctgtttaccgaattctttataatttccttcagtttcaaagtcgccacttttggtttcttaaaagattgattaattttaccaagtttgagctaagttatgatttatttttagcaataaaaataaaataattaaatttaaatatttcaatcattgatacttttgtagcaccctatgtgttatacaacttttttgggcttgctttttcaatctttggccattactcatcgattttggcttcgttttcgttttccattttgtctgttggtcccccgtattcaccctcggggtgttcttcgtcctccgccccccccttttttcttttttcctccaccatttctcttccctttccctctcttctcttcttttagacggtccatgtgcttggaatacacagcacaacagcagtgaatgaatgttttgcttctgcttttttgtcccttttcccatcgattagcgttcattccgtaaaatttaaaattttttgctcaattttttcaatttttgctaggtaaatttatttattttttaaggtcaaaggaaaaaaaagttgattagtgcctttagcaagggcgtaaccgaggggggggggggggggagagggctcgaaatccaaaaaagtaaaattttcaaaaaatggcaaattttttgaaaattttaagccttaacaaattgtattacaacttaaaatttccagttgctaatcttgcttttagccaggccttagacaataaaatatctgtcaagaattgtctttttcatttggactaatccgttttgcgttaagtcagaaaaattggtctaactctaatgcctatgggcataatgaacatttacgaaaagcaattagatcactaacatcctttgcaacattatata

SEQ ID NO: 33886 - DNA, 725 bp, Heterodera glycines
aggccaaagaaaaaagtaccagacatgcagacacttatttgccttaggcattttctaaaggaaaattgattaaagagcggcagattaaaatcaaaaaatcaaaatgagaagaaaaggcaggaaaaagtacgggaaacagagagaatgagaggggaagaaagtggaggagagagagaaggacaaagggagagaagagagagaaagagggaaataaagcgagaaaaagcgtaaaatgacaggtaaagacaaaggagaaaaagaggaaaaaagaaaaggaggaggggagaggaaaaatatattaattatccttttttaaattgttttcccgttcatacagtatctggttcttttgccatcaccgttttacagtatccaaataccgtacatttggccattgggccgtaaaagtttccttttacttttggttgttcggcctggcatttgtttgttcatctttcgtgttttggcctttgtttcagttcgcttttttggcttcgatatttcgccgtcgttttttaattgattctctccggccaattaattatttgttcgatcgatcgattcaacgccaattaaaaggatgtgctgttaatcactctcttttaggcttttcctcgtcctcccaattcattcacttttttgtacgatttcaccaatgctatcaaatttcgtctgtcaccgtgaccaatgataagtgatttaagcgagtgacgatgcactgatag

SEQ ID NO: 33887 - DNA, 1350 bp, Heterodera glycines
aaaaaagaaaaaaaaaaaaaaaaaataaaaaaaaaaaaaaaaaaaaagaaaaaaaaaaaaataaaaaaacaagcggaagagaggggtgggggaatgatggatatgggaggaaaagaaagatgggaaagggtgtgggttaaggatgggtgtgaaattagaagaatgggtattaatttgagaattatcgtttttttggattgttaatagtatgtagaaaagttttttgaagggaggattgatagtgcgtgtaaggcaagaaagggaaaagttgattaatataaattaagatgttttaaaaatttctttttattttttggagagtttcccaatgtaaatattgtcatcagtgagggtagggggggggtggcgaagtgggggaattggtttcgacaaaggttggcctggccggggttaaagttacaatgcaaccagattcttacccatggtgataataggagagactttatttggagctgtacaacccccccccccagttcaaccttaatttggacgggcggcgggaagtgccggtgggaaatagtatcgctggtaccccctccacccaccacttttttcaaaaaaaaaattttttttttctggaaatagtcattttaggggttttcaggatcggagaaaccgattccaatatccattccgaccttaaatgtaatgaaacaaactaaatgccaccaatgcctcaacaaaaaacttttaaaccgatgttttaaagcaaaaatgcgcactacgaaaatgagttctttttttttttgttcaaaatcggtccggggttcggatttgagtcggaatggatatcagaaacgaattctccgccatgaaaaaccctaaaatgactatatcgagaaaaatttgaaatttttgcgtaaaagtgggggtacctttggcacgattaccgaagtctgggttcttatgaacttaaaaccctgattggcagcctaccggattcgaatagtcgtaacatttgagaggggcggaacagctgaagcggatatgggtgtgccgtcaatcaaaaacgcgggtccaccatcggattcaaaaattatgagttccatggtcaataaaatttgtttttctaaaattcgaataaaacaaaaacattttttatttcttaacaaatttcattcaattttacccgccccacccccaaaaagaaaaaatgccgagtaaaaatgtattggtaaaaattgatcataagaaacccaagagagagacgggaccagagtcccgcaggaatttttcagggctcccgtagcaatgcagagcccccccccccgcaaatttttgccagtctcttttcttatgtgcactttcctaaatgagggcgctcccgat

SEQ ID NO: 33888 - DNA, 874 bp, Heterodera glycines
aggcctggatttttttttgttttttagaaaacacttctttttaggttcctaccagcggaaattttttgattcagtttttagaaaaaaagttatgggctctgaactgtgagaaaaagtgacaaatcgcttcccgggactcagacgtccgcgctaaattttttttggtcgtggcaaacgccaccgaggtgctggcgcgaaaagtgatggaaagaatggaaaaagaaagaggaaaagaaagatggaagagggagaggagggcggggaggtggtgggagcggaagcggcaattcaggccgctgtgacactattaatttttttttgattaaagattttgttgaattttgaataaatttttgtataagtattttttttgcagtgaaatttaaacaaatttataattttaaaaaaattcaaattcattatcggcagagctaggattttatgtgctaaaatccctgaaatatgtacgaaaatatgtaaataaattttatatggttatttaaaaattttattaattattaataaaaccaaaacatttaaatttattaaaactaatgaattaactaaaaaataatagaaaaataatgcacaccacccgggtccgaaccccccccccccctcataagggtgcctcagaatccccatcacacagggattctgaggtcttaacgatgtcaaaagtgaaatctgatttgatattcgtgatcagcgccctaaaatacccctaaagacatgtttctggaaggtttctggtgaaaaaatttttccaccaaaaaatcctggtcccccctttggtcccgaatctcaaaatcacttttatttttatagcaatttgtaagaaagtgataaaaaggtgaaataaaattttttataa

SEQ ID NO: 33889 - DNA, 893 bp, Heterodera glycines
tcactagaaatgatcctattttggccgcttttatatgcaataaacttgtaaaaatagtggaaaatggaggtccggtacccttttttataaaacttattcctctccctttttgatatacaaagcatcagagtgcctaaaatagcttgaaaataaaatatgatgatgcttcagaaccctctcctgaaaaaatatttaataattattttctgaagaaatgaataaacaccacagattcatattttctaacatttttgtgagtcatctagatgggccttcattgcattgcccgaaattcctttaccgccgagcatccctgatgagtttggcaaccttatgctcaattaacataaaatatgagaagatcgagttttcactatcaaagataagcctacctttgttgttatctgcatcaaactcttccccaatttataaaatttaataattttcccgccccgaatcgactcagtctccctcgtccgttcttcggatggcaagtgaaacgcagcaatgttggcaaatatctcaaccggattgccattccatttccaatttttaaattgccaggccggaccctaaagcagttttgcaaatcccctgaaatgaccatacgcccacctgcacaaacactgcgaccactcggtcccattcctcgtccttcaatcgtgttggattgtctaccgactcggaacggaacagtgacgccattctttgggatttgcagtaacagctcattctctcgtttactgctaaattgcttcttttcttcccgtgcttacgtaacgcacatccttaacataaattaatttataatatttttcaaatgaataaacctgcaaaatttccctgcgcattgtaaattgtgatgagtgaacttgcaccggcagggataatta

SEQ ID NO: 33890 - DNA, 974 bp, Heterodera glycines
atatgttgatgattaaataaattgaaatgttttttgttactgaataatttgtagcattttttttcttttttttttgtattagtcatgccttcagaattgattaaacaaataattatttttggtccgcttatgtaatttaaattcaccacttaaaatgaaacaatttgaaagaaaaattttgttttcttcaaaaaatttaaactttaaattctctctgagattacggctctagtttagaaaaccaaaacaaaatttcttttttatataaaaatatattaattttgaattatttaaaaatctattttttagaaatcttagcaaatattattattttttaaattaaaaaaaattcaattgatctctttttccaacaatttccttccttagcttgttttctcagctttgctttaccaacagaaagctgtgccctaactcgcggttgattaaaaaataatataaaatttaaatcgtttgttcatcaatatttaaaaaccataaaatttcttttgaatataaatcaagttttggtcagctttttgtacccattaaattaagaacatattttatatttcgtggcgcaacaatagtggttttgtaactaggggacccgaaaattttttgaaatttttgaaattttgcatgggattagaaattcgggattaagacagcagagatgcgagggattcgcagtcctacagagtatcacaaattttaattttaaagaataattcaaatttgtttatttgatttttaataaaagaaaaataatcaaaaataattcataattttttttgacaaatttttagttttaaaccaaataaataaataaatattttcggcatttttttggttggtgaattttatgggactcaatatttccaaaaaaattcaactcataataagaaaatttagataaaaattgaaatcgactcataaaagtgtgtttcattatttattattactttttgcattta

SEQ ID NO: 33891 - DNA, 681 bp, Heterodera glycines
aatcaaatttccctaatttaatggggttttcataattattgcctttcaagaaaaattttatttgaaaacccataaaaacccaaactgaaacccatcaattaatcaaagtaagccccgtcactgtcgatcagcagcttttgccacttttcccccattttcccatcaaatttttcaaataaaaatgattcaggcatagaattactgtacaaaaagtaccgccgtattactgtaggaacaatttccatcattaactaattgccctcactaattaaattctgaactggtccccatgatcatccgtttatttaaattagaagcataccttcgatatgacaaccggcacgtgatgggcgccttcggtgccgccataaaatgcaaaaatgaaataattaaaaaataattttaattgccttaattgacaggccaaggccttccggccccttcggcacgttcacactgcgcagtgccaattcggttgaagtgtcggatgcgggcgaaccaatggtcatctgcaacgaattcagttcctgctcgctgtccgcctgcagctgaacgctcagaagatctagtgggaccggaccatagaatggacaccgcctttggcattcatttcatttttggcaatcttgccgactgtagactggcgtttttcgccattttttggtcacctcataaaaaata

SEQ ID NO: 33892 - DNA, 955 bp, Heterodera glycines
tccccttctctctttcgcttctccttctgtttgtgtgtcccacccatcacgtccattcatcagtcaacagtcaagactctcgtccttcttcccctctctttctgttctggccaccgaccgctctgcatttttcatccgtaatgatacactaatgaatgatcacaaatcgtgatgaaaatgggacgaaacataaaaaaagaaatagggaaagagggaaagagagggaagaaaacggtgactgatgatggtaattaatgataagcaccccattcacacatccatccctctcatttgtcagttttcttttccactctgcccgtactaattacttttaataataacaaatgagcgacgataaccaaaaatgatacattcattcataaatcacccatagcgcactaatgtagaaaagagtcgcgcaatttcgctgtgtgtgtttgtttctgtggcgtgcgcaattcgccgaaagagatttttgtacgaaatgggagaaggggggggggatcaaatcactcgaaaaacaaatcgccgtccggccgatcacttattatccccgacacaacaacacaacgatcacacactcaactcacaatcagcagagagagagagcaaaaacgcaatttgcaaatatttatttttattttcttttccttttaatttgtcagagttttgcggcggcggtcgtccgccgtcagaagtgatcagcgtcaaagcaaagcccagcgcagcaacagcagcagcacacccatttcaacatttatgttaagcatactgctgctgctgcttcgttgctgcaacgttttgcgttcccccccccattcatttttcgcggcgctcaatcagtcagttggtccatcggcggtggtttgccttgtggaattcttctttttttggtaattgcgcgtgtaaaaatgcatgaaatttcttacaaaaattgtaaaatgagaaatgctca

SEQ ID NO: 33893 - DNA, 874 bp, Heterodera glycines
aaaatatgaatgaaagggatgaaaaaggtacataaaagccgacgacgattcgctggttattccctcccatcgatgggagttttatgcgccacggccaaaccgacactccgccgcccaaccgacgatcagccgtaaacgttctcctcgctgtaagcgatgtacatgaacaagtcctcctcgtggcggtcctgaaaaaagaattaattttgaaacccaagaaaaaattaaagcgatttggaaaagacataccaaaacttgcaacaaaaaaagtgaatcaaaagagaaaagcaaaggtccctttgtaatttgcccattttttgttttaaagaaccagtggggattatcggcacaactgccgattttgtaccacttcgaatctcgtttggcttccctcttaaaaccttttaaaggtcaaatggaaatgaacctggtagagctgtcccatggttgtcattgtctgaaaggaaatcatctgagggtaaacctcataaatggaaaacattaaagcaaccaaaacctgggggataacgctgttgataaagaaaaagagcgattcttcggggcgaagatggatcctaaaggggaagaggtatttggaagaggaataatcgtttctttttgcatttatcatggaattgttcctttatgataaaaggcattatcaccaataaataagcaaacacaaatgaccttagctctagttcgtaatgcgtccaattaatgaccatcctcagtttctttgaccatgtcattttttatttggtcaatgcctatattcttggtatcaactggtagcttaaaggctctgtataagtttttatattaataaaacaacagacaaaaaactcttgaatataggtactccaaaacattg

SEQ ID NO: 33894 - DNA, 1007 bp, Heterodera glycines
aaaaaatggcatggtcaaagaaactgcaggatggtcattaattggtcgcattacgatgtagacctaaggtcatttgtgtttgcttatttattgatgataatgccttttatcataaccccccccccgcccttcaaaattttgaaaaaaaaataaaataataggagactcagaattttgaaaattttttataaaaactgatgacaagctaatgtgataaaacaggttaattcttttcctttcagtatccctgcaaagtttggggcgcttctgataagtttctgaaaaaaaagttaagcctaaactttttggcctgtttaaaaaggaattaaaaatttttaaaaatttattcatctccctttttgatagaaaaagcatcagagtgcctaaactagcatgtaaataaaatttggtgcgtttcagagcattttctgaaaaaaatatttatgaattaattatgcaaaaataaataaaaatttctaaaaatttgatcgtccataaataatttgtaattgatcaggggctcaccaaattttgcagggatacgtatcggaacactacaaatgcttactaattttcctagattttttaaacccggtgaaaattttttgcagacaccaccacttttgcacttaaaaaaatttcaaaaaactttaaaaattcatagaaaatttaaattcataggtactactgctaaatcaacgcagagacgcctttccttgacctttttaggcccctgcaaaatctggtgcgcttctgatcactactcgaaaaatgagtgattgaattttcactaaaaagttaagactaaactttttgacctgttcaaaaaggaattaaaaatttttaaaaatttattcatctccctttctgacagaacaagcatcgagagtgcctagcctagcatgcaactaatatttggtgcgttctagaaccctgttctgaaaaaccatatttatgaattacttatgcgaaaaacaaataaataatgaactctcttccttaataat

SEQ ID NO: 33895 - DNA, 936 bp, Heterodera glycines
ataaatgcccatttaattgttccgttcccaactttttattctttcaatggcctttcctttggccatttcgcctttccatggcaaatcgacaaaaatgtctcatctgtttctcaacttagtgcttttgcttctgcttcactttctttctgtcgtttccactttcaatttggacttccgacaagcgcaaatccatcgtcggcccggcgcccattcggcgtttggctattctttggacttcgcctacagagaccaaagacggcacaaattcacttaagtttatgaaaacagcgtcacaaatggcaacaattattaaatgaatgtgccaatttaatttttcagtcttttggtcggtgcgccatttgctcagacggcgcagcggcgacttcagaaaacgggcgcagtgtacggctgcgaagtggacaatcagcagcaaaacgcatgtgcggagatcattttcgatcagaaaggtgaagccaggccaaacagagggaaagggaagaaaggcgggggatattaagtggaaaagcacaattaatttattttttaattacccccccccccaccgaccatttgagcaatgttaaagtgtccttaaaaaaagaaagatgggaggggaagggaagggggagaaaagtcatttagcaaaacaaaacaacaaaaaacacgcactccaaacaatcgccgccaaacgctcaaaagagagggatcagcagcagaaccaattaatccaaaacaaagaaacacaaaaataaacaatgaaagacaacaaaaagaaacggacggacatttaacagggcgaaaaagagagaaaagagatagatagagagagagatagagaggagaaagggagagagagatagaggggagaaagggagagagtgagagagagaaaaaagagagaaaaagagagagatagaggggagaaagggagagaga

SEQ ID NO: 33896 - DNA, 581 bp, Heterodera glycines
tcgagtttgggtccggatttcggaattgttcgaaatgatcgtcaattcgtgatcagcgaccccgaaaactccagaaaaaaaaataaaaattattttatgtggcgtaaagtgaaaaagtaccctgaattctcacagtttcggcctcggtctcttcgtcacgtacacaaagcgtcgtgtgactgtcgtcgcctccacttgcgcttcgtccgcgtcgtcatctccgtcccccgcggtgccttttgttggctttatgtccgtccgtttcccccctccctctctctctcagcttccctctctctctctctctcagcttccctctcccattcccctctctctcagcttccctctcccatcgcctcctctctctctcagcttccctctcccattcccctctctctcatcttccctctccctctctctctcagcttccctctcccatcccctcctctctcaccttccctctcccattcccctctctctcatcttccctctccctctctctctcccattccctctcccattcccctctctctcatcttccctctcccatcgcctcctctctctctcagcttccctctccc

SEQ ID NO: 33897 - DNA, 1465 bp, Heterodera glycines
  unsure (1)..(1465): unsure at all n locations
gcccattccgccactctcttcgcttggtaatgtttggcgtccgtgcgtcccatgacaccccctcgccgtcttcactctccgcatgttccctcccccaaggtttggngcttgtttgctctgtctgtgctctgtgcacattgcgttgcctttgccctgcctttgctttgccttgccctacctctcttgttgtcctccgcccaccatagtctttcatttgctgtgtttgtcatcgtcaaaggccgatcgattggctccttcgactccatcgcccaccgtcgtcccccgggggggtggtggtaccctatggaacacatcaactccaaccccacaaacataacacaagaagaaagtcacagcactctcttctgacagaaaaaaaacttaaaatgtccatttaacgtttgcagaaacggggaatgtaagagcgaacaacgaacggttgaaccgttttaagcggtccattctctccgctgggataaacttttttaaaaaacggcaaaataaattcctttataaatttaaactccttaaagccgttaaattatatatttactaattggtactaatggacaccgatgctaatagtccttcccaaatgctcagccaaatttttggtcaccaaagtaaattgtccccactttgatttcaaaagctcaattggctttagttgatgaatcgatcagccatttgaatggatgcaatcggaaccaatacagagaggtggaacggttcgagacggaagatgagttgcagcagtggatgctctcccaggggaaaaagtgggggatgtgagtgaacggcgtggggaggaaggattacggcaccaatcattacgggttccgcaattggaaaaccttaattacgtttttcgatttccctaattgaaacccaattacgtccagccctgggggggggatggggaggaattaggatctaatggtgaaggcaccccaggagagctatattatttagttttttcaaaattttttttgtttgtttaagagttcaaaagggacgcgtgaccattgaggatgtgagtcggcactgatcaatcccatccattcatttccccgcctttccctttcctttctcagatcattgatcagtacgcgtgcgttttccgtcgccggaagggctacgcgtgcaaagtgcaaatgcgcgtgcggcacaatcggcgcaacgggcacaaagtggtggaagtgagtggccaattggacgaacgcaacgctcaaaaggccgaaggattttgcagattttggaactcgaccatgaccacacattttacggctacaaaagcggctttgagccggccgacggggccaaaatgttcgcttccgcctcgggcggccaattctgtgcgcaaaccgccgattttgggtcgggccaccaacaggaagagcagcagagcaaatctgcagctcaactaaatgcccaatttggtgcgatattgaaaacaattttgaaa

SEQ ID NO: 33898 - DNA, 852 bp, Heterodera glycines
ctcacatccgcagtggaaatcggcatcgtcctcgggagttgagtttgtgccaaaaacacacgtggaatggaaccactaaaaataaataaaagggactcaatgtttgtacagcacaccttgtcgcagtcatcgcattggacccaattgatggacatatgcagcggtctttggcattttttgtgtgcacataactccgggtctccattgccaccagtccaatcttcggccactgttgtcgtggccaagtctggtgaagactcgtccctcgttcggcctttgcgacgtcctctccgccccgtccctttcataattgtcgattcaccaccaccatttagttttacgtctctgctttcgctggccaattggacgtgctggtcgatggatgagtcgtcatcggaagaatcgccacttgatgacccatccacggcttttcccacggctttatgtgcacttcccaaaggtctcccccgtccgttgccaatgttccttcccaacatttttggttttatcgcggtgagagttgtgactgtcgacggagtgtttgccgtcagttttttggaagaatggactgccttccctttgttctgaaaaaggtaacctggtttcttccactcattcattctcttctttctctcacctccgtcctccctccttttggccccctcttttgttgtccttcgctgttccgttgtccaccatttgccattttgctcgttgtcgttgccacattattcataattgtcatcgctttcttagttcctggagcggatgagagcagttttccgtttcggcactgtcccatcgccgttggccattgctttggttgtgcttttcttctcccatttttttcct

SEQ ID NO: 33899 - DNA, 1460 bp, Heterodera glycines
cttcggacaattcatcgggccaaacgggagcactctttcgggtgtactagcggagagaatggacaaggtccttcccaaaaagaggaattactttgaattattagttaaattatttggattaaatatcataattttaatcattttaataaaatacatcgaataaacgccaaatctgaatggacaacaccaactatttttgattttaatttttacataatttcttatttcttaagaacgaagttcgcgacttgatgctttgcgtcctttacacgctgaacattcttccgaagaaaatattagcagccttttggaatgtccaagaagccattcagccaaccaaaacaatgccaagttgcgacgattcggtcacggaattgcctaagcaaccccaacaaaatgtccttgtcgactttgtccgtattttggaactttcgcttttgctgtttcgctacagagggcgaacgcgccacttaatgttacaaacaaaaaggtaaatatgacataattcgacagaattttcaaactttatttaaagaaacaaagcgacaaacccgaacaaaacgcccgaacttctgctgaagttcgatgggtcgaattcgtacggaatgagcagcaaattttccacactgactgatataaattttggaggtaagcacttaaatttaatcatttaattctttgccagtagaaagtttcgactcgagaggagtggcggacgaagaaggcaaaggcggcgaggcgacaagttttttgatggactgtaatttggcgcaagaagtcgcgctgattgtgttggagactatccaaacaatagccaaccaaattgccgtatgtttttgccattttcaaatttaccctttcattgttcaattcaggcaaagacgcgttacacctccaccagcagtttggatgtcatttttgttcgtcttcttcacttacagctcgaattgctcaacgaatattggcccgaaactgtccgacttcacactctctctgcgctcgctgtgtttgtcaatttggttggtcctcctaatttattttaataaacgggggggggcgaaggcccaccacgaggccgcgaagaggccgagtgagtaccttcggtgcaggaaaattattaaattttaaaaattttttaattgctttttaaatatgccaaaaaatgtaggcttaacttttttagtgaaaattcgatcactcatattttttgctaattgagcagaagcgtaccaaactttgcagggatactccccggtaaaggactaacttacactgatatgagcaccgagctagctggctcaaaaaaattttcgaaaatctgagtctttcgtttttatttattttttgcaaaattaattcttaaatattttttcagaaagggttctgaaacgcaccaaattttatttacatgttagtttaggcactctgatgctttttctatcaaaaagggagatgaataa

SEQ ID NO: 33900 - DNA, 967 bp, Heterodera glycines
atgtcgatggatgtaaaaaacacgaatttaaaaaaaaaccaataaatgtatcacagtaggggaggggtaacctttgatttgcaaaaaaaaaaaaaaatttttttttgcaccggaagttggcatccattttgaccaaaccaaaaggatcgcaacaaaacaaacaaacaaaaaccaaaatgcactttgtgcgatgggtcgacgagaatgacttcgaagaatttgtaggtcgagtcctggcccacccagtacgaattgagcacacgaagttcgcccaaacggcggccggcacgggcctatgggaaaagggaaggggggaaaatcagtcagaaaatttgtgaaactttaagggttgaaataaaagatgggccgggctacttagcctgggatgacaaggggcgggtgaaattgtggcagctcccataccttccttttttcttgttaccgccaggtaaaatttgacgcattttttttttcattggttttcaatgcgctttgctctaaaatccccaagttttgaccattttttgggaaaaccgcacaatttgttaggcccatctaattgaaacaaacctccgcaacggcctgcaaactgcgcgtgttcttcagctggttgacgccatgcgttttcggctttccgtacgtttgccctttggtcacttgacgctttcgacccccgcggcgaatgcgcacgcggtaaatgagaaagcctaaaaaacagtaaaattttaacagacaaaaactcaacacggtgagttggccgcgataaattggacggttccccttttttccaaagcatcaattcatcacacagattggcacttttacaaaaaaaaaaaaaaaactgacaccatgacacaatgattgtaggattttttttttttctatgaaccaacttggagaccccgagtgttttaactagggctgaacgcgccaattactgctgggattaccttttatttttgaaaaa

SEQ ID NO: 33901 - DNA, 932 bp, Heterodera glycines
  unsure (1)..(932): unsure at all n locations
aagaggttttgctcactggataagaaagcaaattttgcacagggggaggaggagtaaatcaattcggccgcgtcagaggattttgccaacgcttaacctgtggattgagataatggcgtttaaatttgggctgaaaagctcaaacaaagcattattttattaataaaaattgaaaaacgaatgcaaatggagttgctgcgcattgccatgtatcatcgcttcatgccattcttatttctctgctttttgttgtgccgtggggccccggctaatgatgtaaaaaagaagaaaggtaggaccaaatttcaattcatttttattttatattaaataatacttttaaaatatttttaggggtatggaatattagtgttttatttttataaagccagtaaatttttggaaatttgataacagagttccgaaattttttaagaaaatgtttgggttcaacgtctaaaatatttgttgcacgtaattccgacttccaaaattttttattgcctcgcggcaacttcttcccttataaatactacattaatatttaaaattatataaataaatgcctggtaaatttgtttaaaaaaaaaatatatattttttctatttttctgcttttataattagggcccctatcacccctctacacccccccccccccccgccaacactcgaaaacaagtccctagtaacctgggcctggaaatttttatgattttaaaagaaaaccataatataaccaccaaaaattttttttacctaactatccagtgggtttcaggttttatgcgatacattggtgagagcgcaaaagcaatttcaagcgtggttggttcgacagttccattttggtggcggtcttggcttcccattntggcagtggtgggaccacttccggcacgccattaaggcgaaacgccagcagcggcgca

SEQ ID NO: 33902 - DNA, 892 bp, Heterodera glycines
caaaagcataacacgcattagtgtcttacacgaaagtcacagaacaaacccactaatgttttatcaaaagcatgacacacattagtgtctcacacgaaagtcacagaacaaaacactaatgctttatcaaaagcatgacacacattagtgtcttacacgaaagtcacagaacaaaccactaatgttttatcaaaagcatgacacacattagtgtcttacacgaaagtcacagaacaaaccactaatgttttatcaaaagcatgacacgcattagtgtctcacacgaaagtcacagaacaaaccactaatgctttatcaaaagcatgacacgcattagtgtcttacacgaaagtcacagaacaaaccactaatgctttatcaaaagcatgacacgcattagtgtctttcacgaaagtcacagaacaaaccactaatgctttatcaaaagcatgacacgcattagtgtcttacacgaaagtcacagaacaaaccactaatgctttatcaaaagcatgacacgcattagtgtctttcacgaaagtcacagaacaaaccactaatgctttatcaaaagcatgacacgcattagtgtctttcacgaaagtcacagaacaaaccactaatgttttatcaaaagcatgacacgcattagtgtcttacacgaaagtcacagaacaaaccactaatgttttatcaaaagcatgacacacattagtgtctcacacgaaagtcacagaacaaaccactaatgctttatcaaaagcatgacacacattagtgttttacacgaaagtcacagaacaaaccactaatgttttatcaaaagcatgacacgcattagtgtctcacacgaaagtcacagaacaaaccactaatgctttatcaaaagcat

SEQ ID NO: 33903 - DNA, 900 bp, Heterodera glycines
  unsure (1)..(900): unsure at all n locations
tttttcaaaaggatactaaaactcgggataacccattcagacactagtcaaaaaaaataataataggcttggactaccatactaattagaatttttagaatgtgtctgttaaatgcaaaactgttgtgaaaaattgttataactccattcagagaagagatagaaaaaaaataaaaataggtttagagagcccgtgaacagctgcatcggatgcaagtgccgccgttgctgtacgcctaacagttggtgagcaatgacggaaaattgcttaaaaaagaaaccaaacaaactcatcaattgtttgctcccgttgacaaaccgaagggtacattggggcaatggatgttgggctaccgtatcagttattaaaatttttgtttttcaaaaaggatactaaaactgggataaccccattcagagataagtcaaaaaaaataataataggcttggactaccatactaattagaatttttagaatgtgtctgttaaatgcaaaactgttgtgaaaaattgttataactccattcagagaagagatagaaaaaaaaaaataaaaataggtttagagagcccatgaacagctgaatcggatgcaagtaccgccgttgctgtacgcctaacagttggtgagcaatgacggaaaattgcttaaaaaagaaaccaaacaaactcatcaattgtttgctcccgttgacaaaccgaagggtacattggggcaatggatgttgggctaccgtatcagttattaaaatttttgtttttcaaaaaggatactaaaactgggataaccccattcaaagacaagtcaaaaaaaataataataggcttggactaccatactaattagaatttttagaatgtgtctngtaaatgcaaaactgttgtgaaaaattgttata

SEQ ID NO: 33904 - DNA, 1162 bp, Heterodera glycines
aaaaaaactcatttttacagatgcacattatatggcctattgtcggaattctgatgtcctctattggtacgactttgacgattcgaatctcacccgatgtgaacagctttgaagtgctttcccaagaggcgtacattctgttatacaagcagaaagagactttggaagacgaggaagcgatggaggaggacgaaatgttggaggaggaggaggaatgggtggaggcaaattcatccgacgaaatggaaactgagggcggcaacggcacgtgaaagcactgcggccccccccccccccttattgtgattattcattatctttattacatgtagtaattatttgccgatttcgccaataaacaaatggacggattcattttgcgtcctttcccccccccccccccaattttcaaattaattctatctgaaaggacttcctttgcctttttctttctcgcttcggcattcctttcctttctcccgttttaagcttttgcttttggctcctatttgattgtgccaatgctttgaaaggactatcttttgctccctcgctccttcctggccaattttcatgcttccaccagtgacggcttcatttccgattttcttcgtcgctatttaattttagctacaaagctaacggagtcttccacttttattcctattttctgcggcttgttatgttagtcggattttcgaagttgttgtttcgaattttgaatttgaaaatcactcaccaattacttacatttctctttccttttctcccttcggacctttctctttaccttacattatatctcatctttattttctgaggcaagcgttgcttattctacaaaataaattgaaaaaagggaaaaggatcgggtagataacgaatagagggggagtaggtagtggaacgaaatttatttaaattcttaaaggcttttgatatcccaacttcattgctcttaatttaaattaatgataaaatatttgacagttttccctcggttcgggcgattacatgaccaaaatcggaattttcgcctacttaaagtaaaattggacgttttgccaaccgacaatttggcctactgaacagctttattaagtttattaaatgattccgaggaagaaggattttttttaaatttttttttaaattttttttt

SEQ ID NO: 33905 - DNA, 959 bp, Heterodera glycines
tggcggtcatggggaattttgcgaaaaatcaattaaaatgtggcacgaccctcgaaaaaaaaaatccaaaaaatcgaacaaggacaagaaaaaaaaatcgttttaaaggcctcaatctcaccgagtacacgtaggaatgcacaaaatagttgaggtaaatcgccccatcggttgaatgcgggcgtgatcggataggagtagaaggcgtacatcatggtcaaaatgtggtggtaccaatgcaggaacatcaacggccttttccggagcacctgtgacaattacggcataatgaatgccagcgatccacagagtccggacagaaatggttttgtcggcaatattagattttcccggattatggtcgcaatttgtaagaagaaatagattgccagatgacagagtacggcaatgaaaatatcggcagttttcgattttctcgggatcttggtccaattacgaaaaaataagattttgaggatactttgatccctttttggaaaaatgtggtgatcatttatagtccatcagtgaaaataatcgttgcctaatcaatgatcaaaattcaattagtaaaagacatattttatcgtataacaaaaagaaaacattagattggtcttgatgtgaacgcataaaattaatcgagaattttggaatgattaagcactttcccgacaattaatatgcagtagagtaaaaattggaagaaagaaaaataaacaaacaaccataccaggaaaacggtgtcaacaagctcaaactgaaaaaatcatttaagtaaatgtaaaatcaaaaatacaattaaatttattcgaaaagatattttttatagatatttttataaatttaaaaaaaaaataacgatttttgtattaccattttactggtgatgaacaccacacccaatagccattgttgccctcagtgtatttcaacacattgcaatatgatgctgaata

SEQ ID NO: 33906 - DNA, 1582 bp, Heterodera glycines
aacttcatggaaagtatgaggtgaattttcaggaatttaaagaagcattataatattcgaaaaaaggaaatagtcaggattttgttttagatataggctcagtttgtaggatcaaatcagattcaaagaaattaagattcaagcatattcgagcataattcaattatgcattgaaaacagatgtttttctctgaatgagtgtagtattcgtagtcacaagtgtccatataatcaagagtcagtatgtatttatccatcatttacagtgagcacgattgcatcgcagaattgaagttcatgctattttcaatatactttcgcaggattcggtctcttcataaatctggtcgcatcggttcggggcgcctgccctgtaatcaaaagttttgattcattcaagtgtcggtttggggtactcagacaattatggggagcagaggtccagcacagaattattgtccagtctatagggaagctattgcagaaggattcggtcttaacataaatatgtgcgcatcggttcggggggatttccccgaaattaaaaataattcgattaattcaagtgtccgtttggggtactcaaaccattatggggagcaaaaatccaacgcagaactatagtacagtctatacggcaggtgaaaacggcccacgcgaaaacggcctggcccgcgcaaatcccccccccccttattcagtccccccaaattttatatgcatcgtgattttaattaatttttatataagaaaatttttaaaaatggtttaaaaaattgaaaaatgcgcgaccgcgatttgcggcaatttttttgcgcgatccgcgaccgcggcaaattgaatccgcgaccgcgggatttttctgtgcgcgccccacccctgttttgaaccattggacttacaattagcctattttgtataaaaattatgttttattcgtgcaaaatttcaaaaatttttacctcggctcagaagtgtctgccttttttcaaaaaaaaacaaatttctctttttaagtttgaaatgccatgaattactatatttctgacttaccgtatttgctctttttatccccccggggggattatttttcaacctcctcagaaacggggggattattagatacggggggaaaaatggagaaggggggattatttttcgacagatttatttgtctaatatttttgaaaatttaaacatatcgacaaaaaatatcatcgcgtcaaaaaaaagatttttatttcatttttgttaaagaattccagaattttacatgagaattcccaaaattcttataatatttaaaaaatattgaaaaccccaaacgtttttttcctacccctagtaatgatgtacagaatattttagcacttttgtttttaactttatctatggactctttttgctgcgtttgtaaagcaatttacggaggaagccacagctgttctgtctgcaaattgacgtgccactcattctgtggcgattctggtggggttgaaaacgaaggcttcggcggaaaggtcgtatgccacaactgcgtgaacgaggaaggaaatccacagacagcagaaggttccgaaaa

SEQ ID NO: 33907 - DNA, 938 bp, Heterodera glycines
  unsure (1)..(938): unsure at all n locations
ccgacctcttctgccctaacgaggaagctgccgtcgatctcaactgctctctgtccttaggagcctgccaggagcgcttccccgaccactcggcagggagcgtcgaatgtcactgtcgagacctcaacctcgacgcattgcttgaaaacccggaagctcgactgcccatcacaactgcgagagttcggctccacaaccgcggccccaccatatttgcctcccacgcttactcccctgttcaactccacctcgtcctggccaacgtaactctacaactccggctggctgactcactatgtcgtgtggaggaacctcggctggtcgggtgttacagttgtttgaccggtgcacaactcgactatgtctgtcactccgacatggacaacgcgctcgccactgtttcttgtagcgacgggcaattttttgtcgctaactgcgcgccgaatggcaccaggagtcgtcaagttttaccttacgaccatgccgacatctcaacacaatgccatgttaaatgccccgcgggcgaaacaaccttccggctaaacggcacactgaggtacatcactcaccagcaccgatttggccatcggcaaagaacatcggaaaatctcatcccggaacccgaacaattttcgttttgggccgacctcagcttcgacaaattctcccctctcctttatttcggcaaaacccccataattctcgccattgtcgtcgctctcctaattggtctcgtagcgctatttttattcgtcaaatattcgcctgtgctcgccacttacagactcatcctccgattgtttgtcgggatttcaatgattaagtcggcaacttcactaccttcaaatttcancctcggtccacccctcccccccagaattaatccgaacgttcaacgaatcgtnccacccatcaacttcatattttgtcgtttttcc

SEQ ID NO: 33908 - DNA, 1000 bp, Heterodera glycines
aataaaataattggcgtggtactcagtcttaattatattatttaattttaaatacatttcgccaaaagccatataacagcacaattttaaacaccttgtcggccgagatttttaccaaattatgcaaagcaatgccctaagagctatttatgtcatcagcactgaatctgatttgtttgttgcttttattaaacatttcgccaacacgtataaaatttaacaaattcaaacaccatgtcggccgagaaaactccaaaaagtcaatgattcgacttgtgcacattttcgcattaacctaacgaacaaagattaaattaataaatatgaataaatttgaacgcaaattcaaggtgaaattcattaaaattgcccgacttattgaccctttctcaattgtttatccaatcattatctcttgcatccatttaggctaacattagcccctttagtttaatgtatgcgtcatgtacattgccccgccttcttcgcacccatcggtcaataaattcttctctccatagccactcattttcattttctgatttttttctctcaccatgctcgtttatgaacatttttcccctcttcttagatctaagcaaaaattaattccaacaattctcctatccccttagcctgcgggcaagaaacagaaaatatgaccggaaatggaaatgaattaatgagaacagaggatgacgaaaattctgttaatttcatgcatttgtttgataatctggaattgacggattctgaaaatctggccagtctaagggaaattgagaaaatagttgcggacacctcaccaccgccagctggtccatcgccaattgaaagctcagttttggggtttgtgttcatctcacaccccatactgtgggcactggtacaaccggacattttgggcgaacgaaatgagctatcggaccggaaaaatttaagcttagaatcggatcagttggtcttccaagtacacccagtatgtgacgactattacact

SEQ ID NO: 33909 - DNA, 934 bp, Heterodera glycines
aattttttccgaaaagaaaaaggccccaaaaattgagaaataggcacaaaaaaaagaatgaataattcgaaaattttccttttattttcaaataaataaaaaatgtcagtttttgattccctccaaaatattttttagagtttcaaattatgctttgataaaccatgatcatgaatctcctggattactgtagctccattgtatcccattcttccccatttcaatacagtatgcaacagtaacgcctttattccgggaaagaaaatcacacaattcttaggctctctctacccgatcggtctcgtgaacagatactgcccggggggagaggcccgatgtgatcatattatcatccatcatgttcaatcataactgatcaattagtgttgtagtaaattggttttccaatttttcagagttgacgatccaatttccaatttcctggcaattaatacatcgctcaatttctgatttttttcttttatttcgtaatattttctcatttttcttaatttagcttcatttgtatattgctcttaaataaaaattagatttaatttaactaaaaatatattcttactttgacttttatggtaatttggcaccaattcttttttccaattccaaaatgtcttttcagaaatgcccaattccttcgcaaattctttctgtttgccttgaccatataattctttaaattcatcaaattgttcaatgaatttgcgctttttctcctcataaaaactctttcccatctttttaattatatttaattcttttttccatttgtatattttatgacgaccaattcctaataaatttccaatttttctctcaattttgcattggtctttccatttgtattttcctttttccttcacttttctttaattgctttcaattttttaattattctctcttttgctgatcattt

SEQ ID NO: 33910 - DNA, 871 bp, Heterodera glycines
aatgggaagcggcacaattcgaacatcagctggagatcgatgacaaactgattgacccggctccgtttcagcttgtccgcagaacatcgagtgtacaaagtgagaaaacggggaacaaagaaatgccaatgccaagagagaaagaaagaaatgccaagagagagagaaagaaatgccaatgccaagagagaaagaaagaaatgccaagagagaaagaaagaaatgccaatgccaagagagaaagaaagaaatgccaattccaagagagaaagtaagaaatgccaatgccaagagagaaagaaagaaatgccaatgccaagagagaaagaaagaaatgccaatgccaagagagaaagaaagaaatgccaatgccaagagagaaagaaagaaatgccaatgccaagagagaaagaaagaaatgccaagagagaaagaaagaaatgccaatgccaagagagaaagaaagaaatgccaagagagaaagaaagaaatgccaatgccaagagagaaagaaagaaatgccaatgccaagagagaaagaaagaaatgccaagagagaaagaaagaaatgccaagagagaaagaaagaaatgccaatgccaagagagaagaaagaaatgccaatgccaagagagaaagaaagaaatgccaatgccaagagagaaagaaagaaatgcccatgccaagagagaaagaaagaaatgccaagagagaaagaaagaaatgccaatgccaagagagaaagaaagaaatgccaagagagaaagaaagaaatgccaatgccaagagagaaagaaagagatgccaatgccaagagagaaagaaagaaatgccaagagagaaagaaagaaatgccaatgccaatagagaa

SEQ ID NO: 33911 - DNA, 1270 bp, Heterodera glycines
tccaattcgtcaacagctccttcttccatgggcctcggcatatatctcttggttagctcggtttccttcatcttcggagtggtgggtttttgggggtgggggaaatcatttattttgtgtctaatttgtccccacttccctttcagtacgcagggctcatgctgtcaatcaagattattcgtgagtgccgccactaatcatctcgcacaaatttaaattttgtttttacagttacgtttggcacgtgaacggggcgtcgccggcggtgtgggcggagatactggtacagcaactggcagcactcggacaagcagtggacgcaaatctgacgacgacgaatgccgacaacaaaacggcgcctgggaatgcggccgccagcagctctcaagcagcgacagtgactgactgaatgacgcgtggtcggatgagccatgcatggtacaacaacaacaacaataacaacggcatggcatgaagaaaaatggcgatcggaatggacgagaattttgcagaggatactaattaaaaagcatggataattttccgcattaaagaaatgttgtataatgaaattaagcccgtcaaatccaactgatttgtgtatgaatttccacactaatgcatgccatcatttgatattaccaataaatacttttgaattggctttccgcatgttttttcatcagagtcgctgatcattgatcactaagggttgcgtggtattttgcttgtgactgtactatttctccagtaagagaatcagaatctgagtgcaaaagagagaagcgaaaaaacctcatacaagagagaaactgacgaatttatatatcgcttacaaattaatgaaaaccaagagtaaaaacccacgaaatgtccaaaatttttcaaaatttataaaaacaaaatgagtctaatttaggatttttagggttttcggggtcgctgaatacgaatataccctttatattaccccttgcctaaccttaggcccatctgaataataaaaaactcaaattcgagacttggacatttcgtgggctggacattttgtgggtcagcggatttttttttgtgaaaaatggctatattagtcggtactcagccgtccgaaaaaagcgacaaaaacagcaaaaccgttttattttgtaaaagaagagtgtgtgggttggttaatggtacgagaatgcgacagcaaataaaaggggaaaaaagggagacaaaaaaagggtgtcaaaataaaaggaagaaatcaaaagaacaaacaaacaaa

SEQ ID NO: 33912 - DNA, 862 bp, Heterodera glycines
aattctctacaaaaatgctcttgcatgactttttgctaaaatcaactcctgacaagttattgcgccagaactgaaattgaggcctaccaaccaaaaattttctatttccaaaaaaattttgaaaattttttctgaaaatgacaccaatcgatagagcatgaaaaacgattgcttgaaagtggtctccgttttcccccgaaaaatctgcaaaaaatactaaaattcaaaaacctcaaaagtgacgagggggcctagctcgaaaatttctgaaaattttagaaatttaaaaacaccattggatgcagcttttaaaactgttcaaaaagtttgctgacgacgaccagctcagcccaacccccagcgagttattcccgaaaatccaaaatccggttttttgcttttcaatttttagtcacgtgtaccgggaatacggcaggtcgtagagaaaaatgtttgctggccaacttgtagagcatacttcaacttaaaatcctcccagcaagcattttttgatcagaccaaaacccatcgtttcataggctcttaaaaaaacgaaaaagccatttcagcgccgctggcgctcagttggccaccggaccggaatgcccctatttttcccggatgcgccgtcaaaagttacccatgcctgcaaaatttcagctccccccgattagccgttcacgacatttagtttttggaacgaaactccttgtttctttagtagtatataaactagcgtgtgggaattgacgggggcggcgtaggccgttgggttttggatgaagataaaatggacatgctcatttgttattttaaacagacaaacattaattgcattagtgtgaagttttaaagcgctatc

SEQ ID NO: 33913 - DNA, 1284 bp, Heterodera glycines
tgtgttgagtcccagagattgacatgctggtgggttgagtcccagagattggaatgccattgaaagttggtggttaagtcccagtgttggaatgccagagatttgagtcccagagattgaaatgctggtgagttgagtcccagcgattggaaagcctgagaattgagtctcagagattgaaatgctggtggattgagtcccagagattggaatgccaatgaaagttggtgggttgattcccattgtttggaatgccggagattttagtcccagagattggaatgccggagaattgagtcccagtattggaatgctggtggcctgattttcagtgattggaatgtcattgaaagttgttgggctgagtcccaatgtttagaatgccgcagatttgagtcccagtgtttggaatgccggagatttgagtcccagtgtttggaatgccagagatttgagttccagtgattggaaagcctgagaattgagtcccagagattgaaatgctggtgggttgagtcccagtgtctggaatgccggagatttgagtcaccgagattgaaatgctggtgggttgagtcccagagattgaaatgctggtgggttgagtcccagagattggaatgccaatgaaagttggtgggttgagtcccagtgtttggaatgccggagatttgagtcccagaaattgaaatgttggtgggttgagtcccagcgattggaaagcctgagaattgagtctcagagcttgaaatgctggtgggttgagtcccagagatttgaatgacattgaaatgctggtgggttgagtcccagtgtctggaatgccggagatttgagtcccagagattgaaatgctggtgtgttgagtcccagagattgaaatgctggtgggttgagtctcagagattgaaatgctgctggtgggttgagtcccagagattggaatgccattgaaagttggtgggttgagtcccagtgtctggaatgccggagatttgagtcccagacattgaaatgctggtgtgttgagtcccagagattgaaatgctggtgggttgagtcccagagattggaatgccattgaaagttggtgggttaagtcccagtgtttggaatgccagagatttgagtcccagagattgaaatgctggtgggttgagtcccagcgattggaatgccggagaattgagtcccagtattggaatgctggtggcctgattttcagtgattggaatgtcattgaaagttggtgggctgagtccccaatgtttagaatgccgcaga

SEQ ID NO: 33914 - DNA, 1314 bp, Heterodera glycines
  unsure (1)..(1314): unsure at all n locations
gaccacataatgtgggcagggaaagtcctaaaaaatttaaaaaatgtaaaattattatttaaaataataaaatagatatttagccaaaaagtacatactttcaaaaaatttgttttttnagtattatntacggaaaaaaatgaaaaaaagttttgcgcttctttttgtcacaaccttttgaaatttccgaaattttgcaggcaaattaatttaaaaattttncaagagaatttactctcattttaaaacgtttacatttaccatttgccacttgggtgttcaatttgtggctcaattccatctttgctttcccaatcgttgttaccagcaattgtataccatggcacattcaaactgccataattgtacactttagtaaaattctataaaaagaaaaccattggtatttatataaaaatattttttttattaaaaattcttttcccgtattaaataaatactttgtggtatagtttgttttataaattatccttaattaacaattaattacctgttcaaaacgctctgcaacatcctcttttgttacgccttcgtcgtaaaaattgtcgccaacgttcaacaaaaaatggggtgccatttctccagaagcaattttatacaattcttttttcgactttttagaagcaaacacttttgtaaaatcctataaaaacaatttgtttaatttttacaaataaaaattgataggagaaattaaagaatttttatatcaaaattttagttttttttgttgttaggattaattaattaattattaattacttttcgaggtgtcactccattactcgtagcaagcgaatccatcgcatttgccaccgctttttgtgccacagttggacgataatactttactaccgtaggatttttctcacaatcagccaccgttccttaacttacagtggtcacatatgcgtttaagtgattattgtatattcctattttattttctctcattttaaaatgttattttgttctccctcttcaacttaccgtgtccttccaccgtacactgctgctgtttgccctctaccgtatactcctccccaccgatgtcaccgatgacaaaaaagcgcaaaacatttccctccgcagaacagccattnttttgcgnntttgnnncctttgtgcctttnnngccnggttgnttttcggggtcggcnncngnngnntnnnnttnnntnnnnnntnccnnnncnntcnnnatgngtttcataggtnnnggtannnncnnnnttnttattttnnattcttaaagggtttaaatgcaaaatgaaaatttctgagtgaattaat

SEQ ID NO: 33915 - DNA, 791 bp, Heterodera glycines
ccccccccccccccattctcaccacggcgacaatcatttggagggattaacgggggaagaataatacggggaggaagagaaatgagtaaatggggattaatgatgaattgggaatagtgaagtgaatgaatgtgtgaacagttgacgggggacgaaaaggccccgcaaaatgaaaatgccatgcccaacttcagtttttaacaatttgcatcaaattttgcactttttcctaattgagaccgggccgactcgggcacccgacggactttttgccgtgccgcccaggcctgggccaggtaaattttgaaaaaaacaccgggccaggggctgcccagttaaacgagtttaggcttttaacgggcccggtcaaactaatctcatgctgtacgaacaattttcaggtaggctttccacttttagtccctcccgccatagacttttcagcggatttttgtaactcggttcagcattttcagaactgttcgaagcatttgcaggaagtcgacactttccaatgtatttttgtgcaaaatttcatgctttttcctgtatgtaaaattgtgactcactcaccccaaatccgtggaggaaagatgcggcggcgaacaccgtcggatgaaagggcggcggaggtaaaagggaggaggcgtatgaggaggggggcgaagaggcggaggaggacggagccgggaaaggcagcggaaaacgctgaaatgccgtgccgcgcattttataaaacaaaagaatgtttaaaatgccacctgacactccaacgaggggaacaacggacg

SEQ ID NO: 33916 - DNA, 1554 bp, Heterodera glycines
  unsure (1)..(1554): unsure at all n locations
gtcagaacgccaaaatcgccgggtgccaatccgatcgcccgtttggacgtcctttactccagcgaaacccccgcagtgcgtctccaatggattctcgccccgttcgaatgcaatttaagtcccgaaactcactttttccaaagtgcaggcacataaacgccgtgttggtcggaggtttcgatgtgtttttcactgatcgctacgacctcgccgaaagcgaatggacccaccgacgaatccacgggaatgacccccaattgtcgttggactcgctcagcccttcgaccacttattttgttcgaatcgatgttcgaaattcggacggaactgtcgtaaaaagccaatcagcttatcgcttcacgacattcggttggttcggcaaaatttgctttaatcgcctattaattcattaattgaccttaaaagagactttgccgcttcgaagagattttcggcacatcgacacattggcataccaacaaattgggcctggccgaatgcaaatccaatgggaattgccggaagcagtaaaaatgggatcaaatggtaattttgaaaagggaaacggaaataaaaggatcatttagggatcgtcatcttctacaagtacgcgttcgttttccttctttctttttgattttttgcactcattctcagttcggacactcgcgaacctttggaccgatggcaccgaattgacttggaaaattccgaaacggttcagatcattggacaacattggaaactatgaagagataaaccaattaagcgatcacttgaattaattggcctgagagagaacgcggaataccaagtgcaaattgtaccgaagagcatggacggaatgccaatgtggacacacgcacaacgaatacagctaaggacaaaggagacggaagaagacgaaagacgaatggaggagatgaagcggaggatgaggcggatgtgaggatgaagggaaagagagattggaaggaagagagggaagaaagattggaaggaagagaaagagagggaagagagattgcaagaaaaggataaagagaaggaagagagattggaaggaagagaccaagagagaatgagttagagattgggatggaaagagaaacgagacgatgagagatggaagagaacgatgaacgaagagaggacgaagaatgagtgaaaaggaagatggaacgtgaaggggggaggggatggcattttatgtcatacatatcgaaaatgaattgtataaacaaactattgtaaagcaaatgcctttcttgggccaattaactaatccgctgcccaattagtccattaattaccccccccccccctctgcttttttaatctttccctgttttttcttatcagaacggtgcacaaacaatctcagatacattcattcaccttttcaagaggaacaaacaaagcaaattattttttgtattaattattatttttattttaattgcctttgcgctttttccgtcccttcgaattgccatctctcccgcgtccctcccaatggatgcccttnccgctgaactcatcttggccattttg

SEQ ID NO: 33917 - DNA, 1297 bp, Heterodera glycines
  unsure (1)..(1297): unsure at all n locations
acctttccggttatctatgtaaaatgatctttttgagcatttccggttatttacatgaatttcctaacatttacggttattggtaaaaaaattatgatttcagaatttacggttatntaaaaattatgattttttacgaacatttccggttatttatatgattttccaaacatttccggttattgtataaaaatgatcccatttcgaatctttccggttatttatataaaaacgatcttttaaagcattttccggttatttacatgattatccgaacatttacggttatttgtaaaaaaaaatatgatttttcctaacactttccggnttattgtataaaaatgatcccttttcgaacctttccggttatttatataaaaacgatcttttaaagcattttccggttatttacatgattatccgaacatttacggttatttgtaaaaaaaaatatgatttttcctaacactttccggttattgtataaaaatgatcccttttcgaacctttccggttatctatgtaaaatgatcttttttgagcatttccggttatttacatgaatttcctaacatttacggttattggtaaaaaaaatatgattttcagaatttacggttattgtataaaaattatgattttttacgaacatttccggttatttatatgaaaatgatccttttttcgactaagggctatcaaaagatcttaaaatgtttgcactttaatagccctcttcttctcctcctcttcacccaaacgtcgtgctaggcggtgcggtgcatctatttgctcttcgcattggtcagttgaattgtgttgcgagaggagggattataaaattggggcagctgtcaccacagcctccattagtagctccatttgcattcctaccataattatttgctcttttcattcaactaatttgagatcttgcgattatatttatctgctggttgagcttggtcgcctactatttaaggtcattccttgagtcattgctttccatgacaaacattttcctcttagaaaagactaccagttttttaaataaatcatccaaatcttaactcaaaagctgttaaacccaaaaatattaaacaattaattatttaaagaaataaaaaggaaaatattcatttttaatactttcctaaacaacttataaataaaaaaaaaaaattcggccaaaataagagtttagggatcgcgataaagattaaacatttcaaaaattccaaacccccttactcaaattcgaacaaaaatttcgaaaagtccaaattttcatgtattt

SEQ ID NO: 33918 - DNA, 916 bp, Heterodera glycines
gagtcattgaagccccacttaataactttggcatttgcatatttttgatggcactttttatgtggtaaaatttgaaaataatttctattttcttagcattcgaaagttggccttgacttatttatgaattcattaaaaggtttaattaattgaaaatggttgaaaatgaatggaattgccaaatttatctttcaatttgccaatgttgttcgatgatttgagtttttgcttttgtcaattatttaactcgtatttgacagaatattttttcttctttttttaaatttttcgattaatttacatttttgctttaatgattgattatgcacccctaaatttgagtgttttccatttttggagcctattttagcggtttttagagcctaaaaatggagccctaatgcgtacacgccttaacgccagaattaaaaatattttacgcaaaaggcactaaatttaaaaatcaaaagaccattcgttatttgaaacggacgggacacttgagttccaccagccaaatttgatacattctaagcgacttttatattcgatcaatttctacaaattcggcgtcatttataagcctttcatctcaagaggataatgtataagcaaaagctaaaagatttaacagctcataaaaaattttgctaggcatttaaaattctgaaagttgattggtcaaggttttcagcgataccattttgtatggccaaccaaattctacaaacccaatatcattcgaaagcgctacatgtatagaagagaccaaaatgcctaattatatccgacatttcgccacctaattcttttttaattatgggcgaggaagcttagactaagtttttataagattttgagagatgtaagcctaggcctaagcaagcatgggcttagtcctactgtgccgagtgcg

SEQ ID NO: 33919 - DNA, 1497 bp, Heterodera glycines
  unsure (1)..(1497): unsure at all n locations
acgatgtctatgacaccttgccacttatttttagtgtctttgggaatcgntagtcaacaatcggggnaaatgtggcggattgaatagaatcaccaattcaaccctccggggacggtggttttcttcgatatggccgtcaagcagggcttcagcagcaggaaaagtgcgctctcgactcggccattaaaaggcttatttctgcccattgtctgtcattcgttctttcactccaatttctctccgtcagccattggaaaatccacgggtgtccgtctattctcgaatttaatatttagaacaacttcgcgagagcctacgaatccaaaagcctctccaagtgtattggcccagaaattattatatggatacagtaggtatatattatgttgaattttttttgctctctgcctttttggcgttttgtttgcgtcccgccccctttttctctgatctctcacagggaaattaatcaatcaaatgctgacgtgttacgaaatacaaaaaagaggaggatgtgctgtgttacactttgcacctgtatcagcgatcaatgatgtgcgaagcaccacccagctcgacaagcgttgtttaaagtgaaaaaatcatacgaaaattccaaaaaatatatttttacggtaggaattctaaattttttatattgatttttatggtgccctcctcgaatttccaaattcaacaaaaatattaaaatgattgatagtgagtggactgttctttagcaattacctaattcgataattgttggtgtcctggtactccccctcccccgttgcaaactaactacctaatttgcataattaaattggggcctcttttcatgaatgccgccgattggcatgtcctaccaaaaatagacattaattaacacaaaaattaacgacagcaccaaatctctgttataataagcattttgagtgcaaaatggccggtatcgcagcaggaagactgacggaggagcggaaagcctggcgcaaagaccatccattcggtttcatcgcacgacagtgcaaaaaggaggacggcacattggacctgtaatttttttgttttgaattaatgttcgaactagccctaatctcatatatttggatattatacagtttgtaatccacttttcatctaaatttcaggtacaattggatctgtgccattcccgggcccaagtcgaccatttgggaaggtggtctgtacaaattgcgcatgatcttcaaggacgacttcccatccacgccgccaaaatgccgttttgagccgcctctcttccacccgaatgtttatccgtccgggacggtctgcttgagtctgttagacgagaacaaagactggtgcgcaacacatcgcggtttttaatccttggcttttgtttgcagaaatcgaaacgatttttcgggcattaaaatgaccgctcgtataatttttattaaatatatattttgtacataggttaggcaatatccaagcggtgcttatactcgt

SEQ ID NO: 33920 - DNA, 1293 bp, Heterodera glycines
tcaagatcatccacaaactgttccaattgttcatacaaggaattgcaacccgtacgtcttattcctcgtcactgttcctccggcgagacggaagggaaagtacagatcagatacccaaaaaaggaaaaaaccactggagagtcttgtcagatttgacttttttaaaacaacaaggtaaacaaattgctctacacaacaatatgtaaaacacgatttaatttgattgattgtcgttagccatgttctgatcatcattaccacttccgatcacttccaactgatcactgccgtccttattggattgatcaccgatgctcatgttctggacatggttgccaatctcgcccacatttgactgatcactggtgtccttgtttttgttgtcctttctattttcgatcacttttgactgatcaccgatgcttatgtcctggacttgattgaagatttcgcccacatctgactgatcatgcttctccattctggtcactttcaatttcgcttcttcacacggttcatgcttaatcatcagcaactgtttcgccttctcgggaagcccaaccgtccttggttcttggattttgtacttgtaagaccataacaatgagcccaagtggtgctccagctcaacataatgcttaaatccgttttgaatgccatttttcgtcaaattggataagctttttcttgaagattgaattttgtgctgaattaattgcgcattttcagccttttcatcaacgtgttcgtcctccctatatgcatcacatattgttgccatgtctaaattagagcccgaaattcggataaaatgcgattttttgggcttctttcgccataagtaagccgcaaaaatatatatatatatatacataaaatccggtctctacatataagcaaaaaatatttaattaaataaaatgcccagccctactgatcatggtaaaacttgcctaatcccaattcgttggtattgtcccatattttctgaatgcttttgtgaatccctgtgaaatttggcacttgagattgcttcaagtcgaacagttgccatagaaaatcaaacaacacaatacgaaattgttcgacaattctttgtcgctccatttgttcctttatttcttcgtatattccagcaaaattcgctttaaattattttttaaaaaatgaaaaaaaattgttaacttacacagtccaacattttgtaaaagttctgcctgccattcatccttattcgccaagtacatctaaaatttttgtaatgctcgaaaatcgaggtcgaaaaatatcgga

SEQ ID NO: 33921 - DNA, 1159 bp, Heterodera glycines
  unsure (1)..(1159): unsure at all n locations
aataataaatggaaaaaaaagttggactgtatttatattgattttcaaaaagcatttgactcagtgccgcatgaattacttttatacaaattggaaaaaataggtataaggggcaaacttntgatgtggataaaggactttttgagtaataggacttttcgtgttaaaattggggatgatttatcctccagtaaaaaagttggctctggcgtcccccagggctctgtccttggacctttattatttttgatttatattaacgatcttcctgatgctttgccatcaggagtgaaaataaaattatatgctgatgatgttaaattgtatatatgctataaagcaatagcagatacagaaattatgcataaagcattgcataatttatcagaatgggcaaataaatggcaaatcagaatatcaattaaaaaaacttttgtacttcatttggggaataaaaaccccaaagaaatatataaaattgatggaaatataataaatgttgtggatacaattagggatttaggcataaatattgataataaattgcaattttccaatcatgtcacacaaataataaagaatgcatatttacgtatgcgttctttatttcgggttattaaatcaaaatctactaggatttggattattttgtacaaaacttatgttagaccgttattggaatatgctcctgaggtttggaatccatctcttctaaaaaatattaaaaaaattgaaaaatgtcaaaaatatttcaccaaaagagttcttttcaaatgcagccttccacccattccataccaacaaagattagaataccttcaactgccgacacttgaaagcaggcgaaagctgtctgatctgttcatggctcataaaataatttatggccgaacagatcttaatccctttgaaatattcaaaccttctgaacactttaacattcccttttatagacttaactcgaaatataaattaggcaaaaaatttataccttttgcggggcgggtaactaaaatttggaagccactctataaaaggatcattgaaataaactcattaaatcaatttaaaaataaaattaaaactatctctattcccgtaaaatagaccgaaaaagttaaagtcgaagttttaatccattcaaactataagtgatttg

SEQ ID NO: 33922 - DNA, 692 bp, Heterodera glycines
  unsure (1)..(692): unsure at all n locations
tggacctggatttcctggacaaaaatccaggaaaatccaggtccaggaaaaatccaggttgccgaaaaatgacctggacctggatccaggaaaaatccaggcctggatccaggtccaggccgagctctaattgtcatgtattcatctcgctgttgtcatttcattcatttgtattttcacactaatataaaaaatttctttattgttttggcattgaattgtactgttcctatagtcaggtcaaaaatattgcaccaaaattttttgaaaagtttgattttctcaaatgaataagtggaaaaggtctaattttaagtcgaaattctcatttttaacgattaaaaaacaagccaaatttagagtcgctaaccatttcaacatcaaaaaatggtcatttgtactgatacgaacattagtgatttttgaaaattttgatttcgacttttttgttcgtctagggttcggaattggtcaaaacgggtgtcattttccccgaaatttgttcagtggcgatttttgtaattaataagctgtccaatatatatagttgtaagaccttttgttgtatgatttatttctgcaatgataaaagtgtggaacgaatgaatgagcgaataatttgatttattttgtgatttggtcgagcggaantgctactgtctgtntgtgtggaccctgccaggccatgcaag

SEQ ID NO: 33923 - DNA, 810 bp, Heterodera glycines
aattagatcccacaagaaatgtttagaaccacttcactaatttgatcaattgttatacaatattttactattatctttttttcagacagcgctttgcttccggcctcagattttgacatttcaacttctcattaatgactcatttccttatttacggtcttggtcttgggtagggccaggtgggaacgggattcctcgggaaaacctggtcatcttttttcagtgaccggatttttcggcaacgggaaaaaaggatgggaatcctctcccgcttttttcctttttaatttctctcaaaaatgactataaaaatacaaattttccccggcaaacgcctaccggcaccgctggacacccccctggtcccgaaaagattttggtagagacacgccgcaaaaaagcgattaaacccaaaaaaaggattttggcaattaattgaaaacgtagaaattctctaagttttttcggcattgaatctttttggattttaaatagataataaacaattttaacgaaaattatttaattattaaaaaaaaatctagaaacttcaaattcagaaaattaccagtttttgccagtactgtggaaatgttcgtacttgtttatttataataattaattccgaaaattcaatttttattaaaaaaattttgtcattaataaatagtaatcttttaaattattaaattatattttgtcatttgaaaaaagcaaaaacattctgaagaatcataatttttcagaaaaaaaatgtatttttctcgatttagcttacatgctgtgttttgcggaccccctcctgctgtg

SEQ ID NO: 33924 - DNA, 952 bp, Heterodera glycines
  unsure (1)..(952): unsure at all n locations
atttgaagatatcaaattntgcttggaggatggctggctataacatagacttaatgtaactactccaaaacaaggtgcagaaaaaagtaaaatatttgattaaaacattttcctcctatttattcaacgctctagatataaaaaagattatttgttaacaaaaactaggaatatcagccttttaagtgatatggaaaagtttgctagtattgaaaacagtggaatataaaaaaattatcgtaattttaagcaaaaaattaaagatgagcccaggggcataattgagaaaaattgaaatgttgagggggtttaagcaacaacgtgttaatgttatgaatgataattaaccacattgcatacgattaaacactgtggagtaattagagttatttttttaaatgtctttctaaattttgactatttaatataccagcaaaaggaataaaaaatttgaagatatcaaatttgtttgaggatgctggctataacatagacttaatgtaactgctccaaaacaaggtgcagaaaaaagtaaaatatttgattaaaacattttcctcctatttattcaacgctctagatataaaaaagattatttgttaacaaaaactaggaatatcagccttttaagtgatatggaaaagtttgctagtattgaaaacagtggaatataaaaaaattatcgtaattttaagcaaaaaattaaagatgagcccaggggcataattgagaaaaattgaaatgttgagggggtttaagcaacaacgtgttaatgttatgaatgataattaaccacattgcatacgattaaacactgtggagtaattagagttatttttttanatgtctttctanattttgactatttaatataccagcaaaaggaataaaaaatttgaagatataaatttgtttgaggatgctggctataacatagacttaatgtaactgc

SEQ ID NO: 33925 - DNA, 188 bp, Heterodera glycines
ctgtgcttagaccaggggcggtgggcgggtacccttgaggtggcaaggtcacactgctcatcagaagtttctcactagggtcttctctggcccagcctttgactgaagctggtctggagacaggggcgttagagaagtgactcatagatggcctaaataagcggggccactcaaggacccaggacagg

SEQ ID NO: 33926 - DNA, 69 bp, Heterodera glycines
agaaatctcgtcaaatctgcattccttcttctcgatggttcgtaatgcactttgtttcttggattcgta

SEQ ID NO: 33927 - DNA, 886 bp, Heterodera glycines
ttttggaatattttacgtgtcaaagggtgtgcatttaccctactcgctgtgcttgcccactgcatttcaaatagctggtaatttttatttctccggcctaatccagaaaaaatcactatctctttttttttggaatattttacgtgtcaaagggtgtgcatttaagcgactcgctgtgcttgcccactgcatttcaaatagctggtaatttttatttctccggcctaatccagaaaaaatcactatctctttttttggaatattttacgtgtcaaagggtgtgcatttaagcgactcgctgtgcttgcccactgcatttcaaatagctggtaatttttatttctccggcctaatccagaaaaaatcactatctctttttttggaatattttacgtgtcaaagggtgtgcatttaagcgactcgctgtgcttgcccactgcatttcaaatagctggtaatttttatttctccggcctaatccagaaaaaatcactatctctttttttggaatattttacgtgtcaaagggtgtgcatttaagcgactcgctgtgcttgcccactgcatttcaaatagctggtaatttttatttctccggcctaatccagaaaaaatcactatctctttttttggaatattttacgtgtcaaagggtgtgcatttaagcgactcgctgtgcttgcccactgcatttcaaatagctggtaatttttatttctccggcctaatccagaaaaaatcactatctctttttttggaatattttacgtgtcaaagggtgtgcatttaagcgactcgctgtgcttgcccactgcatttccaatagctggtaatttttatttctcccggcctaatccagaaaaaaatcactatctccttttttttg

SEQ ID NO: 33928 - DNA, 93 bp, Heterodera glycines
tttaaggctaaacaaataagccgtattgtgatgcatttgccaacaattattggccctaattcagttatgtgtccaattaatgccattcttatt

SEQ ID NO: 33929 - DNA, 669 bp, Heterodera glycines
ataaggtcattggctggtacttacttatgctgcttcgcccgttttttgcttctttcggttttcgttccctattaaatatttttatgctaaaaagaaaacaaagccgaaaaagggcggcttatttaagcaaaagaatgcccaacagagcaaaactccgtccgccccccggccattcgctgggaatgaccttgggaagagagggggaggggggaagaggagggtcatcaacacaaagccaatcgaaaggaatcccccgctcacaaatcagccaccaaaagcagtagcagaacagacactttgctgatcattttgtgaaaggtggcgaccgaaagagaaagctgaaaattgcgcgaaagagagacactgcccacaaatgttcctcgttttgattaacgcaatttgacagaaaattggctaataaataagagaaaactctcgttgtctctcgccctctcctctctctccctctctctcttctctctctcttctctctctctttttctctctctctctctctcttctctctgtctatgcttcccttccttctctcattcgtttcttctctttctcctccgttctcttccgcctttcccttttcacccgtcatcacatttttcttcgtcctccaccatatttggagaattccgttttcggctcctttcacccccc

SEQ ID NO: 33930 - DNA, 954 bp, Heterodera glycines
  unsure (1)..(954): unsure at all n locations
ccctctctctcctcctctctctttctctctctctctttctgcctctctctcctcctctcactctcgcgttaattccattcccggctctctctcatctcccttttctttttgatgacacccgcttcttcttctacttcttctttttctcgtgcttccagtcgatccacctgccaacaactgtgacataggcagcagaaatgttagaagaaatgtgtgaatggcgggaaggtcaaagggaagcgccgccgggcacaccccgggcacttttgacactctctccaattgccaatgcttcaattggcactctgccaacacatttcaatgccttgcactactggtacacataggtataataaatggaataccttgtactattacattccattcattaattaagctttgttcggacggagttgcccccccccccccctctgcctgccccaatttatcattttgcgtttgccatttcgtttattgccaattttaattggcaacaacactcgcacagagcaaatccacacttgtgcatttgcacactctttgctgtgctgctgcgcttttcagttcagctttttttttctggcactttttttgctgcctttgccgatccttccgagaaaaacgaaacggaggaaatggcagcagcgaataatttgaatttgaattgataattaattaattaattggttggttgtcgacgagacaaacggaagggggaaaccaacgagaacgaattgctctctgcttttttggacaaaatgcgacagtgcaaacagaaagttgacgcggagtttgatggaacagccgggaaatgctaaagatggctgctatttncatgctattcaaaaaaactttgaaattgatattgaggagaaaagtgcatgctaattaaaataaaatttaacatttttaattatttaaatctttaaaatattgtttgaaaaaaagtttttt

SEQ ID NO: 33931 - DNA, 94 bp, Heterodera glycines
gtggtgattttttgtgtttgtttgtttgtgtggcgttgtgtggtacacaattattatgtacacacatatgtacattgcataggtaggtacatac

SEQ ID NO: 33932 - DNA, 913 bp, Heterodera glycines
tatgagacggagggctgtgcacaatcgccattttatttcacagaggatttttatatttagaggttatcccagaaaaatggctatctctttttttgataaattttatacacatacaaatgctctcgagcatgatagggagggcggtgcgcaatagaccttttatttttgagggaatttttaaatttatactctatcccagaaaaatgtctatctcttttttttgagaaattttatacctcacaaaagcgcttgcgtatgagacggagggctgtgcacaatcgccattttatttcacagaggatttttatatttagaggttatcccagaaaaatggctatctctttttttgataaattttatacacatacaaatgctctcgagcatgatagggagggcggtgcgcaatagaccttttatttttgagggaatttttaaatttatactctatcccagaaaaatggctatctctttttttgagaaattttatacctcacaaaagcgcttgcgtatgagacggagggcagtgcacaatcgccattttatttcacagaggatttttatatttagaggttatcccagaaaaatggctatctctttttttgataaattttatacacatacaaatgctctcgagcatgatagggagggcggtgcgcaatagacattttatttttgagggaatttttaaatttatactctatcccagaaaaatgtctatctcttttttttgagaaattttatacctcacaaaagcgcttgcgtatgagacggagggctgtgcacaatcgccattttatttcacagaggatttttatatttagaggttatcccagaaaaatggctatctctttttttgataaattttatacacatacaaatgctctcgagcatgatagggagggcggtgcgcaat

SEQ ID NO: 33933 - DNA, 886 bp, Heterodera glycines
  unsure (1)..(886): unsure at all n locations
tttgtcttattgtaatgttttagtgtttatagatataatgaaagtgtgcgaaaaatatgacttattgtactagagaaacataattgttgttttccttttccaataaaaaataataaaatatctcatttttattaagttaaataccaaattttattatttgcaaattcaaatgaatatacacttaaatggaaattatttttaaataaaaacccgctctgatatgtgggtacgcgcagacattctcttttcggagatggtcccattaatcgatggccaagaaaattgattggaaaattaaaagatgtgaaattaaatgacaaaaataaatttaaggacaaaaccaaagtcgcgaaaattaatgcaaaattaaggacaataaatatattctaaaattttagaaatttataagaaaagagaaaataacagtaattgaaagaattgtttaaatagttttaaggagaatttgaaaaattgttgtgttcggaacacattatttttgtagttattagtttacttttttttaacataatttttttcatttgaacatgaataatgatatatttaaaataataagaattagcacgtatttttataagcatttgtgctactaaatttcaaattgggggggggaagagaaagacaaagaaaatgatgcgcgattgggagagagaaagagagagacgagagagagagagagagaggaaaaaagagaagggagacgatagtgtagagaatgccgcattttcaaatcttttggttgaaagtttctaaaaccattgtaattccattanattttacggtattccggacccgatcaccatatttaaagtcaaaatcaagtgaatttttcaaattggacccaaaagccaaaaatagaacatttttg

SEQ ID NO: 33934 - DNA, 787 bp, Heterodera glycines
aatcccgcgcgggatcccgtcccgcgccggtctcccctttagcatcattacacaccccgcttaaatagcaaaaaatactattttatagaattatttagtcgcctttgcaattgtgcgggcgaaaaagataaagagtgagatttttgaggatttttgtgcataattaacacatattctgacattttagcattttttataacatatttcaggatttttagcacataaaaatcccagctctaattatttgatactataaatcggcgggatcgggactcccgttggatttttacgagattcccgttcgggactcccgctcccggaaattttttttaccggactctatttgataccaaatgaaaccttcaagcctacagaatttttttgtataactaaatgtagtgttaaaggcaacaacaaaaaattcattttctaggtttttaatgcaaaattgcaaaatacgcattaaatgccacaaagtcgccacttaagaaattttagcccccgcccctctccgatttgcaattttattgtttgttgctcaatgttaccaatgccgtcgcattccacgccttccaaaggaagttgtcacaaatgagcgcggcaattgccgctcaagttcttcaattcggacagaagaaaggacagcggagaacaattctggttccattaaaaattaatttccacctgtaataaatctctgaaaaatttagaggtaaaagcattttgatggcaccccctttaaaaaaattccaccatataaaaacatgtttccttgttcctggggttt

SEQ ID NO: 33935 - DNA, 956 bp, Heterodera glycines
  unsure (1)..(956): unsure at all n locations
ttttcaattttttttttcttttttattgtcgcaattgcttttagattaatggaaacgcttaaaaattttaaactttatgatttattcaaagtattggctctaccagacaacgaattcgaaaaatggctcaaagaacttaaactcctacacaccacccgtttttgcgactgtggcacggaaatgagctacaaatggattaaaggacgtcaacatcaaggatcctgtcactggtcagcatacaaacacaattgaatcgacgtggcagaagttcaagcagcaacacaaaacgagatttggcacgcaaagatcataccacttttttccacatacatttctgattttttgtggcgtaagcaatttggaggaccggatattttttataatttgtggacccaaatcgcggaattgtacccaataagcacataaatctccttttatttgttatttaaagcaattgcgacaataaaaaagaaaaaaaaaaatttaaaaaatttgactcaaaaggcggatacaaactgaatgagtgagtacctgctaataaaactctatttaaaattagcaatttttctcaccaggatcggattcatattgcttggatttccgcttccatgcttggaagaattttaactatacttatttccaagattgtacttggaaatcggcatttctgaaaaggtccattttatgaaaaaatttttggaagaatttttgtcagaaataaacactgcattttttagatttcaagaaagaatgctaaaaaatttctgaataattcgcaataaatcaattaaagcttaacccattttcacctttanatccataaattccccggcggtacctttggcccgccggaccagcctccactttcaagccctggtttttttctttttcctcattagctcatcacacacacgctgtctctctctctctctctctgtctccctctcgctttctct

SEQ ID NO: 33936 - DNA, 234 bp, Heterodera glycines
cgcgctacctgaccatttccgccgtgctgggcgtggtgttctgcctcggcgcctgggtcacccacggctacgtctcggtgggcttcgtggccgcactgggctttgccaacgcgatgatgtggccggcgatcttcccgctggcgatccgcggcctgggccgtttcaccgagaccggttcggcgctgctggtgatgggcattgccggcggcgcgatcattccgcagctgttcgccg

SEQ ID NO: 33937 - DNA, 1248 bp, Heterodera glycines
aataaaaaattattgtttactaatttcatctatatggatggagatttatacaagaaagaagaattaaaaaaaggcaagaagcgaagaataataaaaggaaaattaaattgtcacaaattaataagtatttaaaataaaaaattgttaataagtatttttcatcaaatttacatttgggaggaaaataaataaatttaaaaagaaatgcaattaaaaatgtattgaatgtcagttaataaaagttataaaaaaaattctaaaaatatattttaatcaattcaaaaaaacaaaccattttttaaacaataattgaaacaattaaataaatgtaagaaataaataatcagaaaacagaaaataaatttaattttttaatataaaaataaacacttaaaagtacgaaaaaaaagaaagtttaattttcatttgtttaattcaatcgcttgaaactgctgatgttttggtgtgggctttggcggtgaaattggatggatttcttccaatcggcccccttaatttgagttgatggttttataggagtcggaggggggggggggggggagacaaattgttttcgcaacggaggagcaatttttaattcgatcgatctattcaattcatcacaatttatcggaaaaatttatgtggtggcggcggtgtcgtagtacagcagatatgtacaaaaataaaacaccacccctccgcagaaaaattgaacaaaaataaatttaaaaaataatttttaaatttgttaccgtacttcttacagttttctggggggggggttaaatgacctgggaaagattaaataattttaatgaaaataattatttgaagaaaactgaagttatgatttatgtctgtaatgcataaaaaataaaattctggcgttggccccttcaaatttaatgaattttcgaaaaatcagagaatgcaaatcaaacctcgtttaaaccaaaccaaaaaatttggacatacaaattaccctcttaaaatttgaaaggagtatcattcagagataatttgtcattgatcaggtgatctcactaattgtgagttttacgtgattaaatacattatcaaatcaattaaataaaagtaatgttcattcaatttaagattaaacggcttttcgacatttttaaattatcatacatttattatgtattggaatcgaatttaaaacaggcaaatccatcaattaaatatcccaaaattggagtaaaaggaataaaaacctcccgcaaa

SEQ ID NO: 33938 - DNA, 202 bp, Heterodera glycines
tctagagtgtgatcacacatttttaactccaaattcatttcctctccagacctgtatttttcctgtacttttgtacagaaaacccaagtacagtctttttactacaaaataccgagcttattaatctatataagtgaccttatttttggcaaatgtttatctgagctcccaaactcaaaaacactgagccgagtgggcgctg

SEQ ID NO: 33939 - DNA, 1490 bp, Heterodera glycines
  unsure (1)..(1490): unsure at all n locations
atgttatttaattaagaataatttttagattttcactacataaaaaataacttagttttttgcagcttgatttaaattatttattttattgtagcaacttggtgtaaacgtgccaatttttatattgcgtagctcacatgcaattggaatgttatttaattgaagaaataatttttagattttcactacataaaaaataacttagttttttgcagcttgatttaaattatttattttattgtagcaacttggtgtaaacgtgccaatttttatattgcgtagctcacatgcaattgaaatgttatttaattgaagaaataatttttagattttcacaacataaaaaataacttagttttttgcagcttgatttaaattatttattttattgtagcaacttggtgtaaacgtgccaatttttatattgcgtagctcacatgcaattggaatgttatttaattgaagaaataatttttagattttcactacataaaaaataacttagttttttgcagcttgatttaaattatttattttattgtagcaacttggtgtaaacgtgccaatttttatattgcgtagctcacatgcaattggaatgttatttaattgaagaaataatttttagattttcactacataaaaaataacttagtttttttgcagcttgatttaaattatttattttattgtagcaacttggtgtaaacgtgccaatttttatattgcgtagctcacatgcaattggaatgttatttaattgaagaaataatttttagattttcactacataaaaaataacttagttttttgcagcttgatttanattattagttttactgtttacgggaaatcgatgcaattgctgccgcttcttcatcttctgcttccttctttcctttcttctttggcttcttcttctgcgaaacatccaaataggtagttgcagccgaaacactctcaagaaattcatccagaatttcttcgtctgtctgttccttctgtttttcgatcggaggttgctgcttaggttgttcattgctcctacccattgttgcggcggaaatggcagaagcaaactgagaggcgaccccttgttgctgttgtttcatctttggcttgggtttttctgcaccaattcccatggttgccgctgaaataggtccaaagaaattcgaggcgtcggtttgctgctgtctcggctttggattggttttcttttgttccacatccattgccattgtcgctgcggcaattggcgaaaagaaatcagaagcttcggaacggttctgatgtgtcggttgttgagttgacatttgcccaaagtcgagccccgttgttgccgccgaaatagaagaagcgaaatttgactcctgnngctgagttngntgagctgaangattgacnngtagtgcgccaaattcaactcccaaagaggcttngcgaagagcggaaaagaacgnccgggcgtccgctttgtgctgntcctg

SEQ ID NO: 33940 - DNA, 1297 bp, Heterodera glycines
aatggacatgggtgaaagttggcattcattgaaataaaataaattcaaattttagattaaagatgcactattttttgaatttgtcaaaggattagcgacaaattttgagaaattttttaagatggctaacgaatattcaaattatttacgtcagaaagggaattttgatttttggtgatattgataatataatcatgatctcttctgggttaaacgaaactgagaaaatgaaagagcatttgaaacaaaaatatgaagcccatcttggcgttatgtatttgatggcagagaattggcaatgtgacaaaattgctcatcaattaactgcaaatgaaaatggaatgaatgtcaaaaatatcgtaaatatgtggacattttctatgaatattttttccgattgtatgcttatggtttgtttgatctgtacataattttgaatttgtctttttattaaaattaattatgataataatttattaagctaaaaatttgaacgtgtctgaacaattggtaccattgatgaagccattacttattacagaaatttctctggacagtttaattggagttatcaaaaatttgaattatatttcgaaatgtttttggcaaagagataaaaatgaaccatggaatttcaattattgggagatggatttgataaatgaggatgaattaaattatgaaataaaagaggagaaaagtggggaaaatccatcaaaaaatgaaattgaaaaaaattgcaaaacttcgtaaagaatttgaacgaaaaatgaaaatatttgcaaaaattccaagcaaaatgaactcctagcaaaagacaaattggaaaaagcaatggaaaatgcggcaaattatgaggaaaaagaaaatttggaaacagaatattatgacaaatttgacattttaatttcgtcgcccttctcatgaaaaaattctttttttttacaaaagtttcttttctgtttttttttgtttttttttctttttcctttcgaatgcttctgtctttttcagttttttattttttgttttgtcatttttctttaattttatatttataaatttcacttttagatggatcttctaagtctttcttttgtatttgcgcctattttttatttattttcttagaaaaaattgattttaaatatctaaaaataggtaataattaaggatgatattttcaggcaaaagtctatttttttcctgagctccccgtggcctgaaacatacgaaaacatgattttttgggctgtagtgaagctacttttcgacttattaatgcctattttctagg

SEQ ID NO: 33941 - DNA, 1046 bp, Heterodera glycines
  unsure (1)..(1046): unsure at all n locations
tttgaacaaaaaatcataantttgaaaaattcaaaatttcgatttttattcgagttcgggttagggattagaaattagtcaaaatacatgtcagattcgtgattagcgacctttaaaaccccggataaaaaattatcatggttttttatcttaaaaaaattttgcaaaacaaaagggtccccccttttgtttcaaaaacggccacttttagattagcgccgaaattccccccccccccccgacactcatttttcaatttcataaaacatttcctttctcccactgaagcggtgctttttgttctttggtttggggtatttttggaggataaaaagaagggggatagtgacgtgggagggaatctcttctctcatccctcccctcccatttcccctctctctctctctctctctctttttcccctctctctccctcttttcccttccatttctcctactctcttcccctctctcttcccgtctcctcattatttctcgcatttcctcccctcccccttgcatttgcagttcctccctttgctctccctcctcctcttccgttgcttttcccgcgaatttcccccctctggccatgtccgccgtctctcccccgtgctcgcgccttccgtccgtcttttccaccttcaattccgagcagtccagcggccagcactcgcgggccgagagctgtctcgaattggaagcgctcgccgccgtccatcgattcgcaggaattgtgcaggaaattgctgtgtccgaaatggtgcccaacgccccctccccctctcacttccccttccgttcagctcccccgcactgccgatttgatttttgtgaatgtcaccactttggagggtccgtccgccgtttgtttggcatttcgtccatttccgtccctttcagcgcagccgttttgtctcgaattgacggcgaagggatggcgcgtcacttcgctgcgtaccgattgcatgcagggcgacttcacccgcatggaattgttcaccanttactatcaatcgctgcatcagttgatggacgcaatttcac

SEQ ID NO: 33942 - DNA, 1311 bp, Heterodera glycines
  unsure (1)..(1311): unsure at all n locations
aaaaggtttttttttgaattggcaaatatttnttatcgatgggaattctttttaattaaattgtaatttttctttgctattccttaaacaaattttctattttaagagaaaacataaaactcaagcatctgagttgccatattactctaaacatatttttgaatagctaaaaacccataaaagcctttaaatttaacgaagactccaaaaacaacaataaattgccaaaacttgcaaccatctcctccaagttacgaggagtctgacaaacgacagcgagagcttttgctgaactaccaagaattttccaaaaaaaaaaaaaatttctgaatctacagtaacaaattactgtaacagtctcccaccatttgctttcttttccgcttcttctccaatgctacaactttgcttcatcaccaacagcagcagttcgtctcgccggtgccgctcctcctctatttctgctgctgtcgtccatcttttgttgctgctttttgtgttgcccgccgtgtccgacgcgtacagttcaagaacaacggtacaacaacactcactacagcaggacacgttactgtacaagcgcagtgagcggcaatgctcggccggcaatttctgccgggaggaggacttcttccattattatggctgcagctttggcatttgtgacttccacctgcaggtcgatcgattttggcacctttggcgtgtttttgtttttacccataaaaatttgattttttaaggacccaaaatcagtgaaagccgtaatttcatacaattattagagcgttgtatttttttcattggggcccaatttttattttgaaatcattttttagagttagttacggaaagaggttctctgatccacccacgaatatggctgctttttgaacattccgaacttctgacccgaattcgaagaaaattcgctttaaatattcgtttttacatataaaaaatgggatctttctttcaacaaaaaatggtaaaatagtggcaaaaatagtggcgaaaaagttctaaatttagggcgtaattttttaaatagctattttttaatttgaaaataatttaaaattaaggcaaacaattttttttattcactgattgcagttacaaaacattttcttagcaaatattgagcaagaaaaaaaaattgnggtaagaatttttgagaaaattttcattcttaggggtgtaattttgaaaattttagtttgattnctaggggtgtattttttgaattttttaggtcgattcttggggtattttttcatttttattgcattttttgcgaaattttcaaaa

SEQ ID NO: 33943 - DNA, 784 bp, Heterodera glycines
ttttttaaaatttccccttaaaattttaaaagtaaccattaaatgagagattttttcccttgcaaatttttatcggtttgttccggtaccggcggcactagaaaaacccgttccggtttttatcgttttgaaaaaaacagtaattaatggtagcgctatactcaattttataaatttaatttttcattttttggtcccttggctaatttacgaaacggcggatttttgaaaaggtccatgctagcagaatttacaaaaccacctagcataatttttttttcaggccaattacggtgccgcagcgggggccctacggtacatggaacttatgggattgatcgtatggcttttcaacacgggcgtcaaacaccgccaattgctcacttacatttcaaatgtattggacccgaatttcgacaaagtatttcctccggtgttggccaaaatatgcacaaaagggcccgtcgaatcacatcaattgttcccattttgaaacgagcattatttcaattttgtcttaaatttgttgagaaaatttacgaatttttgaaaactttgcatttaaatcaattttacgtaaaatttttcgaaaaaaaagaaaaaattttctgtccaaaatcgcgccgctgccgataaaaaaagacgcgggggggatgtgacggcacaaaaatgccctcaggccgaaaatttatttattaagaattatttatttatctataaatatttatgtgccttattctgtaatgcttatttcggatgttctctacgattgaggtacctatta

SEQ ID NO: 33944 - DNA, 607 bp, Heterodera glycines
taataataaattaggaaaagcactaatttgtttgacgatggttatggaagtgaagcgacgcgagtacatcggagatggacagggtgacctcctcccacgggcttttgtcatacatgtgaataaaaaagaaaagccatcgtcaaacaaaaacatttttttgttttttaagagagaaaaaaatcccatcacttgttgcttcatattctgcggaccaattcaatggcgcatgaataatttcagctacattggatgatgagagaaataaaaacaaaaatgaataaattgagagaatttttgtttttagacacatcaaaactctgtccatcaaataacacagatgaattatgcaaatatgaaccaattcaattcttttcctacactaaacggtcaaaaatacacttataaattgttaattatagtgaacttttttgtttgattttaggcactttgtataatcaccagcaacaaaaacaacaacaaataaattatgcaatagaacaacagcagaaacaacaaccaaagacggctcaaccgaaagtgaaggaaaagccaaatagtgaaaagagcaccagcaaaagggctgaaggaaaagcccccgaaaggaatt

SEQ ID NO: 33945 - DNA, 815 bp, Heterodera glycines
  unsure (1)..(815): unsure at all n locations
ggaatggctagtattgctgcctacatgttagcctcaacagcagagagaacaagcacgattttgattggaaatttcataatagttttaatgtgaaatcaaactatttatattcccaggatataaagttcataatagtgtaatggattcaggatatgtcctgaatttttaattttgccgaaatttaaaaaatcacgtgaatccagcatgaaatcaatgcaaatattggccgtcctgatttgttggatttgttctgacttttgaggaatcatgctaaccaagcattaaaaccgtgccaatttggcgctcccaatccgttttattaacttagttgtaactttagaaatgtcttgatttttagagatttgtcctgaattagtgaaaataaaaatgaatgccctcctgatgattattacaattacccttaatcggagataggcaaacagaaaatcaaaatgtctgaaatgttctgaattttgaggaatcacgcaaacgcagattgacaagctaaaaaagtaaattgtccttatttttcctatttatgctaaattcacaattttcatttttgaatacccataatacagtcatggtcataagtgttgtcccatcatgctttgaaaaaaataattgcgtataaattgtcattttccaatttcaacagataagtagcataccattggatagcattttttatgggctttccaatgataccatatttgcatttgtgacataaacatttatttgatttattttaccatattcacaatttgatcaaaatataggtggtcaaaangtgttgtccccatttcatttttaaa

SEQ ID NO: 33946 - DNA, 1326 bp, Heterodera glycines
  unsure (1)..(1326): unsure at all n locations
aaaatgtcggggttgggatcagggacgggcgaagctcggcttagtactcgaagccgaagcccttntaataaaataaatatattgaatataaaacttttggttaccggcgatgccggtggcgcctccggggaaattntaataggcactagtgctgctcaagagtctcggtctcgagcaaatttctcgggttttttgggctcggtctcggattttaagtctcggtctttgagactcgagaccgagacttttacacccctaatgtttgcttttggtaaatttttataaattttaggtctttgttcaatcttgtcgccatatacgtggtcaagtgggttgtattcttggatattttctttatttttgcgttggatctgtcggcaatttcatcgccgacgagagtgccagaggagaaagaagcggaattttggttttcaacgccgacggcacggcgagggaattatcggaggatgaggaaaacgaatgggcagggggattttccatcacccccagccgaaccgctggacccgaacaaaaaaggaagaagtgccgaggcgggcgacgctgatcggaaaatccggagggaggacattcccggataaaggccattaccgtgttaaacgatcccatttttatatttgttgacatttttcatcccctttccttttttcttatcgctttaaattttcatttcttttcattttggcttatttacataatgtttttcttcaacttcgccatttgccttttctttccaatttttctgccgtttttcagatctgcctccgatttttgattcctttgttcacactttctcagatcgccatttccatttggccatttttgcattcatctcattttccctttgtttggcatttttacccgccgatttttgtacccatcggcgtcgctttttcgcatcttaatctttgccccccccctccaggaggaaatcgttaggtacttaaagtattgtttatcagttaatagcaacaaccaacaaccgccatcttgtttgtcctccccaccccctccccagttcattcccttgggcccggacccaacgggcagcagaggcaaaagtgctgtgacttgagtggagctcagtgaacgatgcaatccaaatttccttcccgggagttactcccgagggagagtgccgtcaatcaaggagggcagtcctcaaaacatcgcgtgactgttcgatccactcggattactcgccccggccaccctccagccaagcagtacttnccaaggctgtgngacactacacacaattggngacgcgcctctcgaaccnggacgatgtgcgagaatggaacagaa

SEQ ID NO: 33947 - DNA, 596 bp, Heterodera glycines
  unsure (1)..(596): unsure at all n locations
gtgcctcttttgtcgaaaatttgatgattggaacgaagannncgagaaaagcgagcggagtgtgatgtactgtgaaaaggaaggaatgcttttattgccataaagctttgatttttaatttactaaatctcaaggctcttaaaaaggattttgctgggcaacggacggtcgggcaatggaaatggcacacatttgtaatcgaaccatacaaacagcttcggttcaggtcctttgtccttgctaatttcgattggtctccaaattgtcaattcggttttgccattgaaatgtttgtccaccaacgcattgaaacgtggcgaaagaagtgccaatttgaggccaagttgagcatggtcaaaggatgggaaaatgtccatccaaacgtcgttgcaaatccaacagaaattatggaaaaacagtttagttaaataaatgacgaatttgtgtgccttttaaaatccttttaccgtcggttcatttttgaggcaattagcacaatttggccgagttccgaatgatgtcacacaaaagagcagaataataattcgttagaaactttatttttttaatgagagtcaaagcggaaaaccaaacat

SEQ ID NO: 33948 - DNA, 862 bp, Heterodera glycines
  unsure (1)..(862): unsure at all n locations
tattcaagtttcccttattaagtggtggaaacattaaagattaaattatagctgtccctgagtgatcacggaaattgaattcaaattaaaatttatttttcctaaatttcaaataacataatccttttttaataaataataaattaaattatttgcaggcttttaaatatatttattcattttctcttttttttctttgccttcaattctctttcttttccgcttctttttcttcttctcattaacctctcttctcgggaatcaatgttttgtacagtttttcgggctcgtccaacaacaatcgatcacacaattctttgccctgaaaattaattaattaatttaaattatttttatttttaattttttaaagccaacctggatgaagcaatggtcctggtttgacacttcgtacttccatcccccgaagcgtcctctgctgtaaatgcaatgcttctccaacacttcatgagtccgagcaagttccacatctctctgatcaattaattataattgaaaattaattattattattattatataattgaaataattctaaaaatatttattgacaaattaatccaattttaattaattttaataatttaaaaatatttattgatcaattttattaaaaattaatttatttttttaattaactgaaattcaataaaaatatttattcatttttttatttcatattttaggagctttcataaaatacagtaaattttaacttttcctcaatattttgctaaatattttggcacaaattttttttgtcaatattttaataaatcctgaatgttttttactatttagaaattttcatagttttaattannagagatatttaattata

SEQ ID NO: 33949 - DNA, 1303 bp, Heterodera glycines
tttaatcttttttctcccgtagaattgaatttaatctttttatttacatttcgaagtttagtttcacttcaggacgaatttttcattaattttttcggcttttctttaaataaataattcctttaatcttatttgtttatctgaaatttcaagtttttcgcggtataataataacagctttaaatcgaccacttgtgcttaactgagtgattttttccacagaaaaggcagtattaaaatataattaaatttcttataagtaagatccggatttgcatggatttctatattttttttgcacttcttaaattgtatttgatgtctgacatcttcgctcttcaattattccaccacatttttgtgttaatatgtttgtatttttaaagatttatttataaggtattttttcatttatgtagtttaacgggattttcaaaatattttattttgtgaattcatattattgaaaaatcatattcgaatccattaataacacagcaattttgaatatatattatttaattaatgagaatttaaacaatttcacatggaaaaacagagcgatgttctccattgtttgacctgcaatagttagattttttgaaataaataaattttattttaaaatttgcttcgttttccaaattgctttataattacagtattttattttctcaaatttttactaagttagtttttaagtttttcaaaattatagatagtttttataaaaatctattaacaaaattcattaaattgtttaaaaatcgcaaatttcgtcgtttttcgataaatctgttaacaaattgcaacaaattttttaaaaaatttaaggcgacacctattgtcacatccggacccaccaaaactgctgtttaatatccctaataaaatttagaacaaagctatattggtattttttcttgataaaaaatttttcaaaatatcaaaatatccttgtccgtatacggtccgtatttcctggttattgttttaacggactagggtttttaggggttttagtccgttagtccgtagtagcatgcgtgctgacgcgttttctaaaaagtgccacccatgcgcgtttcctaaatacgccatttaatataatataaaaattatacaaactattcgattgaattgatttttattatttatgaaaagaagtttctgtctagattatcattaattgtttgccaacatcataagtgaatataagtttataaattttaatttttacttattattggaataaatttaaaaagtgaatgcacataataatacatatcatatgtggcagtaa

SEQ ID NO: 33950 - DNA, 928 bp, Heterodera glycines
tttaatgatttagcgtggaagtgccgacagaacgaagggttaagcgatggggcctaagcgtcatggaactcgtgcgcgaccctatcggacggcaggcaaatgaatgaatgacgaaccaacggttcctttccattttctcaggttctcgaatcctttttggattccgagttctcgtcagagaacctccgcttctggtgttgcatccaggacctcaaattctctcccaattgtcaagttaaaacaaaaggccaacacattttggacgagtttcttgctcccggtgcgccctgtcaggtcctttcctccgttttttgcttccttcggtcaatttttacattaggttaacgtcgactctagaacgcttgaagaaacattacgatgcttggaggagtcggaccaagcattgcgaaaccagaggttcgctttctcagtttcggaggaacacgtgttcacactgatgagcaaagactcgtacccacgttttctccgatccggcatttacaaggctgttttggacgctgccaaggcaaagggtggcagaaaacggatcattgacctgatcagagagctgtcagggagtgccgtaaacactaagaaagtgcctgccaaataccacaaaacatcgcgggggagtgccgatgtggacaatacacaacaactgtcgttgaacgccaacaacttccccaaacagtgctcctccgactcattgcctgtgaaagtgggcagcttgggcggcacttcgccatcactgcaactgccttcgtccggcacttctagcgccagttctcctgcgcttcagacaaaggaaagcaataaaagatagtaaaacacgtctttcttccatgtttgttttcgtacccacgaaaggaatgtcttgactctataaaaatttaaaaaaatgacaagaagcattgattcgattatggaa

SEQ ID NO: 33951 - DNA, 563 bp, Heterodera glycines
agacaccctgttttttgggagtttgaccacttcccatgaaccgatcgagctgaatttttaactgtacgtagcaattctgaaaatattaagattataaaaaggagaaggcgaaatgacgacggaaaaaaattttatgaattttttcccgaaaaaggagtgttaatttaaaatagagacacttgataaaaacgaatcaaatctcaacaactaccaaaaagaaactgataaaacaagctaaataagaaagaacaaatcttttttcacatttctgtttattttgcgtacagaaatatgtcttttggggagagttatgttgaattttctaagttttcaggagaaattaagggccaaaatgcttaaatcgcctctaacatttgcccaaccgaatcaaactaacagcaatcagctctaagataacgtacagacatcctttaagcattttttattcattttatgccataaaaaaggcattgaacacaaaatttttgcgggtgaaaaaatacgaaaatctgagtaaattcgaaaaaaaattctagggggttggaaaaaattttccgtagaag

SEQ ID NO: 33952 - DNA, 1392 bp, Heterodera glycines
  unsure (1)..(1392): unsure at all n locations
ttgcgagtttcgttgatattttttgcgccatattgaaaaagttcccaaaagtcgtactttacgacttcgcttaccaatttaaatatttttccatttttctcgctaaaaatccatttcgttaattttgataaaaaaaatcaaaaattttcaaatttttatttaaattatgaagttaaaaaagaatctttttggtttcaatgacctttcaaacactttaagcatgtgcttgctgtcttttgacaattttctgtaaattttgaattcgtttttcagtttttccgttatgtaatttggcatattttctgtattaaactccgtaattgcgacacataagccaaactgttcggagtttccgttataaatctgtcatttaaaaagtgaaactttaacaaatgccttaatttgtcattttgtatttggtaatatgtgatttcgtcagtgataataatcattttttacgaaaaaacgttttaatgtttcttaaatttaattcgttcgatatttaaattcaaaataaaattatttgctcgattgtcaacctaaatttggccggtcacttacatatctaaaataatttgtattgtgcctcttttttttactactttcatctcctgtgtgttcatttctagatggttggtagccattcattctgctttaatgtcggaatttcgcttttaaatttcttaccaggggtggagcgtgaccgcgatccgcaacccggcaatttgaatgcgtgatccgcaaccgcagaatctttctgtcagcgttccacccctgttttttactaataattttgaatttctgcactttgagtatgttgatgctcttagttcgttttctgtctgcaaatcgaatcgtaggcgtcagccaatcacgttggaagtggcgttcaccttttcgagtgtgtacaagtaactaattttcgcgcagccccgctgaccgaagaaggggcacatgaaaagcacaaatcataatgggttctgcagggcaacaatttgagaatacttgcagaggattttgcaaatcgtgactcgttagaatatttacaagcctattcttacgactccatgaattttttgtaaaatttggctaagtgtacgattttttatgaattaatttccactgacgaaatcaccgggaaccttgtatttcatattaacaaatattttatttgtttttccattaattaattatttattttttatttaatttgtatttatttattcacctttatgtttttttcttctataattatgcttcggtcaacactgaaaaatgagtgcccaatcttttncacggtgccataatccctnncaataatttgctcatcacaatgacttttcgccccattgcgcgctgtgaaacttcttgcagcnaactcactgaattttc

SEQ ID NO: 33953 - DNA, 1466 bp, Heterodera glycines
  unsure (1)..(1466): unsure at all n locations
gatcgtcaccaagttcttcaagaacgatgcgcgtgccgtgnatcagtccttctttatcacttttgttgataaggagaacaacgacggcttccgactttgagtcgcagacggtggggaggcatcccagagtctgtgcgccggttcaacgctgccacttcggactcgatttcatcgatgtccagtggacgctcgtcaagcggcttatccgaggacaaatattcgcgcacttgaccaggcacattcgccatcatgatttcgttgatctcatcacacgtgtcaatgtgcggagcgagaatcaaacgattgagcagctctttgtcattgccaaggagttgttggaagtttggatagacaaagtctatcaactcttccctgctctttacgaggaactgcggaggaatccagaagtgttctccggtctctccgaggccgatttggcggcacatttgcaagtacgcttgctgcccttggcccaacctctggttgatggtcaatttcattgtggtaaactgaccaaacagtggattggtttgaaagcaggccgtaacttgtgcagttaggccttcgtgaggcacgaccggcagtgactgtttaaagtcaccgctgaatatgaccgtttttcctccgaagaggaggtccttgtgctggggaattgccatttctttgcacactcggtcgatgacctctatcaccgtgttgtgcagcatggtgatctcatcaatgatgatgagttgggcctcacgtatccgtcgggcaaagaagctttcaagcggaatgcttggaagcttgtctagcgagacttctctgcctagacggaacgtggaatgggctgttttcccatatggcagcaagatagccgcacacccagtggatgccgtagcaagcactttgtaggtgtatgggaccttccgcaatcgccttataatttggccaaacagaaatgttttcccggtccctccgtcgccgaatataaagaaacggcgaggtacagtcgcatcccttgggtccgactgaattgccttaacaacagcatcaaagaccgtttgttggtcgctgttgagtggaggtggagcgttttgctgctgcctaggattttgctggccaggcgacatattcagatcatcatcaccaaagaaagcttcttcaactgccaaattgatatttttggcttttgaatttggtggatctgggaggccacagtgcacgcagcttgagttaaagaagtgcaatcgccaatcaatgtcggctagcgcttcctgctcccgtgcttggcgtatagccgcactggtgatgccctgtggattgtacatttggtctttgtacttgttccacagttctagggcattactccgctgccccnaagacgagatgctcacgaagagccatctcatctggtccgncagcgatgcaggctgctcgccngagcgtttgtgccaaatttgtcatcttcagaagccatgctgtaa

SEQ ID NO: 33954 - DNA, 987 bp, Heterodera glycines
catgataggaagtgcggtgcgcaatcgccatttaatttcacagagaatttttaaatttatcttatatccaagaaaaatgactatctcttattttgagaaattttatacgttacaaaagcgctcgagcgtgagagggagggcggtgcgcaatcgccatttaatttctcagagaatttttaaatttatcttatatccaagaaaaatgactatctcttattttgagaaattttatacgttacaaatgctctcgagcatgataggaagtgcggtgcgcaatcgccatttaatttcacagagaatttttaaatttatcttatatccaagaaaaatgactatctcttattttgagaaattttatacgttacaaaagcgctcgagcgtgagagggagggcggtgcgcaatcgccatttaatttcacagagaatttttaaatttatcttatatccaagaaaaatgactatctcttattttgagaaattttatacgttacaaaagcgctcgagcgtgagagggagggcggtgcgcaatcgccatttaatttctcagagaatttttaaatttatcttatatccaagaaaaatgactatctcttattttgagaaattttatacgttacaaatgctctcgagcatgataggaagtgcggtgcgcaatcgccatttaatttcacagagaatttaaaaatttatcttatatccaagaaaaatgactatctcttattttgagaaattttatacgttacaaaagcgctcgagcgtgagagggagggcggtgcgcaatcgccatttaatttctcagagaatttttaaatttatcttatatccaagaaaaatgactatctcttattttgagaaattttatacgttacaaaagcgctcgagcgtgagagggagggcggtgcgcaatcgccatttaatttcacagagaatttttaaatttatcttatatccaagaaaatgactatctcttattttgagaattttata

SEQ ID NO: 33955 - DNA, 522 bp, Heterodera glycines
ggccaaatgcatcatgaaaaagcaataagcaatttaatttaggggtaatactggaaaattggtgtcccggcgaaaaataaatttaaaaattttcttttcgacttttctagtgtgaaaaaataagctgattacggatctgggctcagaattcgaaaaatcattgattttgtctatgatttttcatcacatatttgattttttaaataaatttacatctaataaaaacatgcattctgggcttttctattgctgatcaagcgtctggcatgacttctgattaatttcgaatccagcaatcgaacgcgcgccgaaaagtttgaaaaagaataacaattttgtattgttgttatttttttgcaatcataatcaaagaaggaagacaaatattcgttaaaaattttattggattaatttttgacacattggctctaaagatatgtaaaaatttaaaagataattaataatgtattcaacaaatcaattttgctctccccgtgtaaccatcgatgacgacgaagcggc

SEQ ID NO: 33956 - DNA, 999 bp, Heterodera glycines
gctgtccgaacattttttctttttttctaacgcatctccaagcggattacaccccatttttggacccgtatttttgtaccccgatcacattctgaaaaaaataattgatgcgctaaccctaagtctccccagttattctgcgcattgctttctccaacgcgagagcaaagcagcgaattgtttcattttcctcctttttgtattttttcatgccgatctcgaccctaactcagcaacgcgtgggcgtacagcagcggcgactgcagcattcaatgcagctcttcaaaagctgtccgaacatatttttctttcttttctaacgcatctccaagcggagttacacccatttttggacccgtattttttgtaccccgatcacattctgaaaaaaataattgatgcgctaaccctaagtctccccagttattctgcgcattgctttctccaacgcgagagcaaagccgcgaatttgtttcattttcctcctttttgtcttttttcatgccgctctcgaccctaactcagcaacgcgtgggcgtacagcagcggcgactgcagcattcaatgcagctcttcaaaagctgtccgaacatatttttctttcttttctaacgcatctccaagcggagttacacccatttttggacccgtattttttgtaccccgatcacattctgaaaaaaataattgatgcgctaaccctaagtctccccagttattctgcgcattgctttctccaacgcgagggcaaagccgcgaatttgtttcattttcctcctttttgtattttttcatgccgatctcgaccctaactcagcaacgcgtgggcgtacagcagcggcgactgcagcattcaatgcagctcttcaaaagctgtccgaacatatttttctttcttttctaacgcatctccaagcggagttacacccatttttgtacccgtattttttgtaccccagatcacattctgaaaaaaataattgatgcgttaaccctaag

SEQ ID NO: 33957 - DNA, 805 bp, Heterodera glycines
aaaaatgattttttgaaaaatttttcgggttttgggctcaaaaaggctaatttagctgctgggggccgttctaatagaggtttttttgaaaaatgccaaaatatggaccaaaatgccaaaatatggaaatatggacataaatcgcgaaatatggaaaaatatggaaaatatggatatagaaattcttcctagaagcttcaaaccaagctaaaaacatgtttttcgtgcgtttcaggcctcccacagtccaggaacaaaatatggatttccatataattggactccctaatcattagggttataaattatatggattaacatgtttttctgcggatatgctatgaagaaaggggactcaaaaatggcatttctacgttaaaattttttggatttggtgaaagttttttgtaaagaccggacgggaccgggatcccgcagggattttgccgggactcccggtcccggccatttcataattccggtatctagtttttagtccatataaatccatattttgggggttttcgggagtaaatccatatttcaccatttttgcctttcaatatggttaccgtagttcctttcccaaacccgttctatgatctttgctgtccgcgttaccattcccaaaattggaataatatcctttattccgaaggtgtgcatacaattatataatgagaaaatgagggaaaggagcggcacccgattcgtacgggacagatggggagggaaggattggacgggcacttggcccaatccccccgatcagaatgaaaagaacaaaagagaggggaacagatta

SEQ ID NO: 33958 - DNA, 974 bp, Heterodera glycines
catgtaatcgcagaccaccttatgcatgcgttcttcaatttgcttgatgtgaacctcattcaacttaaaaagaaattaccaaaaaacagaggaatcaaaacctttgtacgcctaacgcttgtacaacgtggagtgttcgcacccgcagcaaaaagcgtcggcgctgacttccgacgccgagtatctgtgactttttgttgaaaatatatgtaaaaaactgaaaaaacctgcaacgctttcaacgtcgcttgcatcctctcgttgctgtaccgtgtgctgagttgcattgttttgcgtacccacgtttgaactgtgacgggttcttttatttgtagagcctgtcatttgtttaatatatataggtttagtttaaattttgcttaaattaagacctccaacaatagtcaaagcccgtaatccgacagtggtcggagtcgaaacaacactggtgtccagttgcattgccggcgtacccacaatagcttgtccatcatttcgtagttgtctgatttgggcacgaattccagtcgacgttgaaggttctacaaatagattttaattatcatatgaaaagcaacaaaaaccctgatctatgccaaaaggttgttgaccacttgtattcggacccccaagagcattggccacgtcaggtgtctgaatggccgctcgccagcgtaaacgatctgcttcttttcttcttcgatcctttgaaggcattaatttaaaataatggcaaaataaattaatagaatattaaactaaaaaaaacatagttaggtttaggtaacattaaaaatataaaataacatttatttaagcaatggaactcaaaattaaaagagcacattacttttgttaggacaggccgtactaaaaagcgaagcaaaggagtgtgcttttaactatttttgtgcaaagggtacgcagtggaagtgtaggcacgcagggacctcttccatgcattaggctgggac

SEQ ID NO: 33959 - DNA, 1251 bp, Heterodera glycines
  unsure (1)..(1251): unsure at all n locations
aaaaagggggggggggggaatcgaccaacttttttgttaatgttcgtgcgggggggggggagtcagttggtcgacttttgtgaaagggtcgagtcatgcaaatcggcgacctttttgtgcttgtcataaagtcttttttacggcatatttcgttggaaaactttttttctgggggagcattaccgacgggcgtcaaggaatttcgaaattctggacataggcgctttttcaaaatttttcaacacagacgctaaatagcaagaatttgtagccattttgaacttttcaaaaaaataattggtgcaaacggggcggaagtttgcaaaaaatgaagactaattttgagcattgacaaataaatgaagataatatcaattaatccaaaacagacataccatccaatgggcaagtagatttgcttgttcctgaaaatttcagggattattttatgttgcctctgctaatcaaaacttatttaaaaatagtgattaattaataacttgtctaaaactgtccaatttttcaaaaactaccaaatttatgtgaaatcttaatttttatggaattttcaattcgttaaaaaaataaatcccgttttacagtgtatatttttgggttttagaaaattaaagtcaatagcaattgggataagaacataaagaacgaatacccacatgaacaccgatccggacagaagaatgtaccagcaagtggccaactgaccttttctaaaataaaaaatatatccatgagcaggtttacttattaaagaattgattttctttcagtttgaaatgattctcatgctgtaagtccgtttaaacagtgctttcttcccacctgaacaacacataattggccgggtgtctctccagtcgtgcagttcgacaaacactccgaagaggggagtcgtgtaaccgttcaaaaacatccaaacgacgcaattggttgaatatcacagatacatcctgaaaaatagttcatattctgagtttatatttaaacaactccaaacagttgaagaaaaatctgacgagcttattgaactgacctcttcggtgcgctcatttggacgtcgaattaaagcattgtaaaataaaccagatgaactcatttgccaccttcaatatttgagcaaaatgaataattaattcattcatgtacaaagtgtaaaaaactgatttacataatcaaaagccgaattgaagttacctaattnanaaaggtttaatcaaaatcaaagagaagaag

SEQ ID NO: 33960 - DNA, 900 bp, Heterodera glycines
cgcatgcccattccaactgctcacgggtgccacgcatgcccattcgccaagccctcgggttccaactgctcacgggtgccacgcatgcccattcgccaagccctcgggttccaactgagcacgggtgccacgcatgcccattccaactgagcacgggtgccacgcatgcctattccaactgctcacgggtgccacgcatgcccataagccaagccctcgggttccaactgctcacgggcgccacgcatgcccattcgccaagctctcgggttccaactgagcacgggtgccacgcatgcccattccaactgagcacgggtgccacgcatgcctattccaactgctcacgggtgccacgcatgcccataagccaagccctcgggttccaactgctcacgggtgccacgcatgcctattccaactgctcacggatgccacgcatgcccataagccaaaccctcgggttccaactgagcacgggtgccacgcatgcccattccaactgagcacgggtgccacgcatgcccattcgccaagccctcgctttccgactgctcacgggtgccacgcatacccattccaactgctcacgggtgccacgcatgcccattcgccaagccctcgggttccaactgttcacgggtgccacgcatgcccattcgccaagcctcgggttccaactgttcacgggtgccacgcatgcccattcgccaagccctcgggttccaactgagcacgggtgccacgcatgcccattccaactgctcacgggtgccacgcatgcccattcgccaagcccttgggttccaactgctcacgggcgccatgcatgcccattcgccaagccctcgggttccaactgagcacgggtgccacgcatgcccattccaactgagcacg

SEQ ID NO: 33961 - DNA, 141 bp, Heterodera glycines
ttactagatcggggatcgatccccgggcggccgctcgagcaggacctgcagaagctagcttgatggggatcagattgtcgtttcccgccttcactttaatcgtggggaacaacacatacatgtaggaatttacttcactcg

SEQ ID NO: 33962 - DNA, 1226 bp, Heterodera glycines
  unsure (1)..(1226): unsure at all n locations
cccccccgtctcatcgtccgtcgtatacccttaacctgagacaccttttgcattgtaacgtatgcacgatnttcgaaattacttttttgcaaattataatagaaggaaggcaacgtcaaaaaaatattttttaaaataaaacaaaaaaaatacaaaaatttaaatctgtcaattttttgttccgtttgccattggcgcgtcctctccgttcgctggtgcgatggaatccaacactttgtgacaaatgtcgtccatcatgggcacggtcaaattttgcacatactgtgaaaaaagtatttaaaattggggttaattactttggaagcagcacgtttcccgctccccgaatttttttaaattttaatatttattgttagaattcactaaaaaaacttattgctagacatttttttgtaataattgaaattttttaaaatttctcagcgatttttttgggaaaattttgaaaaaaacaaaaaaattttcagtaattttaataaaatttcttataaaaaggttctgattttttcttgaaaattaagtttgaaaattttaaaaatgtgagggggggggacgtagttgcatttctattattttcaacaaatattcttaccaaattccaccactctgtgctcgcgtcaaaatggaatgtccgtccgatttgctgctcctccatgcgctccattttgaaggacatgtacaaaagggcaatggcaatgacctgacaatgagagggaagcgaagaaacaaacaaaaaaagagaagcaaaattcaaactaattcttaaaagcgtataaaattggcattttggggcactccaaaaaatggcaaataaatattttatataaacaaagtctccaagaaaatctaattatttgttaaaaatttgaaaatgtcattttaacgtcgaattcggtcacaggaaaaaatactttttaataatttttcatttttgagatttccccgagaaattggattaaactatcaaaaaagaaatgactgatacggacaaatctttattatttttttgctgtcacatttcactgattttctgataaacctcgggctcccacaaaaggcacagtgttgtgccgagcgaatcgttgacaaatgtccatgcgttggtcacaattttgctcatgtattccttgtccatgcgaaagcccttggcatattggaccaaaaaagtgtaactgaaaaagaaggcgaaaagttggggaaaattg

SEQ ID NO: 33963 - DNA, 962 bp, Heterodera glycines
ctgtttgccgtcatggtcctcaaattggatccaggagaaagactttgttggcccggatgttggccaaagcagtgcgggaaatggtggccgaaggcaatcgctaatcaaaaattttgtagaaaaaaattttggtggtttttcaaagaaatggctaaaggaagagcagcagcgaacagagcccaaaaataaatgtttaacaataaaaaatactagcaataataatagcaataaaagtcgccgatcgctgcttcaaatgctccccattaaataattgatcatctgaacccattcattcatcatttgtgcgtatgtgaaatgttagccaaaattaaactttagaaaacccaagaaaggaaactcggaaattcggaaacgaaatcggaaattatataaacacaaaattgttataatttcttcaactggcataaatatgtttttaaattcgaattcaaatgtgtgtgcgtccacattaaaaatgcaattagaaaacaaatttaagtcaacgattattttttgtatgatggctaatttagaacaattaaaagtaaaaaattaaattttaatttaaatttcaggaaatgattctcattttgaagcaccagaaccagatgctctgtttagcagccctggtcaacatagtgcttacacaacggagagaagctgatttccatagatgaaaacaatatattgtttgaccaattctagcgataattaaattatttaactattagattagccatattctacaatttttatactgcaaattttaataataaaaaaaaaagtttggttcagccaattgtaaaacgggtattgtgaggtgttcaggcacctttttcccgagaatttattttaatttggtgaattttttcaggaattaacagtaaacatttattaaattcaaaaattggaaattctgaaattaatttcaaaagcgtggagtcaaaatccaccgagcgcat

SEQ ID NO: 33964 - DNA, 939 bp, Heterodera glycines
ccggggacctctagagtctttaggaaggagaattaaaaataggggcctttctattatgattacaacaaatcagcatggcgtctcgctgatatggtatgtttcagttaaggtttagccgatctacaaatttcggcactgtctattttgtaaaagcgaatcaaattcctttggattccaaagtggaattacagaattgcgacggcaaatcctaaatagacaacgacgctttcattataaagctttaagggaggaaaagtaatacgaatatttcaatttcttacttatccgaatagacaaagataggttacacacgaacatttttatagaaattccggctgaaactaaaatccctcttttggtcttaacctatgatttttggcccattatggatgaattaagtatagaaggcgtcgcagaaatacattcatattttctaaattcgggtttcagaaaattaagatttaaaagaggctaaattacagatgcttttcaaattttgggtgtatccgaatagaaagaagttggaaatcagtacttttcacgcctataaaattcgggccgaaaaatattggtgtttgtgactagaaaaatagcagatgcatatcaaatgactacagaaaattacagcctccaagaaaataattgctttgcacaagcaatattttgtagagcccatcaaacacattgtgcttataggaaaggcagaattaaacaataggggcctttttattatgattacaacaaatcagcatggcgtctcgctgatatggtatgtttcagttaaggtttagccgatctacaaatttcggcactgtctattttgtaaaagcgaatcaaattcctttggattccaaagtggaattacagaattgcgacggcaatcctaaatagacaacgacgctttcatataaagctttaagggaggaaagtatacgaata

SEQ ID NO: 33965 - DNA, 560 bp, Heterodera glycines
ggacaaaatccgttaacaaattgcagtaaaattttaaaaaattttcccggcggcgcctatcggcaccgccggacccctgttcccaaaacatttttttgaaaaagagcaccacaaaaaatggtgtaaaaaagtcaatcatatgaaaaggaaaaatgtatggtagcttaaataaggaaaaaaacaaaaatttttgagaaaaaaactcaaaagattgattttttcgatttttaagtgtgtaagaaaaaatttttgaaaaaagtttcgggtctcgggtttttttggtctcggtctcggggttttgggtctcggtctcgagtctcggggtcgagtctcggtctcggggtcaagtctcggtctcggtctcgagtctcgggaaatttttggtctcgagcatcactagtgtcggggagcaaaaagtcgggggccggggacctcggggagcgacatgtcggggcggggaatagcccaaaaatatcggggtcggggagctcggggtcggggctgacccctatttttaacgttctacgtcgtgtctaagaccataatcgaaattatataaa

SEQ ID NO: 33966 - DNA, 881 bp, Heterodera glycines
  unsure (1)..(881): unsure at all n locations
gaagaaaaagttccaacattttgccaaatacacttaatttttcaaaaaatcatgcgttttgtcacttttttatcaaaagaacacaaaaatccgcaagtcctcattttccaaaaaaatcctctttgaccctctaaaagaccacaaaatgaggaaaaatcctcagatttcgaagctctgatataatcgtttctattcaacaaatttcatatcattcgaaatctttgttttctaatttttcatcgaactcagtttacgattccgttgaatggctccaaaaatgccttcttatgtaggaccgcatttagtacatcaaaagaagcctaaattttaaaaattttgacaaaatatgaaatttatatgatttaacaaattttgtcaacagaagaaatttaaaattcaattattttttgctttcattcaatttttcggtttgaacaacactaaaaattacgtgaccatattttaatgattttgaacataaactcttgacatgaggttcaaaaatcgattttttaaacattgtttcaatcatttcagtcctgcaaggattgagaagtaccttttaattgttttttttaattgaataaatttttaaacattaatttatttaagttaccaaaaagacctttactcttacaccgctgtagctaaaaataaaatttttaataagaaatattttttataattaattactaaaaatagaaggcggcggaacccatgacgacctttttggctttttttcctacaataactacaaatcaatgcacagcagaagccgctgcagaagacgatgattanaataagaataataaggagtaagatgatattgnnggncngaaagaggtacatggaaattcggcagattggctactaatctaata

SEQ ID NO: 33967 - DNA, 953 bp, Heterodera glycines
  unsure (1)..(953): unsure at all n locations
caattgtatttaaaaatagaatacaataaaagttaaacttagaaaaatttcataattttttgcccacgataatcaattttctcatttcatatttttaaaataattctcaaaaattaaagaaaatatattccaaaaaacaaaatttttttttattattttatatgggtaaaatgtgaataaatattgcaaaatatttggttttattttgctcattgcagaaattaggagaaacgccacgccattaggggacttcatttcacacacacacacacaattagcagaccaaagggattaatgagcacatggaattgctaataagcaaaagaaaaatgcaaagtgcccaaatgccaaaggatttaaatggatttattttttgtgccgataacataattctcatcatgtttttcgaaaagaaaaaataatttaaatttgaaaaaaaattttttttattctttttgggcacgaaaaagcatcaaattctcctgtcattccccgttcgaattggttggtgtaattagtctggtaattaattaaaatttatgccaaacttggattaagctttcattttttagttagtggcatgtttatgggttggggtgttcgggtttagagaaaaaatgtttggtactcattcaagataatttggagccctaaaattagtcaaaattttttctaaaatagaatcttttgaaaaatccaaaaaaaaaattcggcacacgagaaccaaattctggcatcatttttaaagaaaaccttttgttcataaatttgtggctacatcttttatgaacccaaaatttaaaaaagggcatataggtatatttattaattaattttactttttaaaataattagcacctaaaatatactcattttttggaaggctttaataatctattttttagaataaagaaaattanaattaaaattggcgtaatggtcattttgaaaaa

SEQ ID NO: 33968 - DNA, 70 bp, Heterodera glycines
ctagagaaaatgggcaagcccactgtcaagagcacaaaatttgctatcgaattgtgtttggaatggtggg

SEQ ID NO: 33969 - DNA, 956 bp, Heterodera glycines
gctcgagcgcttttgtaacgtataaaatttctcaaaagaagagatagtcatttttcttggatataagataaatttaaaaattctctgtgaaattaaatggcgattgcgcaccgccctccctctcacgctcgagcgcttttgtaacgtataaaatttctcaaaagaagagatagtcatttttcttggatagataaatttaaaaattctctgagaaattaaatggcgattgcgcaccgccctccctctcacgctcgagcgcttttgtaacgtataaaattttcaaaagaagagatagtcatttttcttggatataagataaatttaaaaatattccacttgcttctgctcaaatgtttgataggcttgtccaacaacaattaacagaagggcatttgggtcgccaaacttttgccttaattaatacattttaataaataaagaaaaaaaattaatgaaattattttttctaccatgccaagtaaagtgaatcgacaatgattccttcggaattgtttgctggcattgcgtcaggtgaaaagttagcaccggattttgccatggttcggcgatgcagatttgtggcacgcgttgccctaccgtatccgccaattgcaccgatgttcatctgaatcttaaccaaaacgatcagattttacgctaaacgggtgagagtgattagtaaatataatttcgaaactaaaaatctaatgtaaagcgggaccgggaattttggggaaaaccccgataatttcctttaaaaaaacacaaaaaaaaattcttattacttttttcaagtgaaaattattataatattaaaccttcttttgtttttcatttcataaaaaccaaaagttaaataggaaatttcgacaaatttgttaacagaatttgttcataaaatagccaagttaagtgatctgtcgatttaaaaaaataaggatgatgttgtgacctga

SEQ ID NO: 33970 - DNA, 996 bp, Heterodera glycines
  unsure (1)..(996): unsure at all n locations
accccaacccacaaccaccaccaacaaactcctccaattccttctccatcataaatatctgtcgtcttacaccgaatgggaaagcgggggggggggggacgaatttacgaagctttgggaaaacagcctcaagacaaacggagcagtgagaggcgagttggggattatgcagcaaatggaagtggcaaattgggggaggagagagtgaccgatcagaagcgaaggacagacagcgtaatctgagagaagtgagtggaaatggcgaagaacaaaggcaaagtcagaaaagtgacactgaaaaagtggcagcaaaacaaaacaaaacgaagggaaagaaacaaagagaaattggcaaaagtgccggtgaaaaatactctttttgatcagcagcaaaacctaacttaaaaattgtggaattttttcagatttttccctcaatttgaaataagttttttggggtgttaaaacatatgaatgactgcaagtgttcatcaataaaaatgaagtgataaagtttcgtgaattttactgagtgagcacagaatgtttttgaacaaaacgccgcctttctttgattttcttggccttttgatcggccggtgctttcgctgttcgccgtgctcatcaatagcagcagaatgtcttttttgtcggcctttttcgccaaagcttttgttgcacaatcgccattcggcaggaaaactttattctcgagataactaaatccttttttccttattattttacagttaaatatatacataatttgagtgggaaaaaacaataattcatttttacgtaaaactgctaccaaaaacaagggtgtgctttgttcttatttctaagaaatgttctgatttggaaggtacaaatctgagaaaacaaatgaattttggtgaaattttttttgagatttttgnntcgantcgggtccggggttcgaaattggtcgaaatgggtatcagattcgtgaccaacgacctcgaaaaccccata

SEQ ID NO: 33971 - DNA, 983 bp, Heterodera glycines
ctaaatataaattgcataacaaaaaatatttgccatgtatgaaatctacagaaattggaagaaattcaataataataatgaacgtttaaaaatatataaaatattatgccattattaaataataagtgaaaatgccaaatccaaaaaagaaaagctggtgccaaaaccaagacagccgtggaggttgtcgacaggtaaagtaaactaaaaatatgccaaattaatcgaaaaagcaatgattccaattgctaaatttaatattaaagcagtttgtgaactacaatttaaaaaaataaaaacgattttaggataatccataaagtgtaagcaaataatattatttcaagtctccttatccttaataatttacttgacaattgaacgtttgtccataatttttatttatcatagattttcattatttacctcagtgaatttaaaaaataaagtaaataatatatcttttgcttaattatatgtaaattaattatcttttgttttgcatattttgagcagttttacagtaatattataattaattaattgaatattttattttcatttattgtttggaaattgttggattttatttattcatttgcgactaaaaaaattgttttatgctgaatagtattttaatatttattcatcaatattaattctttgctcatttttatttgtgttggtttactttttcattagtactcgtgtaagaaggggaattttacttcgtatagttcctgacatattttagaaaacattttttatgggttgggtttcggatttaatttagttgcatatacaaatattcagcattgaaaattttttctgagctttaattagtttgagtaattcagaaaggcatgttgaatttattgcttaggaataaatgaaattgaaaaattacattttcatattgaaaattgaaataatgaataatttaagtgttttttaattgttgaaattatatcatgattgattga

SEQ ID NO: 33972 - DNA, 897 bp, Heterodera glycines
agagaaatgccatgggactgggggggagagacggacagagcagagaaatgccatggacttgggggagagacggacagagcagagaaatgccatggaattggggggagagacggacagagcagagaaatgccatggacttgggggagagacggacagagcagagaaatgccatggacttgggggagagacggacagagcagagaaatgccatggacttgggggagagacggacagagcagagaaatgccatggacttgggggagagacggacagagcagagaaatgccatggaattggggggagagacggacagagcagagaaatgccatggaattggggggagagacggacagagcaaagaaatgccatggaattggggggagagacggacagagcagagaaatgccatggaattggggggagagacggacagagcagagaaatgccatggaattggggggagagacggacagagcaaagaaatgccatggaattggggggagagacggacagagcaaagaaatgccatggaattggggggagagacggacagagcaaagaaatgccatggaattggggggagagacggacagaccaaaaaaatgccatggaattggggggagagaccgacagagcagagaaatgccatggaattggggggagagacggacagagcagagaaatgccatggaattggggggagagacggacagagcagagaaatgccatgtaattggggggagagacggacagagcatagaaatgccatggaattggggggagagacggacagagcagagaaatgccatggaattgggggagagacggacagagcagaagatgccatggaattgtggggagaaacgcacaaacagaaaaatgccctggaattggggg

SEQ ID NO: 33973 - DNA, 145 bp, Heterodera glycines
ttcttggcacacaactcctgaaatccttggaatctccaaagtgatatctttttgtatgccaatgatggatggatggccagcagcccctcagctttgagatggggactggtcaccagaaagacaaaggcagggtccccaaccttct

SEQ ID NO: 33974 - DNA, 492 bp, Heterodera glycines
atgatggccaaaaatgcaaaaatttgccgcggggtgcgacggcgtatttttggacaaagaatggaaagggggaggggggcgggattggcgctgggtattatttggtggtcccctggggcccctccttttactgcccccccccaatccaaatgagtctcgtcgcctcccccacccccgggggcccccgtcccgtctttgtgtggtctcgacttggcaggcagcagcagtcgtcgttttatcgtcgagattgggcgcttcccccccccccccctcgggcgtcgtccgtcgcccgaggtgctccaccaccagccgccaatctctacacatcccctcgtccattctcgtcttccatttgcctctcgcccatctctctgccgccgccgtttttgcattgtgtgtgtgtgttgtgttgcactcactgtcccccccccggggtggacaggaggggcgataggacttttcccttccccacaacacttcgatgggggaagg

SEQ ID NO: 33975 - DNA, 1129 bp, Heterodera glycines
  unsure (1)..(1129): unsure at all n locations
ggttgcaaaagatgcgctcgccgagcatccaaaactgtggccgtgctgatcactgactcattcgggctttccatacggcagggttgaaaaaaaattagaactttcaaaaaaantaatcaaattntaggtcgcacatcggagggtnctcgacaacgtgggccagtctgtacaccattgtgcagaccgccaagtttttccacagcgctcagtgtgctgcgattgcttttccaaattcacagtgccaggcaaaacggcgaaaaccaaaaattttttaaattttttttccagcgatggcctctccgatcgcttttacaccgccttttaccgtcgcctgctcaatttgcagccgggcaaccagcagcacgacttgcaactgttcacactggcgcaacaagtgctgcgcaacgatttggtggagtgccgcgtccgtgccttcctcaaacgcttcttccaggtgccgccagaaaacatgggagtgctcggcactcgagcacactaaagggtccggaccaattggcggcacacttgttaaaccggatgaaatgcccattttgtcggacgggcatattaaatttttggcttttttctcttgagagaaaaagagtggttccggtggctcagtggttggaactgaacatcacgaaatgggtggaggaggcgtgggttcaattcccacccggggccaaccaaataagtaacactttgtcacggtttgtttaaagggaaacctttccaagttgtcaaattccgctttcccattgctatgtgacgaagcgggccaaagacttgggaaattgtcatttgatttggtcggcatatggaatatggggaatacgcctttccttggcatttcccatcagatgcgccggcacattttgtcaatcgcattcctatgggcttaatcgaattaatttgccgtaaattctaaaacaaatactcccgaaattattgttttttttttttgcaattttagccgtaagtcaactattcctggggctttaactgagttcacttacctaattaggctaattagttaatagttttttttcagattgctctttcggccaactcggcattcgctgcggccattctgctgatgtgccattccgttgtgcgggaacgaccgcaa

SEQ ID NO: 33976 - DNA, 1229 bp, Heterodera glycines
  unsure (1)..(1229): unsure at all n locations
gggggggggcgaaggcccaccacgaggccgcgaagaggccgagtgagtaccttcggtgcaggaaaattattaaattttaaaaattttttaattgctttttaaatatgccaaaaaatgtaggcttaacttttttagtgaaaattcgatccattctattttttgctaattgagcagaagcgtaccaaactttgcagggatactccccggtaaaggactaacttacactgaaatgagcgccgagctagctggctcaaaaaaattttcgaaaatctgagtctttcgtttttatttattttttgcaaaattaattcttaaatattttttcagaaagggttctgaaacgcaccagattttatttacatgttagtttaggcactctgatgctttttctatcaataatggaggtgaagttcagaattcaataaaaataacattcacggtgcgaaaaatggggtttgacaagtttattggggaaaaaaagactntacaaaataatacccctgggagaagggagtgggaaacatgatttcaaaattttcaattttttctagtctaatctactcaaaccggttcagaattcaataaaaataacattcacggtgcgaaaaatggggtttgaaaagtttattttgaaaaaaagactttacaaaataatacccctgggagaagggagtgggaaacatgatttcaaaattttcaattttttctagtctaatctactcaaaacggttcagaattcaataaaaataacattcacggtgcgaaaaatggggtttgaaaagtttattggggaaaaaaagactttacaaaataatacccctgggagaagggagtgggaaacatgatttcaaaattttcaattttttctagtctaatctactcaaaacggttcagaattcaataaaaataacattcacggtgcgaaaaatggggtatgaaaagtttattggggaaaaaaagactttacaaaataatacccctgggagaagggagtgggaaacatgatttcaaaattttcaattttttctagtctaatctactcaaaacggctcagaattcaataaaaataacattcacggtgcgaaaaatggggtttgacaagtttattggggaaaaaagactttacaaaataatacccctgggagaagggagtgggaaacatgatttcaaaattttcaattttttctagtctaatctactcaaaacggttcagaattcaataaaaataa

SEQ ID NO: 33977 - DNA, 461 bp, Heterodera glycines
ttttctcttccctctcactcactccatctctctctctctcactctcactctcactctctttctcccttctccgttctctttccccattctctctctcctcccccccccccccaccttctccctccttttctcgtttcttccctttgtctccctctcattcctcgcatattaccaatttgtaaaatctttgttattcttatttttgtatttttatatttaatcaatttttttaatagattttcaattaatttatatattttaaaatttttctgtgtttaattattgattatttaattggactgtttgtgtggcgacgtgaagtctgggcaccgggaagtttgggcaccagagtaagggattccaaaaaatgaaacaatataaatatataaaatgttatataaatcattaaatttagtaaattttaacaacccttatgctcaaaaatttctatgttcttgaaa

SEQ ID NO: 33978 - DNA, 885 bp, Heterodera glycines
tgtcgtcaaaaagtaccaattcttctcacacctttgactgacactgatcagcatcaaacgaattccgctgctcaaactaaacgtttcaacccaacgatcggccaaatgacacagaatattttgtcggagcattttgaaacgcccattggccaactgatggcacaatttgacatacaaattcaaattcgcgacacggactttggtgatgctcggtttgtcgacatggaaaagaattggtcagctgaacctgttgacaatcgcggtgcctacaaagtgatgctccatccaaaagtgggcgcccgcagaattgtacatggacaagaagaacgttccagcagccaaatgagcaatcggcaaaatgaaatgttcggaaatcaaacagccttttagcagaaaattctttttaacttgaaaatttatattagggtgctgatcatgaattagcattaattttagcagaaaattccgattccctgacccgaactaaacaaaaatcgaaaactccaacattttaatgttcgaacctgtacagaatgactatttttaatgaatgtttcagtagtttgtgttaaatgtttgtttgtttttttcaattttagaaccaaaatgctcaatttgaaaaatttgaattttcggtttttggttcgcttcaggtctgggatttttaataggccaaatgaatgccgtattcatgatcattttttggattctaaatgaggaatttaatatttttttttccaaaatccgttttttattgagtgttaatttagcaatcgttctcttctttgaaagttttgccggtttgaaagagcgcaccaaaatgttggggcattgatcagaaagtttttgataatacaatccgaaacatattttttttgaattttt

SEQ ID NO: 33979 - DNA, 1015 bp, Heterodera glycines
ggggagcaaaaaattccaccgcagaatttaaagtccaggctatactccatcttcctttttgatactaaagcattagagtgctaaaattaagttgtaaataaaatttggtgcgctttagagcactttctgaaaaaaatatttatgaaacaaaaaaatcgattttttcaagtgtccgtttggggtactcaaacatttatggggagcaaaaatccaacgcagaattaaagtacaggctatagggaagctattcccgaaggattcggtctccccataaatctgggcgcatcggttcggggggactgccccgaaaacaaaaaaatcgattttttcaagtgtccgtttggggtactcaaacaattatggggagcaaaaatccaacgcagaattaaagtacaggctatagggaagctactcccgaaggattcggtctccccataaatctgggcgcatcggttcggggggactgccccgaaaacaaaaaaatcgattttttcaagtgtccgtttggggtactcaaacaattatggggagcaaaaatccaacgcagaattaaagtacaggctatagggaagctattccggaaggattcggtctccccataaatctgggcgcatcggctcggggggactgccccgaaaacaaaaataaatcgattttttcaagtgtccgtttggggtactcaaacaattatggggagcaaaaatccaacgcagaattaaagtacaggctatagggaagctattcccgaaggattcggtctccccataaatctgggcgcatcggttcggggggactgccccgaaaacaaaaaaatcgattttttcaagtgtccgttaggggtactcaaacaattatggggagcaaaaatccaacgcagaattaaagtacaggctatagggaagctattccggaaggattcaatctccccataaatctgggcgcatcggttcggggggactggactctagaacaaaaaaaatcgatttttttcagtgtccgtttggggtactcaaac

SEQ ID NO: 33980 - DNA, 807 bp, Heterodera glycines
ggcgaaaaaaccgttgcacagctttgttcgatttaggtattacaacgcagacgaacggcaatgcgtgtccttccaatacaatggcaaaagagggaaccaaaacaactttctgacccaagacgagtgccaattagcgtgtcccggtgggaatattagccgattaacccccccccccccccccatcgtcaattatcaataatttgattcccttcaatttcagctgaactttgtcttctgtcaatcgaccgcgggtcgtgcggggggcgtcaaacgcgttatgcttttgaccggcaaaaagtggcgtaaattaaaattcgaaattaaagtgtcaattcagtcccaatgcgtgccatttgagtacagcggatgcgggggaaacctcaacaattttctgacaatgcaagaatgccagcaaatttgtgggaatgtgcggagctgaaatcacggctaaacggccattgttcaaatttttctcagaaaaaatttattaaataatgaaaatatttttccgaatgttttttcggaattcactgaccaaaaccggggatcacagaaacaatttgaaaagtaaaggcaaaaaatgtccgttcttttcctccgttccgtcggtcacctgagtgagcacccgtcgtagtgggacacaaattcgaattccttttccggaaagtgcacaattgtgcgccatgaaagctgaattgttttgtttttgtttgcgttggcattctgttggctttcgccaaatcctccgacctttgccgcctttgccattcgcattttcgcaactttgcaatgaataccttcgatttt

SEQ ID NO: 33981 - DNA, 893 bp, Heterodera glycines
attattaaataattaaatgcgaataataataaaataatttataaaatgtgaaaacccaagcgccggtgaattgtgcggggatccaacactgaatcggttggccgacgtatctgaagggacggacggagccatggaaatggaaacattggaaacgaaactgtttggcggataatgtgagagcgaaaatgatgaataacattggcgtgtagtaatagttgagtctgtccacaatgtcatcgtcgaattggggcttaagcccctggaggaatttgtccagaaaaaacatcaaaaatcagcagaagaagacggaggcggaggaaaagacaaaaggacaaatgccaagaaaacgagaagaaaacataaaaggggaagaagggttgaattaaaataatggatcaaattgaaattcatttaaatcgcatcgattctctccccctctcactttccttccttagaatgaatggtccatcgcctttctctctccctttttgtgtcctttcgtctccgtctttttagcagcagtctctcccctctcctcccctaaaactgcattgaattccctcaatgttttggtcgatcggttgcctttgcccgcccctttcgtctcttttcagtgagttgcgcaaaattggcggatttgcacagaaacgggaaatttccctgacaaagtaagttggaacattgggagaatttggaagagagggggtgaggggaagagagagagggaagagagtgggtgagaggaagagaagagggaggagagaggtgtgaggggaagagaagagggaggaggaggggggagggaaagagagagagagggaagagagggggtgagaggaagagaagagggaagagagggggtgagaggaagagaagagggaggagagaggtgt

SEQ ID NO: 33982 - DNA, 851 bp, Heterodera glycines
tctgctctttaagttcgcctcgaaaagcatttgggagcaaatatgttgttctacaacggccagcaggcggagaagggccgacggcaccagcgccattccggtgattttgcgaaaaaattttgaaaattttcccttacctcaggctatggcccatcggtgcagtccaccgctgctggtgctggcagtggtgaggacactcagcagtgcaccagctgtgtgcagctccaatgtccgcccggccccccagggccgcccggcgtcgcgggcgaagacggcgcggacggactgcccggcagaccgggaaagcccggtcggttcatttggccgagtgggatttacatttgatttcaatccctaaggcttggatggccttgacgttccgctggagcccgagccgagctatccatggtccgtttgagacgaacttccagtacagactcggtcgagaattcaaatttcagtgtcatttgtccggccggaccgcctggcaaccgcggccctcagggcgaaccgggccgtcccgggccccaaggagaaccaggaccaccgggtataattgttttttaatgttaactttcttttatgctttataggactcccgggccgaccgggaaagccgggccgagtgggcgatgcggggccccccgggtcacgcggtgagcctggcgagcctggcataaaaggtaaatttaattggggtttttcaatcatttccattttcggagttttaaggccctcccggagacgatagcatcggcggcaccggcatcaaaggaccgccggggccaccaggtcagaactgaaagaaatgtgtggacaaatggagtatcacttgtcaaattaaggcccgc

SEQ ID NO: 33983 - DNA, 1022 bp, Heterodera glycines
  unsure (1)..(1022): unsure at all n locations
atacaaatgcgaattttccaatgcntnaattacnaatgaaaatacaaatgcgaattttccaatgataaaattacaatagtaaaataaaaaatacgcatttccacttaatgcgcattttcaatcattaacaacaactgaaaatacaaatgcgcattttctaattattaaattacaatagtaaaatacaaaatgcgaattttccaatgatgaaattacaattgaaaatacaaatgcgcattttctaatgataaaattacaatagtaaaataaaaaatactcattttccacttaatgcgcattttccaatgcttaaattacaattgaaaatacaaatgcgaattttccaatgataaaattacaatagtaaaataaaaaatacgcatttccacttaatgcgcattttcaatcattaacaacaactgaaatacaaatgcgcattttctaattatcaaattacaatagtaaaatacaaaatgcgaattttccaatgatgaaattacaattgaaaatacaaatgcgcattttctaatgataaaattacaatagtaaaataaaaaatactcattttccacttaatgcgcattttctaattattaaattacaatagtaaaatacaaaatgcgaattttccaatgatgaaattacaattgaaaatacaaatgcgcattttccaatgataaaattacaatagtaaaataaaaaatacgcattttccacttaatgcgcattttccaatgatgaaattaaaattgaaaatacaatgcgcattttccacttaatgcaaattttccaatgatgaaattacaattgaaaatacaaatgcgaattttccaatgataaaattacaatagtaaaataaaaaatacgcattttcgtttaaggggcattttcactcattatcgtctacagacaatacataaatgcattatacataatgtcatttcctattgagaatatagacgagaaagtccaatgataaagagacaatagtaaaataataaatacgcattttccgaataatg

SEQ ID NO: 33984 - DNA, 957 bp, Heterodera glycines
  unsure (1)..(957): unsure at all n locations
ctttgtctgtcgccgattcgctgcaggcaatcaaatccatttgaagttcaattttaaaaaataaattctcaagatcgggctgcattttctttgacaatttttgatgcctgtttttgaacctaatttaaattataatgtaaatctgacttttaaaatgcgaagttgaaaggcaattatcgaaaaagtcgcctaaagtttctctactaattatctgttaatttatttttcattttagcccatatatttagttaattgacctcaacagattttcaaaatttccagctttaaaaaccgcaatattctggtatttaccaaggctgtgaaacagatacatgaaatacaaaattggaacctaaaggttaagctgtgccggattttggcccgacttaattccaactccggagaccgaactccaaccaccatccactaacaaataatttgttgaccgagccgtagccatgcggaaagcctccgtcccatcggataaaaacagccccggatatgctttttaggaggagcctttccttttcaataaatattcaaatccatagccgaaaattaaatcccggccttacagtgctgagccacaaaaatttgatattttgctccaaacgttaaagaccaaaggtgcaaaagtgaagaccagccttggaaacttagcccggatgtaaaagaattcctattggatttccaattttggtgtcgcattccctagtttaggctaatggatgttcgcagttttttcttccttttccttatttttaagcctcactgaattttgggaaaatctctaacttaccagtgataaaatgccaaaaaattggccataaaaagtgctctcgtgtgaacatctgtttcactgtcactgtccatataatttagataatatttgacttgtaattggcttatttcgtctgatgtcaaatctgattttaattangagggaattaaataatt

SEQ ID NO: 33985 - DNA, 1025 bp, Heterodera glycines
  unsure (1)..(1025): unsure at all n locations
tcattttacattttctaggtcattcccagaacattagtttatttgcctattttgttttttcttgatatggcacaatcggtccattgcggcgaccggtattttcttatctattttatatttgactgtccgattgtccactgtccgattgtccactgtccgattgtccacttctgtccgattgtccacttctgtccgattgtcctcactgtcggattgtcaactgtcggattgtccactgtccaattgtccacttctgtccgattgtcctcactgtcggattgtccactgtcggattgtccactgtccaattgtccacttctgtccgattgtcctcactgtcggattgtccactgtccgattgtccacttctgtccgattgtcctcactgtcggattgtccactgtcggattgtccactgtccgattgtccacttctgtccgattgtcctcactgtcggattgtccactgtccgattgtccgggagcccttcagactgcttccacatgtccatcatcgaaccatcatttcgaacaattttttttggcacagatattacacgtgcaataatacatatagactttttgttaaaatatttccaaatttccaacattttttttttggtttattaaagcataaaaaatcattgtagaatttagttagaaagaaagagatggataaagacaatttttgttacagtttctttattgtgggctttttggtgtaacgacggataaatgccgacactcgcccaaaatgacaatgtgcaaaaaatgcaaatgcacatattcttttttctaaaacaatctncaatataattttacttanaatttctattttttgaaataataaagtgaataaaaattaggttaatttcaatcatncacanaaattataaattgtttatgatctgtcctccatctcncattttggtcttaatggcgattaattacttttttattagcatttaatttggaccttctttggagcatcgcacaaaggaaaatgattttaggtgctaaaaactg

SEQ ID NO: 33986 - DNA, 1372 bp, Heterodera glycines
  unsure (1)..(1372): unsure at all n locations
aaaaatagatgaaaaatttttttattaagaatttttttcttgaaatttttctgtttgaaaatttttttcaaaagcttgttcccagttttttatgtgaaattcaaaaaaatttctnaaaattaaaaaaaaattgaatattttcgctaaattttttttacaaaaattccttattctaaatatgaattcgggcgggaggacccttttcaattgtcccttgaatttttttacattaaatttcccttaccaaaatgtacttattgtatttgcttgcttgcttcagtgtatcatcatcacgcgttggtaccgcctctttttgcactgtccccagtgcgcacaactgctccgaatgagggcgtccaaagcgtccgcaacgtgcacacattgccagcaagatttctacccaaatgtggggttgcctttatagaaaattgaaaattttgtgattttttgaaaccggaaatttcttttatcccgcagtgtcaataggtgtcgtcatgttttttttttgctgaattggtttttaaaaaatggtcccaaaatttaaacagaaaaatagtttttgtcccctgtgggcaggcggtgcaccccaaaacgtcttcggccgaaacgtcgtcggaagactttttgaaccataactttgttcactgtcaatcaaattaagaattgttggtgttgttcaatagctctatgtgtttattattaatttgcaaaatctacaaaaattttcgttaagtttcaaaaaagttatggccagaaggaactcaaaaccccagtaattcgaactttttttgctctgatttttttgtgcataaataaaaaattttgaaaatttgcaggctaatagcatttttcgaatgctttcgaataataccaagaatgtttaatttggttgagaaagaaaaaagttatggtcgaaaaattcgttcgacgacgttttgtcctactccggcaaaaaaaaataggtgaaaacctaaaaatccgttccctgctaatgacgactgatttaagcgaaagacccggggaaccgttgaataagaaaaataaattttaagatttcgcattttaaaccacgaaaaagcgttcgatgttttgttgatttattttcgatagaatgcttttcaataataattaggaatgggaatttaagtcaaatgaccacactttctttgattacgccttggttttaccctcggacgagaataaaatttcgatatgattctttttaaatgcttcttaaagtatgtaagtaaaagtgctgttattttaaaatttaattaataaaatttccaccgaatattgttcaacaacaaaaaccttgcggattttttgtaaacctcacaaagtctccaaacacaaaaccctcctcaataat

SEQ ID NO: 33987 - DNA, 841 bp, Heterodera glycines
agtgaattttgtgcaatccgcgcagaatgtgctgcatcatcgttttgatgtccaccagtcgaattttcacttgggtgttactcaacagaccggcaagatcgtgctcgcaaaaggtgaacaccaagtaaaagcagaatttctccttcccactcttttctaaaacaactttttagtggattcgtggcttttgctttgcttttttttacgtttgcttgtgcacacttccaccagttcagttatgtgctgatgtcgaagcctttgtagcatttttatttcgcgaagtgcagttattggaaactgaaaatgaatatgcaaatgggttcctccggtgccaattcaccccttccttttcattttccatcaaaatttttttcagtgccaccaatttgccagttcgcttgcaacgcgccttgaaaacctcgctagaaagttcactatattaaaaaattcgctccgtcttaagcacccaaatgttccttgtccaatcttcaacaactgctcgtaatatgtcacttcgctgacatagggatagttaaaatgctcagtatagttcaagagcttctgtgatattcggcattgttcgagaattgcctaaaatattacaaatgataaacaaacaaatcattgacaaagtgaacgaaccttcactttggtgtcatagtctttggaatttccaacaccgttcatttccaacatttaaactgtgacagttgaaaaagaaaattaaataatgcttaaatctgttcaagtaacaacatacaaaatagcggggtcgcccccagcccagcccattcgccaggaaagggccaaaatgggtgcccctttcacggacggaaaaaaa

SEQ ID NO: 33988 - DNA, 1251 bp, Heterodera glycines
aaaatggggttgaaagtttattgggaaaaaaagactttacaaataatacccctggagaagggagtgggaacatgattttcaaattttcaattttttctagtctaatctactcaaaccggttcagaattcaataaaaataacattcacggtgcgaaaaatggggtttgaaaagtttattttgaaaaaaagactttacaaaataatacccctgggagaagggagtgggaaacatgatttcaaaattttcaattttttctagtctaatctactcaaaacggttcagaattcgataaaaataacattcacggtgcgaaaaatggggtttgaaaagtttattttgaaaaaaagactttacaaaataatacccctgggagaagggagtgggaaacatgatttcaaaattttcaattttttctagtctaatctactcaaaacggttcagaattcaataaaaataacattcacggtgcgaaaaatggggtttgaaaagtttattgggaaaaaaagactttacaaaataatacccctgggagaagggagtgggaaacatgatttcaaaattttcaattttttctagtctaatctactcaaaacggttcagaattcaataaaaataacattcacggtgcgaaaaatggggtttgacaagtttattggggaaaaaaagactttacaaaataatacccctgggagaagggagtgggaaacatgatttcaaaattttcaattttttctagtctaatctactcaaaacggttcagaattcaataaaaataacattcacggtgcgaaaaatggggtatgaaaagtttattggggaaaaaaagactttacaaaataatacccctgggagaagggagtgggaaacatgatttaaaattttcaattttttctagtctaatctactcaaaacggctcagaattcaataaaaataacattcacggtgcgaaaaatggggtttgacaagtttattggggaaaaaagactttacaaaataatacccctgggagaagggagtgggaaacatgatttcaaaattttcaattttttctagtctaatctactcaaaacggttcagaattcaataaaaataacattcacggtgcgaaaaatggggtttgaaaagtttattgtgaaaaaagactttacaaaataataccccctggaggaagggagtgggaaacatgattttcaaaaattttcatgttttctagtctaatctactcaaaacgggtcagaattcaataaaa

SEQ ID NO: 33989 - DNA, 887 bp, Heterodera glycines
aaaattaaaaactcaaaaataaaagatggaagtcctattgtgtgagtcatcgataagctctgacgcttcatccgtctctcttttcgatttccaattggacaaacattcgccacggtcttccccccaccaaaatcccttcgcagagcaaaagctcccattgcaaatggaaaagcttttctgtttgtccctttgaccgcgtgtcggacgattttgcaatacaatgaaaggggagggggcggagagtgaagtggacggacggaaggacggaggaggacgaaacagcgacgaaagtcaaagccaaagccagctgagcacagtcaatccaccgaattcggacaaatgagtaaagaaaggaaaagggaaaaagcagcacaaaataacatcggacaaatgatctatgttggaattgcaaaagcagagcatcttaacttcgcaaaaaatgagatacgaagacggagcgagcaattagtggggcgcccgagaaagcggacggttgcgagcgcatggctaacaataaggtcgggccgaggcccaccccaggcgcgagcaacgcaaagcaagcgagcggagccccacttactgaggccgctgtagtcgagtatgcgccgctttttagcataataggcaaatggcacggcttatttttaggcagggttgggatcgtacaaaccctcttcccaagaacaattttttaaatacatattaaaactttcgataagtgttgtatatcaaattcaactcaaacaaactcgaaaaaaatacttgtttaaactgcagtgaaatggatttagggggattttaacctttaattaggaatttgatcacagttaaagaattaagacactttgttttatatttgaatgcattggcgttttttacgccaacaa

SEQ ID NO: 33990 - DNA, 605 bp, Heterodera glycines
gatgccgaagaatccgtgaaaagtgaaggattgagtcccagtgatgggaatgctggtgagattgagtcccgggaattggaatgatggaaaattgagtcccgatgattgcgatgccgaaggaccaggtgaggttaggtcccagtgattggaatgccggagaactgagtctggtggttgcgatgccgaagaatctgtgagaagtgaaggattggtcccagtgattggaatgctggtgagattgagtcccgggaattggaatgatggagaattgaatagaattgagtcccagtgattggaatgtcgcagaattgagtcccgatgattgcgatgccgaagaatccgtgaaatgtgaaggattgagtcccagtgattggaatgctggtgagattgagtcccgggaattggaatgatggagaattgaatagaattgagtcccagtgattggaatgctggtgagattgagtctcagtgattggaatgtcggagaattaagtcccgatgattgcgatgccgaaggattaggtgaggttaggtcccgttgattgggatgttggtggattgagtcccggtgattggaatgccggagaattgagtcccggtgattg

SEQ ID NO: 33991 - DNA, 973 bp, Heterodera glycines
  unsure (1)..(973): unsure at all n locations
ggcaataaaaaattggcgcaaaaaatccactaaatcttttgctcctaaatcgctaaatcggaggtatgtttttcagcaggaaataatggaaccctttttcaaagaagaaatttcttcctttcccgccttttccctggggggtcaatcagaaggggcggagtcgttatttaaaaaaccatcattatgaaaaattttgtcgaataattatttataattttgctctaaagcaactaaatgtttaattcttgatatattcgatagccctaagtgttctctatcagtctgcaaaatttcaaaaaatttcgttaagtttcaaaaaagttatagctcgaggaactcaaaaaaccttggttttcgaacatttttggtcataacttttttttaaagttataaatttttttgaaattttacaggctcttaaagaacacttagttctatcgaatgatatcaagaattaaaaatttggttattttagagcaaagttataaataaaatttttattttgatggttttttaaataacgcacatacataatgatggttttaaaataatgacatagcaccaatcagaatttttaattttttgccttatcttaaatgttttgttcattttaaagaaaaatgacgacaaatttacggacaatttgacgacagagacaaacgacctaatttttgtcgtaacgataaatttggagacaaatgccaaatgtgtgatttgtcgtccgatttgtccttcgtaattatgattggcctccgttcccgtaaaaagtaaaaatagtgccccgggcaaaaaagaccagaaaatgggaagggattgngatttcgggactggcggatttccgcagaagctcgagaaaaagcctaccagtgttgttgcttcaaaatctttccaatgaatgttgtctaaaatgattgcaaaagaagccgtgtctccaatgtgtgggccacttttgcgaattgcccaatctgaaaaa

SEQ ID NO: 33992 - DNA, 902 bp, Heterodera glycines
ctgattcattttaaacggatttgaatagaaaacaccgacgttatttgacgcaattctgacccgaatggggacaactgagtcccggattttgccataaaatgtttaaaactcaaaggaatttttctaaaattttcagaccaatggataaccatttactgttagaactatcgaatgaatgatactgaattggttcgacacttatgaaaggattgctatatcccaaaactgtccctattttgatgaattatacccaattccgttggttggggacattattagttttgattttgacaccactgacttcctgcggagccgcttcaaatatggtaaagtccttgttcaactgctcgtccagctcgagaatggccgccacattgccgcatcggtagcaataattgggcgccgaccacacagtgagcacctgggaaaaatgggcaacaaattttggaggagcaaaggcaaatcccaacccaaccatgcctggtaggcatttgagtacataccactcctcccattttgccatatttttgaaaattgaccccaaatggcaaaaaatagtaatttttttttgtcgaaacggctacaaattcgtcgaaatacgggatttctaaaaaaacacttctaaaaaccgatttttaaatttcaggcccccccccccccccacaaaaccaagggtctggctgcgcccttgccccctgctatccattttttttttcaaatctacgggtaagatttctgaggacacaatacacccattcatgccaccgaaaattcaattttttttttcattaggttccattaaaacgaatcaaaagcataatgcctttgattcctgttttgttttccccccatttttggcattaattaccgtctcattgaaatgccatttgtatccctccatc

SEQ ID NO: 33993 - DNA, 1812 bp, Heterodera glycines
  unsure (1)..(1812): unsure at all n locations
agggagcagtacnactcagttggtgcagacatatgccaatgagancagcgaaggcggagctgacagcaagaaaaagaagaagaagaacaataaaaagaagaaaaacgccccgnttgtctgtgcacaatgaggaagtagcaaaaaaagaatcgaaaaaaggtgtggaagacgagcgggaggatgacagttttggagagaagaacaaggtccgccttgaagggaaggggcgatttgatctgtgccgcatttaattttagcgtcggacttcgctcaccgattcgccattaactgagctcagtccgtcgtcaacgactagcaacggcgactcagcggacgacactgaggtggccaaaagcagcagcaaacaaggttttttatgctttcatatttaattattcatttccattgcttggccactttttctgcaggttcgtcgtgtgggactgtgtccaattcgtcctcctccaacttttacgttgtcaatgcaccgccttcctcttcatattcttcagttggagaacgacaacagcaccagaacatgcactttttgagcgaaattacagaagaggaaaacatcaacgaagtggagcgcgagtacgccttcgaaattgtaatcaaccagaaaaaggtgcagtttctgaaagaatgtgaaagggtggggggagtgtttttatttatttgattaatttccctctgatatttggcggttctttccgaattcgtttggccaaaaatcgttttagcatttgattaagcagctgaagtacaacaaatggacggagcagttgtgccagtcgatcttcggtggggatttccgcactttttaccgtcgcttcaaaatggtgatgatttgcctacgcaaacggaaatctgcccattacgagcgacttaccgatgcacaattggcgtcacacgtggctgaggtgaaacgaaattattcagtttttctagttgaaaataaatattttttagatgatcattgaaaagtttcacaacaaggagaatcagaccaccattttgatggttttgctcagcaatagtgagcgggaagtgaagtgtgcggaccgcgaccacggctattgcaggttcaaatagttttccaaattttttatgaagtatagtggctctatgggaattgaatgttgtgggttatggaatttgatacgaaagaaattgccttttgttagcatgacgacggatgcagttttttcgcggggggggggtgagtagcaccctcatgagtgacgatttttgcaattccaaggcacggcctgtgaaattggatccgttttttaaaatcagaatccagacctcttattgttaacgcatcaaaatattctttaggattgcgcatatgttgttgaagctattgactcgcagtcaattggaaaaattgctcgaagtgaccgcggcgaagagcggaaaaaacgcattgcatttggccactgccactggacagtcatgtcaactgcaagtactgctcgctcttacaggtcattttaccaacttggaatttaacgcattgtcttccaacgaccgtctttttaattgaatgattaggtatcgaatgtttcatccttttagaaattgatgcaaatcatttcgatttctcgatgcgtgcagcgcttcattacgcaattgagcgcaataatttggatatggtattattttattctcacttataatatattttttgcttttttatgccttctttttcaggttcgtcgcactttcacctgtccattttattcggtttggtggccgctgcagaaggtttcaacagaataatgcacaaattacggtgatttttgt

SEQ ID NO: 33994 - DNA, 910 bp, Heterodera glycines
  unsure (1)..(910): unsure at all n locations
gcctggcaggtcacatggtgtatattaaagtgaatatcaatgatttcgcattgaatataaatagaaattattattttgaagatcggaattggacataataacttaaataaagaatccgcatccctttattctcgctgtgggtgtcggcacaatctttgttttaattgcgcttaatcgcctgaatagcgtcccttgaggcgtaaaatgacggacaattggtagagaatggccgacttgtacttggcatgcacatgattcgcctcaattccctgcaaaatgccgagtgcgttctgcaggaacacaagagctttgttcaggtccctgaaatttcgtcatttttaatgccgtcaaaggaattgacagcttagggtagaatttccgaataatttagctgactatgtttagccacctgatcagtgtgaacaggttgcccagcccgaggctcagctgcagctccagcagtttgtccgcgttcgcattcgctattttcatggccttttcaaactgttgtaagctggactggaagttggacagccccatgtgggcgagtgcatcgcactgaaatggcaactcaaaatgatcaattaactagcttaaacaaaactcattaaattaaatggacaaaggggagaaagcaattgaccatttttctcgagcactggggcctatntcaattcagatcatatcccagatatgactctatgaatcatatcgccgatatgatatcgtatcgtatgatgccgtcgtcacatatgacaccccttcccttgtgcaaatcatatgcgggtgtatccgctccgaagcggagacatgccaaatcgtatataggataaaaattcataaaaaattttaaacttaatcgaaaattttcatttanaaaagattttatagaatgaacctctattattga

SEQ ID NO: 33995 - DNA, 1794 bp, Heterodera glycines
agtacagaagcctacaaccgaataaaccggctgtatggtgccggtattggaatcgccttgtccgggaaactccgaatcggacacgctcatttgcccgcgcttgccatcccacttgccggtgagtataatctcctcgccgcggccgcaagcggtccttcaagaagtggcggttgaaccataccgccgtcagcaggaactcatcgaccatcaccttgcaggatagtcgggacttgccgctgtagcgctgcagcaccggctctccgatgatataccccttcaccgtgacgcggtcgccgtccttcacactagctaaatcacgcaccgtgtaatcctcataccggaacggcacatattccagtaaatccataaccgtaaaaatgcccatggagttgagctcaagtgccttctgagcgcccactccatggacttcgcgtacttcgaattgattcaaatccatctcttacaccgtactcacgaacgctgcgatggtgcctggtccagcgtgtgcgccaataacaggtcccagtgtaatgtagtccacatgctctacaacaaattgctgcatgatggccgcgcgcagctgttccgcaccttccaaattgtttgcatgagcaatatgtaaactgcggattgtcttaccgggtacatccgccgccaacagctctaagattcgcgcaaccgcttttttgtgaccgcgaaccttatcaatcgcagcaacttcgcccgttcgatccagcgaaagaatgggctttatgtttagcaaagaaccgaaaagagcggatgctttgccgattcttccacctttttgcagaaattctagcgtatctacgaggaagtatatgtaaaagttctctctcatcgttcgtacaagttccaaatctcatcaacactttgccccgccttagctgctcgggcagcagctacagcaagagcgccaatcccataggaagccgagcaggaatcaaacacatgaaccttgcctgacgagtcctccagcatcgtggaagccagcagcgctgactggtatgttccgctcagcacggatgccaagtgaatcgagatcacctccgtatcgggctctcccagcagtccctgatacaagtccagaaactccgcaggagacggctgcgacgttcggggaaagtgcggtgacgaggtcagcttcggataaaattcctcagactgcagcgtcaccgtatctaaatattcttcatctccaaaatgaatcttgagaggcaccatctcgatgttaagttcttgtctgagtgccaaaggtatgtcggccgtgctgtccgttacgatacgaatgtttgtcaacagggctcactccatttcacgaatttactccacggctaatggtattcttttactcaacggaaaacaggtacgcatacaaaggctgtccgccaggatgaagctcaatttcaatgtcgggataagccgcctgaatgaacgcctccagctcctccgtctctgcatcaacggcatcttctccggtgaggatagtgacaatttcgctgctttcttcaatcatttcctccagcagcttcttgcaagcatccagaagactcggctgtgaagatacaatgcgcccatcttgaatgccaataaaatggccctgtttgatgtcaataccgtccgtgttcgtatcgcgcacgagcgtaagtaacttggcccgatttgacacgtcgaagtgattcactcatggcttccgtatttgttttggcatccgctttctcttggaacgcctagaatggctgcaagaccctgcggaatcgattggacgggacacaa

SEQ ID NO: 33996 - DNA, 846 bp, Heterodera glycines
tatgtgtttttacccgctggaagtttcagtaacgagtgcatttgtacaattcagtacctgttctgtattcggattcatagagaagtctatttgatatgttccattttgaagtctctatcgtttcggcgctgtcatttccggcgccgtcgtttcggcgccagggtcgtttcggcgccaaaccaaaaaaaatcatgaatcagagggaagggcacctatacaccttcgataaatcaactgcggataggatggtatgacaaaggtttggagatgcgaattcaatgacatttgcaaagtaagaaattgacgaccatttcattttttacgattcctcagcagtgaactgtgcagaaagtcaagacagcgacaaaacgttcactcaccacatatgaactgccagcacagtgacccgttgacgaagatcagttcctattgagtgactcctgtatttctttcgtgcccggaacgaaaatccacagcggtaacttcttgaagaaaaaaaaatttgcattcagcttcttttcaaggattctagtgggcgcgaatctttcggtcggtgggctgatcgaactaaagaatgtctcggagacggctgttatgggcaaacaaaaatgaaaatgatcgaaattacaacataaaggaaaatcaccatataaacaaatgtgcaaccctggcttacaaaatgccaatttcaaataaatttgaactaaataatcttttatctgcattcgcacttttttatttgcctatttttgttttttcttggtatccagcgattgcattttcttatctttttgtgtattttactgtcggattgtccactgtcggattgtcctcactctcggattg

SEQ ID NO: 33997 - DNA, 942 bp, Heterodera glycines
  unsure (1)..(942): unsure at all n locations
agcatgcaaagcattggtgcgcttgagttacggtccgtaaaacgcgaattagaaccacaagttcgcgccagcacaccaaaaccccacagccgagctgagcaagtaacgtaagaacacgtacaagtacatgatcccacgaagcaacgcacaagcagtgcattttatggtaacgaccctgaaccaggcgtgccaatggatgtaactccaatggcgcaatgtgcattcgaatgttttgtgttcaaggtttctgcagttcgcactaattatcgcagttggctgcgttcttcatcgatccacgagccgagtgatccaccgataagactagaattcattcttcaacagaagtgtaaaaaaaaataatgaaaaaaaaagaaaaagctggcggtgcccgagctgacactcattgagtcttaagccacgtgctaggccaagcacgggcactaccgcgtcgtctcatcacggccacggacgtagcagcaagcacaaacacaccgctagttacggcacgtaagaccgggaacgaaaccaccatccccagtcagtgtgttatgtgcctgccacaacaaccgctcaacgacgcacagacgccagcacagccgttaggtcgccccacgagcgtgcatcccacattggcgcagcgaaccagccaagcgaggcggcccgccaccgacacattgccacgcagcagccatacacaggctttcacacgtgcagcactgagcggtataccacagctccaacgtatggaagcaccccaaaagcatggctcgtgaggcagctgccccgtaatgttgggcagcgtccacaagtcatctcgaacgacctgtgcccatcagcggacgggggncatttggtggtgccaacgctagcccacaggacagcnaggtaggtgggtgataggaatcacttgggtaatgatccagcagcaggttcacctacagc

SEQ ID NO: 33998 - DNA, 1026 bp, Heterodera glycines
aatgatgttttattgctttaattacccacggttgagttgcctctacatgttttttctaattatcttgtataaaaagcttatcaaatgaaagattaacataaaattatgaataaaaacatctttaatattaattaaataaataaacttttctttataaaaagaattgaaaaaaagtaaaagtgggttcttcaataatattgttgatttttatcatttccataaaaagcgacattattatgatacgttaccaggatcgataatataaaattcatttttaaaataaaattaaacagaataatgaagaatttaaaaaattgagcgtatctctatgataaaatattataaaaataatgaaaaaatgaaataattgaaaaataaaatcaatttatatgaaaaccatttggatttttcatttaaatcctttactctttttcattgaaaaggttaattaatgattgaaaaatgtctaatcaaatggataaaaaaataataaaaatcaaccttaacaaaatcaattgaagaagattaatttaaatatgttcataggtcaataaaatatgtaataaccagacaaataaaaatggtgaacccgtcgagactgataagaaacggttcattcctgttcatgaaactcagcaacacaacaacaacaaccaacaaccgcagcatgaccgtttctgcatggacattcaaaatttaaaaatgcccaactcacaaaaacgggaccggttgagagcaactatgaaatttacttggatattgttattaaattaaaataattgattaattgaattcttcaaatttcagtgaaattttattatggcattaatttataactaagaaacataaataaattggtaaaaggtaataaacagaaaatagcggtcgggatatgttaaaaatgttacaataattaaaaaaaacaataaatttaaatttcaaagcgggcaaaatattaaaatattaaaaatataaaatcagaatatatgagaaatatttcaagactgacttttttaaatagttttt

SEQ ID NO: 33999 - DNA, 997 bp, Heterodera glycines
  unsure (1)..(997): unsure at all n locations
atagccaccgcggctcatcgttaaactttagcgtgcttctttattctctggagctgcgatcagcccacaaaagaggtcactaaatttgtattccaaatataattatcaccctctctcatagccaccgcggcacatcgttaagctttagcgtgcttcttaaattctctggagctgcgatcagcccacaaaagaggtcactaaatttgtcttccaaatataattatcaccctctctcatagccaccgcggctcatcgttaaactttagcgtgcttcttaaattctctggagctgcgatcagcccacaaaagaggtcactaaatttgtattccaaatatcattatcaccctctctcatagccaccgcggcacatcgttaagctttagcgtgcttcttaaattctctggagctgcgatcagcccgcaaaagaggtcactaaatttgtcttccaaatataattatcaccctctctcatagccaccgcggctcatcgttaaactttagcgtgcttcttaaattctctggagctgcgatcagcccacaaaagaggtcactaaatttgtattccaaatataattatcaccctctctcatagccaccgcggcacatcgttaagctttagcgtgcttcttaaattctctggagctgcgatcagcccacaaaagaggtcactaaatttgtcttccaaatataattatcaccctctctcatagccaccgcggctcatcgttaaactttagcgtgcttcttaaattctctggagctgcgatcagcccacaaaagaggtcactagatttgtattccaaatatcattatcaccctctctcatagccaccgcggcacatcgntaagctttagcgtgcttcttaattctctggagctgcgatcagcccacaaaagaggtcactagatttgtattccaatatcattatcaccctctctcatagccaccagcgcacatcgttaagctttagcgtgcttcttaaattctctggagct

SEQ ID NO: 34000 - DNA, 722 bp, Heterodera glycines
ttcgatctctgttcatgcattgcatttcaaaattgaaattttctttttaagtttggcgttttgttttttgatttgttgcttcgagggtaaagcctcaacttcgtcaaaatcggaaaaaatattgaataaataaaaacaaaataaattaaaaaaaaaacttttttttttcttaattttaaacgaatgttgaattaggttgttcgacacatgttgggttttagaattacattttaattaaattttaattcaactgagatttccttattccaattaatttctcatattcattcatccattcaaattggaatgccctcgaacatggacagaagcaaagaaacggaagaaaagaaaagcaccgtttcccaattccttcattgtccgacaccgtttccaccaaattttgtcggcggcaaattaaaaagaaaaagatagcggatggatgcgcgcgcgaaatttttccgcactcctcctcgcacctaatgggcattttgagtggcggcacaaatctgattaactggcgctttccaccgatgcgctttgaccaccaacaacaataaacaggtggttgttgtggcgcgcagcggcgatgccgcgactgcgcccctcaaattattgagagtgccggacgagatgggtcgcgtacgtccggaaacagtgcccaacaattgttgtcttcatcattcatgcagcacatccaagcggcgaagcgggggggggggggg

SEQ ID NO: 34001 - DNA, 1218 bp, Heterodera glycines
  unsure (1)..(1218): unsure at all n locations
tcaaaatgatgcctcagaatccccaatcacacagggattgtgaggtcttaacgatgtcaaaagtaaaatctgatcacgtaatcctgatcagcgtcataaaatacccctaaagacatgtttttggaatattttcggtaaaaaaatttttccacccaaacatcctggtcacccccctatggtcccgaaacctaaaatcacttttatttttataacaattcgcaaaaaagagataaaaattggccttggacgggcgcttcgctcccgtttttaaaatttttttggtcttggacgggcgcttcgcgcccgtttttaaaagaagtacttttacttattaaagataaagttcgaaatttataatatagaatatttattgaaattgaaaggaattaatttctcgaaaattcaaattaaataaaacagttattcatcagaaaataatttaaaatttattaataaaaccatttaaataaaaaaattaaataatttaaaataccccttgagatttttcaaatattcgcccaaattcccaagggccaaaaaatttgaaaatattttcgaatttttaaaaaattctaaaatcgtacattcgatcgattattcgtcgtattttaatttttcggacaaattctaaataaaaaaacaaataaattctttagtttaaaaataaataaaaaatcaattttaaataaaacaattattcgaacaaaaaataaaatttaaaaaatttatttattatcggattaaaaaactatttatattaattaaaaacattcgtaaaataagccaaaaataaaaagaaaaataatgtacaccgcccggatccgaacttggtcccccccctcaaaatgatgccccagaatccccaatcacacagggaaaaatttatataatagagcaaaaaattgcggatttttgttgtattttacttttcccaaataatttttcagaaggcagttacgaatttttttctgaaaaatcgaaaatttccagaaattctggaataacttttgtatttttagagataaaaattccatataaatcccataaaattctccttatttttctatatttttaaagctttattgcattanaattgtctaacatttaagtgagttgcgaattttcaaatcttagcccanaatctncagggccaaaaaattgaaaaatatttttgaatttttannaaattccnatattatgaaacttaaataaacatca

SEQ ID NO: 34002 - DNA, 941 bp, Heterodera glycines
cataacttggtacacaggagagaagtgtacaacgaaaatgatgttcacaatgccgatcatcaatacaatgaggaaaattaggcctgttttaagcccaaacagagcatgaaaggtggacgcccagtcgaaactgaagtcagcccagcctgaattgctggcctcttcgaggctttcggagactcgggctccgaattctgactgttgtcggagtgggatgtaatggagttgtcccatcaaggagaatttggttcttccagccaagcacatgacatggcacgacgtgcttatttcggctttttggaatgggagcacgacagtgtggtccgttatattcggaccacatttgctcgtgaaatgcgaaccgtcttcgcattgaatgtcggccaatgtttggccgatgtcggtgtggcacgagtaagagaactgagctcccgtcgcacatttgtagcagccagagatgtgctttggtgtgattgtacacaaactctggtgcatttccaaggacatttgaaggctgtccatttgaatgttcatttggaccggactatatccggttatggcgaatattcgccttccgatattccgcagttcgtaatggcggaatgagagcggaagtctccgctgagggtcttccattagaccctcgagattggcgacgcgacaatggcacgagacagtcccgtctgtgtggtcgggaagacagcccgtgcatgcgtcaattcccagagtacaattgaaagcttgggcggctttcaagtctgtacaatggaaagagtccgtgattttctcacggacaagggcgacatttcgcccttcaatcaggaagtcagcgttcaataggggggccggtgcttggctgacccctattgttgaaaccgctgatgttgtgccatttgagcacacgacctggaagaagcacaggttcaactgtggcacttctt

SEQ ID NO: 34003 - DNA, 1310 bp, Heterodera glycines
  unsure (1)..(1310): unsure at all n locations
ggcccccgtttttgggcccccgcgtttgggcccccgtttttgggccccgcgtttgggcccccgtttttgggccccgcgtttgggcccccgtttttgggccccagggtcgtttgggccccaacccaaaaatagaaaaatgtgcttttttaaaaattaagattctaaaaactaagcctgaaggatccctcgccacttggcataagttaggtttaaatatttcatcaaatgatttttgatggatttttttcttttctgatccgatcggatcaattagaatgatcaaaaataaaattaaactcagtaatgggcacaatttcatttcttttgcattaagctttaatttgaaaaaaaagaaaagatgacgcttctttataaagttgttttaaaaaacaattttcttagttatagaaaaatattaaatggaaatgattggcaaaaaatgattggcattttatttaaaattgaaatattatacataattgtaaaaaaaaaaaaaattgatgacgagaatagcaatttgtcaattgcctgtgattggctatttgaaaaccaggacattttgtgtaaagctcaggacattaacggaacaaatagaaaaaataagcattttgaaggttttttgaaactagtacaaatatagaaaaataaaggacatttctgatcattataataaatgaaaaaaatttataaaatgaacttcatggcctatgaatttgaaattttctataacattttttgtttttaaaattcagtcaaaaactcaatttttgcgtttttcctccaaaatactcgacgacaacagaggcaaaaaaagctaatggaaaattttttgaaaaatcttttaaactaatttaatgtcatacgatttggagtacagcagaagggattcgcagttctcgaatcggatcggggaaaaccctaaatacacaaaaacacaataaaatttgaattattaaagcagcaatttgtttaaattatgaattgattgatgaaaatcggggatgacaccaacaaatcaactgacaattattagcataactgtgatcaaatggaacaaaattcggcaaataaccaaacgaatacccaaagtgccggctgagaaggaagcgacggcccaaccttttggaacattttattgaatgcctaattaggcattagagtatggcgcaattttcaacgttttataattcacactaaaaagttggttaattttacatgaaattcttcttcaattccttcttcgaatgttttcccaattgcataaattcattttttattttaaaatatttttcaataatnttctctttttt

SEQ ID NO: 34004 - DNA, 601 bp, Heterodera glycines
aaaaaaacaaaaaaaaaatcaaaaaaaaaaaaaaaaaaaaaaaaaaaaaaaaaaaaaaaaaaaaataaaaaaaaaaaaaaaaaaacaaaaaaacccaccgcgggggggggggggggggggggcggggggagagaaaaataaattatattttcctcctccccccccccccccccccctcccctttctttcaaaaaaaaagagaagggagggggggtctcccctttccctcttttaataaaaaaaatatatttttttcccccccccaaacaaaaaaaaaaaaaaaaaaaaaaaaaaaaaaaaaaaaaaggggggggataaaaaaacaaacaaaaaaaaaataaaaattttttctcctccccccccaacacaaaaaactatacacccaaaaaagagaaaaagggggccccctttttttttttttttcttcccaccaaacaaaaaaaaaaattttaaaaaaaaaaaaaaaaaaaaaaacaaaaaaaaaaaaaaaaaaccccccccaaaaatttttgttttttttttttaaaaaaagaaattttttttaaaaaaaaaaaaaaaaaaaaaaaaaaaaaaaaattttttttttttaaaaaaaaaaaaa

SEQ ID NO: 34005 - DNA, 122 bp, Heterodera glycines
tttttttttttttttttttttttttttttttttttttttttttttttttttttttttttttttttttttttttttttttttttctttttttttttttttttttttttttttttttctttttt

SEQ ID NO: 34006 - DNA, 1176 bp, Heterodera glycines
  unsure (1)..(1176): unsure at all n locations
gggggggggggggggggggggggggggggggagggggggggggggggggggaggggggggggaggttgttcatatagattatatatatttttagagatcatttgtacggacacccatcttttggctaaaggggaaggaagggggggtgggggaggggggggggtgtggagcacaaaaacatttaggtgggggattttgtggcccgggggtccccatagtgggccggccgggcgctccaaaaaacccttttttttttttaaaaagtatatcccaaaattctccaaaattgtggtcatttttaaggccaaaattgtggtagcaaaagggctcataacatacaaaaatttttcccgggcgggcgcctattggccaccgcccggcttcccggtgttcgcgaaattttttttgagaaacccgcaccggcaaaaaaaagagattttaaaaagcaaaaaaaaaaaaggccgtcgatttacatggccgggaccatttcgcaaaaaattcggttgccccccncctcttttcatgtatgatttggtcattgatcacaaaactgacaccaaaatctgaccaattctgaattcttaatctaaaaatgcacaaaaaattgaaatttttgaattttcgacttttggttaaagtttccaggattcagaattggtcttaattgttgtcagattcgtgagcgagaagttgagaaaaactgtgagtaaatcagcccacctctgcgtttatttgcttctgtcgactttcccgtgccaacactttcgactttcgtacgcccattttcgctccttcgccgtccgccgcctcatttttctctttggcgctgtcctttttggcacttttcgccggagttgtgccatccaaaaatgctgccaaatctgaaaatatgaaaggaggaggtgaaaaaagcccgagtttttgtgtatgtttagcttttgtttatttgtaaagccttaattacatccaaaaaatgggattaaacccagaaaattacagttttcaaaaagaaaaaggggtgttgccttttccactcttaaattagcaaccaaaaaattgccaaaaacaaacactccttttgaggaaccgtgggagggggagtccggcagtgccgttagcgccccgctgggaaattttttttgagttttttatggatttgttaggaaaactagccaa

SEQ ID NO: 34007 - DNA, 312 bp, Heterodera glycines
  unsure (1)..(312): unsure at all n locations
ttttttttctatttttttcttttttttttcttttttatttttttttcttttttttttttttttttttttttttttctttcttgataaaatatgcccccccctcccccctttgttttttttttttttttttttcttttttttgtcttcttttttctttttctatttttgngttattaaaaaaaaaaaaaaaaaaaaaaaaactaaaaaaaaaaaaacattgcttgtttaaaaaaatatctctaggttttttttttttttttctttttttttttttttttttttttttttttttttttgttctctttttttttt

SEQ ID NO: 34008 - DNA, 831 bp, Heterodera glycines
  unsure (1)..(831): unsure at all n locations
ctgctttnggtggaagatgaatttactggactgatcggagtagggatgggccaacgaatgtctcccaaagtgtcggcgattggcctttccctgcggcggcgatattccctcagcaccgaattggccattgaagctaatgattgttttaatttggctgctttatgactgatcgaattggcttatgacttttgtttctgttctccgctgtccaaatttcacttttagtcatccgtccctttcgttctcccttcactcataaattaatctttctttgaaatcgtcttatgaattctttttcattgctcacacattttccgttttgagccctccaaggaacttaggataacttacgcgaaaataggatatccatgaaagatttcaatttttattcgagttagcttcatggatcagaaattagttcgagatacatgcccgtactcacgattaccgacctttgcaaccccggataaaaaattatcatgcttctttatattaaaaaaattgtgcagaacaaaaggggccccccttttgaaaaactctacaaaaactgacactgtccatctagtgccaaattatccttccaaattgaatatactatttttcataacctattgtcaataaatcaaaggatcacttcttttatttacataaatctttgagaaggcataccgattcttcattaactacatcctaacgaacaccctaaaataatgcaagaagattctcgaacatcacttaacaatgcctttttgcttgcttactatactcgcatgaaaatggagcgtcatataactataatattatacatatacagtaactcatgcctaattt

SEQ ID NO: 34009 - DNA, 703 bp, Heterodera glycines
ttcttggcttatgtcgtaataaaacacacttcaaaaccatctttaacacttaaatttgtaagcattagcacaactaaaaatatgctgtgatgagactggggttttcttctgtttttttctctcgtttttctcggctattccctcgcattctcattcctaccttttctctaccacttccttaacataccctctcttatctttgtgactgtcgtttcgatgtctctctcttttctctcctactcttaccgcctgtctctatctctctcgtccaccctcctgtctcgctctccccactcctactctctctctctctctccccctttaatctgtcccgtatttggccatcccctgaggggtcttttgcactctgtcgcccacaacggagaggaaatgtttttggatgaaatctaatttttttgcacttaaaaatgaataatttttggctttttggaatataagtgggcgaaaattttatgcaaaactattgaattgacaaatcgaaatttttaaatttacaacaaatataatggcaagttttcttgattttttttgctttgaaggacgtttttgttattccaggcagattaagagccgggcgattttacacgtagttttattcgtcatttctgttgtctgttggacagtgagattttaacagatgaatatagaccagaaaaagctagatatttttttttgtccaata

SEQ ID NO: 34010 - DNA, 1003 bp, Heterodera glycines
  unsure (1)..(1003): unsure at all n locations
cgaatcaagtgtcggaaaattgtggtcagaatccttcccaccggggttgacccgtgtcttaccccatttaaaagttcccccgggaattatatggatatttatatttttttgatggaatgtgggaggtntgaaangtaggaaaaatatgtttttagattgggttgaagattataggaaggatttntatantaatatttatgatatttttgaatatttagagatttatgtgaatattttgatatttttaaatattttggaattttgggtaatattttatgtngatattttggaatttttgaaaaaaacatatattagaatggtattaagtaggtaaattagaatttttgagaaaaaaaattgaaaaatttttcaaaaatcattttttagacaaaattctcgagaataaagttaaattttattaaaaattaataaattatgtcaaaaaataagcaaaaaagagaaaatttaggttgtgttgttgattttgcgctaatttcctcttcctgcttcaaatttttattctaagcaacattttaactgaaatactttgtggaggtaaggaaattttaaaaaatgtaaataaaaaaaaccaccaccaaaatagactaaacgtctacctaaattatgaaaaatttctccaacaaaataaaaacctaaaactgaaacaaaaccatgagaaaaaaaaatgaaaaaaataaaaatattaaaaaaaggaagtagaaaatgcagaaagaaaagaaattttaaagagtttgatctgaataaaaaagagccccaaaaaaaaaatattaaattaaaacctaaaaaagggattactctcgtacagttgcttagtttaggcttaggcaggcagcctaaattttaggctaggcttacgcttgggcttgcttgggtctatgcttaggcatacgctaaattattttgtaaaatatgagttgacgtttctatgagttgccttttgtacttgtacgagttatcattagggagtcccaattatatggaa

SEQ ID NO: 34011 - DNA, 497 bp, Heterodera glycines
cgtaggaagaaagggggggggggacggattggcattcctttagagaagagataaaaaggtgtgaatgatcatccccctctggtggcggaggttcgttcacttttcgttcgctttgctttctgtcgctttttcaccaccgaatcgtccgccgttttcacttcgccacacaattcgcttcactttatcatccggactcatttcccatccattttccaaatgatgaattccattttcgggttttacgaccaacagcaattaacgcccgtcgtctatgcccaactttagccccttttcccgcccacctggcgtcaattggcaaattattctccttcccccgaaggatttatcattaattttccgtccttctgtctgtctcttgtccttccttgctcacgtatcctttatctgtccttattcgctgatccaaagcccaattagggcagcgagtgtgcttcttctttcctcagtcaacccaccgggcatcggtgtcatccccc

SEQ ID NO: 34012 - DNA, 1228 bp, Heterodera glycines
  unsure (1)..(1228): unsure at all n locations
aaatcaaaatcctaataaaatntagtgaatttctccgcctcttatttgtgcaaaattttcgaaaaagtaattttctatttaaaattaaaaaattcagaagcaaattcaagaatttttttatttttaaatgcattttttaccacatgaattatgattaaatttttgcgtttcgaattcattttggaattaagaaaaataaaaattgatactcatttgatcatttttagcgcactttaagcaccgccgttaggcagcgcagttacaaaatttattccatgccacagatattatgggcaggacacgccaagtacctcaaacttgggtaattaaaccgaagaaagaagtgcagtggggaagaatgacgcccaaaatgaaggaaatattcgatgctgtgcgaactctttgtgacccctctctgactctgccaatgcagcagttgaccatttttaccactatttttctctcactcatcgtctgctcgtctctcctttattataagctattttcctaagccaacgcccttttctccctcttttctgttagtcatttctcattggtgttgacgatccaacattcagtgtacaaatttgttaaacctctcaacattttaaatcaaaatcctaataaaaatttcgttgaatttctccgcctcttatttgtgcaaaattttcgaaaaagtaattttctatttaaaattaaaaaattcagaagcaaattcaagaattttttttatttttaaatgcattttttaccacatgaattatgattaaatttttgcgtttcgaattcattttggaattaagaaaaataaaaattgataatcatttgatcatttttagcgcactttaagcaccgccgttaggcagcgcagttccaaaatttattccatgccacagatattatgggcaggacacgccaagtacctcaaacttgggtaattaaaccgaagaaagaagtgcagtggggaagaatgacgcccaaaatgaaggaaatattcgatgctgtgcgaactctttgtgacccctctctgactctgccaatgcagcagttgaccatttttaccactatttttctctcactcatcgtctgctcgtctctcctttattataagctattttcctaagccaacgcccttttctgttagtcatctctcattggtgttgacgatccgacattcagtgtacaaatttgtttaaccctctcacatttcaatcaaatcctaataaaa

SEQ ID NO: 34013 - DNA, 1621 bp, Heterodera glycines
tttggggatgttttgacaaaagatgggtacagtccatccctgaacaatcgagaggtaatcgaagcctttcctgtgccgaaaaatgccaaagaagtgaagagatttttgggaatgatgtcatttttcagaaaattcatccctgattttgcaaaattagcctatcccttaaatcaattgacaaaacaggagaacatagagtttaaatgggcagatcaggagacagaagcttttgaaaacttgaaaaggcaattacttaaagcgccctgtcttagagcgccggactataagctgccattttatttgtttaccgacgcatccgcaactgcatatgccggagcattgatgcagtctgagaaaagtgatgaaatgcatgcggttgggttttggtcgaggacactaaccgcaactgaggcaaaactcccggcaacccacggggaattggccgcaattgtgcatgcggtgcaaaattttcggccaataatatatggctccgaaataatcattttaactgaccatcgcccactgacttttttgttttcaaagtcgagttccaacccaaaattaaaccgttggctaatggctttacaagagtttgaacccaaggttatttacttggagggaaaggcaaaccgagtggcagacgctctgtcacgtgtgccaataaagtgggaacaaatagaagcaaaaataaaagaagaaataccatatttgctcgtttcagaagaaaacgaaaatgaaataagtcgtgataaaattgagaaagagacaattgaggacccaattttgtcagaaattgttttgaaaataagagaaaattggtcagagcccgtagaggaaaagctaaaaccgttttacagaatacgagaccaattgtacttagaggggaaactcattcgaaaaaaacccctaaggcaaattgtgatccctgagaaaatgcgtgatccgatcctaaaactgattcacagggcacattttggcatcgtacgcaataaggacagggcaaaaggattggtttggtggccaggtattaatgaaagcattgaggattttgtgaaaaaatgttggacatgccagagaaatgggccaaataaaccgcgcgagaaaccggaccgcagatggcctgaagcgcggttcccgtttgagcgcgtgcattctgatttggcaggcccaatttggggcaccaatttttttattgtaattgacgcattttcgaaatttcaatttgtgtaccaaatgagttcaacccactcttcgactcttattaatgcccttcatgaattattcggcatttgtggttcgccaaaaacatttgtaaccgataatggcactcaatacgtgtcaaatgaaatggaagaattcctcaaaggcgaaggggtgcgacacttaacctcggccccctaccacccttcatcaaacggcgaagcagagcgcttcgtcagaaccttcaaagaaggagttgggaaattgctagatgagggaaagtccctcaaaattgcacaattcgtttttatgcaggaatatagggcatcgccgtgtgcagcggcagagggagagagtcatcccaaaagtttttgggagagaatacggacagtgctggacacatataatgtcaactaatgcc

SEQ ID NO: 34014 - DNA, 1261 bp, Heterodera glycines
  unsure (1)..(1261): unsure at all n locations
cgaaagggaggacgttcacatgctcggagtgtgccaggttttattgaattgtatgtttaagcaatgtgtgtaattcagggcncaaaagtcaatgtgtttcaattgcacaaaataaagcgatttgtcggacgaagcgaagtgagttacagccgagtgaaggaagtgccgagcggactgctctcggtgaaactcgactcggtgggtgggacggtcgcgtgtccatttgcgaattgggctttttacagcgaatcagcgcgtgtcgcattagccccgatgcgactgcgctcgctgtggcctcactcgacggatttctgtcatttttcgtgatcgaagaagacactttgcaaatggccagtcgcattcagccgttgaacaacaatcacattgaggagattattttcctggacaaccttttcctcaacactcagtaagaacccatcactttggtgatttattttccgattcaaatcgaatttctaataaataaataaatttaaaagttttttatcgaaaaattctggcgcattctcttttttcattacattttatctcaccacagagaacagttttggaagtatgtgacgttggcttccgacaatggtcgacgattggccattttcgactgtgacacttgggaatgtttggccaaattgcgcttcgagtgtcccaaccaagtgggccgaatggaggtgttggtcgagccgaattcgcattttctgtttctcgtcgattacgacatgtcggtgagtgtttcgttcgaatgcgttggccgttcctccctaagtcgaaaagattaattcccagaatatgttctgcatcgagttgagcaatggtctccgttcctgttccccgctttgttttgcttcctgcactttggtcactttctcctctcaactcgtcagtgttgtgccctccaggctcactgagcacgtttcggacatcggtcggcatttcacttcgaattgcccttccatccaacgaatgttttgccctttttagtcggcgacctttcgttggaagaagacgagggaattggcgggggaaatggcgtcgcctttccccagcgcacttctgccatcgccactttggtggctctcacccataaagcgctgtccgaaataactttggaactcgaccgcttcttcaaagttaacccggcgttggcattgaccaccatcccccagttgngacggagtcgtcaccacagtcagcaaaactcggagcagcaccaaacggaggagcagccgcaaattgccctttt

SEQ ID NO: 34015 - DNA, 1013 bp, Heterodera glycines
atgagaattcatgtgaaattttctggaaataggttagttagggcctatttaaactgtaaaaaaaatattttggggcgatttgaaagagaaatagaaagaaccagtttagatgaagttttggtaagccaaaaataatccaatcatttaaaaatctataaaaaatttaaaaatgagaattcatgcgagattttctgaagcttaatagggcctagttaagctgtaaaaaaaatttggggcgatttgaaagagaatagaaagaaccaggttcgatgaagttttggtaagccaaaaaaaatccaaacatttaaaaatctataaaaaatttaaaaatgagaattcatgcgagattttctggaaataagcttaatagggcctagttaagctgtaaaaaaaatttggggcgatttgaaagagaatagaaagaaccaggttcgatgaagttttggtaagccaaaaaaaatccaaacatttaaaaatctataaaaaatttaaaaatgagaattcatgcgagattttctgaataagcttaatagggcctagttaagctgtaaaaaaaatttggggcgatttgaaagagaatagaaagaaccaggttcgatgaagttttggtaaaccaaaaaaaaatccaaacatttaaaaatctattaaaaaaataaaatagtgaagttttaaaaattaataaaaatttttaaattaagagttactggcgttagcatcatagcggtgcttttccttgtctttttgatgcccttgcaaaatctggtgcgcttctgatcagtttatataaaaaaagttaagcctaaactttttggcatgtttaaaaaggaattaaaaatttttaaaatatttattcatctccctttttgataatataagagtcagagtgccttattcaacttgtaaataaattttggtgcgtttcagagcagtttctgtaaaaatacttatgaattaattttgtaaaaaaataaataaataatgaaccctcctccttaataatttttcctgcgccc

SEQ ID NO: 34016 - DNA, 860 bp, Heterodera glycines
ttgtcttttgcataattaattcataagtatttttacagacatctctctgaaacgcaccaaattttatttacatgttagtttaggcactctgatgctttttctatcaaaaagggagatgaataaaatttttaaaaatttttaattcctttttaaacaggccaaaaagtttaggcttaactttttagtgaaaattcaatcactcatttttcgagtagtgatcagaagcgcaccagattttgcaggggcctaaaaaggtcaaggaaaggcgtctctgcgttgatttagcagtagtacctatgaatttaaattttctatgaatttttaaagttttttgaaatttttttaagtgcaaaagtggtggtgtctgcaaaaaattttcaccgggtttaaaaaatctaggaaaattagtaagcatttgtagtgttccgatacgtatccctgcaaaatttggtgagcccctgatcaattacaaattatttatggacgatcaaatttttagaaatttttatttatttttgcataattaattcataaatatttttttcagaaaatgctctgaaacgcaccaaattttatttacatgctagtttaggcactctgatgctttttctatcaaaaagggagatgaataaatttttaaaaatttttaattcctttttaaacaggccaaaaagtttaggcttaacttttttttcagaaacttatcagaagcgccccaaactttgcagggatactgaaaggaaaagaattaacctgttttatcacattagcttgtcatcagtttttataaaaaattttcaaaattctgagtctcctattattttatttttttttcaaattttgagggggggggggggggg

SEQ ID NO: 34017 - DNA, 891 bp, Heterodera glycines
tttccattgtcaaataatcgtgggtatcttgatggtttcattgttctaccatgagtaccgccgatgggacgtcgtcgcgcgacagggcaaaaatgcaaatgattttatcggttcctttttgcttttttttacttttccgtttttcaataaaaaatatatgtatgtatatggaatggaattttagagcgaagaactttcggaggaaatgctgcaaaatatccgtgctgacgaagcgtcgaaaaaggcaaatgaaaagaaaaaggctgttacgaggaaaatctcttctcgagagcagcaagttcagcttgacctcagcctggaactgaacgaagtttattcattattttacgttagttgcaaatttgtggtattttttcaggttggcgtcgtcgtcaaacatccccacactgtcttgaggtgccaatgctttatgtccaatttgtcatgggtttttttagtgctcgaattcaactgttgggtttccacattgaacccgttttgcacggggacagaggctggcaaaattggcattaaaagtaattttcttatttgtgtgccgtggtgccattttcaatgttttgtttcagatcggtccaccagaggaggacggagcagtccaaccatcaagcagctccatcgacctccaaacagcagaaggacaaagagacgagcggagattcgaaaatggcattgccacccccaaaattggccatcattgttgaagccaccgaaacattggacattaccatcgccaaatcattcctacaacagcttacccaactctctgaagtatgtccttttttgttttcttatttcctatttttctgttttaggcctttgataatgcttcctaacaaatcagcacccagcgatgtgagttgcctggcactt

SEQ ID NO: 34018 - DNA, 1032 bp, Heterodera glycines
  unsure (1)..(1032): unsure at all n locations
aataaaatatatttttaaatatttcgtccttctagtgcgtctagtattatttatctaattgtttctatctgtttttgtcgcctaattaaccctcaaagatacaatttaaaattttagcattattatgctatatttcaacagttcataaaatctttaaaattaaaattaaagtcacattcttaaatttaacttctcattaatttataaattttggcttcaactatatttaatccgatgatggaaatgaacctcaaattaaataatttatttaaaattaaaataagcatctctttttcaataatcaattatccgcttctgtcatctcgctgcccattttgatgaatgataaggctgcactgtaattaagacattgtttttgtccaatggaacaacaacattttgtgccctcgttgacggcaaaaggcgttttggcaaaaaagtgccaattaattggtgccgaaatttgtcgcttgtgcacaacagcagccaactggacaacaccaaagtgcaaagatcggtgacccatgggtattggatgtaaatgatggcactgtactggggataaaatggccagacgaattcgctgacggaaagctgaaattggaataagtttattttgtagttaataaaaatttaaattaaaaatatttttaaatttaaatttacatacaaaaaacaccgccaaaagggcgtggccagcaaaagtaagcagcgagtaaattaacagtttccgctcaatgacgtgacagtcgcttttcggtgccgtttataagcaattagtgtcaacaaattgactaagaaacataaaatcagaaaaatgatcgacgtcagagatttcaattgattagaataatccaaaaatgtccttgactgaaattagatgtcatattcatttttactggattaaatttttaaaaaagatatttataaaaaggacgcggatttttaagtttttacttattttttctgcngctttaactcgacgagaaatgcacgaaaaccacattnttttttttcgaaattttgcctttt

SEQ ID NO: 34019 - DNA, 904 bp, Heterodera glycines
ggagcaagaacgacaacgcaccctggtcttctcccccaaggcggaaagcaatgccattcgcccatcggaacgtcttcaggaagacagggaagccgccacaaaaatcctggaccatcttgaagttgaggcccaaccaaccgccgtctttcgactcggacgttacgacccgcagcgaacaacaccacgcccgctcaaggtggtcatgccaacaaccacacaccaacacatggcactcggaggatggaagcgtgagcgtgctcgactccgttctctacaaaacctgaaccgcctgttcgtccgcccagcgctgaccaaagaacaactcaaggaagaatatgaagcgcgcgtccgaaaacgtcaacaaaactctgctcccgtggcaccagcaatgcaacatcgccagacaaatgttccgactcccgtcaaaaaaaatggaccaaaccagaaggaggccagcgacgacatttccaaaccgccggaagtttttgaccaaacaatcctcgtatgttatgaagcattaaaatcattaccaccaaacgacaaaattgttcaccaaattcaatcactcgaaaaacaataccctcgtcttttcaataaatagttctgtcagacctccaaacatttcctcaacaaaaaaaaaacatttattccagtacttcacatttctcaccaaaatttttcctcaaaaaaaaaaaatttttttttctcttctacaaccctaaaaaaacaaataaccacttttccctttgttggaggtctgacttttctaatttctgcttctccttcaaaatttcaattcttttatcactgctttccatttcaccttatttccgccaaaagagtaagtggcacatgtccttcttttggttatttttatttttgaataaataaataaataattttt

SEQ ID NO: 34020 - DNA, 953 bp, Heterodera glycines
agtcagttcatttaaataattttatccaaaaatttttttttggttttcggggcagtccccctgaaccgatgcgcccagatttatggggagaccgaatccttccggaatagcttccctatagcctgtactttaattctgcgttggatttttgctccccataattgtttgagtaccccaaacggacacttgaaaaaatcgatttttttgttttcggggcagtccccccgaaccgatgcgcccagatttatggggagaccgaatccttccggaatagcttccctatagcttgtactttaattctgcgttggatttttgctccccataattgtttgagtaccccaaacggacacttgaaaaaatcgatttttttgttttcggggcagtccccccgaaccgatgcgcccagatttatggggagaccgaatccttccggaatagcttccctatagcctgtactttaattctgcgttggatttttgctccctccccataattgtttgagtaccccaaacggacacttgaataaatcgatttttttatttcataaatattttttcagaaagtgctctaaagcgcaccaaattttatttacaagttaattttagcactctgatgctttagtatcaaaaaggaagatggagaaaaaattttttaaaaatttttccttatattttggttatatcgttttgcttttggtggggtgcttggaacagtggaatcatgcgcacccgtccgatctggcaagttaagcaacgattgctgactagccaaaaggttcggtgccgtgatgaaacgaaccagcactgcttaccccgcggcacccggcacggtcccccgaaggaatggatttaattaaattctctccttcggggatttttttccattaggtcgtccgttagcgttcgattgctctagtcaatttttaaaaatttttgttgaaatatttgtcgtgc

SEQ ID NO: 34021 - DNA, 417 bp, Heterodera glycines
  unsure (1)..(417): unsure at all n locations
atgtccctntttgagcgaaaagaaaactcaattcacttttggacaattcaaaaaaatattttaaatccatggaaattaaatttaatgatttaatttaaaaactaagagtgtttgggttcggagggtgccgacagggaaaatcggacctttaaaatgaagggcattcgggtaaggattatattccctaaacacagcgccccaatttgggaccagagcgtttgggcccccgtttttgggccccggggtcgtttgggcccccgtttttgggccccggggtcgtttgggcccccgtttttgggccccggggtcgtttgggccccaacccaaaaatagaaaaatgtgcttttttaaaaattaagattctaaaaactacgactgagggaaccctctccactggacatcaattaggttgaatta

SEQ ID NO: 34022 - DNA, 962 bp, Heterodera glycines
aattagccctctcaattttccttcgggcctcagcccccctatctctttttcggccaattttgtaccgatcaaagccaaaatggcttaattcaggccccaatgtgcgcctgaatcgctaattagcttggcactttcgaatattacatataaattagccctctcaaattttccttcgggcctcagaaaatggctatctctttttcggccaattttgtaccgatcaaagggaaaatggcttaattcaggccccaatgtgcgcctgaatcgctaattagcttggcactttcgaatattacatataaattagccctctcaaattttccttcgggcctcagaaaatggctatctctttttcggccaattttgtaccgatcaaagggaaaatggcttaattcaggccccaatgtgcgcctgaatcgctaattagcttggcactttcgaatattacatataaattagccctctcaaattttccttcgggcctcagaaaatggctatctctttttcggccaattttgtaccgatcaaagggaaaatggcttaattcaggccccaatgtgcgcctgaatcgctaattagcttggcactttcgaatattacatataaattagccctctcaaattttccttcgggcctcagaaaatggctatctctttttcggccaattttgtaccgatcaaagggaaaatggcttaattcaggccccaatgtgcgcctgaatcgctaattagcttggcactttcgaatattacatataaattagccctctcaaattttccttcgggcctcagaaaatggctatctctttttcggccaatttagtaccgatcaaagggaaaatggcttaattcaggccccaatgtgcgcctgaatcgctaattagcttggcactttcgaatattacatataaattagcccctctcaaattttccttcgggcctcagaaaatggctatctctttt

SEQ ID NO: 34023 - DNA, 319 bp, Heterodera glycines
agcatttcaatcactggggactcaaaccaccagcatttcaatcactgggactaaacccaacagcatttcaatcacttactcaaaccaccagcatttcaatcactgggactaaacccaacagcatttcaatcactgggactcaaaccaccagcatttcaatcactgggactaaacccaacagcatttcaatcactgggactcaaaccaccagcatttcaatcactgggactcaacccaccagcatttcaatcactgggactaaacccaccagcatttcaatcactgggactcaaccaccagcatttcaatcactgggact

SEQ ID NO: 34024 - DNA, 986 bp, Heterodera glycines
ccaggaacaaaattgatccgcgatcggatcaaccaagaccttattttcgaacatggacggctccaccactaccaccaagaggacccaaacggaaattgatacaaacagaccaagcgtcagaattaaagcaaaaatcacaaaaactcagaggaatgagacaggcgagagtcagggagcaagaaggattgatgcttccgtttccaacgaggggagtcaagcggaagcgacggtcctgccaacagtagaaacggaaatcccaacctaaagccagcgtctcaggccacaaaaatggaaaaatcaattaaaaatgtgttagaacgcctctacaatgacccaaaatcccctgctgcgttcgccggtgttgacagactgtggctggaagccaaaaaagaattaggaaataaaattcgtaaaaatgatgtaaaacattacttggagggacatcgcacctacactttgatgcgcccaaggcgcgtaaattttctgcgcgctcgaacgactgcagccggttttatgaccgactgtcaggttgatttggctgattttcaagcactttcccaacacaacagcggcaatcgttatttaatggtggtaatcgatgtcctttctaaacggattttcgtaacacctcttcgtaccaagaaatccgatgacatggtagaaggctttaaacgagtgttttcaactatgccaatgaaaccacacagaattttctccgacaagggtacagaattcagaaatcagcagctgaaaaaaattttgatgaagaggaagttgagaaatatgagagcacacattctgagaagaaagcagcattagccgagcgcgcaatacgacaaatcaaaaatcgtgtatatcgttactttgcccaaacaaaaaccctcaattgggtggacgtaattgatcaaatttgttgatggcattaataaatcaccgagccgagtgcatgggatgcgaccgattgatgtgaactttaaaatttcaca

SEQ ID NO: 34025 - DNA, 597 bp, Heterodera glycines
  unsure (1)..(597): unsure at all n locations
acttaataggacaattaaaattntggtattagtacagccttttaagccaaaaaaatggtcttaaaatcttataaaaaatgcttccagagttttcgagggcgctgattatgaatttgaatccgatctccatttcggcctaattcagagttccgaacttaacttcgaacatttgtgtcgccgaagcgacacaaatttctttgaaattttcctttattttttgatacttttcgtcgatcaattttcccattcgctcgctcctcttttttatgactcagctctttttctctcttcatttttttgttatgagtcatcatttttgagggaattttttccctttgcttgtgcacatttcttcacgtgcctggccccgcccccatcgattgtgagggtataaaagcccggcccattctccattttcttgagtcttatcaattttcgattaagtcaggtggacaggttgctgtccagtaaattgtaattgtctaagttgaataaagattgaggaaagagtcttagtgttctccctatctgtgaaagggacgctcaggagcgctttcatacagagcattaagtccttgacccccctaggggcagaaa

SEQ ID NO: 34026 - DNA, 775 bp, Heterodera glycines
  unsure (1)..(775): unsure at all n locations
agaaaaattttctgtcaatttattgtccacaatttactttaatttaataaggccaaaatgatgaattggactgtgcaaattagacattaaattattacagaaagttttattgatggactgatgattagtttacgattttttaaatttttcaaaaaagaataaaaatgtctgtcagagaaaagagcatgctcaggtttcggaattttccaaatagtaaaataaaaacggttgaatcgatgtaaaaaggttagaaatgggtaggaaaatagaataaaggcgcgttcgccctttctttgtttttattgaatgtaaaaaaaagaaaaatatgtgaacttaaattaaaaacttaaccgagaaggtaaaattcaatcctaaaaagaaaaaactcatctggacatatgaatatattgtataatatgaattaaataataagctttaataataaagtaaaataatttaaagcaaaatcataatgcaatattttaaaatagatttaaatcattaaaattattcatttacaatgtattttgctataaagctgtggagaaattttcaaaaattttatgaaattttcatgtgccaagcccgtagcccgtgcccgtgtaaatgtgacacagtttaaaagggttttttctccggcgaaattgagatttttttgagtttgagtaatacatttcaccaaaataatcattttactgcataatttgattaaaaaatctatttcttcagnatctgaaacaaatattcagatttagattatataatttaaaaatag

SEQ ID NO: 34027 - DNA, 890 bp, Heterodera glycines
aaaaaaaagaattttgcaaaataaccgccaaaagtcatttgttgttgcaagaattcaccatttttcaacgggacgtcaaaatttaagccaaattgatagattcccagccgccccctccttttaacgacgcaccaaaatgcgttcgttcggctgtggtgccaatgccataacgggcaaaaatgaggaaaggccttggatggagtaatggcccgccaaatattcgggagtggcgcctgaaagcgcatcaataaaaagttaagcagctacaattggttagctaacgactcaaaaaagaattagaaatgataaaaggaagtgcccaattatggccgctttacgccacttacccaccggcacctgcgagtcgtacaccacgaggccaactttggtccattttgcggccgggtcgacattcattccacgcgaaatctgaaggaacattcgcatgggataattgtttattaaaagcccaaaatcagatcagggcgagggaatgccaaaattaaaagggtaattttcagcttatttcgcaaaaatgattaaaatcggtcgtcctttctcacaaaccaatgcctttgccaactctccgcgccgcgttttcagcggatttgagcgaattgtcacaggccgcggctgttcattgctgtccaaaaattcgagtaactaaaaattggaataaatttcattttgggttttccttataaaaccaacttcagccccggtggggaaaagctccatgaatttttccatcaaaaattcgttgtagtcgtaataggagcacaggtcttttaagagaagctgaaaagcggagaaaatatgaaaatataattgaaaaataaccttttaactctaaattttgccattttttcaatttttctcgccttttttat

SEQ ID NO: 34028 - DNA, 737 bp, Heterodera glycines
ttacggccttttttgacccccgtcatgacggattacggatggcgccgtaactgaaaaaatcgccgtaatgacggattacggatggccgtaactgaaaatcagttacgtccagccctgctcgaaacgcaaggaagtgaaataaatatcaatcgtctcagcatcctaattaccagcaggatttttaggttctaaaaaccgagaataggtacctaaataagatcgccattttcgggcacacgcacagaatttaaattctataaaaataaaaaggtcattgctatttttttttaaagaataacgcagtcaaacagtataattggagctaattcaaatcaaacccccgccccgcgaacagccacgcccgcccacgggctcgaaccctagtataaatgaactaaaaatccttttgtgattttttaaaaattatttatttctgtgttaaaaaagttaattgatattaaaataaaataggtaaacaaacaaaacgaaaaaataaaaatgtaacaaataaaatgaaataaaaacgaatgaaatggcaatgaaatattcatttgtaagttttctaattcaattgatcttattattttttaatctgttttttaaacatgaattcaaaagattacaaaagaatttctgtgaaaaagggggcactttaatgtttttgtggatcgatcattacggttttattaatgttaaattgtaattttcaataattaaagtacattttgtatggtcgg

SEQ ID NO: 34029 - DNA, 494 bp, Heterodera glycines
tcaatgccacaattcattggcggcagaaaatcgaaaaaaccaaaggggaaataattcttttttacatttatgattggatttttggttttttgtgatagcaaagtgaaatgtattcgagccgtaaattttaaacggaattggctaattattttttttagtacaaaagtgttgccgttttgcgtaaccgcttttgtcgtcataagacatttttaattggatgaatgctaattaatgtgaaatataatgacttgcacttacagtacgcctcatttgttcattattgtcttcgtcattttcccattaatgtaatgctctttcaatttataataaattttgtagacttcagataagggcatcgtaagtctggtcacatgccgtaagcaacattggcatcacgtatagacacatgtactaaaaacatttcttattgtctttaggtcggacagacaaaatgccaaaaaaaaataaggaaaatactaaaaatgaattaaaaa

SEQ ID NO: 34030 - DNA, 878 bp, Heterodera glycines
  unsure (1)..(878): unsure at all n locations
atcgatcactccgtcatcgcttttcttcgttcaaatcaccaaattttcgacaaaagaggcaccaatttagagttgtggatttattccgcacacagctcggatggccagctgatttttgacattttcgttcgtgaaatatggccaatttttgcatcaaacattcgccatttacgctttaacatggtgatcatttggacaatttgcgtcgtcacacttcgccaacaattctcactgatctcaaactgctgaattcaattcattcatttggtctgttgcctgatgccattggtgattattttgacgggccaaatgcaactgctggccaagcgttgaacaaatggttgcactctccgagaaaagatggccaacccaagcgattgcgttgtgcacttatgaaagaacaagcgtacttcgattgggtcaacaaattcaaggaggtgtggtccggagggggggggggnggagcaggacaaaaaatcaaggaagttaaaaaaaaatttcgttttttttgttgtggctgagtcgcagaccatttggccaaatggtctacgacttagttacaactttactgattttgattacctctatttttgttttccaatttgtttaggcatttctccgtgccatttcttccgtttgttaccaaattcattttgttgttcatgtgccgtcaatgcaactggtgccatttgaattggtgaacgaatggacaaaggaaaagctgacattggccaaagaaaacgaaaatgaatggatcaactgttggataatgaaacgatgcaaaattggggagaccgcggcgattcagcagcaaaagaaagatgaaaattggaacacagtgttattttggctttttagtggcactaattgcattgggt

SEQ ID NO: 34031 - DNA, 1489 bp, Heterodera glycines
acatgtcatgtctacatcatttcatctttggtgtcctcctcttccacgattggtaactctctcttgtctatttctgttggggcagtttcccgcccaatgtccatcgcgtctacaaatgacacagtagtcgacaaaccagacgctgatcgcatcctctacaatgtctctgtagcgcctgttattaatcctggttgccgaaaaaatgctagtccccacataaaattgtttgttaatactattttttggtcttactattattttagtagaaaaacgatttctatattttggcagtaacatgacttctagcggattttgaattttgaatccagttatttgcgcccatgcttcatctacaaggtcaagattttttacatccggtccaatttgatgcggaaagaatgttatcatcactctcatcatcatatacattaaaatcgacatcaattgcttttatctcatttcttacactttttataatattataaatagttccactttcctcgtttgggtttgatgagtataactcagaattcaaagaactaaaatattcaagcttttccactttcggtactgagattatactgcctaagcgtggatactgattcagttttacatttggatgaactaatgcaaaatatggccatttgtcctctttacccagccgaacagccattgcacactcacccattctctggaaaataatcatccttagctgatcatcactatttttatccctttttttctttttttgatattcatcgctttctggtttaaccattgcccatgcaagagtatcagtacatcttaaacctattccagaactagaaggacagtctatgttattaataggttctgttggattcttttcatcacttttttagtatctctcagttcagatgttttctcagtatcacattttattgccaaagctgccattgtttttctaatcatttctctacaatgatttatttctgcaattcttttcgtttccttttcattagtactttggcttgccgaagcaatattttgactgatatttttatttgtttcactgttttcttgcccgtttcctaccatatgacccgtgcatgccccttctattttacttgccgaagcaactgattgtacaccgaattcattactacaagtttccctagaaagattcctagtttgatcttcgttttggcttgccgaagcagttattcttcccttgcttgcctcctcctcctcctccaatgtcagcatttcgagcagatgtaaatcgtttgtgtcagtcaaagtcgtggtaggcggcagcggattgtttgacattcctaaattgattatgtgttattaatgatgatttttacgtgcatttattttaattaaatattaataacaaaaatgctaaagtattatttataattttcactaggaccgtattcctttttatttctgagaatgatattctgagaactctatcctttacaaaattataaatttttactaa

SEQ ID NO: 34032 - DNA, 685 bp, Heterodera glycines
  unsure (1)..(685): unsure at all n locations
gaaaacgaaaacacgaaaaaattttgttaatttcagccataatcaagaaacataaaactttaaattgtattaccaaattgaagaaattgaaatccaagattttttggaaaagagtaaaaatgaataaatcaagaattcttagctaggtcataatccggaaaaaccggtcaaaaattcgccggatcggaccggattggcattttcaaaaatgaccgatttccggacccggaactctaatcgtctccctaatcctgagcccaattccgtccgcgtccgaactagtcaaaaacggtgaaaatatattagtcgtattgtgcggcttagcgttcccttctgtttaatggtcagcgtactgataacggatatcagttgatcaactgactgactctcgaggaaatgtttccgtttaaacagagggacccgtgggaaaagcaagggaagagaagcggacaatgaaaaaagagaaaatgctttaaagcgaatgtggataaatggcgctttacaagaacaataccgcactttcactgatcaaagaatcaaaatcggaacgaaaggatctttttcctaaaatgctcgtcaattcgtcctcctcaggccaacaatttctttgccgtttcgtcaatttgtgccctcattntcgcttccatttttgcgcacaatcgcaccgccgcttttcgcattgcgt

SEQ ID NO: 34033 - DNA, 928 bp, Heterodera glycines
ttcaagcggcttcgccatcgtttatgggtgtctcttttctttcggtcttctcggcaatggttccgttctgctcgcttttgcacaaaacaaaaggtgatggtattttatgcccatttatgcggggggaaaatggaaaaacaaaaagggaatggcaaaaggaattttaagcggtaaaaactccggcggagcaaatttggcctatccgctttttctaatagtgatggtgttttgctgtaaatattctgagttatctcttccgtttagacttcgatcggctcgcaatttgttcctgctcaatctcatcctcaccgacatccttttgtgtctcaccgctgttccggtcacgccttggtccgaccgtcccctcctcccctgtccgtttccgtccccacccccgccctcttttaaggtatgcgctgactaaggattggagtttcggctctttgatgtgccgtctcgtgcccttgtccaactcttgcgctgtgttcgtcaccaggttggcattgtgccatttgctccgcccttctcccatttgttttcgtttagttggagcttgacagccatcgcggtggacaagttcatgcacatcatcgacttgacccggcaaccttttgtccttttgttagccgtccctcggcttcatctccccccccccccttcagtgaacagttctctctgcgaaccgcgggcttcgtcactttcgtcatttggactttgtcctcgctgctcaacatcccttaccttctctcctattcgttggtcaatgggttagtattcgtctttttgtgacacttttatttttggcacattttagtgattattatgtgccaaagaattcgactcccttttgcggacaattttgtgagaaaatgttcaaattggtggcatattaaaatggtcatgttgaggtgatgaattaaattggtca

SEQ ID NO: 34034 - DNA, 1013 bp, Heterodera glycines
agacactaatgtgtgtcatggcttttgaaaaactttagtgcgatgcactaatgtgtgtcatgttgtgccataaggaaatgccaaaaaacaagaagagatgatgaaaatgccaagaatgttgtgccataaggaaatgccacaagaaataagaaaagacgaggaaaagataagaacaagaagagatgatgaaaatgccaagaatgttgtgccatagggaaatgccacaagaaacatgaagagatgatgaaaatgccaagaatgttgtgcaatagggaaatgccacaagaaacaagaaaagacgacgaaaatgctaagaatgttgtgccataagcaaatgtcaacaaacaagaagagatgatgtgttaagaaatgttgtggcataaaaaatgccacaagaaaatagaagagacaatgaaaatgttaatgttgtgccttaagaaaatgccaataaacatgaagagctgatgaaaatgccaagaatgttgtgccataaggatgccacaagaaataagaaaagtcgaggaaaatgttcggttttatcattcatttccggttatggggtttgtgaagaattggtgagattgaattatggtgtctggaatagagccgaagactccagttacgagagcgcgaagcggccgagtgagtacctttggcgcaaaaatttggtgagggggccgaaggcccccgtacggttgagtcccattgattgaaatgttggtgggttgagtcccagttattggaatgctggtgggttgagtcccagtgattgaaatgctgttgggttgagtcccagtgattggaatgctggtgagttgagtcccagtgattggaatgctggtgggttgagtcccagtgattgaaatgctgttgggttgagtcccagtgattggaatgctggtgagttgagtcccattgattgaaatgttggtgggttgagtcccagtgattgaaatgctgttgggttgagtaccgagtgattgaaatgttggtgggttgagtccccagtgatt

SEQ ID NO: 34035 - DNA, 104 bp, Heterodera glycines
ctaaaaaagttaagcctacattttttggcatatttaaaaagcaattaaaaaatttttaaaatttaataattttcctgcaccgaaggtactcaatcggcctcttc

SEQ ID NO: 34036 - DNA, 1416 bp, Heterodera glycines
ccttataattggtcctcgactccattggaccctcggttcccagttctgtccccgtctattcctccgacgaaaatttgggcaccctctccactgatagtgcacaccatgtcggcgcagccaacacaaaaaacaaagacaaatcaccaatgctgccccaattgagccggcaagcgtgccgaccacaaaggccagaaggaacggggagcaatgggggttaaggactctttcccaacacaaatagcatttgatgaggctacacccctccacgggctcgcactgaacttgtgatgagattttttcccctgcaattgaataagagatgtgacactcaaaaccgcttgccaacaggtccgggggaaggggcagtagatagggtgaagggtttccccgactgctgcatatgccctcacagcacattatgctattctccgcccgtgggttcaaaaatacccaaattccctgctcgtcgcaggagagagcccgggtggcagcatccgtgccacaaaaaagggttaaaattgggataaaaactgtgattaagggcaagcgcgtcgcccagcggaaatgaataggattgcctttgtcggctccgaaagtgggcctttttgagaggggagggcggtcggcccacttcaaaatcccttgtcgccgttggtccctctttttgcctgaggggggattgtctgtgagcggcacttcgctccatttcgctgcggcctccagggggaccaattgattaacggaacgttcgaattccctgccgcttccgactaacaccttagcgctgcggggtttatccggggggatcaaagaaagaatgcgcccgaggggccaatgatttcgaggaaagccctcctgttctattagcacgacatctccgattttcggtggatctggggcagaaaccctcgggccggcatgtgtatcctgagtcctaccccgcaaaattaaaaggtaatcccggctccatcttttccaaaattgccggagggattcgttggtggtgtaccataaatgagctaatttttcggatgaggaaggcttaaaggggtccggttcttcgggctccaccacggcattttgggtgtgaggggaaaggaagtccaggggacgaagtggcaacggaccatcctctaagtcggaaacaaaagtaatgggacgactgtttaaaattgcttctatttcacaagtcagggtgtgcaattgcccccaggtgggcgttagtcgtcccaaactccgacgaaatgccgttttgactagcccaaccatcctttcgtagacacccccggcccacggactgtacggtgggattagtttccattccaccggaaagtcgtagtaggccattagaatttgcctcccgagaattaactgtgtcccattgtcggaccaaactcgttttgggactcccctccg

SEQ ID NO: 34037 - DNA, 1211 bp, Heterodera glycines
gtggtataaatttcaaataaatcccataaaattctcctcatttttctctatttttaaagctttattatagttaaatcgatgaaaccatcaccgagttatgaattttcaaatattaggccaaaatcacgagggccaaaaaattgccaaaaaataaagaatttttaaaaaattccaaaaattatgaaacttaaaatagacatcatattcgtattcagcacctcaaaatagcccagaaaaatatttttcacaccctttttcgaccccaaaaaaatttttgaaaatttctagggggcctagctcgaaaatttttgaaaatttccaaacatgcagtacaccattcgatagagcttaaaaagctctacaattttggtctaaggcactttttggctaaaatcaacccctgacgagttatgggcccaggactcaaatgtcccgctcaggccaaaatttttttctatttccgtgaaaaaatcgaaatttttccgaaaaaaataccagtcgatagagctcgaaaaactatgttttggaagtggtcttcgtttttctgggaaaattcgttaaaaattcttaaaattcaaaaaccaaaaaaccgttttttaggcctagctcgaaaaattttcaaaattttcgaaattttaaaatttggaaaaatcgagctcaccgagctctacaataagtctgctggccaccctgcgctcaggtcaaagcctaatgagttattcaacggggactgaactggaaaaagttggtactgaaaagttgccaatttctgcagcccttccaagtataggtagaggcctggaattttttttgaaaattagaaaacacttcaacttaaaaaccttccagcaagaattttccgctccctgtcctttaaaaaaagttacgggccttcaaacgcaagcaaaagtgagaaattagccgccgggactcagttggccaccggagcaaaaaacctatagttttcccagatgcgcctcaaaaagttgtaagacccttccactactttcagggcgctcccggccttcggccgggagccttaatttttttaatgagtccccctttttctctatatatatataaactagcgtgttggaattgacgggggcggcgtaggcaattggcttttggatgaagagaaaatggacatgctcatttgttattttaaaacatacaaaacattaattgcattagtgtgctgtattaaagcg

SEQ ID NO: 34038 - DNA, 523 bp, Heterodera glycines
tttgttcattttcatcttctttctgcttgggtgcatttatgggtgtactcagttcgtcatgttcgacggcggtattggcggtgggggcgttgcttgtatttgcctcgaaagaatctgcttatgactctcctcatgagaactcagttaatgtcggcaccggaatattggcctctattaatgtttgaaaacacctaagcttgcctcttgtgtcatgcgttttcttattctatgtgaaaaactatcagttttctcaagtgcagctctttctctaaccagctgactcggtttcttgacgaagtggctgagagctcgatatatcaagacgaccagcatttccatttcttagaactgccatccttacaaattgaaattttctttacaaatttcaaggttactatcagcacattttgatagtatttttgtcaacgaaaaatcctagaatattattctatgcaatttactagaacaaaaaagttgggcataaaaattctttcggttgattgatattcatgctaattaatca

SEQ ID NO: 34039 - DNA, 1401 bp, Heterodera glycines
  unsure (1)..(1401): unsure at all n locations
gctttttttaatattttttttgccttttccggtcggtttcaattttcgctgttttctctcatttttaattttttttgcgtaatttaatttcaactggccccaccatttccatttaaagtgcataaaaagttttaagtctttgatagaaaagggcaaacattctctcgtcccccccccctccctcaaattgcattatttcgcttattacgcctacggcatggaaatccaaatgaaatcccagaataaaatatagagccattaggggaagaaaattagcggccatctcaaattgcgtgcaaataaataaataaacgcttttacgatatctccacgccccaaaatcaattgacattttagataattatctcaaaatggacacatttcagaatgttcccatttgactctatagaatttgttaatctctttgcaacgatgtgttttctctctgtggcgagccctacagaaaatctactcgtgcgagggaatgctcaatgactcccttgtccaaaaaaaagttcgtccgcacaaattaggagtcaagacgtagggaaattcagtcgccttacctttttgacaatattagtagaaaaaattttctaattttattaagaaacgacctagcaccctgtaggggcatttcctttaaaatcatatcaatcttactgtaatgcgttttttctacagtcgtccctcgcttcgtcagtcgtacagcggcagtttgtacctttcggcactcggctgttccgacgcattggtaaggcacaaaatccaatcacggataattagggctaattgccttattaccactaatcccatccgagcgccaatcattccgccctaatcaggtgataatcactggcgttgtttctgttctttgtcgactccattcgtcgttattccttggcactttccattggctatgggtcgctttcgcccattggttaccccgcggcaatgatcgcgcagacgtgctccgtttacttcacactcgtggccggcatcgactgtttcgtacaggtgccaacattcctcatcaattaatggctttactaatattacttatggcttaatcataagacaaaaaatgccacttttggttttttaatattnttaaattggctaaaatataaattattatttcaattttaatttgactgtccctttgtnaacagaaataaaaattttgtttctctctaccaacattttttgctgttaaatttccgataaccttttcatatgtctatttcattgactaataagttaccatgccagtgttttttccacctcaatttccactttttgtttaagggttggctctcgtccgcgtccaaaggactttttgcgcgccatgcttccaaaggcgaccattttgtgcgtgctgattttcgcgttctttacaat

SEQ ID NO: 34040 - DNA, 866 bp, Heterodera glycines
aaatttttgaaaatttgattaaaatttgttgacagatttcaccaaaaatcatcaaattttgtgatttttgtatcatttttctaatgagaaataagagttttggcgcgccgctgagaacagtttttcatcaaattaccaaattttgcgattttgggccattttctaagaaaaaataggagttttgggggcgcggcggtgccgataggcgccaccggggaaaaaaattggaaattttgatcatttataaacagtttttcactgaaaattagccaatttataggtaaaattttgaaaaattttatgggaatttaatccaattcttaggggtgtaaaagtcgcatttcgcgccaaaaagcgaaatgcgaaaagcgaaatgcgaaacgccaaaaaatgcgaataatgcgaaaggcgaaatgcgaaaagcgaaacctcggcccataggctacggtagaggtaattaattaatcacttacaccgtttaccgtattttaaattaatttttacagtacatctttggtggagaacggaacgatcggctgatttatttaatgcactattcatttgtgtttatttatttgattttactcattaaaatattaattatttaattaatgaattaattaattaatgatcattgaacgacgaacatttagtcaacatttaactcattccaacagatttttaaactgctgttggtcagtaaagattaactttgtttcatgcagtttttctcagcaaacagaaaattagagaagactttggaaaactttaaagagataacaggcggagttatggcattttaggaaaactaaaatttaaagtaaaaataaataaaatttctcaattttttatgcactgaaaaaaac

SEQ ID NO: 34041 - DNA, 845 bp, Heterodera glycines
ctgatttgtaagagcagaaaacaatgtgacaaaaacgaaatagagagaagtgatcagcagagaaaggactttcacaattgtccaaacgacaaaaacaaaacaatttaaattatttaatcgcatgacaaaattgttttcgtttgcaattaattaaattttttttttttttaaattgttttcgttaaacagttttttttcagggtgaatttaataaaaaaaatttaattcataataaaaaatatttttcaacaatttttccaaagcattgaccgattggtttttgtttttctattagtgaatatttgtgagttttatcaacaaatttgcttaccgtagccttttcatccggaattggttcataattttcttccctggccaaaattgcgtcaaaatgccaaaaaaacagagaaaagagacaaaaattggcaacagaaaaggacaaaagggaatgccgtgatttgtgatgccacatttaggctaaaaatgtttcggtaaattctttaaaatttaacgaatcggcaaatattgcccggggaaacggtgaaaatcaatggcaatgccatgccccgcgggggtgttaaaaaaattgaccaaagggtttaaaaagagggaaaaaaccaaagaaattgggaggaagttaattagtatttcattcagaaaataataataaaaaaaaggatgagtgaattttttgaacacaattacggaaagaggcggggaagaactcgtcgagaagactcgccaaattgggcgagaagtgattgatggaccacaaaggccgacacggactttcgatcgaatcaaatgaggggggaggactgatcgaaatggggcacaaaacattt

SEQ ID NO: 34042 - DNA, 775 bp, Heterodera glycines
tagtaaaagtttcttttcacattcattgatttaaaattggtgggaaattagtaaaaagggaattgacgtcaacaaaagatatgacgaaagcaaagaaataaatgactgttctaatgatgatggccttttctaattgcaattaggaacaaataattcagctaaaattgagttgatttggaaatgaattaaacgagggaaatgggaatgaaatgattgaattgaatgagttcctaatccattccttagttcgattcaaaattggtgttcgaaacgctttcccggggcaaagagtcggagccgttcagcgacgagttggcggtggctttgaagcgactttgggctgacccgtcgctgaactcggccacttttgaacatgcgttggaattgcatttgcagagctcaaccaaacagtgcgttcttctgctgtacagcgacatttgctcatttgtatcttttgtatcttttgacagctttttggacagtctggaccgaatcagcaacccctcctacagaccatcggaacaggacattctgctgacgaggtccaatcccattcacataccgacaaacattttcggcattctttcagaattagaacgacgggggtcaccgaacagtcattcatcatcagggaaatgaagttcaggtgagtccggctgtctgagatggattgaatgtaatccatttttatttcagggtatttgacgtcggaggccaggtcggaacgaaatggagggagaaggggacggggagagagaggggatactcattttga

SEQ ID NO: 34043 - DNA, 1045 bp, Heterodera glycines
  unsure (1)..(1045): unsure at all n locations
catgtaaatgccaccaaaaactctaagcattcttttcagggatagagttacgaagtcataaaaaaattaaaaatttcggttccaatccaaaaaaagacgaaattccgcgccatttctgattctttccccatttgttttttcaagtgaaaaggaaatgggactaaagaaagttgaaattcaaatttgtgtgctttagcacgctgagaatgcgctgaaccccttggctatggtcgggctcattgacttccgaaatgttgacgactttccatggcccgatttgcgttcttcgaaatctctcgggaggaccgtggagaacgacctcacacattcgaagtattccttgtccaatttgcactttatcaacgtgtacttcactataacaattggccatttgcacggcagcaacgaattcaaacgcttttccatccaacggactgtcaatggaccaaaaaaggccatttgaacaaacagaaatgaaatggcgacgatctccaatggatttactgcaaaattgccggacttttaaattgctattcatttgctcgttctgctgttttgctgtcgtctctcctctctaatcctcaactcgtccatctcagaatgtgttctgttctgtctgtctctgttttggatcattttattcattccaccaaatcattttgggtatactattgtcaacccccagaaaaaatgtcacaaatgatataccaatcgttaaaaacttaatgagagaattcggcacttttagcgtttttanatgatcaaaaccttgacaaatttggtatcatttgaaagctctttttttttgtcaattaaataaaatttgcgatttttttgtgttccaattggtcttttccttcacttcccatccctttttaagttaagcattcctctccattttgcttgttttccccttttccgcacttttccctttctttggtccctttaaaaaatttttggggaattgaaggcgaaattgccttcctttggcccatccctttgaaattatgcgccccagcaaaaagaaggatcattaccatttatg

SEQ ID NO: 34044 - DNA, 1398 bp, Heterodera glycines
cagcttgctgcctgaggtcgatagaaaaagatcagagtgctaaaattaagttgtaaataaaatttggtgcgctttagagcactttctgaaaaaaatatttatgaaacaaaaaaatcgattttttcaagtgtccgtttggggtactcaaacaattatggggagcaaaaatccaacgcagaattaaagtacaggctatagggaagctattcccgaaggattcggtctccccataaatctgggcgcatcggttcggggggactgccccgaaaacaaaaataaatcgattttctcaagtgtccgtttggggtactcaaacaattatggggagcaaaaatccaacgcagaattaaagtacaggctatagggaagctattcccgaaggattcggtctccccataaatctgggcgcatcggttcagggggactgccccgaaaacaaaaataaatcgattttttcaagtgtccgtttggggtactcaaacaattatggggagcaaaaatccaacgcagaattaaagtacaggctatagggaagctattccggaaggattcggtctccccataaatctgggcgcatcggttcggggggactgccccgaaaacaaaaaaaacgattttttcaagtgtccgtttggggtactcaaacaattatggggagcaaaactccaacgcagaattaaagtacagactatagggaagctattcccgaaggattcggtctccccataaatctgggcgcatcggttcagggggactgccccgaaaacccaaaaaaaaattttttggatagaaattatttagatgaactgactagataatatttaaaataggttatttctcttcctttcagtatccctgcaaagtttggtgcgcttctgatcagtttctgaaaaaaaatgtaagcctaaactttttgggctgtttaaaaggaatacaaatttttaaaatttattctctccctttttgataaaaaaacatcagagtgcctaactacatgaaaataaatctgctgcgttttcgacccctttctgaaaaatattttaaaataaattttgcaaaaaaaaataaaaccgaaagactccaatttttccaaaatttttttgagccagctacttccgcgcttttttcaagggaaaattatccctttaccgggagaattccccgaaaaatttgggaagcttttggctcatttacaaaaaaaaaataggggaaaaaattttttaaaaaaaaaaaaaaaaccccacttatttttggtaaattttaaaaaaaaaaaaataaaattttttaaaatataaaatttttctctccccccaaaaagacccccctcccccccccccccccccccccccgggggggggggggggggggcccccccccccccccccccccccccccccc

SEQ ID NO: 34045 - DNA, 1041 bp, Heterodera glycines
gcaaataaatactttttaattaaatttttaaaatatatttattcatttccaaaagtgctccactgctgttgcgctctgagtgccctgttctacgcgttcgcgctgctctccagtgaggtgttcttcgatattgacaaatggcgatggtcggaggtgccgttggaacagacggcgcaccaccgaattgggaacggactgctcggagtcaccgttttcattgttcaggtccaaaaatatattttgggaatttctaatccattgccaggagcttatgtataaaaaatattgatgctatagcatctctgtctcgagaaaagtctaggcttttttgatcttcattttcgagaccgagacttttttacaccccttcatgattggattttggtaaacctaaaaaataatgttctttatttgaagatttaatattttcggtaaagaattttgtaaattttatacatttttaagccgattttgtaccaaaataagcaaatttattaattatgtacaaattctatttttctaaaatttattatttttaaattaatggacgattgctgaaataagggcaaaaaaaaaacaaaaatgttagaaaaggcctcaaaaaaaatgttttttaaatttataaaaattcaattggtttttaagtgtaaagggaaataaatctcgagtctcgggtctttttgatcttgagtctcgggaaacttttggtctcgagcataataaaatccaataaattcgttgattagattctctctctcgggcattgttaagcatgtctgctcataattctgcttatttattgtcagatgttctgttgccactcgccccaattggtcacttcctccgccattcttcagcttgtgctcagttcgttggcattcttcacgcttaattcggccatcacaaatgtgtattatttggtcagcattttgcattaaatttattattactttttaaacaaaatttcatgtttaaaatatgaaaatatttaatttaccataactataattaatcatcagggctggcaatttttttttctgg

SEQ ID NO: 34046 - DNA, 832 bp, Heterodera glycines
ttctatttgctgaattggtcgaaattggtgaaaaatgtgtggaaaatctgtgatttttaattttcggctttttaaaaatttaataaatttcataaggtaataaagactctatttaaaaaacaagaaaatttattaaatttgaaatggtgcatttatttgttcggaggctctcatcaatagggctgagaattaagtcaaaggaccatttttttgtttttcgctttaaaattacttaaaaagttctgcactttgtttgaagcttctaaactgcattttatttggcttttttttactttttggcattttttcaaatttcccccaattatggcccttttacaataatgagttttgctcgataaaattgaaaatgtaccttttttacattgtgaccaaattatcgtttttatacataagtattctataaattgtttcaaaggataatattttttacatttggcaatttttacgagttggcttagtacgagttgggtgtcgtccgctaatagagaactcttagagctatcgaatgatagcaagaatatttattttggtggttgactttgacaaaagttatgggcagttttttatcaattgtttggtcattggacaaatatttaggggagggcgaggggcagcttcaccactgccatttaaatttcactttatcaatacaaaatcacatgaaaatagtacataatggatacatacgtacaatatatatacccaattaatgtcggtatttacattaagaacaaacataaagaaaatagcatcggattgattgatcgatcactttcgcccgattttcatctcaaatcctttcacgccacca

SEQ ID NO: 34047 - DNA, 318 bp, Heterodera glycines
ccattgaagagatgagtaggtggatccatttggaaatggagtaaaattcctataacgaaaaatattttaaggcgagttcgggtacttggctttttctttctaagtcaaacaaattaaatattcttttataccaatcgttagatcggtgtactctactaaatttgaaaattttttcaaaaatttttaaaactaaatatttttttattttgcgggacctaaattttctctattcggcaaaattttaaaaaaattcttaaaatttggtttaaatttttaatagcgacatcgcaggccccaaatacatcaaaacccacttga

SEQ ID NO: 34048 - DNA, 1021 bp, Heterodera glycines
gccgatggtacgccacccggttgaactgcttggagatcgtgccgacccgcttgaagtccttgaacgagagttgagaggcgacaatgacgagtgtgttcagtggcagatggtccagcgggaatgaacactagtcaaccagcaggccggaatttgttgatgaacacggcgcatccttgttttgtcgcttctgcaaattgaaaaaaaggtaatagtttagatggtgccccacatttttgacaaaaaattcaaaaattttaaaaattaataaaaacaggtattatggggtttcggaggtcgctgatctcgaatataacatccatttcgacctatttcgaatcccgaacccggattcgaacaaaaaattgaaaatcaaattttaacaaaattcacattcaagctacaaaaatggttcaaatgcaagaacaaataagtaacttttagcaatcattcgcatggataaaattgggaaacatgcagccagaaattgtaaaaaacatgctcccgggctccgaagcgctgacgccaaacgaactccggaaaataggtatcgtacgtctcggttttgttcccaaattgctgtttgaaatttcttatcagcgttttccacaacgactcaatgttttgcgtgtgggcaaggcgattggcgggatttacaaaatttttgggtatggttgaccgtccaatgggtgtaattctgtggcaaattgggaatgccacggtacggacgccattcatccgaaacaatcgtggttcccggaagaatgtattgctgaataattgggagcaggcgatttgcggtccgtgattaacaggaaccatgaagacacgttcccaatttgagtcacgttccacacccccgaataaccacacttcttgtttcgccaaaattcgaccaacgccatatttccttttgacaacaagagtttcgtcaatttcaacgaaacgcccttcaaaacaaattagacttaaaaattccgccatcaaaaagctggaccgcctttcactgattgcagttacaaaa

SEQ ID NO: 34049 - DNA, 823 bp, Heterodera glycines
gggtaagtgaaaaattgaaaagtgacaaaaaggggggggagggaaaaagcaagcagaagccaatgattagtgatgagctgaaaaagggcgaagaaagcatatgcaaaatggaaaaggaaaatgaatttttgagtaaagtaaaaatgggcaaaatgattcaattagtaaaaatgtcaacggttgccatggcttttgtcattttttaattacctgtcagatcaaaaaaaaataataatttaaacttttgtacttttaagcaccgtttttcgggattgaattggctaacagacagaaaagacagctgattccttaaatggatcattaaaatgcgtataaagttttttcttttcttttttttgcgtgtggtaaaaaggggagaaaaggaagaagcagcagacgataaagcataataaaagatgaatgattgagacgataaataatgatgattgatgcggggttaccccttcttatgtactgttggaggaggaggaggaagaagaagaggagaaagacagaagagacggactgacgaatgaaagaaagaaagtgaagagaatgggtgattcatcagctggacggaagaggaggaggagaaagaggaggatgaagaggaggggagggaaatgggggatagaagaagaagagggaggggaagggagggagggacacacaacgcaaagacagagcaaacagacagcggaggggacggggaggggaggggaggggaccacgaatgaatgaatgaatgtgtgtgatgtgatgaatgaatgaatgtaaagggcggcggaatgttggcgaagggatcgatggaactgcggagggg

SEQ ID NO: 34050 - DNA, 969 bp, Heterodera glycines
tttattcaccgcggcaaaagaatccgcaggagaagagacatttttggacgcattaagccaactgaaagaatttgaggaattgtttagggcttcaaaaatggtgtaaattaaagtaatcaccgtaaatatgactcctacttttttgaaaaatagtaaaaagatcaaattttcaaatatttagtgggggaaacaaaccaaaattttgtgaattgtttcttacgcacactgaaaggtccgctttggcccaattaattgtggcagccgtgccattctcacggtcgccactgccgtcggcaacacttcgcttgcggagcggtggtttttgatggtttttgacagtgcaaccgatgggtgtggaagtggtcagctgatgcttcttttgcgtttcgctggtgttcatgtgcatttttgaaaactaaatattaattgttagtatagtggataattcataaaaagcataccatttcggaaatgttattgggaatgatcggatgttgtgtgactggcattgactgtgtgacggatggaaaagcctttttcggaccatttgcagcggaagtcgacttaagccaatggtcgatgggtaagcgaaggccctaccacgaggccgcgaagaggccgagtgagtaccttcggtgcaggaaaattattaaactttaaaaattttttaattgctttttaaatatgccaaagaaatgtaggcattaacctttttagtgaaaatttagatctactcatactttatttagctaacttgagctagaagccgtacgctaaactttgcagggatgctctccggtaaaggactaacttacactgaaatgagcgccgagctagctggctcaaaaaaattttcgaaaatctgagtctttcgtttttatttattttttgcaaaattaattcttaaatattctttcagaagagggttcagaagcgcaccgaaattttatttacatgttagtctaggca

SEQ ID NO: 34051 - DNA, 1486 bp, Heterodera glycines
  unsure (1)..(1486): unsure at all n locations
cggcgcggatgggagggggtagagtgggtaaacgcgtgcgggtttcacgcaggattgaatgcgtgcgtttttgtgtgtgtgatgcgtgtataggagtgggtggaattagaagttagagaagaggaaaactatagagaggagatgaaaagggaagcgagagaggggatagaacgaagattcagaaagaaaggtgagagagacagagaggaagagaagagagatagaaaagataaaggaaaaaagcgagaatacaattaaaaagagagcaaaagataaagagcaatcgagaagtgggaaatgggtaacgatagaaagagggggaaaattgatagatgatagagagagagcagagaggatgggaaatagaacagagggagagcgaaagagagagagaagagaaaaaaaaacagagaagggagaaagcagtgagagagagagcgaagagagagagagagaggtgaaagagagcagagagagagcgaagggagagagagagaagagagaaagagggagaacgaaagagagaaaacgaaatatagagtgaaaaagggagagagaaaaagaaagagcggttggcgccgctcgtataattttaagaagcaaagggttaattttttttgaagcaatatacatatgtacatacatataatgcaaattggcaaaatttaaaaagaaatgaattccttagtttgtctgcatctaaaaaactgatcaaaaagcgaaaacagttatctaaattaatcacactttccttttcatagatgattccttcggtttgtaatggtgaaagtagcagttccgacgacgaatattacaacaatttttccaaatacaaagcgaaggcagcattggcattacgaagaaatgattgcaaaagtggcaaagagattactaaaaatgggaaaagcacaacgaagaaagtctcttcagaaccatcggatgttgagggtttgaagaatgaaacgattttctttttgaacaataaaaaatactactttagttttcacatcttgtccattatctgaacaattaatttcgcgggctgaagtcgatcctgagatttgtgtagttcaaattgcggacacttccgtaaactctgttgttgatcgtaattgcaacgctttttatacgttttatatttaaataaatagggcaattattaggaaggagtgttcatgggtccgaaaatataagtccaattcaggcgcagactgattctgaacatagatttagtgactgagacttactcaacgacggaatgcgcctcacctttgcgaaccaatccatcgtttttgaccaatgtttgcagaataaacatttcatccaaaggacaacaaaagattttcttctgtgatttggttggttattatttgacttttgtagatggcaattccggaaaataaactcgtgaaaatttgttcatagagttgatcacgaattgaaaactcatgaataacaagtttgcacgatttgttatgnaattttt

SEQ ID NO: 34052 - DNA, 856 bp, Heterodera glycines
caattgaaagagctttttgcaataccaaacaagccacgtgttttacattaattttttcatcgaaaattccgaaccaatttgttactttttacaaaatgttttggatacgttttataagcccattttggcattacaagttaacaattattttgttaattaagatcacaatgtttttacagaaatcaagtttgatgctgccgaatttaatcaatactatggaatagatcggccgcttcgcggcctcgcatccttttcttgatattttcctatggcagaacatttttgcatcttcttgtcacatggcatttttgcatttttgacataaaatttcttagcattttcctcatcttttcttgtttcttggcgttttcctatggcacagcatttcttagcattttcctcatcttttcttgttttttgaccttttcttttggcacaacatttctcctaaacatttctgcactttttattttattggaatgtacgggctcggccgcttcgcggcctcgaatccttttcttgacattttcttgtggcacaacatttcttagcatttttcttgtccagaacaatacaataacaaacaattcttttggacaattcaacacgtgtgtatctctaaaacattagaggagacatagtagtgtacatctcaaaacaatacatttaaaagactgataaatttcgcttctgtgtctcattgatgagagggacgataatgttatctcataacaatacaatagcaataaattcttctagaaaaattcaacacttgtgtggcctataaaaatgagagacaatagtgtgcatctcaaaacatttgaagggattacacataacatgcacattaatgtag

SEQ ID NO: 34053 - DNA, 819 bp, Heterodera glycines
aattaggggtaattaattgacaacagtcgaccctctcctccctctcctccccccccccccccctcgttcgtcaaaaggtggagagaggggagagaccaccgtggggcgtgggggtcggaccgtgttgggtcttttgtaaaatttgcatttgaattattggaattgtatttaatcaattatattgcctaattattttttctatgattacgataattgccaataccgtaatcggtttgctgcccgcgaaacggaagacgacttcgtccacggggcgcccgtggggacagatcagtgcgcagatggccagccgacattggcccacgctgtgcagaacgatcagttggggggacacgtgccgagtggggaaaaggccgttggacgaatggaccaggcatttggcgtcgagccaattcaatcggcggaagatccgtttgtccaaattgatcaatgttatggtggacgaacggttttcgctccttttttaaaaaatcgaaaattaatccaaaattattttaaaatttaaaattaccattgcgaatagtgaaaagttcgcaacacaaaaatttgttcgattgctttcgtccgtttgaaaagcgacaaaatgcttttgccgctttcttcattcctttcactgaacagaagcagaatgttgatcttcagaatcagaatgcctaccaaattgagcacagcgaacattcggtgattgagcattttaaagattttaattatttaaatatacataaaaataaaataaataaataaaaaatggaaatcaaaatgttcggatgactgaccaatgagctcactctcttccatttg

SEQ ID NO: 34054 - DNA, 1088 bp, Heterodera glycines
  unsure (1)..(1088): unsure at all n locations
tagatcagagaagattttcagcaaagaagcgccgccatattatntaatgnatacgaaaatttcaaaaaagtntaagaaataaaatatgtactaagtagggcccggatttttatgtgctaaaaatcctgaaatatgtaataaaatatgtgctaaaaaatgctgaaatatgtgctaaaaacccccaaaaatgccaaaatatgtgctaaaatatgtgttaaaaattgaaaaaataagtgtgtttttgcataaaaattcccaaaaatctcattctttatcatttttagcccatacaacgcaaatcaaatacatttcgaagtgtttggggtaaaattgtctttttttgataaatcatttctataaattgaaagttccagcagagaacttcgaaatccaatgacgaattaatgaattcgagatttcattagtttctacaatcgaagaaaaaattttttaatttgaaaattatgttaataattaggaaaaaagtcgatttttagggggtgtatttttcaattttcttgtatttttattgcaatttttctcaaaaatgccaaaatatgtgcaaaatatgtgacaaaacgccaaaatatgtgtttttatgtttttataagtcgctctaaatcaaaaattgttcggagataatgctatttttgggcttctctcgccataactaagccgcaaaaaaaatatgtaaaaacataaaatccgggccctagtactaagcaaaaagatttaaaaaatcaatatgtataactacaaaaagtttgaaaaaaatacttaaaaagattaaattatacaataatcaataatactcaattaaacgaaaaaatattaacgccaatttagaaaagaaaaagaaaatttccttatttatacattaatatagtacgaggttaatgataattatatactttttcaaaaaaaacagcacgaaacgaagacgtagaattcgaatagggtagataagaacatttaaataaacaccccaaaatttaaatagcaaactaaggatatgaaatgctttagagaatttaaattaaaaaaataaatgcaaaatgtttttattatttatctattcatttaatgaa

SEQ ID NO: 34055 - DNA, 771 bp, Heterodera glycines
  unsure (1)..(771): unsure at all n locations
ggtttgatgtctttgaatgtcaaatagaactgaaaaaagaaacaatttatatatatttatcagcaggaataattaatttcatttaccgtattattgttaaggtctgacataattctaaataatatttttaaattacatttaaaattttggtacttaattaaaatgaatgaaagtaaaaatgttttttgtcgggaaaaatatgccaaaatttgatcgcttggcttctaaatttctggtagcgtgctaaatgtccttttttataaaaaaaagtcatttaaataatttaaagtaaattaacatttaaatgttattggataccaaccaattaattcgtgagaaaatgaaaaaatgccaaagtcacgctttgaaacattttctttatgggaaatatcaatcttttcaatattgtctgtctacctttttaacaacgtttaaagattgcgtgctgtaagcatttttatttggacaaccacagaacaattaaaaatttatgcgaggcgcaaatgagggagcacacacttttgaaattttttcacttttctttttgatgaagaatttgttttttttaacagatggtacacatttagattatgacaatctgccggctcggcgaccttttttggatggaatcaatttacgttggatttacgaattcaaatatctgtgaacaaatttttcgacttaatgaatgctagggctaaagggaaaaaaactattattanagctntctgtgattntcttcgtcataataatacttttattcgccatatt

SEQ ID NO: 34056 - DNA, 780 bp, Heterodera glycines
  unsure (1)..(780): unsure at all n locations
tttttttttttttttcccttttttttttttttttttggggggttttttttttttttttttttttcaacctttttttttttttggggggggggtttttttttccccctttttttttttttttttttggggggaaaaaaaaaaaaaaattttttttttttttttttttttttttatttttttttttgcgnggggggggggggggggggggggnnnanaaaaaaaaaaattttttttttcttttatttttgtcatggtgggtgtttgttttttttttttttttcttctcttttttttgggtgtttgggggaagaaagtgggggggcttgtttttgttttttttttgtcgtttttttttatttttttggccggaggagggggggttttgcttcctgcggatcatgggggtttgttttttttttttttttcttttttaatttttttttttttttttttttgctcgtttaggggctggttttgccccttttttttgtttttttctttttttttttttttttttttttttttttgttttttttttttttttttacttatcgtttattcattttcttatttttttttttttttttggggtgggcctcggtgtttttttgggttttctttgtacctatagttgatatttttttttttttttttttttttttgttttttttttttttttcttttttctttttcttcaatcttgtttttcttttttttggtcagtctttttttttttcagtattcttctgtgttgtttttttttttttttttttttttttt

SEQ ID NO: 34057 - DNA, 1146 bp, Heterodera glycines
  unsure (1)..(1146): unsure at all n locations
ttttttcttttattaaattcaaactattttttagatcgacagttntggctctgtccgggggtgattctcaacgatgnaatgcatgttcgcacgtcccaataaatttgattttcgtcaaatatgtgccactatgcatcagactgcacttttgcaaaaagatccagtgatttaatgtattattttataaagtgcaaattttttttttcattcattcgtttgtttcattttttagtcataatcattatatgatttaatgattcttatatttattaaatatcaaacaaatttctgctttttttttattctcggtttgaacctccataattgccggtgtattcgagaataaccttttctctgttgctcttatttcttacaattagcactagcttacaatttaggcataagtacataactcagacggatagccagagggatttgaccccacccctcccccacgcccaccgggaacagacgcgctcatagaatagcaccgcttccatttttaaattttggcgcgttttccattcgtttattacctttctcatttggttttgggtaccaagaccgtatcgtgactgacttgcgctacttcaacttgtcttgttcatttatcgccaattgacgagtaggatcatcgctatccaatgaatcgctaaatcacttgcatacaggttagtattaatgaaaaaacagcgcagagaccatggtaagtttatcatcggatagacagtgaaatgaatccgacaaaaaatgcgataaatgggacataacacatacaaacattcagccaaatggaaaaaaatcaaataaattaatatattgtcccattaagaatgaacatttcattgcggacattagcgttgctcccaaattatcaattggagcatttagcctaattgtgatggccttctaattgtgcacgaaattgccagaaataattgaaaatccgatggaaagatggattaaagattgccctctgtatgcccgtccccattcacttgccgaatgtaataaaaacaacgccccatctccaaaaccaacgacgctaatcatgcttttaatttaatatacatacaacttaaaaatgaattaactttccgtccttgtaaaaagattctggctggccgcaattgaagtgaatgagaa

SEQ ID NO: 34058 - DNA, 860 bp, Heterodera glycines
  unsure (1)..(860): unsure at all n locations
ataantttgttaatccaaaaaaactaattaagagacgaacaaattgcgcagccaaaacttagcgattcacaatgagaaacacgacatgcaactttcacaaaacaaagaggtgcggaaacactttttaagcatacaattagtaatttgcgattaatggaattatttaagaaaatagaacaaatccagcgttcgtttgatgagctacaacacacgagtttgtttaagctgatgaaccatctcaagaaaggtaggaaaaagttaacgaaaaggaattaaagattagaaaaataaaaataattgctctaagtttaacacatctgaaaatttttttacagttttttcttttatttcagggggatttccccccccctcgccccctcactctcgctacggaactgctgctcattcaatttatcttacctttcagatggaaacatccaaacactgcgctttttgcgagacttacacaatcttttgggttttgaattcgttggaatagattcgcacggtaaagttgaacaatcgcagcacggcgtcgttgaaaacgtctcggtaaggatccgattacatagttatccaattggcagtaacaatacattcatacataagaatggagtcacccgaaataattgcgaaggggtctgggggtggttcgaccctcttctattttttataccgattcattttcaatatttttaaataaagtccatatgccgacattgtgcaattttcgttcgacttttccagcatttcccagggtgatgatgcgcaggaagaagcaatcggtcaaaatcgccaagcttcttacgacagcattcaatccgcacaattggtaaaaatgccaatttatataactatcg

SEQ ID NO: 34059 - DNA, 812 bp, Heterodera glycines
agagtctgatcaatgggaaataaaaaggaattcttattaatttttgaaaacctttgaatgttctgattaaatttaattgataacattttttcaggaatgatggtaaatttctcaaattcgttaatttaagctatcgaagtttatataaatttaccaatttttagaaattaaacatttttttattattattctcgagaaaatctccccaaaatgatttcttttttttgtaaaaatttatgaactttagggggtcaaaagggccgctttataagatgcgaataaaaaatattttaaatacacaaaatatgcacataaagcaagcaaatattaccgttatggccttgtcaaagaaaagaaattaaattattgagcatttcgcaattttctttaacaagtcataaataaaaaataaaaaacatcaacctaattattacgatcgtttgttcatatttttcgagattgaactttcaattctgacaaatttaggtcatcccaaaatgtgtggaagccaaaattatttgtacaaatttaatttttttttttaatataaattttgtaaattttcaaaatattttatgcctaaaattaaaagatgtacaaatattggattaagtgaccggtaactttcaagaacatccgcagcagagatggcactgcacggaattccgatttcccacttccgaaatttaaggtaaaaagtcggaaattttcgtaaattcttttttttttttgagttttttgcgaattcaagtgttttatttaaattgtaaaataattaatttttgtatgaatttattttctacttcatcttt

SEQ ID NO: 34060 - DNA, 579 bp, Heterodera glycines
ggttctagtcggttttacgcgtcccatgacactttacgcgtccaatgacattttacgcgtcaacaacactttatcgtcccatcatattttacgcgtcaaaaaatgtttttcgaaccgtcaatcgaaaactttataccttccgaatagtctaattgttcttgtttgtatactttgaccatcgaaatgtgaaaaagcaaccctaagcacacttaatgatgtcaacagaaattcaactaatataagaaaaaaaattacaaaagcctaagctaaggcctagtctaaccataagccattgttcgagttgcctgtatatgagttgtcatgataaccttaggtttaacaacgaaatttttagttaaaaaaattactgaatacctgacaaaaaaatagtttgtctcttagttattaggacaactataataccatgagaccagggatggcacggaattccgatttccgaaaatttttggggcctcgaaatgccatccctgccataaacacaaaatgtcatgggacgcgtaaactgttgttgggactcgtaaaatgtgatgggacgcgtaaaatgccgtggggcgcgta

SEQ ID NO: 34061 - DNA, 1447 bp, Heterodera glycines
tccccacagttttcacatttttcatactctttgcaggccaatttcttgtgttcttcaaagcattggatattatagaagtctcgatggcactcgtcacagttaatttccgggcacttttccgcacatgggaacccgagtcccatccggcaacatttcttgcagcgctccttgcattcaattcggtgtcgttctttggtccaaaaggtcacttcacagctaacacaaaaatttttgacgcaaaaaaaccaggacaccgatttgatcccgtcccagtgattgccttctcttatcacgcaaacttcgtgcttacggacaccttcccccttgaaaattggcttaagtccaaatttctaaaaaaatgtaaaaaatgggttaatttcaagctaatttggttaccatttcaaaagccgcaatgcgaaacatatccgggaattccctgtcccaaaatttttgtacaacctcaaggtgttggaaccaaaagttttgtcacccatgctaatccctgatttttccatcagttcgatggccaattccatttgtttcttctccgtcttcatcagataacggaatttgttttccgttatacctttccctatgagctggtagcttcgagcaatttccaaagcataaaaaagacctaaacacaagtaaaagatcctaaatttgtgcggaatttatgggatttggaactcactaaatttcccctttggcgtattaagccgacccgattcattgatttgggcgaggggacaaaagcgagacattttatgaagggagtaaaaaaagccgttgagttgctactgcgagaaaattctttcgggaaaaatacaattttgtttaattatcagaaatatcaattaaaaattatcaaattaaaaaataaaatttataaatttatttaaattttatatctttggtgagttgtgtggggacatcgaaaaataaataaattcctgttctttgggccattggtagtaataaatgatctgagcgaaacaatcttctcatcatggaatagaacagacatttaacaaaggatgccaaaacaaaatttacgagcagaagccgatgtgtttttggagggggaagagcatcaattatttccttgatcatttcggcggggagcgggcagggcataattgtggcgaattttcaaaaaaagggggtataataaatgaagaattaaccgtttcgacaaaaccttattaatgcgaaaataaaacacaaaaagtaaagtccataaattgcaaaaagaagaaacattccgaaaatttcgtcatttcttttcgttttttcgtaatctttgtctatggtaaggtttagcatctaatttcttaaaattttaataatttttaaacaatttaggtaacgggatttaacccttatcaattcaaaaaattaaaaaacaacaaattttatcaaattggaattccattcattcattgag

SEQ ID NO: 34062 - DNA, 113 bp, Heterodera glycines
gaatcatcctgctgttcttcttcaattatgacttgattgagaggggaggggttgaactgtccgtaatcccctgttgcggatgtcaggattttgggcaagatttggagtgatgg

SEQ ID NO: 34063 - DNA, 634 bp, Heterodera glycines
aaatcaaatcttctcagggaatttttcagattaaaaatgaaagcaattcaatttcatatgcttcttcaatgaaaccaaatcaaaaacacaccgctttttaactatcaaattattttctcaaataacaaattcatttatatcattaacaaattcaaatgaaaaacgcgaacaaaaaatcattaaataatgtagaaaagtaaaagtaatttttctcataaaatcatgaacagccattttcatttttcttttattaattattttatataataaaagatgggttataaataaggaagggatgcgagacaaatttcccattatctctccctttcctttcttttactctcttttcttttccattgcaatttactctctttttttctcactccctccttctcccacacacacgcacgcgtccaacagactgctgctgcacagcagcacgcgtatgttcactgtatccccctctgaccctgccgctgcccgcgtagacagacaatcatacagtgcactattttcccacctttccctcgctctacttttttcaaattcattttaacgcaaaaattaaacaaaacgccacacaaattcaaacactggacacacaacagacaccaaactttttatataaggattt

SEQ ID NO: 34064 - DNA, 730 bp, Heterodera glycines
  unsure (1)..(730): unsure at all n locations
gttgatccaatattttaacagagatgcaaattaaatcctaaatacatatataactcattaaaatantgcggaaaaacatacttttataactgagataatgttggcaataatgttgacaaatatttattaaattttcgtgaaaaacaaacatttgctaataaatgtctagactgatatttgtgcatccgacaaatgttctatagataaaattcaaaaatataatttttatgaaaattttggcctaaatggattattattttttggcggatttacgaaacgccctggcggatttacgaaacgcccatagtggcggatttacgaaacgccctggcggatttacgaaacgcccatagtggcggatttacgaaacgcccacgttggcggatttacgaaacgccctggcggatttacgaaacgacctagcaccctttaagagagcaaaattaacttttgttttgtagaaaaaaagatattgttaacatttatgatatcaaatcattttaaattatttttttttgaacattgaatttgatggttactggaaaaattcaaaccgaaaatattataatgtatgatttattatagcttaaataatggcattcgtatcaagcattcaaaattgccgtagctgatcaaatacatgtattatatcagatggtacaaagaagcaaaatacagtcaatactagcatgaaataaaaacctgatcattttgtgtccataattaccgt

SEQ ID NO: 34065 - DNA, 1085 bp, Heterodera glycines
cgggggatggcaaaatgggccaacagtccccggaaaatggcaactcgtacaatataaagcctaagcgtaagcctagcctaagccattgtacgagttgtgatgccactttgtcccccgggggcgaaaactgtccaattcccatcatttcataactcactgatcgtttttccgtttattcttctgaattaaatgcgtttcctttttgctgctctgtccgtcgttttccgtcgtctggttttttcgttttaaaaaagtgatcggaagggcccttctcgcgttggcgaagttatagtcgagcagaagagcgacggttgtgggctcggaaaagggaaaagcattgacaaaggcactccgaaatagtgacggatggttcaaaatttgatttgccttcgccgctcatttggtcgaaggcgtggcattgtttgaaacatgcgattgtctctttgagcgcgggacacttccgtcccgcgtttgccctctcgcgcaccaccgcccgcctccgctccctcgtcccaactccgcagtttccgtcgtccgctaaacattccgtccaatcggaccatcggctgacctcacaatcggctgctgaattattattattattattattaaaaatgcattttatgataataatttacgtggacaagcttgcgcataattcgtgcagcagtcgccgaattcagcgcataattcgtcacaaaagcaatcgacgcccgactcggtcagaatttgcaatggccacggctcggacaccgctgcccattgacctgctccctcctcatttcctactgctgtccctccctcttcctcttcccattcttcctcttcctcttccgttctctcttccgttctcttcttctccactcggatgcgccgtttcacaattctcaacgacaaatagcggcttagcaaggagtatctgcacaacaacaaaaaatgcttggcattgccattaaatcggccaccaccgactgaccgtacgacgggcgactgtcgccctccttcgccgtcgtcgcccatttcgcgctgtttcgggcccattctctcccgaatttgcgcttcgtgtccaaatttatcacagtctc

SEQ ID NO: 34066 - DNA, 128 bp, Heterodera glycines
aacgaacaaacaattcgggggcatttgtataataataataaaaaatgaaatacgagggaacggacggacggagggacagacagaaaaaagggggagaaagaggggaaaggggggggggggtaaagggg

SEQ ID NO: 34067 - DNA, 1049 bp, Heterodera glycines
  unsure (1)..(1049): unsure at all n locations
agtagtttagtattttttaaaaactttaaatttttatcatttgagaattgaaaaattgaattccgaggctgcgggggaaaatttatttggctggtaatttgtggtgggtcatttggctctggtgagaaaaattttgcaaagactgggattggtttatctctttaatttattaaacaatttantttgtcaaaaattctctatatgaaaaacaatgcttatttttctgttttattgcattacatttagttaatgtaatgcgcctttcaagattatatgttcttaaaagcaaattggttaaatgatagtcagggtgagttgcaaaaagcgtatgtgaaaataaattatnttaattaataaaaacgatattttattttaatattttgcttatttacctttttctattcaagcttattagcttccatatatttaaaattattatgaatattacaatttttattttagagtgattagaaattcccatatatatttaaaaaagaaataacaaatgctttaaaatttgcaaagcttaaaaattttcttgggaaaactcggttttttttaattaattatttaaatttcctttaaattattatctttttaaatcattaatactttttataaaatatcggtgtggtcgatatttgatattccttcggaaatgaatctaatttttaacacattttttacaattatttatctaatttattccatttaatactcggtgtattgaataaactattaatgacagcatctttacatactcgctagatttcacttattattgttttattttttatttgaaaattaatataaattttaaattgtatatttataaaaaaagtttatttatttctattttcaaatttggatattttgactagaataacttaaattaagcaaatttattatttgaaattatttaaaaaataattttgccaaaatttattaatttattaaaatgttagaaaaatatctttagttactaaaagctaatatttatatatgtaatcttattatctgagcttttttaataaattaattttataata

SEQ ID NO: 34068 - DNA, 724 bp, Heterodera glycines
ccaaattttaccgcactattccaactcatcataaaactttccatccctcaaaaatgtgcctcactcattttactctacttctccaaggcttaccgcactcttcctatcaactttaaacggtccgccaaattttaccgcactattccaacccaccgcaaaactttcttattcttctaaagttatccgctctcaatttaccctactcctttaagacttaccgcactccctatttactttcgagaacatttaccgcactcccttttcctacaagacagtagttaccctccaggtttcatcgtcacgtgtgaaaatgattaatgggttccgaacttttctttgcactctctcacaaattcagcttccttctcagcattcccttttatgtcggcagcaaaccctgatgcttgtattttctgcgacatgaattcggctatgtaggggcgaaacagctggtcatcgctacgctcatattccaacacacgaaatactttggtgactcggtaaccctcttcaagcgcagcattaagttcgattgaagtgcaggtgctcacccatcctcgttgtttgtcgttatgtctacagatgtatttccgttctatcccgccttttggatggtttttggtgcacttcatacataacggaaagcagagcctgtcgtccactttgacgggcaggactggcacatcgcattttcgtggaggaatcacccaaactttgagaattg

SEQ ID NO: 34069 - DNA, 809 bp, Heterodera glycines
  unsure (1)..(809): unsure at all n locations
tttccactataactttctacaacttttttctttgtcatccaaatccaacattgttggtatgattcgaaagcttaatgtatttagaaactttttctaagctattgcttcgcgattagacaagtatcaaaaaagttatacatgaaaattaagaaaaactcgaaattttaaagttttttcttaataaaaatttttccaggcttgaaaatcttttcgctttttgtaagactaatagagatataaaaaagctatattggaaaaacgtgctggcgcccaaccgtgagcgcccaactgacgggttccgcttttcgatatatttttgtaattaaaaaataaataaatattaatttcacctgcctttttaaaaaatgctttacctttcaattgtgccgtaaattcagcttttctcatcagttctccaatggcattttcatgcaaaataaacaaaaactgcaaaaagttttccccctcacacaaattttttgaattaagcgttattttatcgccaaaaattgaatttttcatctcaaacaaaacaaggattagctgagtctcgttttggaggagctcatccactgaaagcgcttcccttgcgccgttcatcaaaagttccaattcggccaaatgattatccaattgttcgctttttccgtcggcggaagggcgcaaaaggggcgcatttttcttnaagctaaaaacaaaaaaaaaaaaatttaaataatttttattaaaaaaagaaacaaattattttaaaaagtaccactgataaaagaccaaatgttcagcaatatttgaggcgtgtcttttggttt

SEQ ID NO: 34070 - DNA, 723 bp, Heterodera glycines
tggggcatcggaattgcgacttccgacttccgaaaatttttggggcatcggaattccgacttccgacttccgaaaatttttagtgcctcggaactccatccctggttggtaagagagacactctctagtcgaatgacacaaagcaatggaaataataccaattaaatgcaactgaaatatatgaacgagcggggaagcctttgagggaaaaactatggggcgggccggctttgaaccggcgtctctggctttccggaccagtgttctaccagctgaactaccgaccctgccctctccagctccccactttgctcgatcatataggatcaattgttgcctcaattgatccattaatcttcctctcgggaagcttcttcttctctatctcattccgggcctctcttatggacgtcctcgtccattcttcttcttctctgcgtcagctgctgctcggctgaaggttgcagattcgatcacttccagtgccagctttatcctctctcttcattttcgcttctctgctgctgctgggtgaactggaagccgccaagggtcgccatgaaatatatgaacgagcggggaagcctttgagggaaaaactatggggcgggccggctttgaactgtcgtctctggctttccggaccagtgttctaccagctgaactaccgaccctgccctctccagctccccacttttctcgatcatataggatcaattgttg

SEQ ID NO: 34071 - DNA, 821 bp, Heterodera glycines
gtgactggagcgcccgcgagtggtcacattcttttcaaatcacacgcgtgtgatcatgtcgcaagcgctcacattatgttcagatcacatatcatttatttaatgcaaaatgagtgctcatttgtgttggatttggtccatgcctatttcttttaaaaggtctggtgaaggattttctaagtgaatttcccgctcttctaattcttggaggccaactaatctgattaattggttcttcatagatttctccttcttgctgaattttagtttccctcaattttcttacccttttcccagctttctgaattgttgtaccaaataaaaattgcctaagcgcccattccctgcataaatttcacttaaaccaattgtcaatcttatcgccaagtcaattgacaaaatggtgagaattagagacataattattaaccatatttttctgtaatcaccaataactgctttgaccatttggctttcaacctcttcccattcctgagaaattgaagctgtgatttttgtgtccttttcatgaatctgataagtcatttgactcaatttgaccatgttgctcacaaaagcataatcttttatgtctgttagatttaatagaataatttgtgaaaagcatgtgcttctatttaaggaagcaaattgttgaacccaaattttacttcgtgatgatttaatttattcgggcttaccgaagtaatttttccttctatttggtcaatttctaaaatttgaccttcaatttgaattataatttttctaaatttctcacaggtaccttttcttgacgagggagagactatcatcgacgt

SEQ ID NO: 34072 - DNA, 513 bp, Heterodera glycines
atttttcagttccgtctcgaagattggtttatttttcgaaattttcatcacaaaaagtaaaattttgccttaaaattgtaaaaagtcaagaaaaaaagtcacaaaaacgcaaaagtcataaaaatcccaaaaagtgtaaaaaagtcaaaaaaagtcacaaaaaatgtatgttagaagcttcaaacaaagtgtagaacacttttgaactcattttaaggtcatttagagtcagcaaaaaaagtcatttgacttaaattcccatccctatttattcctttgttccgagaaaagaagggcaaacaaaaaatcttttcacaaattcaattttatgaatgttattgagaaatttaagtttaatatagtttaatatttaagcacgggtgacacgcatgcccattcgccaagccctcgggttccaactgagcatgggtgccacgcatgcacattccaactgagcacgggtgccacgcgcatgtgccggtagctgctactgcacgaacatccagacacgca

SEQ ID NO: 34073 - DNA, 1141 bp, Heterodera glycines
  unsure (1)..(1141): unsure at all n locations
ccccggaaaacaaaaaaaatagatttttttcaaagtgtccgtttgggggttctcaaacagattatggggagcaaaaaatccaaccccagaattaaagtacagatataagggaagctattcgcgaaggattcggtctcccattaaatctgggcgcatcggttcggggggactgcccggaaaacaaaaaaaatcgattttttcaagtgtccgtttggggtaatcaaacaattatggggagcaaaatccaacgcagaattaaagtacaggctatagggaagctattcccgaaggattcggtctccccataaatctgggcgcatcggttcggggggactgccccgaaaacaaaaaaatcgattttttcaagtgtccgtttggggtactcaaacaattatggggagcaaaaatccaacgcagaattaaagtacaggctatagggaagctattcccgaaggattcggtctccccataaatctgggcgcatcggttcggggggactgccccgaaaacaaaaaaatcgattttttcaagtgtccgtttggggtactcaaacaattatggggagcaaaaatccaacgcagaattaaagtacaggctatagggaagctattcccgaaggattcggtctccccataaatctgggcgcatcggttcggggggactgccccgaaaacaaaaaaatcgattttttcaagtgtccgtttggggtactcaaacaattatggggagcaaaaatccaacgcagaattaaagtacagactatagggaagctattcccgaaggattcggtctccccataaatctgggcgcatcggttcggggggactgccccgaaaacaaaaaaatcgattttttcaagtgtccgtttggggtactcaaacaattatggggagcaaaaatccaacgcagaattaaagtacaggctatagggaagctattcccgaaggattcggtctccccataaatctgggcgcatcggttcggggggactgccccgaaaacaaaaaaatcgattttttcaagtgtccgtttggggtactcaaacaattatggggacctacaatccaacgcagaattanagtacaggctatagggaagctattcccgaaaggattcggtctccccataaatctgngcgcat

SEQ ID NO: 34074 - DNA, 578 bp, Heterodera glycines
gattctctctttcttcctctttctcgtcctctttctcttccaactttctctttctcctcctctttcccttcatctttctcttcccctttctcatcctctctctcttcctctttctgttcctctttctctatgggataagctataattatacaaaagatttagtaaaatttttatcatagacatttattggagctgagcgaattatttgttattatggttcctttacatcggaaaatagtatggcataaatatttattttttgtctccgtcggcacttttgcacgtaccagcaggtgtattcgacagtggttgatttcgacagtagttgtaaattcttttttctatataatttacgttcatatgaattaatgtttaatataatttgtataaacaaaacttataatttaagtaataatgaattaaatgataatttatcaaaagatatatcgctttcacgttttctatacaaacatttatgtgcactcaaaaacctaacaaatttcctagattcttgaatcgcgtgggaaagtcctactaactaaatcaaataccgggtttgaatgtccagatgcgaacct

SEQ ID NO: 34075 - DNA, 926 bp, Heterodera glycines
acttcgtcctctgaaatttaatttttattttgctcacactttcagcattcagttcaccgttattccacagcaatttcgtttccttcaattcggacttcgcaagtttttctcggcattccttaaatataacaaataattacagcccaataaataatttgtaatttgtgttcatttcataattgaatggttttggcaaaatgccatcaaattgttcgaggaataggtcggccctttctccttttaattttatatcattggaaaacctttaaaaacgaatggaaattttgaactaaattttccataaatctttctctgtttttggcctcccctcccctcccgccgcggtttgatcatttgtccattcaaaaatggcccaccttcagcagctgctgatcagtgacgaacagttcagctgacaattgatcactcaaatttccgtgccaactgaacacttcgtatttgcccacttcttctgctgctgatgctgctggtgctgataaaagttagattttgaatttattttatttttaataattattttcttttttcgtaatttttttaaaatttttccattactttgatcagttgttgaacggaaaaaggaatcggacgaaccgatggatgatgccattgttttaattaaagaaaatgtattgtgctatctagaaaaatgttaaaaatttataaattaacattcatattaaaaagaaatgtaaatttggaaaataaaattcatcactgccaaataaatgaatgaacatttgctgttttgcgctgaatctgttcgccttttataaggcggcattggtagacaaaaagtaattaggcaaatttatttgtgacctatcaatcaattaaatattcactttcaatgaatagtttaattcttttttggctttttttgtcgagcaaaatgatacttaaaa

SEQ ID NO: 34076 - DNA, 739 bp, Heterodera glycines
ggtataagggacaattttcaaatgaatttccgccgggcatttgtcggattatgccaccagcagaagaaagaattaataacacagagattacggatcacggcatttataaatgcttccgtataattacggcttatccgtcttgtttagaatttgatcaggtccacctcgtttagcaccttcccaatttatggttttgaaatgaaatccatctgtcagtgtcttcatttgaatgcatttgccgggtggcacattacaataattaagcgcttaattgaggctggaggggagaattaattttggctacgcgtcacttaaaatttcagtgttttttttgcttagagttttcacctagctgtacttttttaaatgtctggtcaatcaatctttggttaattttgggttcactttgcagttaattaataatacgctttaaaaaacaactgcacaatgtaagttgagtaggttccggtattcataggcttacggtatgtgatacagtgtcataggcaggtgagaatcaaaacatttgtagaccaaagccaaaatggtggaaataccaccccataaatcatcaacagagctcttttctgcacctgttttgttggattggacgaggggtgcaatcggcttcaacaatttgtgggtgtggcagtgtgtggggagaggaaaagccgtccgggtgaatgggctgataacgaccatgaccgcctctccggggaaagtgatatgcctttttggg

SEQ ID NO: 34077 - DNA, 651 bp, Heterodera glycines
atgaacgtgaaaaatggcaagagaaaaaataaacaatatgaaaaacatttgcttaaacttgtggcaaatttctccaacgaagggctcgatgagctgaccaaactgaaaagagacagaaaaagtcagttgataccgtaagcgaaatcttaagttcaatagtaaggatgaatttcaaaaaaaaagaaataaaatttcgcttaaattttcaacataagccctacttacactgccggacacaaaccctatcaaattgttcaaattttatttaaaaatccattaatgtgtcattttcggctagttaataaatctatctaaattctttggtttaccacagagcagccaatttaaaaaaatacagtgataaaaattcgggaaaaaggcaaaaaaattgggtccccccccccccccccccctcggcgagcttgaacatatttaaagatttttgcgcagatggtcgaagacgaaagcggaatccaagcaacaacacaaagtccaaacttgctacagtaatcgttatcgtagtgatgttgatggcactgtcattgtgcgtgatcaatcactgtgacaacagtgggggaagcgaaaattctgatcaaaatcatcatcgacagcagcttcaagacagtgacgcaactcagacatcgaatggta

SEQ ID NO: 34078 - DNA, 1524 bp, Heterodera glycines
ggcactctttcctcttttcgcttcttcgaatcggatcggtcattcgtccgactcggcgcccaacgtttttatttttcgtgggtccttcgtcttcgtaggcactccgtccgtgtgcttttttttttctttggatcctttgtcactgcattaggcatatggccatgtggatattatgtgtctatgtgacgaggaggaggccgtggcacttttgcaggcggcactgtctccgctccgctgttgtgttgttggcttggcttggtttgatgcgctaggcttgtggcggattgggtcggggtcatcttttcgccccattttcatcgtttgccgtacatttggtggcttggatatatatatatatatatatatagctgctagccatagccaccagtgttgtcattggtgctgcacaaaaagccccccatttctcatccgccgttgaccccaccccatccaatgcccattaattttgccgcggtcggccgacggattcgaaataaggaagggtggtgaccacaaagaggtaaggatgggacgaatgggggaatggcacaaaaagggacaaatgctgggcgatgaacaaaatttggaaataaaaaatcaattaatttgcttaattattgaaataaaaaatggtcattcgaaataacaaattgtaaatgttatccattaataggttttcctgcataagctagacctgtacatcgatttttttatatccgaccttgacctggaaatccaagtcctggaaaaacccaggttgccaaaagatttgagtgcagggctcggcgtcggcatttcgccaattcaccaatgctttttatttttttgttgcgatccaaatgaatgaaagaggattttgaaaaattgaaatttaatttagaaaatttatataaaattcctcggatttaaaaaatatataaatattgtatgaacttttttgtggatgaatatgacttcttcgttgtctatgatattaatatcccgtaaaatagccaatatttttgggggtcgacaaagaaaattcgtgaaacatttgttgtaaaaatagtcaaatttatcgtcaattagggggaggaacatggaccattagatgatggtgagcacaaaagtgagacagacagttaatgaacattggttggcggagtaaattctcatcatatcaatcgggcagatcaccgcagcatgatggcattttgggcgccacttttttcaaacatttttttggcacatcaaaggaatgaaattttaaaaaactgtcgataaacggacgggacgacacgggcgagtgaaaaaagaatttttttttttttttgttagccaaatcgcagaaaatttgggttggcctggcggtactcgcgcgtgaacggcgtttcatcatcgtcaccagaaatgagcattgctagatgtgttgatgggttttcggggtaaaaaaaagagttatgcccatttaaaattaattaaggtataacccatttaaatactgtatgtatgctctatccatcagagtacggtatattgaaatga

SEQ ID NO: 34079 - DNA, 1690 bp, Heterodera glycines
  unsure (1)..(1690): unsure at all n locations
tgatcagtcctccttatcactttatgataagaaggacgacgacgcatccgactntaagccggagactgtgcgggggcatgcccgagtctgtgcgccggttcaacgcagccacttcgcactcgatctcatcgatgtccagtgggcggtcgtcaaggggcttatccgtggacaagtattcccgcacttgacctggcacattcgccatcatgatctcgttgacttcatcacacgtgtcaatgtgcggagcgagaatcaaacgattgagtagctcgttgtcattgccaaggagttgttggaagttaggatagacataatctatcagctcttccttgctcttaacgaggaacttcggaggaatccagaagtgctctccggtttctccaagcccgatttggcgggccatttgcaagtacgcttgctgaccttggcccagtctctggttgatggtcaatttaatcgtggtgaattgaccaaacaacggagacttttgaaactttgcacacacggtcaatgacctctatcaccgtgttgtgaagcatggtgatatcatcaatgatgatgagttgtgcctcacgaatccgtcgggcaaataagctctccagcggaatgcttgggagtttgtctaatgacacttctctacccagacgaaacgtggaatgggctgttttcccatatggcagcaaaatgactgcacacccagtggatgccgtagcaagcactttgtaggtgtatggggcctttcgcaagcgcctaataatcacattataggctttctattaaactagtcaacgagatgccatttcatttccacgaattcgaagtttttcaaaaaataattattacattaaattttcaaatattattattcattatttaaaatgaaattttttaattgttatcatttttgtgataggaaaataaaattatttgttttgggtttagtttattttttatgggtttttcgtgaaggatttttatattattttcgaaagtatttattcgtgcgatttattaattttatttaagttcagcgaaatcttttctttcaaaaggttcagttctcattacgattgttgtcggcgcatataatatattaagtgttattttattcagctaaataatatttgcattttaaatcgagatataaaattagttttaatcagggggttcttcaattatttttggattttttgctttgagagttctattttttgcgaaactattcatttatttgtttttattagttgctatttttatttttaccatttaatttagacactctcaaacaaaaatgttattttctatcaaatgaattaattttttatctactaacctatgatgaagattgattggtaaaagatttcaatctgttttgtcattgtttatttgttatactgaagacattattgagtacagcagaaattcatttttttaataatattttatttattttaaatgcaattataatttgatataatcatcagttattggacttcattatgatgtatattttgcttttaatgtagtctagactaatttttaataaaaatttaatcaatttaaaatttctctttatataataatttgtttaaagttcattgttttatacaattaaacgtttgaaattctcataaatcttacaagataagttagcgaaaaattttaacatctgtgcaaaaatttttttaag

SEQ ID NO: 34080 - DNA, 1019 bp, Heterodera glycines
ttttcaagggtccgtttggggtactcaaccatttatggggagcaaaatccaacgcagaattaaagtacaggctatagggaagctatccccgaaggattcggtctcaccataaatctgggcgcatcggttcggggggactgccccgaaaacaaaaaaatcgattttttcaagtgtccgtttggggtactcaaacaattatggggagcaaaaatccaacgcagaattaaagtacaggctatagggaagctattccggaaggattcggtctccccataaatctgggcgcatcggctcggggggactgccccgaaaacaaaaaaatcgattttttcaagtgtccgtttggggtactcaaacaattatggggagcaaaaatccaacgcagaattaaagtacaggctatagggaagctattcccgaaggattcggtctccccataaatctgggcgcatcggttcggggggactgccccgaaaacaaaaaaatcgattttttcaagtgtccgtttggggtactcaaacaattatggggagcaaaaatccaacgcagaattaaagtacaggctatagggaagctattcccgaaggattcggtctccccataaatctgggcgcatcggttcggggggactgccccgaaaacaaaaataaatcgattttttcaagtgtccgtttggggtactcaaacaattatggggagcaaaaatccaacgcagaattaaagtacaggctatagtgaagctattccggaaggattcggtctccccataaatctgggcgcatcggttcagggggactgccccgaaaacccaaaaaaaaattttttggataaaaattatttaaatgaactgactagataatatttaaaataggttatttctcttcctttcagtatccctgcaaagtttggtgcgcttctgatcagtttctgaaaaaaaagttaagcctaaactttttggcctgtttaaaaaggaattaaaaatttttaaaatttattcatctccctttttgatagaaaaa

SEQ ID NO: 34081 - DNA, 800 bp, Heterodera glycines
cccgtacgggtccattttccaagtcccggtcccggccatttcaaaattccgggctctaataaacataggtacgcaaaaaaagaaaagttgaagggtcgcaacttttctggtacatcccaattgtttaacaattgcttagtaaataaaaatctttcctggggttttcgggttcgctgatcacggaataaaggatatccttggctgattaaaaactaaaaatcttcgcctttgcaggcttttcctcttgcttttgcccctcggtttcaccgcctcagttttgatacttcgatttaatttggccattaaatcaaaaaaaatatttttttgcaaatcttaagttaaatcacgaaaatgtgtatttattataaaatggctgtattacaatatatagaatttttttctctatcgacatgctaaatttaaagaaattctgtatgaggaaaaaaaagattcttagagcgaagtgaatgttgtttttccttatgtaaatgcattttttcctggcttctccatgtctaaatagtaggaaaaacactttcttttttgtgtttgcgtataaaaatcgagacttttatttgcatattttggatgtttatgcatattttgggtttttctggacatttcatgcatattttgccattttttgtacatattttctgattttagcatattttgccatttttcgtcaaatattttccgatttgaatatatattttttatttatcgaacaaaccacaagatgggtcaaattaaataaacgattgatataaatgaaagaaaatcacacctctcaatcgaga

SEQ ID NO: 34082 - DNA, 1257 bp, Heterodera glycines
  unsure (1)..(1257): unsure at all n locations
ggaattcatcctatctgacatcaaaagacttcgtgaatcttacatagggtcctgtggaattagttgnntttgggggtaacctgaacttgagagagtgaagggaattggngaccaaaaagtggaaaaaatctatgtacgtttacaaatgaattcttacattagaaattcgatttacgaaaacaaaacaaagttttcccgcttttgaactcatttaatttcagacagaagcaaaaaaattagttccgatgtcatttaccctcgccagtgtcatacattgcaaacgttcgcaattaattctcattgaaacgggaagtcgtgaattgaatagactccttggaggaggaattgagacaagttcaattactgaggttgctaaatcaatccaatattcccatgagattaattggaaatccatgaaaagtgggccgtaaattagcatagtgcgcgtgttgtaaaggaagaaatggagggaaaaatagaacctaaatcaaaagtccatgtgattccttattttccaggtttttggcgaatttagaacagggaaaagtcagctttgccacactttggctgtcacttgccaacttcccgttgacatgggaggggcggagggaaaatgtctttggattgacaccgaaggcacttttcgaccggaacgattactcgcagttgcggaaaggcaataaaaataactgtcaagtcggaatatgctactcaacttaagattcaagctagatggacaagccgtgctcgaaaatgttgcttatgccaggtgccataacacggaccatcaaatgcgactgctcatggaaggcgcttcaatgatggcggagtgtcgctacgcactcgtagtcgttgatagtgttatggcgctttaccgaaccgattacaccggccgaggcgaactctccgcccgtcagcagcatctcgcgtgctttttgaggggccttatgaaactggctgaagaagtgcgtttttgttcagatttggtttttacagatttattctgcttccgttttttctcagtttggtgttgccgttctggtgaccaatcaagtcgttgctcaagtcgatggcaatgccggaatgtttcaaacggacccgaaaaagccgattggagggaatataatggcgcattcatccacaacaaggtaaaccaatcatcagtcagcaacataaatgaaatagtaggggaggggggtcggtacttttccattatgcggccacaccccaaaattttaaaaaaagagggggaaagcg

SEQ ID NO: 34083 - DNA, 124 bp, Heterodera glycines
caacaccatgtgattactacggcgcagattgcgtgccgatcaaaagtttattgttgaaaattgaggcattagaaaactgctatccgggagcaaaaacaatgcggtaaaaacagaaaaaaatatt

SEQ ID NO: 34084 - DNA, 1279 bp, Heterodera glycines
  unsure (1)..(1279): unsure at all n locations
tgccaaaaatgtcagggcacactcaaactattggcatttttaaataattaataaaagaaaacttgttaatggatttgaaaaaatgccatttcccgagttggcgaactggagggggggggggggggggaaactgcctaaaacttgcggttggcaagcaaataaatatgaaaattaaaaacgtgcaaatgagtttggcttcgcgagactgaccaatgctatgcaaaccatacctttagccatgttttctggttttcttctgaaaaagtcaatcgaacttccactccaaagggaaggaataaataagagaactatttttctttgttttttccgatttttacaatttgattgtgacattgtatgaacagacgaaatgagcaataatctttttgtctcgaacatgatcagaatttctcttattaagtgacgtttcctgttaacgattgcttcccattttgttgcctcccctctgactctgtgctctcccggtctgtcaacgcgtcgtccgccggcggcattttcagagggacaagtcgacggtagaagaacaaccaaagggcgatcatcaacacaatttcgcccatttccaccagccaaatgacacgagggccattgttagtgtacataaagctgaaagtattaaaaatggaattgagaattcaatggcgcgttaaagcatttattatccgactcaaaactgatcaatgtaatcagattcaagactctcgactaccccccgtcaaacccgatgagtagcgggcccaacattcgtccaaaaccgccgaacatctccagcattccctgctgcttggattgcattcggggcccaatgatatgcgagaaaagtgtgttcatcgttatgttgatgtttgagaaggctattcctatgcaagagctgatggcaatctgtctagggagaggaattttcttaattttttttctaaatattccaatttctgaaaattatgcacattaattttgtgtcaagttttttttttggattattttttcaaaacttacgtaataaatccagatattgacgcgggtcatatctgcacaccaattcaattggctgatatcgcaacccttcgaggaattaactgaaatcgaaaaattacggttataattaaaacctcctaatgacccaaaatgatgctaacctanagtgccattgtaggagtggaccttttctggaaaggatggccaagaaaatgtgaccaaatggaagaanaggaggacaaacaacgaacacagacagcacaatcggtcgttgactctgatc

SEQ ID NO: 34085 - DNA, 754 bp, Heterodera glycines
  unsure (1)..(754): unsure at all n locations
tctgttaaacctcaatttcagcaccatcgcgctcaatctacaatgggtccgacaccatccaccaaatcaatagtaccaacatcagacgcgccaccnaaacccccacccccggnnnnccnnnccgcaaaagcgacccccagagcaccgacnccgccangagacgcnccaccgcgcanagaaggagaggaaaanaaaaacgncaaanncaangcgaagccaccaccaccgccgacagcagcagcgcaaagggacccagcgcgcacganncacacgcncgacccaccaagaaganagnngaaaacgccgccagcnaaccagaacccggggaacnangcgccgaaggcggagacagnacccnngaacaaagaagcggaacgacncaaggnngcgcncaacgaggaacacancaggcaggggaccgccacaccgcanacgggcnaagaccanggganacgaaaacccccagcaagaggaggcaaangaagnagccaaanacggacaagannngcgaggaggcaccacaagcngcgcggacaacncaaaaggacagaccgagaanaagaacaccgggaacacagagagcaccnngcaccgggnagagacnaccagcggagccagcccgggggacnacacngagaagaannacgacncaccgagannngcgcgagggnnaccacgggaaanaaacgaaanngagaangaacggcgcacaagggacaaaggncganagggggccgacgcccaagggacgacg

SEQ ID NO: 34086 - DNA, 1071 bp, Heterodera glycines
tatctagtcagttcatttaaataatttttatccaaatttttttttttgggttttcggggcagtccccctgaaccgatgtgcccagatttatggggagaccgaatccttcgggaatagcttccctatagtctgtactttaattctgcgttggagttttgctccccataattgtttgagtaccccaaacggacacttgaaaaaatcgatttttttgttttcggggcagtccccccgaaccgatgcgcccagatttatggggagaccgaatccttccggaatagcttccctatagcctgtactttaattctgcgttggatttttgctccccataattgtttgagtaccccaaacggacacttgaaaaaatcgatttatttttgttttcggggcagtccccccgaaccgatgcgcccagatttatggggagaccgaatccttcgggaatagcttccctatagcctgtactttaattctgcgttggatttttgctccccataattgtttgagtaccccaaacggacacttgaaaaaatcgatttatttttgttttcggggcagtccccccgaaccgatgcgcccagatttatggggagaccgaatccttcgggaatagcttccctatagcctgtactttaagtctgcgttggatttttgctccccataattgtttgagtaccccaaacggacacttgaaaaaatcgatttttttgtgtcataaatatttttttcacaaagcgctctacagcgcaccaaatattatttacaacttaggtttagcactctgatgctttttctatcaaaaagggagatgaatacatttaaaaaaattttttatttctttttaaacaggccaaaaatttaagcttgtgtggtagtgtgaaggactgtgttcctccaggcaaaaaattctacaaaatttataagaatttgaagggttctcaccaggtttccccggaaaattttggtggagtttttgaatagtttaaaaggggggggggaccaaaggcaaaaaataatttaaaaaaaataaaggtgggggggggtaggggggaaaaaacgggggtttccccc

SEQ ID NO: 34087 - DNA, 895 bp, Heterodera glycines
ttagccaatgaggatgttcaatttaactacgacagtactgttcaaaaatttattgtctatctttcctctgacgtcacccatatagatttgtcaaaacacctcgcatatgttctggggtttaagaatacaaggctatttcacgcggaagaggcgacttatatgccggatttgacgggaggtgtaaggcagctatacatttatgcaccaaatttaatcgaaaacacaattatcggcaaccggatggccccactcttaagaatagttaacgtcgtcgatgacccgggatcaattagtgaagttatatatagcaccgagtattttcatcgtctacaatcgaaacgaatttcagaaattacaattgaaattcacacaccgtttggtgaattcgttaaatttcactggggaagttgtattcttacattacattttaagaaaagtatattttaaaaaatgacacacgtatttttcgatcccgagtcggtcgattggtcatcttttttcacttcacaacatgggaggggacagaagcaatactttgtcggaagcaagtatcaacggggattcggtttcctcggtaatgtggcacgtttcttgacccctattgcgaggaatattgcctcgagtgcaggacatgaggggttcgccgcggggcagagagttctgagtgacatcgctcagggccgtgatttaagggatgccgtcagggaacattcaagacaggtgttgactaaccttaccgactagttacaacaatgtgggaaaggagaaaggtctctgatcactaataagaaacggaaacaagtatatgatcagttaaagttcatctaagggtataattgggagaaaaaatacgaaaagttgaaaatgaaaaccttctaaaaaatcgacacggcga

SEQ ID NO: 34088 - DNA, 623 bp, Heterodera glycines
tttatttatttttttcctaatgaattcttaaatattttttcagaaagggctctgaatcgcaccaaattttatttacatgctagtttaggcactctgatgctttttctatcaaaaagggagatgaataaatttttaaaaatttttaattcctttttaaacaggccaaaaagtttaggcttaacttttttttcagaaacttatcagaagcgccccaaactttgcagggatactgaaaggaaaagaattaacctgttttatcacattagcttgtcatcagtttttataaaaaattttcaaaattctgagtctcctattattttatttttttttcaaaattttgaagggcggggggggggcgggcaataaaaattgcaatttgcccttttgaataaataattacactatgaaattgtgtcgtcaatataacgcagaaagaggaacccaccaaagcagtaccgcgccagatgccccgcagccagcgcacacaggaagaggtgcacgtggtgaaaacgagtaacatgctgtgccaaaatgagcagaatgcacttcggctccactaccatttcagacaaatcgtacaaggatttcacctgttgatacaagttcgtacaacacggatactt

SEQ ID NO: 34089 - DNA, 582 bp, Heterodera glycines
ggcgaaaatttcagtgaattttttgcctgaaattcatttttccccaatcgtccccgcccaaaccccccgcaaaccacaggtcaaccaaatgacgccgcaagtgatcagcgcgggcaaaatccgcttgcacaacgacacggacaacgcaacggcgcactttgagaatttgcgcaaggagtacgcggacgcgctgaaccgcctccgcgcgtatgtggacgacgcgattgacgcgggcgaatttgtgcgcgccagcgaaggcgtaagcgggcggaggcggggtcaaatgaggggggggggggtggtggaggtgtttggaatcgctgagcaaataatgaggaaaattacttataaatacgcaaggatgggtatgaaacggatagagagcaaatactgtcactgtatgctaagaatcattcctgaaaggtacaccgcgaagacggattacagacgacgaggatccgaatagagaggcggatcccgtgcattatcgacacatcggttgaagacatccgagctatgagtcttgccattgtggttgtgcgtcaacaacagttgctcattattgagaccaagtagtttata

SEQ ID NO: 34090 - DNA, 835 bp, Heterodera glycines
ttatatgcagagagtctagcgcatatatgtcagcgcctctcggatgactaggagcgttcttactggtctccgacacctcctgatagcggcttcccaatggcatagctgatttttttggatctggaattttcgcatagatatatgcaaattagataaccagtgcttcatttcaattatttctcgcattctaacaaaataattttttactatgagtggttggtttggaacctgtctaaaatgctctcggctcgccctcattgccactattttcttgacaataccatgaaaagtgctctaactccaagagacttagttgagcgcactgcaaggagaaccctaacacagatcatcgcaaaaaaattaactattcacgcttgagaacgcgaagtttgctgcggagaatgtgaattatatgtctgaaagaaccagaagcatatactctcagtcgcctagtgcatgagtaggagcgtttttactgatttctgagagcgcctgaaagcaactttccagtggtatatctgatttttttggatctggaattttcgcatagatatatgctcaatatgaaccaaagtttcgtttcttattatttctcgcatactaacgaaataatgttttactatgagtgattggtttggaaactgtctaatatgttcctggtcgctccacatcgtactactttctcagaaactacctatgtacccctgatctatctccttcacactcatttgcgcgcactgcaaggatgaaccctaacatctatcagcactagctcattaactattcacgcttgagaaccctatggttgctgctcagaatgagctttatatgctct

SEQ ID NO: 34091 - DNA, 1009 bp, Heterodera glycines
agaggaaaagccgagcgtcggcggcggtgccctcgattggatggacccggtgacggggtagccaatagccaagcggcaattaataaacattaagagtcgcaaattggcaattaattgaaaataattaaaaaggcacaaaaatggtaattgcagttaaatttcacgcagagattacattcggccacaacagcagcagcaacagaaaatcgtcgattgctttaccatcgaagtgccaatgccgccgggggatgcgccgaattcggaaaagtgcgcgacggacgccgggagcagtgaaaggcgcgaattacagagaaaagtgaacatggaaaaagcaaattaattccaaaaaacagattaaacaatattttaataacaaaaaaaacaagaattataaaaggcaattaaaataatttaaagtaattagaaagtctcaaaaattgtttaaaaattaaatcgattgaaagtggtctcgtcggattgtgcacactttgagtaaccgaagtcgcgacgcggacgatgaggcggagcagacggacgacggggcgaacaattgcctatttgggcatcaggtggaaaatgacctaaggagggaccgtttgagagaagtttgttgaagatacgcttcacaataatggccatctgcacgctgtgtctgtcctccattttgtccaacattttgactttcaacttcacttacatttgcatggcgggcgaaaagccggccaatttctccaatatgacaggcatttgccatttgttaattggctttttaattggatcccgagcactttgttcagaaccttccgaatgggtcgttttcggctacaacccccacttgcattattcgagtgcggcacgcagtgcccttttcatggttgttgccgtcggctctcttctcaccgttttccctctcaccattttgctgaaccaaattggggtcaagggcaagcattgactgctccctatgaaactgcatgaccaatgcttttttacatcaaaggctcgtctt

SEQ ID NO: 34092 - DNA, 985 bp, Heterodera glycines
  unsure (1)..(985): unsure at all n locations
ttattatttttaagtttacaataactctaatcccaaatattatcaatcaaaaaattttagtgtgctgttctcgcggccatgttttgcgttcgccgcccacgtcgtcgtcctcaatgctcagatccgatcttgcgcagttatcgtcgtggaaaggtgaaaatgttttcaaaaaaacgtaatttaaacttaattgttttctttccaaattacatttttttttgttctatgagtcaaaatttttaaattatttgtttataaatatttttgtcctttacaggagcacgtggtgctcgaattggggagtccgatggcgatccgagataatgacgaggacggggcaaacaaagaaattatcgatcaggaattggagggtgagtgaaaatgccattataaatttttgctttcaattattattattattattcagtcactctcgaaggcaatgagaaagagtgttaggccaaggcgcacagagtgcaaattttgatatgatgaatttaaaatattaaatttaattatttttggttttaaattttcatttttaaaatcatttctaagctcaaataaattaataaaccttaagaaatttgctcaaaagaaaagaaaaatcttaaaaggtgtttttatcaaattgattaacaaagggagcggtttcatttggatcgttcccgattttcccccgatcatttttccttctttaaaaacccactaagtattcgttgaaatccagcctccagctcttctccaagatccaggagacagcgaattcgcccttctgtgctcagaagttttgcggactcctccgccagcgcaatgcaatcgagcaacngcgctttttttgctccgtacttgctcctcggcaaggnncgaggctggaaaaacatttttgaaagacacaaaaataaattttgataatttataaataatttatacgaantttgaaaatctttttatataaacattntcataccaaagtcaacgggac

SEQ ID NO: 34093 - DNA, 585 bp, Heterodera glycines
cgatttggctgtttgccctccccccccccctcccattctctctccctctctgtccctttctctctctcctatcctctctccctctcctcttctattctcttcccatttgccctatgggcacaaataaattcaaaattaatttgtgatcattttgattgggctgatcattattgcattattccatttttgcatattccctccccccgcacgtttgccttttttttcgaccagaactcaatcccttactaccattttgtcattgagaccctcggacagaacaagaatacatagtccatatgatggtccaaaggttgatgcagatcataacatagagaagaaaaagagagaaattataacgttaacaattttgaatcggaggaggaacctgaccgtgattgtgcttagttgacgccccactagtcacagcaaaagttggtaccaccgtaggggtcagatacgcagaataaagaagaaagagacattaggtcaacgaaaaataagctgcagtcgatttagaatatagtgtgagagagagaaagagccagactatagaaagaaaatgccgcttacagatcagcggacaaa

SEQ ID NO: 34094 - DNA, 986 bp, Heterodera glycines
  unsure (1)..(986): unsure at all n locations
aaaaaatcgattttttcaagtgtccgtttaggggtactctttcaattatcggggagcaaaaatccaacgcagaattaaagtacaggctatagggaagctattcccgaaggattcggtctccccataaatctgggcgcatcggttcggggggactgccccgaaaacaaaaaaatcgattttttcaagtgtccgtttggggtactcaaacaattattaaaaatttttagatttttattcatctccctttttgatagtgaaagcatctgagtgcctaaaataacttgtaaataaaatttggtgcgtttcagagcagtttgtgaaaaaatatttatgaattaattttgctaaaaaaataaaatagtgaagctttaaaaattaataaaaaattttaaattcagaattactggagttagcatcatagcagtgcttttccttgtctttttgatgccctcgcaaaatctggttcgcttctgatcagtttataaaaaaaaagttaagcctaaaatttttcgcaaatttaaaaagcaattaaaaatttttagattttttattcatctccctttttgatagtgaaagcatcagagagccttatttaacttttaattaacatttggtgcgtttcagagcacgttctaaaaaatatttatgaattaattttgcaaaataataaataattaatgaaaaagtcagaatttcgaaaaattttaaaaacaacaagcgttggcattttttcaggttaagttagtcctttacaatggagaaggcctgcaaaatttggagagattatatcgattttagtgcgctaggttcgatgaaactttttaaaatataagcctaaactttttggcctgtttaaaaaggaattaaaaatttttaaaatatttattcatctccctttttgatagtgaaagcatcagagagccttatttaactttttattaacattntggtgcgtttcagagcacgttctaaaaaatatttatgaa

SEQ ID NO: 34095 - DNA, 124 bp, Heterodera glycines
caactggagcgtacaggaagggtatggcaatcagggccagggcaacagcggcaatgccaaccttgactggcgcgccacctacggcgaactcgtcgcgggatacgcttacgatcgcagccaacag

SEQ ID NO: 34096 - DNA, 1484 bp, Heterodera glycines
  unsure (1)..(1484): unsure at all n locations
tagagtcggttaggtaaaaaattaggaaaaaactgacattttgaaggcattttgttgaaatgtttacccatttttatgctcttatcttttaatatagcttggtgaactgatggttcacattgttcagacattgcggaacaccaaacagtccgacaacggcggcaaaacgcaacaaatggtagaagcgacagtagcggaaaacgggcagcaacaaactcaaaaaaagcactccgactccgctggaagcagcagtatgttgtgaattgtttgcttgcttttacccacacggaaatccgtctctgttggcattgccattctcaatgggtttatacgattaatattccgatgtccttttgaagcatcttcggttgtgccctgtcccgctgagttggcattgtgccgtcaggcggtgttggtcaattcggatcagcagcaacaacaacagttgcacgactatgagcagcgtccggtcatcgttggctatgatttcaacgccggcattcaatgggaggcgttgttggattcctttttgaccaccggcttccaggccagccacatgggcatcgccatccaggtacattttcagcaacaatcatctccataaaacatattgctgtggcaaagagagccgtggattcaattccatgccaggagcaatgtatcaattctatcactaatccaccgcagccgacactgtagcgccggctcaaacagtgcgcagcccaacaacagtcacgaagcaatctccagaatggacgtggtttgtgcacaagggaccaaccatttttgagggtggaaaaatgatggaaatggtgccatcctccgacgctcttttaaaatgcctaaataaaatggtttaagcaacaattcatttggcttttaattcagttaagtgagcggatccgtgacttccattacaacgaggaccaaacgcacgcacagctcaatcgaaaattgcaattacgcgaccaactttattacgcaatttcaccgattttcccaagtacaatcgaattatttttgataaatgatgcgccaaatgctccgttctgttgttcagtgtgcggactttacattgtcggctcgtcactgaacggattcgggacgaagcggtcggacttggacctttgtctgatgataaccaatcgcgatgtgagtttaggcatgaataaagggcagaaaagcaaaggaaatgtccagagaaattgggccccaattctcttttaaattcattttgtcgtccgcagattgaccaacgctctgatgcggttgttgtcctgtcgtcggtgatgcggacattggagagcaatcaaattgtggccgagcagaatctgatcctggccaaagtgccgattctacgcatcaaatttatcggcactttccacgacataacggttgacctgaacgcaacaactcggtggncattcggacacgcatttgatgtgtactacagtccttgtgagttgtcttcattaacggctttt

SEQ ID NO: 34097 - DNA, 1037 bp, Heterodera glycines
ttccaaacattggggactcaacccaccaactttcaatgacattccaatctctggaactcaactcaccagcatttcaatctctgggactcaaccctccagcattctaaacaattgactcaaatctccggcattctaaacattgggactcaacccaccaacatttcaatgacattccaatctctggaactcaactcaccagcatttcaatctctgggactcaaccctccagcattctaaacaattgactcaaatctccggctttctaaacattgggactcaacccaccaactttcaatgacattccaatctctggaactcaactcaccagcatttcaatctctgggactcaaccctccagcattctaaacaattgactcaaatctccggcattctaaacattgggactcaacccaccaactttcaatgacattccaatctctggaactcaactcaccagcatttcaatctctgggactcaaccctccagcattctaaacaattgactcaaatctccggcattctaaacattgggactcaacccaccaacatttcaatgacattccaatcactgaaaatcatcccatcagcatttcaatctctgagactcaattctcaggctttccaaacattgggactcaacccaccaactttcaatgacattccaatctctggaactcaactcaccagcatttcaatcgccaggactcaatccaccagcattccaatcactgggactcaacccaccagcaattcaatctctgggactcaattctcaagctttccaatctctgggactcaaatctcctgcattccaaacattgggactcaacccaccaacatttcaatcactgggactcaacccaacagcattctaatcactgggactcaatttcagcaaatccttcagcatttttcttttttgggtgtcttaggacgttgcaccagacggggggacggttcggaagcggctcacttactaacatttcctattaacaatttcttttcgctcggccgcttcacggcctcgcacccttttt

SEQ ID NO: 34098 - DNA, 1181 bp, Heterodera glycines
atcattaggatatgattgtaatgatcggaaattgacaaaaaaaattttagaaaatttcggttttacggtctctaatcaatatatcctatagctgagcgggaccgggactggtactgaaaaaaacctacaaatgaatgcctagccccggatttgaccgggaccgagactagtcccggtgtttcccagccaaaaagtcacgggttttaacccgaaaaattccctgtaccaattttttttttacaattaccgattaccgctctactctaatataacgaacaaataattttcagattttcattggttacaccggaaaaaaacgtgggcaaaatctgccgaaacagaaatgtgttgccataaaattgtatggcaataataaaagacatttttataatggcacaaatgttttgagaaaattaaaaccatttgattcaaaaaatgagcacattgtcaacatgatggactagtaaaattcaaaatttaattagcattaaaaaataatacctaattaaatttgcaatttttagtggccaaattatgccaaatcaaattttttcgccggggtttttgactattttggagctgggcgaaatgagcttggaccaagaattgcaacgtggtaaaccaaaaaaatcaaagaatcaactgatcacaatggtaaaagatatcgtgagcactttggatgttttgcacaaaggttattaactaattagtttattaattaattattaattaattgtcaataatagagttaacgattctaaattaaaattatttaattaatgtgaataatatgaaaaactgttcaaagacaaaaaaaaatattgtaattacttgaacaaaataattaattattttaaatttaatacatgttcgatcctttccttactgattttatcgaaataattttaatttgttttttaagttgcaatgcatttggacttcaagccgttaaatttgctgttatttaaaaaactcagtcttttttcttccacagatgtttcaataaaattgacggattttgatggtaattaaggattaattaattaattcagcttttgattaaaatagtgtaacatcattgaattaaataattcatgtttatgaactctttttaaggaattcaaatataaattttattttagtaattaattaataaattaaggttgtatcttttatgatga

SEQ ID NO: 34099 - DNA, 810 bp, Heterodera glycines
tttctatcatgaaactaaaaaaagttattccagaagttctcggaaaaattcgaattttcagtaaaaaattctgaactcggttctgaaaagatattttggaaaagtaaaataatacaaaaatccgcaattttttgctctattttataaattttattttagctttttatcacttttttgaaaaaagttatagaaataaaagtgattttggggttcgggaccaaaggggggagcacatggtttttgaatgaaaaaattttttcaccaaaatattccaaaaatatgattttaggggttatttgggccgctgatcacgaatacgtgatcagattttacttttgacatcgttaaggcctcagaatccctgtgtgattggggattctgaggcatcattttgagggggggggcgaagttcgaagccgggcggtgtacattatttttctaccatttttttcgtgtttttcaatttttattcatttaaaatattttttgagttaataaataaaaaattatatttaaattaatttttttttaatgaataaattttataagtttaaatgaattatttttttaattgatagaatttcatgtattttttaaattaaatttgttaaaaaatattttcattttaatttaatgaatttactaattactgttgtacctcttccaatcactgttgtacctcttctaatcattgttgtacctcttaatcacttttgtacctcaaaatttaaataacgggcgctaagcgcccgtccaaggccgcgaagcggcctaacaagctaaaaaacgggcgcgaagcgcccgtatgag

SEQ ID NO: 34100 - DNA, 813 bp, Heterodera glycines
ataaataattatttaaatataagaagatttgtaagtttacaaataattaaaaacttaaaaatttgtttaatcatttcggcttgcctgtctaaaataaaaaatataatttttatttaaaataattattttattttattaaattaaaattaaaagaaactattatcagattcggattataattttaacgaaaaataaatcatatatttaaaactaattattttaatttattttattttattttctttaaaaaataattaaaaataaaatttagctttgatttgggcccggcacattttatcgcattctcaacagagttctatttttggcccaattattatcgctttgaaagtttggcagcccaatggcattggctgattcgagatttggaagtaaaaacttgaaaacttactttttttttttaaaactaagattttttaagaaagctaacttgaacagacatcaggtgccatggatcatcacaatgggccatcgtccaatgtattgttcgggtaaatagagacaaaaaaagaaaaattaataaaaaatcaaaataatttttcagatttttctggcgatgattgcacaagatatgactcaattgtaagaatgggaaataaatatataaatgaaaattatggcaataatattcataaaattaatcatttttaattttcaaagtaataatttttggctaatgttggaaaatattaatcatttaataattatagattaaccgatcacaaaagttaattctttttcataattaataaccattttttatagatgttaattaaaactttgatgcaaaaatct

SEQ ID NO: 34101 - DNA, 784 bp, Heterodera glycines
  unsure (1)..(784): unsure at all n locations
ataaaaccaaaaaatacacccctaagaatcgacctaaaaaattttcaaaaaaatacacccctaagaatcgagcaaaaattttctcaaaatatactcctatgaaatgaaaaaaaattttctcaaaaatttactttcttggcaaaaatttttaattttaaaaatttttttaggtaactattttgggttttttggtcttaaaaatcccagtcctactcatttgcaactgcaaatagtgaataaaaattatttttgctcaattttggctgaaaattatgtcactattcgtcactattttggacttttttcactattttgtcactattttggcactttttcgtcactattttagttaactatttcgggatttttcgtcactaaaagttgctgccctagtgatcatcgttgatttgcggctgcgctttttcccgattgtagcgctccagaatcctcaaaattcgtctgtccgcttcacggtaacgctttgctttctgcggcggagcatttccagcgaggaaatgttcgaagtccacgtcaattattttctggcgctcacgcaaaatgttgatgaatttccaaattgggggatgtccatgtccgatcgcatgttgcaacgtgcgatgatacgcctcggcgaagttgtttgtgcggtccgtgccgttcattgtgcgctcatacacactccattcttcggaacgaaacaatggacgagtgcgtgtgccgttgttgcgaagacgtccggcgtagttgattataaaccntttaaattactaatgaaattgaaaaa

SEQ ID NO: 34102 - DNA, 889 bp, Heterodera glycines
ttcatcaaccattgcatattgcgtacatagaaacatttattataataataatattacatatgtatgtactagagttgtacgggaccggcaatttcgagataaaccggaaccggtacttttcggggtgaaaggccgggacttagatactggtacccacttgtacgttttttcagtaccaggttccggtcccgtacttctctagtatgtattatcaaaaaaaaagttcttacagaataacaattatctgtagggaagatacaaattcatttgttttttttttcaatttttaaattttttccccgccatttcgtctttttcattttgtccattttcggtgttccgattgtgagcagtcatttggcgaattctggaaaattaatgaataatctaattaaattgtttttgttaataatttcgttttgaaaattaccgcgcgtctcccatggaagcggagcgtcgaacaatgagtccactgaatgggtttgaggcgcaaaatgatggttttggacgcggtgaattgatcactgcagcccggctcagatcatctgaaaaggggggaaataatttatttttatttgcttttactatgtttttcgtttaaaaaaatatttaattatgatatttttaaatatatttaaatgaaaaaattatgactttcttctatgacaaattgactacttgaaaaaaaagacgctgctggattggaggcacaccctcaaaaacggcgacacgcactttcaacattgaaatagtttcatattcagcgagttcataggggcgcaaattccctgcgtaactgatacgcacaataaaaggttccattttttaatttgcttgtttgaaaaacgttaaaaatcatttatttataaaacttttagttaaatcattg

SEQ ID NO: 34103 - DNA, 983 bp, Heterodera glycines
  unsure (1)..(983): unsure at all n locations
attattactatctttatgtattatatcatttattttcttttatttaaattacagattgtaattttaatttcatttttaaatttttgcttctaaagtaaaatacgtaaaatatatattttactagcgggtgcgtgaactgtcggttctgtgctagtaaattaacatacaaaatgaaaagtgcacttttaatagaatacttataaataaaagtaaatacaacttaattatattatatcatgattcatgaaataatacaataaatgatgaatctttcatttttctttaaacctatctaccaaaaatatgaaaaaacagttaaatttcatttagacaattgcaaaaatatttatcacaatcatagcgtttttgtccctaatttatgtagcgaacatcatgattatagcaacaacggcaaacaatattaaaatataataatttttgtttatttatagacgtattgcaatgtaaaaaatttgtataaatgaataactattaaaattattatacttatattcacttataatgttgacaaacaactgactgatatttttgacagacacttcttttcacgaataacaaagaatatatattcaatcgaaaagtttgtataataatattatatcataaaatttaattccaaaacaataaattaataagtcatagccgctacttttattaatgagacatcaagtctgtacagcaggattttgcatatttcgtcaatttatcagcaattagatgaattaaaaattctattatattactcatagtaaaaaaaagtaaatatgaaaggaatatgtcaaaatttcacaaaagattatatagtttatgtttttaaatttattttgattttttttgtaaagtaagagccaggaaatgttaattanaagaccaaaataattaaggtacttttttcataaatataaatttttgtgtataaattgtcaaaagaaatgcatttgagtcaaaagttcatttatcta

SEQ ID NO: 34104 - DNA, 808 bp, Heterodera glycines
cgttaaggttatgtttataatcactaactcttcttgaaatttcaaccgaaaaaatttaagagttacagtcaaaatcgggaagtttgaaaaaaaattctagggggttgtgaattttttgaaaatttgaaaaacccattggaaggtaaaagtttttcactttttttttataaaatttttgatcaaatttttaccttttttaatttttggcttcgcgccaaaacgtgggcgccaaaacgaccctggcgccaaaacgtgggcgccaaaacgtgggcgccaaatcgtcggcgccaaaacgtgggcgccaaaacgacccagtcccggtgtaagtgtaccaatgcatttattcaacaacaacaaaaaaaagcaaaaataaaaaaaattcaattaattctgctgatctggcaatggattctggagcggatggggaggccccccttcctcctcttcttcattcgcccagccaatattggccccgccgccgccaccgtcgggcacttcgacgccgccaccgttggtcacttcgtcgccgccaccgttgggcacttcgacgccgccaccgttggtcacttcgtcgccgccaccgttgggcacttcgacgccgccaccgttgggcacttcgtcgccgccaccgttgggcacttcgtcgccgccaaaattgggtccgccgccgccggcgacatcacgccgcgtccacagccaccaggccgtaaacccggccacacctgctcccagtgcagccgccgcgaacaaaagaggtgttcgatgagccattgtttctgagcattgaataaatgagttttttaaaaac

SEQ ID NO: 34105 - DNA, 902 bp, Heterodera glycines
  unsure (1)..(902): unsure at all n locations
ctgcgcgaggcgcacgccattttccaacacgagcgatgccagcccatccgcgagacggacttggaggactgagccacagatcggaaggatgaagacaaaacactcaaacgatttgacgacaattaattaattaatgactatttttgatattttttcccttttcatttcgttttttaaattattatcgcttatgtttatgatttgtttgtgtttaatgtgctaaaaatgcatttttctctgaattggatgaattgcaacgacaaactttctcaggacaatcaattcccagtcattcttttgtttatgcgtctgtctttttttattactccatttaatgtttctttttttgaaatcacgctgacaacaaataaatttaatcatttgtttttgtaattgatgctttattaaaaccaataaaattttaacaaatatcctttaattgcctctaataaatttcaataatttttttagtcttactatcataataattttcaggtataaatgagtgagctgatatttctctatttctttctcttccccgctttctccgtctctgtccatctctctctctcccttctttttcatcttttctctgcctcctgcagcaaccaatacataaaaaggatactgtagaatgagatatcgatttttatacgcctttcacactttcacttccgccgattttaaggagtgtatttcgcgtatctacacatgtgtttgcgtgtattanaactagtggacaaaacagaaagttgaagaacagttgtataaaagtgtacatgaatgtattgttatctaattagcaatttaattatattattaaaacgtataaagcacaacccatttgttttacattggccgaaaattttgatatttgtctttttaaaggctttatatcgaca

SEQ ID NO: 34106 - DNA, 1271 bp, Heterodera glycines
  unsure (1)..(1271): unsure at all n locations
ccaaaaattcgcacaatccatncctttaaaaggccatttcaaattgtcnaagttctctccccccgtcccacccataaacataaaatatttcgtggtcgtgtcgaaatggcaattaaattggacactcacagagacnagagagagaagcagacagacgagagacnacagagagagagagagagagagaaagagagagagagaagacatcgcattgtggtactactgtaagtgtgtgtcaaaaaggaatactgtatatattcaaaaaataactgtcactttttccaaataatagcaaaatcttaatctctcgttctcatagctttgtctccccttttacctgtcctggagaaattgagcccgtctcatgaaacctaaaaaaagaaattcattcacaatcactaattgttgtttttttggcaccgattgagaattttcgacactgctccatgggaaactttgagttcgcgactgattttgcagggtctgtaaggcacaaaattaagaatggattccgtcaattggccaactttatgcccctgcgtgccatctccacaatttgaacgcgcttttcgtgtggcaatggccgtccattgataaacactccgcccaattgattcactcgcccctcaaaatgccctttttgtgaaagcaataccgacaattggcactttacttggcccaaaaagttctcaaaagtgattcgggtggcggtgccgttttgtgcgtgtgcttccgttgttacggcaccgtcgtccactggcatttgtcctctcttcagctgttgttggctttgggtgtcaaattggtggtaaatttcggcggaatcgcattccaatggcatttgcgtaaagtgtctgttttaaacgaacttttgaaaattaaaaaaagccaataaatattaattaatttggttagcaacaaaatgcctaaggggttcagtttcaaattaaaaaggaaaagcagcaaaagaaaggaggaaaagccgagcattgattgagtgatcactcactaattaaccgaattaattaatgcaaatgaatcaattattaatttgctgatgaatttgtgcaattgcaacttgttgagcacttcggtgcccctctgctcctttcgttgccgtttcatcagttttattcatttagtgggctgacattgcgcgaagctccgcccaccgatgggacgaaaacgaagtgaagcgaaggaccaatgggaggagggggagggacaaagacaaaagggagaaacttttttaggggggggggggggggggg

SEQ ID NO: 34107 - DNA, 915 bp, Heterodera glycines
  unsure (1)..(915): unsure at all n locations
atttttatggcccctctctctgtgaacaaaaatgacggattgtttctgattgccaaagccttcgcagttttgctgacgtggattttggatggcatccctaaaatccgttaattttgtgcgaattgttcaaacgcacccaaagattccattcgattggccaaatgaattgtgtcaccaaaaaggcaatatctgacgacaaatttaaacacaatttatgtaaagaaagaaacaccttggcatctgaaaaaatgattggtaaagcactcttaagataagggaaatggaaaagctttacttttactccgacgacgccggcgacgacggggccggaatggacgccaattcggatggaaatggccaattcgttggtggggttggtcacctgcaaaaagcacagaacggagtacagcaggagaggggccacccctgacaaatcgcgactccatcagaaaaccaatggcaacattcagaattttctccgcgtgattttgggactctttcggcacccctccgacgatcatataagcatcgcctgttaatgaaaagaagcgtttgcttattgtatctttctgttttattcctttgtcactaatttaccaattgtctccactttgtacacgtcgtgaaggccgacaattcgatcaaatcgttggtataggtcattaagcagtttgatcacatccttaattagccaattaaggcaaaagagccgacaaatgaagcattgggcaaacaaacgtaaggcgtgcagaaggagcaaatgttcgtaaaagtgacgatctgaaggaacactttgaaaattaacccatgtgacagcttaaaatgtgccgaatattcgtccccattcccggcccaactgctttcattntcnatttcgaanntatagcattatttacaaattacatctgtgaacag

SEQ ID NO: 34108 - DNA, 881 bp, Heterodera glycines
  unsure (1)..(881): unsure at all n locations
gatttgccgttgatttgcgcttccttctttttnttnttgtttgcttntagacatttctctgtgccatcgcttctgccagctacaccgttcacttcaattttcacgtttccagaacatcaattgttgagccatttgaattgttggtgaacgaacggaccaacgaaaagttgacactgatgaaggaaggaggagccaattttggccgccgcacttgttggtggacgatgaagcggtgcccaattgttggggagggtgcggcggttcaattggaagacgacggaggaattaattgggacgacaaattgaacaatgtccaatttaatttgtgggctcccaaaaattgcattgggttagcggcaatttcgaatttgtcaaaaactaaaaaatgtgatcaattttaggccattgtcttcgccaccagcagcggaagaagaagcgagcgggtcaatgcgaacaaaaaaggcgtctgagtgcgcggaagtgaattaattatatttgagaaatgctcaatcatctcaccaattgcaaatgaaatttgattgctctcatttttttgatatttggaatttttttagaatttaatttactagtttttccgaagtttaaaacatactgcagttccgcgcgccgcaaaattaaaagtggacttgcgggattaatcccgtgtgatactgtcccgcaaaatttttttttaaatcccgcagcgggatccgcaaaccccaaaccctagcatttttcagcacactcgaccaagaaaaacagagatgttaattttttttacacagaatttttcccactaataaattacaaacagttaatttatttaaaaatacattttattgtaaattagtcttatgaaaaatacagaaaaatcgacgatc

SEQ ID NO: 34109 - DNA, 901 bp, Heterodera glycines
aacattgtttgctgttaatgatgaccaaattggctcttgcctagctcatcaaagcccaactcatcaaaattaaatgcaccataaaactcactcgaaacgaattggggcccagcgagtggttgcggtcgtttggcatctgaaaatggagggatgaaaaaatgccgttgtgcagttttcttgtcggttgcccacctttcgcctgctgctccttggtgaaaaggttcttgtccaccatttgaagtgttccatagtcaggatggctggctaaatgggaggaaaaaatcagtatacattatgtaaatctcaaaagaaaatcaacactgacatggcacttttttccctttctccgagggctttgactttgacggcggcttcacagcgacggacggtgccggacctgacaaacaaacaaaaattagatattgacttatatccaaaatttcaatttcgcctctcgcctttcttgccagtgccgcgctcaattttgagcggggctgctcctccaaaaaattgagtatcaaaattccgcaatgtcccatagtccatggtagcttctgaaaaaggaaggaaattctcggacataaaatgcggcacaatgttttcaccggaagaagaaacatctgaagaatgcgcatttgccgtcgtcgccgctttggatgccattgacgcctgcgtttttgacggcggttgtgtttttgacgacgccttttcggggttttccggctaaaagtgaatggtgaaaatgagttttgattatggaggggagtcagaaacaaacatgcttttcctccttttgcttcttctaagcaccgcagcattggatgagcacgacgaacactatactgaggacaattaaaaaaggcgaaagggcagaaaaaggaagggggagggggaaaaaaaa

SEQ ID NO: 34110 - DNA, 765 bp, Heterodera glycines
ctgatcaatgtttggtggtcgatttgcgcttttacctctccgaaaatgtgaggaccaccaagcaaatgctggttccgctgctgctccatctgatcaatctttgcctcagctccgctgtcacgacaattgcgttttaccgccccttcgccaacaatttttgttacgatttcttaggccaattcattttcaccgctgtgtccgcctccaattttttgatcgaactcacaatgattctgttgggagaaatatccctttgtgttttgcaaaattttgcttttagttttcatccgtttttgcgccgaagatttgggaaagcaattgaaaaaatgcggaacgcacacaaatgttggcgaagtgttggccatgcgaacaatcgaattgggacgacgacgggggaaagggacagcggagaacagcaaatggtcattttggtgaatttgcacggggaaaagctgaggactgagccgatagccaaacggaacacttcgaagtgatgagaaaggcgtgggaagagatggactagggttgctccccgtccccgaactccccggtccccgatattttgggcctattccccgccccgacccccgacatgtcgctccccgaggtccccggcccccgactttttgccccccgactccccgacactaattcggggatcccgagcattgttaaaatttaaaaagttaattcaacaacgaagaggggaaaggttgaaaatttatgaaattttgaacaattttcttaatattaattattaatatt

SEQ ID NO: 34111 - DNA, 927 bp, Heterodera glycines
  unsure (1)..(927): unsure at all n locations
tctagagtcatgggaaagaatattatggaactttntggttccatctcagttgtcaacgccgcgactgcatcgttattatatcagtcgatagaattttcgaatcgcttttaaatcgtctcttttgcgtcccttaatcttcactctgaaccgagttactgcggtctaaacacgtttttggtagaattgcggccagaatttaaaaatacagtttgctatggcttcgcatcacccgcttcaacgggtgctcagtgtaaatatcgactggccattcaaattctgcctttccagccttatggaaagatattatggaacttttggttccatctcagttgtcaacgccgcgactgcatcgttattatatcagtcgatagaattttcgaatcgcttttaaatcgtctcttttgcgtcccttaatcttcactctgagccgagttactgcggtctaaacacgtttttggtagaattgcggccagaatttaaaaatacagtttgctatggcttcgcatcacccgcttcaacgggtgctcagtgtaaatatcgactggccattcaaattctgcctttccagccttatggaaagatattatggaacttttggttccatctcagttgtcaacgccgcgactgcatcgttattatatcagtcgatagaattttcgaatcgcttttaaatcgtctcttttgcgtcccttaatcttcactctgagccgagttactgcggtctaaacacgtttttggtagaattgcggccagaatttaaaaatacagtttgctatggcttcgcatcacccgcttcaacgggtgctcagtgtaaatatcgactggccattcaaattctgcctttccagccttatggaaagatattatggaacttttggttccatctcagttgtcaacgccgcgactgcatcgttattatatcagtcg

SEQ ID NO: 34112 - DNA, 842 bp, Heterodera glycines
ttcgctgcgcaattaatggtcaatttaaataggatagaaaaataatgaaaatcaattaccgattcaatttttaggggccctaaactctcacttttcaattactgtgttgcttagggaggggatactgtaccactgtcctttgcccccccccccccccaccattttacggcgttgagttggccgttcccaccagcgggcgttacacattagcattccgtgcacaattcaaattgtgcaccggaggggcgctttttgccctcctttccctctgcattgctgtgagacgctgattttatcggcgtcattctcaccgcaatgttcagcggccactgtgttggccgctgctaatgtgcgaagggggagtggccggagggcctttcaaagcagcaccccctccacatttgcacatcctggccttcccccatctcatttatgcaacatttctcctgcgaagcgacgccaccatttttcagcgctctttgcccatcccatttaatttatgcattttgcggttttatgatttaaaatatttttaaatatgttttacattttttaatatttatgcactaaaaatagtataatttaaaactgatcagaaaagtgcctgatcaaacactaaaacgatttattttgggttatggcccagtttgaaaatttccctcaaatttctgatcactttgcgcccattgctaataattcaatttctatttgcccattgatttaaatgcccttccttaaatgggctatggcctaaaatgtgttaattaatgcattcattttacccaattaatttcatgcatttttgatcagaaacaattgcatttccccatttctgatcacta

SEQ ID NO: 34113 - DNA, 848 bp, Heterodera glycines
ggggggggggggattagcggggaccgtctcgagaaatgtgtggtttgcacattaaacgaaacacgaaaatttctcaaaagatgatcagatttgcgtcagaatgaaaatatgaagtggaaatataaagagggaaaggaaagaaagaaaaaagagagagagagtgagagagaaagaaaggaggaattgagaaaagggaaagaaaagagataaacgtggagagaaagaaaaagaacagaaagaggagagagagagagagagagagagaagagagacgaagaaaatgaaatggagcgatttgaggattaattaataattggggaccaaaattcagtgaatttgactctattatactcaatttttggcacttcgcggactcttccctatttttttttgtacaaaagttaaacccacgacaaactgtgccaccggcaaaatggtcgagggagggtgaacaatgaatgatcagtgagtgtgatcagtggcactcggagtcatttgccaaatgccatcgatgacgaactgtaaaaagaaaaacattagttatgtgtgtttagtgaatttaaattcaaagtaaatttgaagaattcaaggacagaagaacttccgtcacttccaaccagggctgcacgcaactggatttgcaattacggaaatccgtaatccgtaattacggcgattttctcagttacggaaatccgtaatccgtaattacgggggtccaaaaaccccgtaatttcccgtaatccgcaatccgtaatccgtaatctttaaaaatcaatttttgtcagaatccaatttttcctgtaaaaatttttaatttttcatttcgggcgggggaatgggggggg

SEQ ID NO: 34114 - DNA, 1570 bp, Heterodera glycines
  unsure (1)..(1570): unsure at all n locations
tcaatgggcaccaaaaaaaaaacaaattcattcatgcaaaaccacaacaatcacacatgtatgatggtccgattttcgtaaatattcatcggtttgctcactttccttctgattttcgtccccccgggcgttgccattgccacggtctaatcgcgaaaacaaaggcaccgaaaagcaacggcaaaacgaagtaacgccattttggctcgccggtgagaaagcgcgcgctgatcggcacccttcggttggccgcgggatcagacggattgtccggctttccgcccaaaagaatgcgaaaaaggcccggctcctcctttctcgcctcggcactgtctttctcgaggtccatctgtgatggatcagaaatggaattgccatcttttgataaagacaatcgaataccgatattttactaatcaattaaatttattctatcattttccctttaataaattacctttttttcgcctccatgttcataaataaatgccattgctgctgagaaatttggcaaaattaaactgaaaactttaaaatataaaaagagagaggaatttcctttgggctgctgtgcttttcaatgaatgccgaatgaatgagtgccttagttttgtgtttatttatttattcctttttttctaatggcggggaatgttttcgtaaacaccgcaaaaaaagagaaaaaggaacagcttaaagagcaaaaaaaaagaggaagaaatgacgaattgcgaacgtttaaagtcggtataaaattgcaatttcaaaagtgatcagaaaaaatgatcaantttttttgggtaatagccaaaactagttcatttttggataaaatttgttaacctgactaaaattccagagtttgcaccgccgaaacagtcagatgatcggaagggggggggggtcatttcagtacggaaaattattttaataatctaattaattatttaattgataattaatttttttttagccataatataatgtttaattatcttatttatttttctatatttgccaaaataattattaagagaataataaattcataaccacattttatacattcaatcaattgcactttatttttatttataattatttctttaattttaattaaaataaatcataatacatgataaaaaaacttttaagaatttttttcatattctttgtggcgtttgtaaaaaatctttgattgtctcaattactgattttatgaaataattacatattaaatttgtaaaaaaaaattattattattattattacgaaattatcaattaaaataatttttctattttttttaaaaaccataaacttttgatccggggcatttttcggtattaattttaaactttcgaactctgattttcatgccaagacgacgctgttcaacagaagcaattggacactaacaataatttgattgttttttgttttcttacaaaatcaaaaataatgaagaaaattaaaatgaaacatttaattaggtaattaaaataataatttattatttcccttcgttttgctcttttttcctttctccgtttggcttttgcttcgtatt

SEQ ID NO: 34115 - DNA, 918 bp, Heterodera glycines
gatggtactgtaaaaaagggattccatgatgacgatactgtataaaaattgtttaataatagcaatttgtcaaaaaaaaaaaacctttttttttggtggtggaatgttttgcacgttttggttgacgaactccaaggaaagcaagtgccttgtccaactccttcctcctttttgtgacagttcgaatctgcaaaaatccgaaaagtgaattttcaaattaaaaaaaaaaaattgcgttcactctgtcattaagaaggcccaaatccggagcagatgctgatgttgttgtttgacctgcaccaactgcatgttggagattgcttacattctgtaatacaaaacaaaattgtttaaacatttagtttctttttctgggaaaattaattttaactgaatttaagcattttaaaaactaacaaatttttagttttttttttagcgggagaatgggtctgtgtcgggtgccctatatcacaccagcaccgaagaaataaacaaaattaaaaagaaaaaactcgcacaaaagaaagttaggattttaaaaaaaattaatttttttttgggcgggggggggggggggggttaacgaactgctccaatttgtgtcgacctgctcttgctgctgcttaataagtgcattttccgccttcactttgctcagttcgtcctccgccattcgtttggcattgatcgcttcctcaatttgtgtcttttgttcctcaatcttttccgtcttccgcctcaaccgttcgtccagtttcattgccctgtgtctgtatttgtccgcattttctttgctcctcttcaactgttcgtccatgttgttgttgtcgtcgtcgtcccatcgctgctttggtttggccaactcggcacgcaattgttcactttcggcttttttgctctgtaaaaaaatattgt

SEQ ID NO: 34116 - DNA, 77 bp, Heterodera glycines
tttttataaaaattttcaaattctgagtctcctattattttatttttttttcaaattttgaagggcggggggggggg

SEQ ID NO: 34117 - DNA, 1481 bp, Heterodera glycines
  unsure (1)..(1481): unsure at all n locations
aaaaatatgcataataaattttcccaaattaaagggtggtaatgtctctaaattttttcaaatttgttaaatattaagtaaaatctcaaaaaaatggctaaatgtggtattaaaaatcattttagaagaaaaaaaacatgataaagcaaaaatttactcattttttgcgaaaaaccaacccaaaaagcgaaattttgctttttttgcttatttttgacataaattaaccattttttgagaaaatttatttattcaatatttttcgtgaaaattttgctaaaaaattatttttttggaaaattttccggtttttgaggtcaaaaaggccaatttgtctgttgggggccgttctattagaggtttttttgaaaaatgcccaaatatgcacataaaatatgcacgaaatgccaaaatatgcacaaatatgcaaaacatgcatatggaaagtcatcctagaagcttcaaaacacgctaaaaacatgtttttcgtgcgtttcaggcctcccacagtccaggaaaaaaatatgcatgtgcatataattggactccctagtgatgggtgctgaaaatgatatacattgggatacgacgtaaagccgatttacgattgccgatatttcagggttggaaattcagatttccaaaatttttgggcagtcggacttccgcttgccaaaaatttcgatgaacaagggaaaacttcgacaatttattgggatttggcatgcttccaattgtatttatttgttagatttgtactaatttagagtatccgaatcttagaaaataattttattttttaaagataaaatttttagagagcaaataaacaaggcatacacagcaaagattaactaagtaacttaaatagtaaaaaatttttgaatgatgtaatttgagattttattttgtcattgtctcttttattttcgagagacttaattggcctgggacgagaatggcggaacacattgacttaatagcccttctcggccataactttctccgctgtctctcccccaccctcgctccgctgccgccgccgccagcgattggctgtgtcgctgacgtggaccaatgggcttgtgccccggcagagtaacgccggcgtgcgtttccgcggtgtgcacttcgcgacgctgcaccacatccaagccacacttttcgttctgattgctcaaatcactttgtgtgattgcgattggaaaagactcgctcttgacaaccaaaaaaacattacaatattatcaattttcagatttacaatctcttagggatgctcagttctttccccttattattgtccttggtcggcctcatcgccgtccacgccgaagtcttcttcaaggaggagttttctgatgacagttggactgatcgatgggtcacgtcgaaggtgattctgngcattagtgcttcgttttggtttttagtttggacattcagagcaggatgactacgggaagntcgagctgcccgcc

SEQ ID NO: 34118 - DNA, 1457 bp, Heterodera glycines
  unsure (1)..(1457): unsure at all n locations
cgtctgcatatgaaaaattttcttgtaaaaatttcggcttacaaattagtgttctgccgttattacaataataatacaaaaaaataatgatattaaggaaacataaaacaataaaatttcaaaataccgatatccaatatagaataatatctgttgctctaaaccgtagtgttagtgttgtcttcattagttaatttatcatagcatctcagctaaaatctccacttttagcatgcgaacagaagtaacaattgccaattgaagaagatgatggaggacctttgtctctgccgaacataaattttctgaatcgccagctcaagctatcaatgaataaaaataaatttattatttagtgaagatctcaaatatgtttttgttagcctatttatttacaggagaagtaagtatatgaatatcaacaataaaaaatatatttattttaagatttataatagtgcaactaaagatattaaatgaaaaatacaaattgaattagaggaatttctaccaaacattacaatattttttcatacataatacttttcagtaaaaattatagttatatgttcaacaagtatttagctgttttttaaccgattcaaaactataaaaaagaatttttgaattttaataaatttatttcaatcaatattaccgaaaactttttattagaaaaattatatttaaaaaataaaggattatacgtaattaagttgccaattacagaaaatgatggcgttgtacaacacgtgagaataccaaaaaaacggtataacaaagaccaaaagatagaagataacaaacgattatagaatagacaaatctatcatcagtatttttcatnaagtgttatagtagtatataaaaaataatctaaaatattttgaataatttatttactaacatantaatgtcaaaacaagcaataatattcataataataaataataaaacatcttaaataatccccttgcttttatatattttaattctatgcaaacttttatatttttattttaccatatttgtccaaaatgataactatctttatataaaataaaaaatactttaaaatagatttataaaattgaatgtaaataatgtcagatatcgacaagaagaaagactaataaattaataaacatttttttaaaaaacatttatttacagagcaaattcataaagattcaatattgttttttaattatatattgaaataaaagtaaaaataaatattaattgtttattcgttcaaaataagctcgtcttaaaaaaccacaatttgatggataatacaaaataaaattaatttaataacaaaattaattcgttttacaatgctgatttaattaaagctttgtttttcgctttcatgtaaacttataatcatgctttttatgttatttttattaacgaagaattaaatatatgactaataaatagttaaatattcc

SEQ ID NO: 34119 - DNA, 657 bp, Heterodera glycines
aattgcgcggaagtgaattaattatattgagaatgatcgatctcaccgtttggaatttgatttgatttgatgctcatttattttctctcagacatctctcatcattgtcttttgttgtttttttcgttcgaattcataaatatatttattatttattaactgtttgttttttttttaatttttttctggatctcttgacaaaaaaaggcacttgaaactcagtggtcaacaatacgtttatttaattatcgctgaaaactgaaaggcaaaaaaaacaatagggtttattttttgaaatttctagttcaattcttagggggtgtatttttggtggccgatcatttcgtcactgagacataatttttaaaaatttttagttattctctctctctctcattccactctatcaatgtcttactctctttcctttctctatctctctgtttctctctcctcttctctctttcctatttttttctttctctcctcattcctctctctctctcattttttcctttctctctctctttctctcatttttcctttctctttctctctttcctccttaaaattggaagtgatgcgccgggggagtgtcaataaataaaaggctgtaaattttgaaaaaatcgagtaaaattccctaaagatggacca

SEQ ID NO: 34120 - DNA, 1406 bp, Heterodera glycines
  unsure (1)..(1406): unsure at all n locations
catttgggaacgtcatttttaggtagaaaaatgcagaattaagagaaagaagacacaatttgtaaattattaaggagaggaagatacaatttttaaaagtgaacgaacttgtcgtttttaggtagaaaagtgcataattaaggagtgaacatgcatgcagaattaagcaatggaagttacaatttgtaaattattaagcatttgggaacgtcatttttaggtagaaaagtgcagaattaagagaaagaagacacaatttgtaaattattaaggagtggaagttgcaatttgtataaacttaaaaacgaatttgtcgtttttaggtagaaaagtgcattattaaggtaacatacatgtgtttaccaataaacgtaagacggttgactgcattcgtagcgaccaccaccatcattgtcgtcaatttcttcgacttagtcaactcgaccaaggcgtttgacaggaatgaagtcgtcctcgatttcggtaaacaatttgccaagccatcgctctttgttggtgtagtcgtcatccacaatttcgagtagttccattggatagtatctgtcttcgccacatccagaatatttctccacaatacacggcacgtatggcaggtgaagcttaatacggtggcgagcgtagaaatgggcagcaatgttaatgttgtacggttgtctgagtctgccgtatgctggggtcaaagccgctccatggtccgatattccgtcgacaaaaaatgttttctgtatttcattccggtcctggtatgtcgtccgaaccttttttccgaccagctccttcagtgccttcactcggtcctcaggatgattgagcttgtcgcggagtgatttcggggaacagccgagaatttgggcacaaaattcgatgacaaggaccattgtagcagaacaaatgagacatagctgacaaattgccggggcttttatactccccggaaaattaggccacgcccacttttgaaagctatttaagccgagattttctcacacaatcaaatcagtcttgcaaaatcatcatcaacaacaatggcagatcaatttgtacaacatgaaactgcnggaggagcaacaagtgaaagctaagaagccaaacgttgatgagcgatttctttggaaaatcacgagaggccaatttgtgcttgcgattcggctgtgctcaggttaatcaaaaatttttgacgaccaaattaattgacagctttcagaggactggaaacatttatttcacaacaaagacaaggcatgtcggctggaagatggacgagtggcgattggactcgagatgtgtgaagaatgtgcccgaatcattgcctgtgtcagtgacatgattgctgatncaaagnaaagccaaaaaccaccgaaataatcatcnaatttttcgcatta

SEQ ID NO: 34121 - DNA, 825 bp, Heterodera glycines
  unsure (1)..(825): unsure at all n locations
aaatggacattttgaattttgtttgcacagaaaagaaataattttattaatggcgatttctgtttgatcaaagcaacttgcgtgattctgaacagctgcaaataccaaaattttgaaccatttggaaaggaatcagctgatttacaaaatctatttgaagaattcgtcaacacataacacaccaaaatttttaaattttcaatgatttcacgttgaataattgcttataaaaaggaaagtaagtcattagaaatgtcgacactgctacataaaattagtttctaaacacatccaaaatgttgtgccgttttccatgcttcgtctgtgctcttttattccttctgctcaccaaattggatggtgtttcgccaacatgcgtctcatgttcagccgacagtttaaaaactctgtccgtagtggacgcgaaagcttcggggatggcacaggcaattagcacgtcaacgccaatcggcacagttggcaccagtggggtcggctgcacaactttgaagctgacttgtggcgaaggccaaattgtgagactcagctcggaactttgtttagggatagtgtaccgacgttgggattgggatttcgagaaacggtacgaagagtggagccacaaaaattgtatggcatttttacagtgatgagagttttggttaattttcgtaccgtatgaaactccttgttgatcaatgaactattatatttgacttatagctattaatttgccttataggtttccatccatgtncacttgggcttgngtggctctgactacggtaactatgactccggtttcatcgccctttgactgcatgc

SEQ ID NO: 34122 - DNA, 116 bp, Heterodera glycines
gggattaagcaactgttaattggcaaaaaatgaggatgatgatggatcagccgccgttggggagggcattaaaatccgactctgatcggagccgcacatttgtgattgatcaggcg

SEQ ID NO: 34123 - DNA, 203 bp, Heterodera glycines
tcactgttttgtggtggcgatggagtggaccctcccccccccgcccctccgtccatcgtccacttcacctcaatgggtggggtgggcacaagggccgatcgcgggggcgtgttcggaatggctggatcaaattcaattcgtacgtgtcgccacccctccccccttttccattgcccatttttgcgcacttccgccttcgcccc

SEQ ID NO: 34124 - DNA, 497 bp, Heterodera glycines
aaattcctaaattttattaaaaaattgacaaaaaaattgcttaatcgcagaattaatttttttttgaagtcaacaaaaacgcgcgcagttttgcaaaagggcgaaggaaaattgttttttttttaaattaattctgcggcacagaagaggaaaagtaccaaaatttcaggacgaaagcgattctgaccctaaaaacccatcttcgaaatgctataaaagtattaaaaatgattaaattaaaattcttgaaaatttctaatatgcttcattcattcatcattaaaatccctgttggtcccgccgccgacgccggctcgaatttggctttttcggcttttcagttccgagttttctccaaaactttcgagtcattctcaactctataatttctctccataataaaatccacaataaattgagataaatcaaatcaatcccatctcatatttaattgctacactggtggaaaaaagtcttaaccaaaccaccgaaatttg

SEQ ID NO: 34125 - DNA, 1296 bp, Heterodera glycines
tgttgttgttcagcaactccaagtgctggacctgacggacaacagcctacagtacctaccgtacacgctgaccgtactgtgcaaggccaaaacactgtccgccctttggctctccttcaaccaaccgccgctgcccaatctgaccaccacgcatgagccggtgatgaatatcaaggtaaaaattaaattaaatatagcatttttaatcgaaaaatttatgggaaaaagtcttataattttttttgtttgaaaaaattttcatctttttttgggtagggttatatggtaaaacattgttttagacaagaaatacgatttggtgcttaaaaattttggtttacgcggagcaggtctttttgacaattctacgcatttttcttaataaattgcattaaaatttccaaaaaatttttcaatctcttaccttattttttttaattttgaccccaaaatggcaaaattagtcttttttttggcgaatgctgaaatttttatttgtttttgtcccatttatccaaaacaattcctcacaaatattcaaaaaagccgtcaacgaaattttgtcccgacgaaattttgggttgcaccctatttttccgggctaacattttagataaagggaaatagactgacaatgagcgtctggttcgggaagggggggggggtaattgatcagattattctctatgggctgattttataaaatgcctgactgggcggcgtcgatttcatagacgaagaagcaggcaccgagagtgcgatgctcatgatgatgatgatgatatactgtaaaccggaaaaaactacaacggtggtaccaagtgatcagcacattagaggaacagccactaggtacatacgcaaccgtgatcagcgaattgaacatatttaaacaactcattgtccatcacaccgaaaactatcagaaaggagaagcggattaggggaatgagattacgatggatcatacgaatgatccgagctgatcaggaaaatgatctctaatcacataactttttgaagtcttatgatggtcaaacctctttaagctttgatcaactctgatcggaatagctcataaagtatatttttttagcaaaaatatactgagtattggtccgaagcacctggtgaatcggtacaaattacggacgatttttctgtccatttgtactgcgtgacggacgacgagatttgtgttcaacgcgaactttggattgagcgaaagggcatgccgaggagaaaggcaaataaaatttacaaattttaaaatattttttaattaaaatttttttc

SEQ ID NO: 34126 - DNA, 648 bp, Heterodera glycines
  unsure (1)..(648): unsure at all n locations
aaataaaataaaaaatggctaatatgtaaaattgggcgtccagaaatttttagactaatccgaagcaaagcacgaatgaattaaagaggcgaaagaattcacagtatcgtttctaatagggaaatattgacaggatattcggctaaaaacgggtttgatcatttttagcgcatttttaggtatacatttgagacaattgggcaggacaagaaaagaatgaagttgatgcctcatgaaactcggaattggttatgttttgtcgaaaatatccttacataatactcataaaaaatacaaataattcaacccacctattctatgaccacattctgaaaaaaatcccagaaatacgaggaaagatatgcttggtcacaataaaataaaaaatggctagtatgtaaaaatttgcggtcacaaataaaataaaaaatggctaatatgtaaaattggcgtccagaaatttttagactaatccgaagcaaagcacgaatgaattaaagaggcgaaagaattcacagtatcgtttctaatagggaaatattgacaggatattcggctaaaaacgggtttgatcatttttagcgcatttttaggtatacatttgagacattngngcaggacaagaaaagaatgaagttgatgcctcat

SEQ ID NO: 34127 - DNA, 1446 bp, Heterodera glycines
  unsure (1)..(1446): unsure at all n locations
aaaagaaaattcaaaatccttcaaccccaccgggcgtgtatttgaaatgttgtggcacatcccgcgtcacaacgccacaatcctcgcatacgaaagtgcccaatgccaactcgggatgaacctggtgcgtacgcaccacttgtcccgaaatccggataagtttgccgattttgtcgctggtcagatgccgaacttggtgcctggttttaacccctactatggccaagtagtattgcttgcgacgcaaatgttcgtgttggtcggcagcatcacaacgctcgacgaccaattcgcaaatggcatggcacagaaacggatacaaccttagaaaatgaattcatggatttagctaaaacaaaagcacgtaaatcggagttgacctgtaaaattgcagttcaattgtggcagcaagcaccgcgctgtaagcggaaatgtgtgcaaattcaacttcgagagtgtttcgttcgggccccctcaactcgtcaatctgctgaatatacacattcccaccatcggtttcaaaacttaaaagacattttaaatttttatattttcgctagattatcctaccttttgataaatcgtgtgaatgcatcttccgttcttcgaccttcatcatccgaaatcttatttatcactggctgagcatccatttgtaatcaaataacggaattttacaaaaatcaaatgaatgacaaagttgattatcagcaaaacgtcagatttttagagaccagaacacctaatacatattgtatttcaaataaattattaaccgctatttggcttaatgatttttaaaaaatgccaaggcataaaaatttaaattcttttcgttagcattagagacggataggaccggtaccggtttttactggatccggaagccagtccagcgatttttggaaaaatttggattgaccggttttttggattacagattttgagagaccgggttcggaaaccggttgcttctgaaaaaatcagtcaagtccggcattttgaaatctcggtctctggttagcattacctcctccttctcttatcggcaacataccgtgattttctttctttcttgccgatctttctatttgacaaatataatttacctatttatgagttttttagtgtcatgattttaattttcattttataaattttagctaaagaaacttttaacaaagtaccatcatttgcattgatttgcaacgaccaaatgccaccaaagtaattattttatatgttctatcttanaaaaatcataatgtttctattgaagggggtttaaacgaaagagagaagaaggatcggaagtggncgaatcagttgatcttgaccggattgatgatgacgaaaacagtcgtcttacactcactccttcccgccataataanagtaattttttgtttcngntcatgctttttgaatttcccacanatttcattg

SEQ ID NO: 34128 - DNA, 976 bp, Heterodera glycines
ttttactttaatttaagctattattatgagccacccaatttggcaaagatcggtctttttatacgcattaaagaagattcagtcgattgcttggagtgtaagcaaaaaaaacgttattaatttttcatcttcatcattttttggtttaaaaatatatttgaatacttttttatactttgaaagacttttttatcaatacagaattttttgaaatttcctaaaatccgcaatcctgcgcaggatcctgcagattttaaatgcaggatttgcaggattaatcctgccggatcctgtcctataaaaaattttgaattccaatcctgcaacaggatccgcaaatttgaaatttccggtctctagttttaagttataaacggatagaacgccaaatatgtatttattaaattttatttaaattttttgttgattttttccgttcgtacttttttgttttcgtacatgctcaattttgttttatgccttttgtacgtacatacgtacgagaatccattggagatttgtttaaagaaagcttccgaatttctttatgtgattattttgaatttgtctaggctcgtagccagaaaaaaatttcagagaacggaatcgatgaaaattttgggtcccgtagcgggttccgcaaaaattaaattacgaggctttacatatgtacatactgctaacaataagcacagtgagtctacagaaaattctgatcatgatcactgtggggcagagaacaaaaacccttttccctctttctctctcttttctcaagggaaaaatgagttgaattgagtgcgtgcgtgtttggcggaggatggtgcagcaacgcggttggcgaagcattgaagtcccctttctccttcactttttcaccaaatgctctctttctctctctcaccttttcaaccaatgctctcttttctctctctcttttattggattttctatcttttcttcctctacatcttgg

SEQ ID NO: 34129 - DNA, 1446 bp, Heterodera glycines
  unsure (1)..(1446): unsure at all n locations
gaaaatgagccaatttgttgggagttaattactaaaacagcgaaaaaaaagtaaaattaacttattagctaatcattcattgatttataataatgaaagaaagcgatattcgcttagacaaaatacaaattaaatgctaacgaaaaagccactcaacagcaaaaaaaaggcattccattgaatgagaggtaattaaaggaacaaccggctggggagaagcaggaaaagtggtgtaagaagaagagaagggctaataacacagaaaaaatgtaataaaataagaaagataatttataaggacagggaaaaggagaagcgaatcgaaagacaacgaaagaaaagagaacagaagggatcagcagaagaagaaaaggagcagagaatgggaattgtaaaatgatcaaatatccttcaaaagtaaactggcaaaaatactaagtcaaccattcatttttgacctttacgtacggaaattaaggacactatggtcaaaataagatttaggggatctaaaaaaacgcaattatgaatttttgaaaataaaatttcgtcttcaaataaataaaaattcctatttttcgtgcgatgactatttactgttgaactataatatattagaattaattttatttaaaaatcactaaaatatttaatttctgaccaaaatatgtcaataaagaaagagagaaaattaaatcttcaattaccctcaaagtgcttattaatgacagaacaacaattgattcggagcctttgggttatacgatttgaaaaaaaaccaaaattcaaattttgtataaaaatcattcgctcggggggaaaaacgcattgaattgagcacaaggacatcatcaaatctaagggggggggggggaagaatgaatgaattggcgaatgattcgtttgatttggcgcatgagaaaatcaattagcgaagaaaaagcataaaatgtataaaaagggagaagaaaatagcgaaaagggcgacagggacagaagaaaataagcgaaatcgaattgagattaaaaataaaattttacaaagaaataatttcaatttctttttttgttgccaaaatctgccaattttcattcattgttaaaagggcaatttcgcctttgtttaaaaatgcaaaaagattgatgatatattttggtgagcattaaaaatgatgggtcgtccgtttgtttatgtgccataaaggaaaatgtgtggattagaattcgaattcaaacggattcaaattcgaccttgtacaaatgcattttccattaaaattaccatttgtttctgttttgaaatgattttcatccgtgaactcctcctgttcattgatgcttttttaaataacgaatccgccccaattagggttttttgaacgatcggtggttttttataggaccgnaattattcataaaaaaattataaaaagattattttattat

SEQ ID NO: 34130 - DNA, 69 bp, Heterodera glycines
aatagaacaattagaaaattcagctgagttttaagcaagttgtctttggacaaataaagaagcaaaatg

SEQ ID NO: 34131 - DNA, 662 bp, Heterodera glycines
aataaatacctgttaacttttcaaaagtggccattgattgattccaacgaaaaggaagaaaagcaaaaaagtctatagaacagcaataaataagagcaccataaatcactcaatttaagcagtgattataaaaactttatatatttaaaattcataaacaaatgaaaagtttttcacactttccgtgtgtaaaaatacggcaatatcgataacaaaaacaaaacaaagaaaaacaaatgaataattgtgatgagagcctaacaaaaagacaaaaacaacggaaaaaacaaagtgtggttttgtcattttaattgttcgtcttaaaggagaggaaaatattccagaaaatgccgaagaattggaggaacacaacgcgaaagtgaagagggataaccgtcagattgacaatttggacgaagggccaaaactgaaaagggaaagaaaattcattagaatttgggataaaaacagcaatcaatcgcctaatcagggaaaatcacaaggaaattggataaaaatgactatattaatagacatttacatcggtgacgcaaatttttttttgtttggaagataaggaaaagtaaattttgaaagaatcgacaaaaaacatgcaaatcacacaactcatattctcaagctgaactatgggaagagattaa

SEQ ID NO: 34132 - DNA, 240 bp, Heterodera glycines
taatttttgtgtcttttgccattctcaccaaatcgttcactcgtgccaaaatggccttccgttcgctttgggtgatgtatcttttggaagtgattttggattctgacttttttttctatttgtcccttttcttcgcacctttcagctaatcgagcgggccaaatgatcattctgaggggggggggggggggggggagagagaaattggggagaaggaaattaattattttattaaaaaat

SEQ ID NO: 34133 - DNA, 743 bp, Heterodera glycines
taagcccggtcatcgtatccatgctatctgagccacatggggaaacccttgaaaaacaacaattgttgtgggaaacggtacagaaaaatgttggaattttgaacgaggaacagagtgaagaattaagagaattgtgtgaaagttttggagaaatttttgcggcaagggacgaatatttgacccaaacatatctggtccagcacaaaatcgaaacgggtgacgcaccgccgatcaaaatcaaaatgaggcatgtgccatatgcataccgcgagaaaattgcggcaatgcttcaagactatctgggaagaggagtcatccaatcgtccatttctccatgggccagtcccatcgtattagtgccaaaacgtgatggtacattacgtttttgtgtcgattatcgagctgtgaactcggttacgcgtaaagatagcttccccttaccaaacattgacaacatactgttaatgctaggaggaaaaaagtttttcagtactctcgattttatgtcagggtattggcagattaaaatggaagacaattcggtggaaataacggcgtttacaactgagtacggcctttacgagttcaaagttatgccattcgggctaacaaacgcggtcgcgactttccaaagattcatgacccgtcttttcgagggcatgatcaacgattttgtcttcatttacatggatgacattgtgatcctcttcagaatcgtttgaagaacgatacccaaacacttg

SEQ ID NO: 34134 - DNA, 1054 bp, Heterodera glycines
ttgtagtctttttttccccaataaccttttcaagccccatttttcgcaccgtgaatgttatttttatggagttctgaaccgttttgagtagattagactagaaaaaattgaaaattttgaaatcatgtttcccactcccttctcccaggggtattattttgtaaagtctttttttcaaaataaacttttcaaaccccattttttcgcaccgtgaatgttatttttattgaattctgaaccggtttgagtagattagactagaaaaaattgaaaattttgaaatcatgtttcccactcccttctcccaggggtattattttgtagtcttttttccccaataaacttgtcaaaccccatttttcgcaccgtgaatgttatttttattgaattctgaaccgttttgagtagattagactaaaaaaatatgagtgatcaaactttcactaaaaagttaagcctaaactttttcccaaagttaaaaagcaattaaaattttattcacctccattattgatagaaaaagcatcagagtgcctaaactaacatgtaaataaaatttggtgcgtttcagaaccctttctgaaaaaatatttatgaattaattttgcaaataaataaaaacgaaagactcagattttcgaaaaatttttttgagccagctagctcggcgctcatttcagtgtaagttagtcctttaccggggagtatccctgcaaagtttggtacgcttctgctcaattagcaaaaaatatgagtgatcgaattttcactaaaaaagttaagcctacattttttggcatatttaaaaagcaattaaaaaattttaaaatttaataattttcctgcaccgaaggtactcactcggcctcttcgcggcctcgtggtgggccttcgccccccccctcccacgcccttcagagcacgacaaatatttcaacaaaaattttgaaaaattgactagagcaatcgaacgctaacggacgacctaatggaaaaaaatccccgaaggagagaaatgattaaatccattccttcgggggaccgtgccgggtgc

SEQ ID NO: 34135 - DNA, 856 bp, Heterodera glycines
agtgaatgaaagagagctttgtttgtgtggacgaatgccatttacggacaataaaattatttcttaaaatgtcgacaacccttaaaattaaaaacgtgcgattaatggtaaaagggggagaatatgctatcttgaaagcaatatttgtatttaataatataccatctgaaattgatggacctataatttatgcatcgcacagtctcgccgaaatttcgcaatatgattttgattcttcttcgagtaaatataaattatacaacatgttttattattttggaaattctaaccaaattgctgaatgagaatagattgaattatgaacagaaattgtcaattaatgaaatgattttgcaattagcaattgatacagccaataattacaaaacaaatgaaacattggataaaataatccaaccaaaatttgaagaatatttagaggaaatgttcaaaaaagcggaagaaagtgcaaaaaaagaaagaccatggaacgccaataaaataaattatgacaaacatttgataattttgtatacaaaattcgatgatcatttgatatgggtgagacttaacattcaagcaaaactttaaaaattaaaaatttaggatgaagattctgaattttcggaattttgtcaaaggattagcgacaaatttggagaaattatttaaaatggctaaagaatattcaaattattaccgtcaaatgaaagagaaaggattcatggcctcttatgggttatacgaaattgagaaaatgaaatagcatttgacgcaaaactatgaggcgcaacttggcattttgaatttaatgcaaaagaattggcaatgtgacaaaattgcggataaattaaat

SEQ ID NO: 34136 - DNA, 985 bp, Heterodera glycines
  unsure (1)..(985): unsure at all n locations
gctcttagggtaatgggaaaaaattttgaagacgttttccggaacggattagcatcggggttacgagatagaaaattgtcctaaaaagagatagccatttttctgagaattaattcacaatttctgcagctcttagggtaatggaaaaaattttgaagaggctctccggaacggattagcatcggggttacgagatagaaaattgtcctaaaaagagataaccatttttctgagaattaattcacaatttccgcagctcttagggtaatggaaaaaattttgaagaggctctccggaacggattagcatcggggttacgagatagaaaattgtcctaaaaagagatagccatttttctgagaattaattcacaatttctgcagctcttagggtaatggaaaaaattttgaagaggctctccggaacggattagcatcggggttacgagatagaaaattgtcctaaaaagagataaccatttttctgagaattaattcacaatttccgcagctcttagggtaatggaaaaaattttgaagaggctctccggaacggattagcatcggggttacgagatagaaaattgtcctaaaaagagataaccatttttctgagaattaattcacaatttccgcagctcttagggtaatggaaaaaattttgaagaggctctccggaacggattagcatcggggttacgagatagaaaattgtcctaaaaagagataaccatttttctgagaattaattcacaatttctgcagctcttagggtaatggaaaaaattttgaagaggctctccggaacggattagcatcggggttacgagatagaaaattgtcctaaaaagagatagccatttttctgagaattattcacaatttctgcagctcttanggtaatggaaaaaattttgaagagctctccgnaacgattagcatcgggggtacgagatagaaaattgtctaaaagagatagccatttt

SEQ ID NO: 34137 - DNA, 1402 bp, Heterodera glycines
gcacaatgtttgtactctccctaatttcattttcaatacacaaacaaacaaaaccttcctttcttttaacatttcacatttttagcatttaaaaaattgaaatatattttcgagactgatttttcagggttcgagactttgaattcgagaatttctcatgcactgaatttttggcaaaaaaaacatataatttcagaaatagaccctaaaatgtctaaattctaccatgtccagtgtttgggtagaaatttaaaattctagaatgtacggataaaaggataagggttacggccacagaaaacactatgatttacgggctaaataacccgtaaaacccgtaatccgtaaagcatcgtaccagtcgaaaaaaaatacgggttacggtctacgtgtccataaaacccgtacacgggtccggcccgtattcaatctctaattttgggacattttcaaaaaattttacttttatttaatttaaatttttttatttctctagcattatgtatcaaaaaaattcggtcaaaaattgaaaaaaaaattcaattacaaaatttaattaaattatatggcagcgccggaagagcgtgcgcgccgcggggcctacttactgctgactaatgacccccccctccaattttttaatcgatgcttagtttaaataaaacactcccaaaaaatttttttttggcgcggggggggcggcggttccatttgctaacaacacaaaatataaagtaaataaatgtacaattaagaaacatgagaacactggcaagcagtgcactgaacattgaacaggaagcggcacctgccaaaatttatgttttcgttttttttataattttttcactctttccaaatgggattttgaaagaaaaaaaactaggcttattccgcttcaaaaatttttttatttgttaatttttatctcatttaaatatttttgtttgagtttaatccaacccgccctctgaacttttcattccttattccattgagattttttgtaattttatttctaagtttgaaataagaaatattatatgatctattctacttatatttccataattttctcttatttttattatcgctaaaatttgttttttatttaagttctttcacaacaaaataaagcattttattttaattttcaatggcattttcctctaaaattttttcaattttttgtctcttccatttttaagcctattccgcttcttccaaaaacaatgtttccattttgtaaaaaaaatattacaaaaaacggggggtgggaaaattggaaaaagtaccaacacatacataacacatcagcagttttattgaattgggcgcttctgttattccatcaatcacttcagaataattaaaaacatttccgtcgcttactcacaaccga

SEQ ID NO: 34138 - DNA, 1585 bp, Heterodera glycines
attctgattccatttttatttgccagtagcctgacattcattggagagtcgagaaaattttctttcctcccagtgcaagaatagtgtgatcaatgttcggaagaggaaatgcgtctttgattgtcaccgaatttaaacctctataatcaacgcaaaaacgcaaagtaccatcacgctttggaacaagaacaattggacttgcccaaggtgagctggatggacgaatgagaccacgtcccatataatcttggaccatttcagtcacttttccgcggtatgcgtatgggattgggcgcatttgacttcggattggttctgcgtcttttgtatcgatcgcatgttggaccaaattagtctgtgttaactcccaatcactgacagcaaaaatgtcttcaaactccgtgatcagaatttgcaatttttgcttttcttctccacgtaagttgtccgtttatttgtgccagcttgctggaattcttttgaattcgcacaatttaattggatttcacttttagatttggacgaattttggtcttcatcatttttgcctgtcaatgtgaacaacattgaatcattcaattcacgcggattcgcaaaatgctcaaattgtccaacaatctcatccttttccaatgtaatcggaagtgcagagaaattggtgatcggtgcgataaattttccgttatttggatttacgacagccggttcaattctcatcaccttttttctgtcatttgatggaaaaattgccaattctttgtctttcttcgttgaacttgtcatttcaacaagtgtagtggctaacggcattaaagtcgttttgaaaatcacgtgaaccgagttttgggtgttcacgttttgcttgaagtctaccatcgtttttgacaactcgtaaaaaattttgaaccctaactccgaaagtgagttggttccgaatagtaaatcgtagccaaacgatgtttgagctacgtgaagacgcacttgcactgtcctttcctgccttttaacaggcaaagttacaacaccgtaacatttgacctcttttccatttatgtctatgacacgtgcaatttgtcgatcgggcttcaaaaattctttgttcaatgttgaactattcaaaattttgttgaaaaattccactgaaatcagtgaaatctgggcgccgccatcaagcattgcgtctgccttttgctctaaaattgagacctttaccaacataatttttccaacagcactgccgttcttttccgcgtttccacatctgcggacacctgccatcaactcatcaaaagcacacgttgactttgcatcagttgaatcgagttgttgcttcatcgctcttcggatattttcataccggaagggattattggcaacggcggaattgtatgcgcgttctgccctacccgaacatttcgattttaatgtgcttaagcgcttttcgttgggccaatcttcgctaactgcgtccaactggcgaaaaaaggcattcacttcgtccgctccggcatttcctctcagctctgacatatggtgtagcgtcaaagagtacgagaaattgtcaagacttttaatggtctgcgcc

SEQ ID NO: 34139 - DNA, 740 bp, Heterodera glycines
gcacctttatccgattgatcgcctcccaaggcaatggatcacccgttggacaactgaggcctccgaactgagcaccgttcagtctgatcataaagcaccgcttgaccacaacaatgtccaagttcaccacgtaactgccgcgagccaaacgcacgcctttgtttttgatcaattgggacagctaaatgattaaatgacaatttttaataatatttatttgtcttttaattattcaacagggccctgcattttagtgacgaaaaagtcaaaataatgtggccccaaagcaacaaaatttgaatttttggtttcttatatgtgccataattgttttcgattaatctgcaaaatttcaaaaataagttacccctggtaatgccacttcaaaatcgctgtccgtcccaattttgaagctgacttccgttttggtgacaccgtctaaatgacatcgattaaccagcaactaattaattactctctttgattcgattacccattttggctctcaaaaggtccacagttacgttttttatgttggaatcagtcaatgctttgatgctgatcagctgctctttggtgttagtgaattttgcagaaaaagtgaggtccacatattttggcggaaaaagatcgaatcggtcgacgtgtggcattttcggaggcctaacggaatctgacgattggataaactaaaaggaacaaaatttgatcaaaggtaaattgaccaaaaacgggtaata

SEQ ID NO: 34140 - DNA, 446 bp, Heterodera glycines
tttcaataaaatagaagaaaacgttcaaactaaatgattgatagacaagggatgtgtttgggtaggggcgaaaccgcaaatttactgttttccttattaatcttacaattaattgtgaaatttcttagaatttttcccaacatagcccttcggcacttcaagactcgtgaatttgttaggccttgtttatgcaagtaacaaatttttatttattttttgctcacaagtcacacacactttaacaaccataatacatctaataataataataattggggtttggttctattctctttttgttttggtctaaaatatttatttcgctgctgtcgccgccgccgccaattttatcagtccgtccgtgctgtgcgatttgggccgctccaacggaaggcccatgcacgcgcccagatcagctgggagagacagccgagtgcccgactgac

SEQ ID NO: 34141 - DNA, 266 bp, Heterodera glycines
ctgcggacatctacatttttgaattgaaaaaattcgttatactctttctttttctccatattgaccatcatactcatactccccccaccctttctcctccttcattttttttttcctttccttctccaaccctctcctccctctcttgatagtttaaactgaaggcgggaaacgacaatctgatccccatcaagctagcttctgcaggtcctgctcgagcggccgcccggggatcgatccccgatctagtaacatagatgacaccg

SEQ ID NO: 34142 - DNA, 53 bp, Heterodera glycines
ctgatcccgggcatcgccgtcgggcgggcggagagcaaaccgctggtggtcag

SEQ ID NO: 34143 - DNA, 688 bp, Heterodera glycines
tgaggttcaacagccggccgcgaagcggccgaatgatcccataaaattatgaaatgggcgcgaagcgctcgtcctgaggccgcgaagcggtcgaatgatcccataaaattatgaaaatggcgcgaagcgcccgtcctgaggccgcgaagcggccgaattaaaccttaaatataaaaaaagggcgcggagcgccctttgaggccgcgaggcggccgaattaaaccttaaatataaaaaaggcgcggatcaccttttgaggccgcgaagcggccgaaagtcctctacaatattatgaatgcgtcctcacgatgcctgtagaccaaaatcccttatcacatccataaattcatttcaaaatcgcgcatgcactagcaacgaagtcctttgcgcgaagcgctcatgtcagcgtgtccttcctaaataccaaagtatactgcccacaacatcccccactgtgcaacacgctagtttatattaccatagagaaaaagggggactcgtcttaaaaactaatttgagtcgaacggctgtcgggaggggtctgaaagtagtggaagggtcttacaactttttgaggcgcatctgggaaaaatatgggttttccgctccggtggccaactgagtcccggcggctaatttctcacttttgcttgcgtttgaaggccctgtaactttttttctaaaactc

SEQ ID NO: 34144 - DNA, 979 bp, Heterodera glycines
catttacgaaatgccattgtcggcgatttaaatgagtcaataaagtgcggcctttgattgtattttagccatttgcgttgttccgcgtgtcgcaccaattccaaatcggagggaagcgaactctgaaaaggcacttagactcattaattggtcattagtgctaattgactatgccttattgaagtggcatgccttcctgatgattttctccgcctgtaaatcactttaatacggtaaatagcagaatggactcgcctcgtccacgcgatttgtggcgattagccaacgtggactctccggaagatgatggatcagaaacagggcaaggagatggaaaacggtggtgatcagctatcatttgcaatccttagcttcccctcgcccactcgatgtccagagagacaatcggtcagtaatggacaattcgtcaggaaataaattacaaaaattattttttgaattttaaattaattttcatattgttttacataaaattgcgttttattaagtttgttgacgaattgtccgggagccgcccaccccacctgaattgaggtccacgaccgccaaatgtaagcaactaatgccaggaaggcgtagccgcaagcccacggcgcttgcaaaaggctgccgacaacggaacgatactgcatccctggggagaaagaagcattggcatggtgcaaaagggcattttggcatggcaaaaccagtgatttccatgcaataaacgtaagcggccaaatcggccgcctcattgcaagcggcgagaagaaatcggacgaccaaaaacacttcgaactcgcgcgagaaggacagcagaaagccgaagatggtggacagaatggagaagccgtaaatggccggcttacggccgtaacggtcggagataaagccgcccatcagacagccgaccaaatagcccagggaataggacagatgcacgtgggctgatcagaaacagcaaaacatgatcaca

SEQ ID NO: 34145 - DNA, 1001 bp, Heterodera glycines
aataaaatggccatggcgcaccgcacttcgtttcatgtttgagagcgtttgttgcatagaaaatttctcaaaaaaagagatagccatttttctggaatatctattaaatataaaaattatttgaaaaataaaatggccatggcgcaccgcacttcgtttcatgttcgagagcgtttgttgcatagaaaatttctcaaaaaaagagatagccatttttctggaatatctattaaatataaaaattatttgaaaaataaaatggccatggcgcaccgcacttcgtttcatgttcgagagcgtttgttgcatagaaaatttctcaaaaaaagagatagccatttttctggaatatctattaaatataaaaattatttgaaaaataaaatggccatggcgcaccgcacttcgtttcatgttcgagagcgtttgttgcatagaaaatttctcaaaaaaagagatagccatttttctggaatatctattaaatataaaaattatttgaaaaataaaatggccatggcgcaccgcacttcgtttcatgttcgagagcgtttgttgcatagaaaatttctcaaaaaaagagatagccatttttctggaatatctattaaatataaaaattatttgaaaaataaaatggccatggcgcaccgcacttcgtttcatgttcgagagcgtttgttgcatagaaaatttctcaaaaaaagagatagccatttttctggaatatctattaaatataaaaattatttgaaaaataaaatggccatggcgcaccgcacttcgtttcatgttcgagagcgtttgttgcatagaaaatttctcaaaaaaagagatagccatttttctgggatatctataaaatataaaaattatttgaaaaataaaatgggcatggcgcaccgcactctcgttcatgttcgagagcggttggtgcatagaaaatttctcaaaaaaaaaaataagcatttttctcgcatatctattaaatataaaaatta

SEQ ID NO: 34146 - DNA, 1169 bp, Heterodera glycines
  unsure (1)..(1169): unsure at all n locations
acaatcaatttcttgttctaaaatcnntcattttccttcctcaataacaaaaacattttcatttcccaataactcatcattttcaactccattactaaaatcgctctgaaaaacacggtccaaattcatcgctcaaacaataaaggcgtcttttaatctgtataataaagttaattaataatatcaatttataaaagcaaaggtaaaatattgcattaaacaaatagtgacaaaaaagttaaagtttatcaatttaaaattaactgatgaataatggaaatgatgtgacaaataaataatcaaaccgacctgttcagcgtaatttgaaacctcattattaaatgcctcaattatgaaatacaatttgaagaaaataatttcattacaaatacatattctcttacaatgtcacaaatctattacaatacaaaacaaaaaaaaaatgcttttcacatccttttgtcagtcaatacaaacaactaagttgccttcaattttttataatgaataaaaatcgcaataacaaaatcagatataacaaaaactcaacaaaccaaaaaattatcttttttctttctttttcagtttgtcaaaaactcaattttaaagcaatatacatacatattttctaaacaaaaaaaaaaatgaacgtgagcgagtaaacgaaaaatttactctttttttactgttttaaaagaaatacaattattggatattgactctttataataaaaatctatataaactgacctcacaacgtaaatagaaaatccgctgattaaaagtaactccttttgtaataaattgcgataaatccatccaatagaaaaatatccattgaaaatagcatgattgaacacccattaaattacaaaacaaaactttttccatttcaatgctctaaccaaattcaagtatcaaaaacttttacaattcaatatctaaggtcatttccattgctttgcataatcaaaaacaaattagcacttacataaacttattcataactaatcaattacatattcaataattacaatagaaataattcatttatattcattagattaacaaaaatacataaattanaaagagaaaaaggaagacattatttatatgtaatatattgctttttgcaaaaactgacaaaacaaaaatgaaaaaaagcaaaa

SEQ ID NO: 34147 - DNA, 915 bp, Heterodera glycines
atgtctgggactcaatctccggcattccatccccccggactcaacccaccaactttcaatggcattccaatctctggggctcaacccaccagcatttcaatctctgagactcaacccaccagcatttcaatctctgggactcaacacaccagcatttcaatctctgggactcaaatctccggcattccagacactgggactcaacccaccagcattttaatttcattccaatctctgggactcaacccaccagcatttcaaactttgagactcaattctcaggctttccaatcgctggaactcaacccaccaacatttcaatctctgggactcaaatctccggcattccaaacactgggactcaacccaccaactttcaatggccttccaatctctgggactcaacccaccaactttcaatggccttccaatctctgggactcaacccaccagcatttcaatctctgggactcaacccaccagcatttcaatctcggtgactcaaatctccggcattccagacactgggactcaacccaccagcatttcaatctctgggactcaattctcaggctttccaatcactggaactcaaatctctggcattccaaacaatgggactcaaatctccggcattccaatctctgggactaaaatctccggcattccaaacaatgggactaaacccaccaactttcaatgacattccaatctctgggactcaacccaccagcatttcaatctctgagactcaattctcaggctttccaatcgctgggactcaacccaccagcatttcaatctctgggactcaaatctcctgcattccagacactgggactcaacccaccaactttcaatggcattccaatctctgggactcaacccaccagcatttcaatctctgagactcaa

SEQ ID NO: 34148 - DNA, 707 bp, Heterodera glycines
taattaatttttttttaaattggtccaaaattgccgcggagtcccaaattccgcgcatcgcgcaaaaaaaaaaacagcggccgcgcatttaatttgccgcggccgcgaccgcggatcgcgcaaaaagaaaatgccgcgaatcgcacatcgcggcgcggtcccagccctgccatggacggttaaaaaaaagtgcaaaatcattggcgtaaaaaacaaaatgccaacatattcaaatgaaaaacaatgtgtccttactgtgaagaagaaaatttggaaaatcccggtcccggccccggtcccggcttttttggacaaaccaccgggacagggagtcccggaaaaacgggagtcccggtcccgggatcccgtcccggtccattttccaagtcccggtcccgatcccggtcccggccatttgggccgggactaacgggactaaatttcatcagtgaaaataactcagatttgaaaatatttaataattattttggcgaaatgtctttaattcgaaattttcaagatagaactttggatttcttgaaaatttgggcaattcaaactgttaaaaagtccatacgaaattgagtaacattttcacaacttttttttaccaaaaaacatttctaaatttgatgaaaaactcaacaaatttccttaataaatttattaaaattcaaatttttcctcagcgtcgccgtgttaaaaaa

SEQ ID NO: 34149 - DNA, 1156 bp, Heterodera glycines
gagagagagagagagagaggataaagtatagatcggagagggaaggaatgataaagaagcgattagagaggaaggaaggtaaagataatgcagggtagaagagggggaggggggggaaatatatgtaaatcaaaaataattacagaaaaaaatgccacgaaagaggagctgaatgaggatggcataatggcacagatgaaagaaatgtttaagcagatgaatctcggaaatttgaacgatttaatgggaggaatgggtgaagaagaagaggaagaaatgagagaaggtgaagaacaattggaagaagaggaggaggaagagaaagaagaggaaaaggcagctgagaaagaaggagagggcgaagaagaaaaggaagagggagaggaggaggagaaagagcaggagaaggaagagggagagggacagtgcagcaaaagtaatgaagaaggaggacaatgtatggcaaaagaaggcgaagagaacgcagaaaagtcagagacgaagatgaaagaggacagagatgaattgtgaggaaagaaaagagcgagagagggaagagagagataggggaaagacagagagagagagaggcaaataggagagagacagacggagggaaaaagggtggaagagaaaaggaattatagagagagagagagagagaaaaagggagagagggagggagaaagaaagttaaatatgggaaaaagagaaacaaatggagcgaaagaaggaagaggagaggaagagaagaaagaatgcgcatgtgatattatgatgcaacaatgagtgccttttggcccacttttggcttttgcccccccccttttccccgtgccgtttattttccctttgccttttcctccgattgtccaattagtgagttgtttaaatttgttgaccatttcgttttaatttatgcttcgcccccactttttgttctaatttcggtccgaattggctcattttccttcgcttgggtcgctttttggtgcgaatggccaaataattcattttctgccgcaccgctcgacgcagtgaagcccaaaaaagggaccatgaatgataaatacataagccccgcttaaaaccctgaggaaaaaaaaaatttcgaattgacaccccaaaaattgctaaatttttccaaaaatatttt

SEQ ID NO: 34150 - DNA, 536 bp, Heterodera glycines
tagcctgtactttaattctgcgttggatttttgctccctccctggtttgagtaccccaaacggacacttgaaaaaatcgatttttttgttttcggggcagtccccccgaaccgatgcgcccagatttatggggagaccgaatccttcgggagtagcttccctatagcctgtactttaattctgcgttggatttttgctccccataattgtttgagtaccccaaacggacacttgaaaaaatcgatttttttgttttcggggcagtccccccgaaccgatgcgcccagatttatggggaggccgaatccttcgggaatagcttccctatagcctgtactttaattctgctttggatttttgctccccataattgtttgagtaccccaaacggacacttgaaaaaatcgatttttttgttttcggggcagtccccccgaaccgatgcgcccagatttatggggagaccggatcctcccggaatagcttcccctatagcctgtactttaattctgcggtgggatttttgctccccataa

SEQ ID NO: 34151 - DNA, 588 bp, Heterodera glycines
aatccaacattgcccccgagggcatgaataaggggcgtggtggggggcttaattaattaaactaaatcatgataaaatgaaaattcagtcgcaattgaaatccaacattgcccccgagggcatgaataaggggtggggtggggggcttaattaattaaactaaatcatgataaaatgaaaattcagtcgcaattgaaatccaacattgcccccgagggcatgaataaggggtggggtggggggcttaattaattaaactaaatcatgataaaatgaaaattcaatcgcaattgaaatccaacattgcccccgagggcatgaatattagagcacggacagcaggaccggaccttgtcagcatttttcaagactcccgctgatcctgatccgggtatatttttgaaaaattgacctggatcaggagtcctgaaaaagaggatttttaatctcgaaatccaccaatccgagtcaaatcttctctaatcctgaaagtccggattctattgaaaatattgagtaaatttttgtttttaaaatgttggacttaatatttgaaaaactaatttttgtgcttttggaaattaagat

SEQ ID NO: 34152 - DNA, 888 bp, Heterodera glycines
atattgttagattatatgtagagaaaagcatttctttaaaaagtaaaagacgacaaacagatggacgaaaaaattcataattctttaaaatggcaaaatccaaaaaaaaattaaatgaaatttaatcaaatcgacgcaagaaattcttttcgcggacacttaaaattaaaattattagcgatatgtaaaaaatatattatatatccggcagtgaattttaacgaatattggctggcgactgactcattagccaaaatttaacaaaaatattttcaaattaacaattttttatttgtttttttgtgtcctcccattgatttatgtaataaatttggccacacaaaatccccaggggtttctttctttttctttcttttctgtgatggcttttcacttattcaaaaaagaaaaaaacacatccaatttttcgccgatttctgagtttggcagcagcgaattccgcccaaatgccttccgccggaaagatttggcattttgcaaattccccgggggattggacacacgcaaattgggggggggggaggcggacaacggcactgaacaacaaaaagcggccaaaatttaaaccccaaaaatggcaatggcgagcatcagattgtgctgcattcgcacttcgtttttgacgagaaaggtaaaaaagggtcgtccattttaattagggatatgctcgagagttttgattccatggatattatggccaaaactcaaaaactcggtccatgttctggcatggaccctacggcaaatgccattttatagggaaaaccatttggcatgagtcgagaaacttctccgctttttttcatttatcagtctcgaactccctcttgctatcacaaattttaatcgcttaaaaactctgccgga

SEQ ID NO: 34153 - DNA, 538 bp, Heterodera glycines
aatgggggtggatgatcagtataattatagccaatgggggtggatgatcagtagaattatggccaattggggtggatgatcagtataattataaccaatgggggtggattatcagtagaattatggccaattggggtgtgatgatcagtataattataaccaatgggggtggatgatcagtagaattatggccaattggggtggatgatcagtataattataaccaatgggggtggatgatcagtagaattataaccaatgggggtggatgatcagtataattataaccaatgggggtggatgatcagtagaattatggccaatgggggtggatgatcagtagaattatgatcaattggggtggatgatcagtataattataaccaatgttggtggatgatcagtataattattgccaatgtcggtggatgatcagtataattataaccaatgggggtggatgatcagtagaattatggaccatgatggtggatgatcagtataattataaccaatgagggtggatgatcaggataat

SEQ ID NO: 34154 - DNA, 1053 bp, Heterodera glycines
  unsure (1)..(1053): unsure at all n locations
ttttaaacatgttttcactgaaaattactcgatttatttatcaaattttgaaaaattttaggggcaactcatccctcattcttagctttataatattcgcgtttcgcgacaaaatgcgaaactcgaaagtaccaaaaaaagcgaaatatgcgaaagcgaaacgcgaaagcccatatccctggtgtctatcgttgttattagttttttttttttttgcatttcttttaattgcttttttgtagttgcacaatattttgagtaaaattcgttaaaaaatcgtaaaaaaaatttttttgagtgagcggctcaaatatccatttttgcttggcggcgcaagtgtcgagacgcaaatgtccgctgcgcaaatttcgcggcgcaacaatattgcgtggtgctatgtcgttacttaaaaaaccatcattatgatttgatgaaaaattatttgtaacttaactgaaaagcaaccaaatttttatttcttgatatgattcgataggcctatgagttaaggaacaaaattacaaaaatttaactttcttgttgaaggaaaggagaaatattgaaaacgatgaatattttttgctattatagtattatggagtgtgctattaatacttagaatgttatataaattttgcaccaaaattttattttccgataaaatttaaaacgcaatggatttaacagatttaaaaagtccgaatatcgacttgacagggcacctcgcgaattgttagaaaaaaatggggaatgaatntgggtattgttggatagaacaggatcgacttcaattctgattttttattattacgggggtgagacgaaaaattaaaaagttatggagccaccaaatttaatggataatataataaaaattaaccattttatttaaaaatacaaaattttatataattgaagggggactttctggttttcggaataacccactaatggtaaaaatccgaccgcaaaaaaaaaactggaaaattttcccaaaaatttctccccaaaaaaataaattatttttttttacttaggaagcccgggaattcc

SEQ ID NO: 34155 - DNA, 713 bp, Heterodera glycines
cccttccaccactttcagggcgctcccggccttcggccgggagattttgttttttgaaacgaaactccttgtcaatataacatatatagtaaactagcgggtgcgtgaaccgtcggctatttagctgggaaaaagcgcttcgcactttgggagcttcgctacctagactgttacgggggaagaggtacaaccacgggtgggaaggtacaattgtgatcagaagaggtacaactacggtttttttagctctggttgtggagatttggaatttttaaaaaattattagctctggttgtggagatttttaatttttaaaaaattatctgggacttttaggccgcttcgcggcctcgaacgggtgaccgtctgtgccacaagggacagtacgttgaggtagctcggccaccgtatcatgggccaacctggctggttggatttttacatctgacaggtcttgtgagggcccggagccttctttcgaagggcatccaggaccaacatgggaccgccgcatagatgcccacttattggacagcgatggagacgatcgagacatgtacatggtcgggttgagctggcacaatctttgccattctgggagtacacctttggcccaattaatgagtccccggtcgtctgtgtttcgcaccactacatcctttatagcggactcctccacggctgaccactgctgaaccctctgcgtccggact

SEQ ID NO: 34156 - DNA, 1564 bp, Heterodera glycines
  unsure (1)..(1564): unsure at all n locations
ataaactaaaancattagaggttttcaaaacaattcacctcaagaaaatattttaaaacctaaaaaatagtttcacaaatttacagacctttaagactagaaattaaataatatccactcagacaatttatttgttacttacatttaatttagaattgaaaaattacataataataaattaataaaaaatattgaaatttgttaaagaaagttagatcaaataaattttattttggttttgaaaataaaaaaataaaataaataccaaaaagtattttacagatttgaatcattgactagaagcttacaaattaaaatgcaacaacagagcgctttaaaaataatgaatacaaagtaaaaaaatatgaccgacataattagttgaaaatattaaattaaaaaataaaataaaacagaatgtaaaataaatttcgtttttccgttgtcaatcaattgtgtgagagttgcatttgtagttttaaataaaattaataaagaaagaatgaaaaaatcttaaaaacataaaatgatttcgttactttaataaaaaccaaagatgacaattcaaacaaattgaaaataaatttgtagtgcgggctctctcaaagtgcctgggaggcagagagtttctcattgcactgatgaaaaagtgcaatagaagggtgtaaagggtgccctgtgtagctcagtggttagagcattccacggaaaggaagggacgtgngttcgaatcccaccgcaggctgaccttttacacctccgccatccaccgaattcctacatggcgctcctgggtggattgatgcatcggagtaatcgatctctgggtgagacgattctcctctctgtcttgtatgcctgggcggcaacaagttcagagaccatgagtgggatgtgtctgctgcattctgtggcttgacgtctgggactcaagttcacctctccactcttaaaaccaataagagaccggagaccggtcttcacaaaggctggggatgtagtgcgggctctctcaaagtgcctgggaggcagagagtttctcattgcactgattaattcaaatttccattaaaattttcaactcaatctccaactgttttgacaatgtctgctgtacaattcaaacagtcatttgacaaagtctgtgccaccacagccaacgcatttcgctttagcctccaatggtgttttgtgccgctggtcgttattcttggtaagactggcatatattggattttttcaaaaggtattccgcgaaatcctcaaattcagcaatggcaaccttgaatttcggatctcatctcacaatcagttgataaatatgaatagagcaaggaatttgaaagtttaaaatgccattccccggtattcccccaaccaaaaaagagaacccaggaaaaatggtaatatgtagtaggttttgtccccccccccctttttttcaaaaaaaataatttttttgaaattcatcaaaacgtctttcctggggttttcggggtcgctgatcacgaatatgacattccttacgaccaatttcgaaccccggacccgaattcgaacaaaa

SEQ ID NO: 34157 - DNA, 1127 bp, Heterodera glycines
atctcattcatatttaaaatactatacgtattatatatgtatattatttaaaatgtattatactcatattgagttgccgctcaagttcagcaagtcggttttttgagctcttcatacgcattttggtgttggttttgttcagtttgtttttgatttaccacttattcattcagactttgcaggaagatatgattattaatttttatatttttacttttagtaaaaaattttttctgaaggtcttcattattattttatcaaaatttatattttcaaagttaatttttcaaatttaatccaaattattttcataaatagttaagtagaattgcatgaatttataactttaaaaaaatataaaattaatattttaacttctcatgaagactatatttttttattataattttttattaatgatattttaattctttgttttatttctcagaaaagaagtatatatttttggcattcattactttgcagcatttggttttgaataattactttttatacagtaaaaatgtcttttttcagttttttaattaatcaaattttgctattaaatagatttgtatctttcaataagaccaggttgagtgaaaattggtacattttaacaaacatgctaggaaaaccctttgaagcagatacggctctcaaaagatgaggagaatgaattttgaaaagatgtatacgaaaagggaaattaaagaaatactttgaaatttatattatatttatacaatctttaattaataaagtttattaaagaaataattcgttagaattatttttttaaatttttaattcgtggtaaccccttaaataatgtatagctaaattatattttaacaaatatcaacaagattgtgctttaccaaattatattgatgaaacgaaacatcaacctattaaaaagataatttattattttcatttaaacttcttaactcccgtatagattaatttggatttttattgtgttaagtttgtttcgttataaaaacttattatatttttgccctttttttgttttcaaaataaattttaataagtaattaataattttataaattcttttattaactttttaaaataaacctatccttcccattgtttttaac

SEQ ID NO: 34158 - DNA, 1009 bp, Heterodera glycines
gctcagcgtggagagcaatttggcggacagtttctccaagttgcaataccttctcggcaacaatcccttccctccggaaaccttcgccaaccttttgctgctttattgcaagtccgtccggtttaatccatgcttttttttccattttaactttggcagattcgaatatttcgatttggccgccgatgttttggccgaaaacggtgccatttaaattggcatcattcattttaattcacctcaattccgctctctttcagctcatctcacttacaaattgctcaaccaagtgcgtccgtttcttttctttgtcctccaaattattcgttttgtcagtttcaattcgattatttggacgctctgatcactcagcaatcgtccgaaagcgaagcgtacgccaaattcgacgctttggcaatggaccgactgaacgaactccgaaagaagcaccaaaagctccaagtgccgttgtttgatgccgaaatgttcgttcgttaatttcattcatttcttggaaggaattgcgtgaggaggacaacggccgtgccctccaatgcgccgtcgattcggtggaggagacaatcgacgagtttttgcccgctttgatggcccaagccaaattgctatgggacaaagctcaatgggcccaaattgagcagctcttccgacactcggccgaattttgtcacgccaacgaaacgtggaaactgaacttggcgcacacgctgttcatgcaggagaagtacaaagaggcgaggtgagaggagagacggaagggcaacgaatggccaaatatttgagagagtgccttttcagcgattgttacgctccgttggtccacgcgagttttgaccgggtgactcttttttgtcgaatgtttggcattcttccacttttcggcacagcttttggacgtttcggcggtcgttttggccaattttgtgcgcctgttacatctttcacaagtcggcttctccctttttctttgcctttttcactttttctattt

SEQ ID NO: 34159 - DNA, 846 bp, Heterodera glycines
tcgtgtttcgagaattaccgcatcccccgactcattctagcggctcaaaaaacatattttcagcctttacccgccccctcctgaaagttttgaggttctatttttgtctttttgatagttttgctttttttatttttagccgtcgtacgtgcgcaaagagcggcacagcaaatacatgcaaagggacacgttgaaaccgggcgacggtcagcaaagtcaacctcaacagcagcagcaaaagcggcttttctgggacttggacgacaatttgcggtgttttttaactctaaatttattaattacctaccccccccccccccccccccctcgtaaggttgcgcattctttccgcctcccatatcaccgtcctcgacagtgccgaccgactgttcattcgcgttgcggtcgccgtgggtcgtcacattctggatgtgcgcgactcgaccatagtgtccccgtcgaatccgcgatggcacgaagtgtgtgccaaatttgccggcttattaaaaagccaaccttaagagcaccatcgaattcgacgtgtacctgaaggatctgcccgagtcggctcagctttgcttctcgctgatctctgtccattgttccgcttctccgtcgaatgccaacgcatcgcaaaacaattcaaagggaaaaggcggcaaaaattctgtttgttcattcaaagcgaacgtggaaaaccatgtgatttgcagaaagggagcggcgcttcaactgcaccttcgtcgacggaccatttgcacccaatcggatggaccaatttacgactgttcgactggcgcaaacattttgtacagcccaaacgcactttgtacctgcgaccatttg

SEQ ID NO: 34160 - DNA, 1161 bp, Heterodera glycines
ggctccctatcatttcgtcactgatcgtttcgtcactgttcagttcgtcactgatcatttcgtcactgagaaaatttttaaaattgtttggtagattgtcttttaaagtcatctcttctccaaaattgtttttatccaaatctgtcgtaaggccagccaaaattttttttacaataatgttttttttttttttttttgcaaaattttgtgataaaaattgcttgaaaatggagaacatttgttcaaaaggcagtgctgcgaagagacgatgtgcggggtagtgctaagactctctagtctcgctcgagaaaattctcgggtctttttggtctcgagcagcaaccaaatccaacgatcttgatatcattcgagaggccttcatatgctctattagcctgcaaaattctggtcataacttttttgaaccttaacaaaattttttgaaattttgaagctaatagaaaacacatagggctatcgaatgatataaacaattttggatttggttgataaataagaaagttatagccaaacacttgtactcgtacgaaaacgacccggacccgaccccttgtaccattatgctcttaatgtattatggcaaaaaaataaataaattttagaaataagcacctttttggaagtggaattaaatgagaagctaaattggtctcttttatttcagagaaaccctttcaaatctcataatcaacaaatttatttgtttctttttgctagcacgtttgtttttaaagaatttttgttgttttttaaggcaatgtgccaaactttttaaaaaaatttttctcagtgacgaaatgatcagtgacgaactgaacaataacggaacgatcagtgacgaaatgattggccaccgaaaaatcataaaacccatttttgaatcggttcataactcgaaaaatggacaaaatggggcaattatttagaccttcgttgctctaaaaatgaaaaagcaccgattaaagcctgtaaacggcatccggtcttcttaatttcataattaaacttcaataatccttggtaatagttaagatggtagccccccattttttggtggaaattttcaaaatttaaaattcgttcaaaacgagtttctaggcgttttcgaggtcgctgcaaacgattctggaatgcattccg

SEQ ID NO: 34161 - DNA, 913 bp, Heterodera glycines
  unsure (1)..(913): unsure at all n locations
tgagtaaccaagaagccgctgagctggtggccaaggaatttgtggaagaaggctcgagctggttcgtcgattttggtgacaaaccgttgcgtgaaaagatgttcccggccaattggaatatcaaaattatcttcaatttggagctgcggagggaagaaaagaagaattggaagtgttcaaagaagacataaaagatatggcaagggcaggactggaagtccattgggcaactcggaaaaatgcacgtttgccgcgagagtttgaggaattcgccgagatgcaggctgtggaatttaccaataagaaaaaattggagaactcgcagcggcgatcagaggaacaccgtccaatacgggaacaaatcccgagataggagagtcagcccagaagagtacaaccggatggaggcgagcataaccaaaagtctgacaggattgacaatgctggtcatgttattgatcacactgttgcaaccaatgatgatcaacggacaagtcattcggccggaacgaaacgacagatggattcctgtaaatcccttcggaagacccctacgaatggaggaactcgttggtttacggagccgacggtacctcggatgagcctcgacaagagggggcaaatcacgcccactttgccgacaacagcggcggatatgtccatttcgcatatccgggaatggtaaaaaaggcgcggatgcaaacaagtggtatgactcaaacttcggcagcaacgacgacagtgctacgagtaccagtgccagtacagtaatgactaccctaggaactccccgaacgacagtaaccacgagaacgacgacngaagcaaaaggagtcacccacgcaccacagtggaagactacaaatcgagaaatcaggacggactcangatggagacagtggactaaaactcc

SEQ ID NO: 34162 - DNA, 805 bp, Heterodera glycines
ccgatgcttaagcctttttatgtactttaatcatttcgaaaagcaattaaattgcgtaatttaaattcaattatcagctgttttgtatgtcaacgaaaatgattaaattggcgaaacgacaataaaaattgatgaaaaagtgctttacggggggaaaagcggtcaattgcaccgacgaattgagtaatttttatggggtttcatcacaattggataatgaccacctcattagaaaatcaaaggcagcagaatgagtcgatgaattcgggaatgagtcgagaatatttggtcaacgaatgccgagaaatgagttcaaattggggcgaaagctttttaaatcaatcttttgattgaaaagatcgatgctggcgagatttattcctccgttgaggaattaattaattaactaattattaatgacaaaagaaagaaaaaagtaaaacaattaatttattgctaaaaaagtaaatcacaagcacatttatccatgaaattgttgaaaacaatgacaggtaagttgacaaatattccttaacaattccatttttaattgcgcattttcgggaatttccccgtcgatggttcggggattcccgagcgattgccccccgaattgctcaaattgcgtaaatccggttgtttgcaaatcaaaagtgagttgcgttgcgatgggcgatttggaggacgacgaaaagctgagaagagaccgacagaaacggagacaaagcgaaaggaaatgaaaaagtaaaatgaaattaaatggacagtaaaattcgaaaattgaaacgaatttaaaaaattttct

SEQ ID NO: 34163 - DNA, 1409 bp, Heterodera glycines
caaacgcaaatggaattggtggtcatttgagtgcggaacgtttagacgaaatgaatgtgagaagaaaaaagtcgaaattgtccagggatggcggcaattgaaattcggctgtgcctgggacattgaagcacagaaatgcatgccgaatgaagaaacagtgaaagcattggcacggggagagaaggcaaagcagaggaagtgacggaaagtattttaaaaatgaaagcaaatgatttgatcgcttctgggattgatcgaagtgatgttgaccgaaacagtttgctacaaatgccaaatttaaatttttgaaaataaaaacaaaatattttcgatttctttgttggacttgttgaaatggtatgcttaagtcgatggatgccaatttcagtctgacggttcggtgtgagggtccttcaagcaaaagtgagaaatcctctcaatcaaaaagataaaatttatatgccttaagacatgcctattcattttggaatttcaagccttagaatattttttttaatttactgcatttcacagtagcattttattttgtccctgtcctctgaaaaagtcagggtaattaacttatgggctgaagtcaaatccgcgtgataatttttccatttaatccccttttctaatcattaatttgtacaaaaaaaaaagaattttaaaatgatttaattgggtttgcaattttttcaagctaattgctcattaatttgcacatttttaaatgaattcatcatctcaagcaaaagatggaactcattttcaaaattataaatggcatttcaaacgaagttttaacccattaaaccaatgaaagcgcacattagcaaagtgccgccatttctttcgcctttattaggccaaattcactgggctttgaaaaaaaagcattttttaattctgttaataaacttatgacgagaaaaaaaatcaaataaaaacgcatttattggaagcattttcaaaagttcgaatgcatttcgttggaatttgatagaaattattgtaataaatgaattggcctttggtgggaaataataaataacttaattattgacaaagtaattaagacttatttttcgtgcttttctctatcaaaaaaaaagctacagaaaaaattaaaatttaaataaaaatattaaaattgtcccacgcttaatttcgttggtatggtaaagaaattttgtccgctgtcattaattcactttattattaaagtgaaaataacacctgctgttccctcaaatgggaatgaattttttctcttttcgattttttataaaaatttttaaaatttcccgacttgggctttctttaacaaagccaaattcgatcgagatcataatatttatcgactaaagactgaggggattctcgagcacattaataagttattgtta

SEQ ID NO: 34164 - DNA, 929 bp, Heterodera glycines
atgggactgaggagtggggaactgacggacagagtgggtcggcaaagccgagacattcattccatttgagtgttatttcaggcatattgccaaggtcgaattgtcacttgggaggatttggtgccctcatcaccggggctgggtaagacattggagtgatcagatgctaattcgacggcgacattaaatttgagaatacaaagaaaatatttaatgagtccagccaaacaagcatggttaaatgagtggattaatttcgaacttgattaaaatttactatcttttaaattagactgtagcatttttacacatttaattttatctatttttaaatccttaatctggtgcccgcacaaacttccccctgcgttctgaaccaaggccgcggccagctcggggcgcggtctgagggagaccaatagccctcccgacccaaaccgggggggggggggtggtggtggttttaatgattaattattagagcccggaattttgaaagtaccgggacttttcgcaccataaaataattttttgaaaatttgaattttcgaatttttgttagaatacggatccggggatcgaatttagtcgaaattttttaattgatacatattttatcattttaaattaaaaatccgtacaaattgagcctataaatctcaaacttttggaaaagcacggcgaaaaagtgatgaaaagtagagatcggaattctcaaaagtgtcgggccgggccgggctgattttttcagaagcaaccgggttccgggcccggcctctcaaaacccggtcaacccgggatttcaaattgctgggttcgggttggtaaaaatttaattttacatatttttcaaaccaaaatttgacaaaaagtgggtcacgagttaaatttctgctctatttcacttcaggcgtcaataataattgacg

SEQ ID NO: 34165 - DNA, 670 bp, Heterodera glycines
gaggaaaagcctaaagggaggggggaaaggaagaggaaaagccaaaagggaggggggaaaggaagaggaaaagccaaaagggagggggggaaaggaagaggaaaagccaaaagggaggggggaaaggaagaggaaaagccaaaagggagggggggaaaggaagaggaaaagccaaaagggaggggggaaaggaagaggaaaagccaaaagggaggggggaaaggaagaggaaaagccaaaagggaggggggaaaggaagaggaaaagccaaaagggaggggggaaaggaagaggaaaagccaaaagggaggggggaaaggaagaggaaaagccaaaagggagggggggaagggaaaaggaaaagccaaaagggaggggggaaaggaaaaggaaaagccaaaagggaggggggaaaggaaaaggaaaaaccaaaaggggggggggaaaggaaaaagaaaaacccaaaggggggggggaaagggaaaaggaaaacccaaaggggagggggaaagggaaaaggaaaacccaaaagggagggggaaagggaaaaggaaaacccaaaagggaggggggaaaggaaaaggaaaacccaaaagggagggggaaagggaaaaggaaaaaccaaaagggaggggggaaaggaaaaggaaaacccaaaagggagggggga

SEQ ID NO: 34166 - DNA, 1295 bp, Heterodera glycines
aattttgttttcccttttttcagcttcatctccgccgattgttggctttgtgtgttcgatttgattacgccttcacaacttggccttggaattgcgatgatcagccaccgtttcgacttttatgtggacgaacacttcaaaactcgcaaatggacattggcatttattggaattcaaagcaaaaatggagagaatggcaccaaggaaatggaaattgtcaatttcggtcacaaagcattgccaattccgcaaattcaaatgccacgcaaagtcatcggattccaatggatcaacatctcgtaaattggccaatgtcaaaattttttgccaacatttccctttcagtttcatcgaccaaaatgccattgcttttctccgccattttcgtccacttttcaccgcctgtccaatcaatttgaccatcattacgcacaatgctcgcactttggagttcattttgcccaacatttggccattgttcgggaaaaacattcatggcatggatttgtccgccacatttttccgccatttgcgtaaatttgccccgtcgattctcaacgactgtccatcgcttcgctttgtcaatgcctattactatggtttcttcaccggattccctgccgatgacagtgccgcggcatcggatggacaagcgttggccaaatggcttttcactccacttcaaagcaatgtgccaaagatgctcgaatgcgggttggacatgggtgatgggaattggtcgtcgaatattgaacaattcaaagcggtgcattcatttatctttcatttttctttatcaattttcccatattttaggcatttgccaatgcttcttcccccgtcaattttattgtcgtcatgtgttttattcctacgtcttttgctgactccgttgtgccctttgatctgaccaacgaattgacacgcgaacaattggcattgaaaggaactaattttaacaactgttttctgctgatccgttctccaattgcgcgagatgcgaacaaatgggcagaatgggaaaaggaagcgattggatggaaatttattgatcaatgcaacaaaattgaaattcaaatttatgatgaggaacaaatcggagatgggtaagcgaatgcttttttcaaaaattcatatttattgcgtttctatttttaggcttctcgacgcaaatcccggcccaagtgatcagcagcagaagtgaatgaatgattgtgctaagaagtgatcgatcaatttggattatggagatatgaaaaatgaattttgatgctatttgacatgctcatataaat

SEQ ID NO: 34167 - DNA, 767 bp, Heterodera glycines
agtccccccgagccgatgcgcccagatttatgggggagaccttatccttccggaatagcttccctatagcctgtactttaattctgcgttggatttttgctccccataattgtttgagtaccccaaacggacacttgaaaaaatcgatttttttgttttcggggcagtccccccgaaccgatgcgcccagatttatggggagaccgaatccttccggaatagcttccctatagcctgtactttaattctgcgttggatttttgctccccataattgtttgagtaccccaaacggacacttgaaaaaatcgatttttttgttttcggggcagtccccccgaaccgatgcgcccagatttatggggagaccgaatccttcgggaatagcttccctatagcctgtactttaattctgcgttggatttttgctccccataaatgtttgagtaccccaaacggacacttgaaaaaatcgatttttttgtttcataaatatttttttcagaaagtcatgcgcacccgtccgatctggcaagttaagcaacgattgctgactagccaaaaggttcggtgccgtgatgaaacgaaccagcactgcttaccccgcggcacccggcacggtcccccgaaggaatggatttaattaaattctctccttcggggatttttttccattaggtcgtccgttagcgttcgattgctctagtcaatttttcaaaatttttgttgaaatatttgtcgtgctctgaagggcgtggaggggggggg

SEQ ID NO: 34168 - DNA, 748 bp, Heterodera glycines
tttcggcatttgtcgaagagtgaacggttctgcgcgtataaggcaccgttttactcagctcagcgaactgagtctaatggtaccgcatacgcatggttttgtcgacttttcgacaaataccgaaagtgtcaatttatttttttttaaatgcagtggtcatcaaattgacacttttggcatttgccgaaaatttaacaaaaccgtgcgtatgcggtaccattagactcaggtcggcgagctgagtaaaacggtaccgaatacgcgcagaaccggtcactcttcggacaatgctcaaagtcggactcaattgacattactttcgccacgtttcgaactttttgttggacaaatatttcgatgacaaaagtatgatgacggtggaccacaaatcgcaaaggtaattttgaatgcggtaagtttttaaagttttctcggctccaaaaatggcccgaaaattaaaaaaaatcaaaatttataatttttttgttgatttttttgtttgtgtcagatttttttttattaaatttactgcaaacattgcaacatcaaacaatggtcatgctgtaatgatacgaacataaaaaccagttttgaaaattttgaattttcgattttttgttagaatccaagtcgggggttcggaattggacaaaacatgtatcattgtcgggatcagcgaccccgaaaaccccgtaagaaatttttttactgggccttacatttatatttttccattatagtcataaat

SEQ ID NO: 34169 - DNA, 974 bp, Heterodera glycines
  unsure (1)..(974): unsure at all n locations
aaatcatatattaatgggattttacaaaaaaaaaatatttatttatgtagatttttagtgaaaatgccaaaatatggaagtaaaatacggaaatgtggacaaaaacctgaaatatggaaaattaaaaactatcaatattcgaatgataccaattttgaagataactgacgaacaaaaaagttatggccattcccatttgaaattgtacgaaacgccattgtacgaactgctgtcgacccatttttggtgtcatgtgaaggaatggatggatgataaaatgatgaaaatgacggaaaaaagggacgaagcggaggggaaggggggacaaaggaaggaaaaggggcgacgaataatcgcctccggcactttcccgtggtgaataataaaaacaattttagcattctgagcagcaattcagagatgtgtcctgacttttaacaatcctttttgtattattttgtttaaatttgcaagaaaattggacagttttccaactcaagctaaatttcttgggcctagtttgatgcctaggctttgttttgtaaaatttataggcgtcattgaaaattcaaatatttaaaaaatttaaagtaatctggctttcacagggacccaaaattatatagtatttaaaaaaaattcatcaggaaagtaattataatgaaaatgcattagtaatttatccgtttaaaatttgtgcggtatatttttctttgttttccaagaattcgtttgtccatttttagggtcttcgtgaccagccaatggagtcgagttagttgctaattagttaataataaagtagaaatatctttacaatttttctattacgacccattggaattgtaattaagaaaaaattttatttaatcattatttaccaattcttttttgaattttattcaaattttttgttaaattttggttggattattcgttcgacaatttcatttgtttccattcatttngctgtt

SEQ ID NO: 34170 - DNA, 991 bp, Heterodera glycines
  unsure (1)..(991): unsure at all n locations
agtacaaagattnttgtaatttgaaattaccattttttcccttagcaataaaccctgtgaagagcttttgatgaaaaacaaaatttctgatgaaattgattaaataagaacagcaaaaaaaatggtgcgttaatttgcggcactaattaattaattaattgagcattcgacagtcggacgggcgacccatttttgccattttgttttttgttttgtttcaacgccttgaccccaattgtgccgttccttttttttcgggagcggggaaggcgagagtgggatcaaggtcagtctcgctgctgactgtccatccgatcagttggctgatcattgtcgtgtcgcggcggcacggcaccccttccgcccattctgtcaccgattttgcgccggccgtggcgtcgttctttttcatttataaatccttcccccgcgatcacttcccaagtgactcgaccaatttcaaattagcccccccccctttttttgctgatcacttgtcaaactgatcggacaaaatgcaaataagcccctttttctgatcacagcccaaattgatcggtgatggcttcctaaattgatcattgatcacttcctcaaatgatcgttgatcaattcctaaatttgtcgatgatcacttcctcaattgattaggcttactgatgaggtttgcccttatggggggggggggggggttctcctacaatatgtacatattccctcctccatgatcacgtcttcctaatgcattctccaccagaccactaaaaattgatccaaaaatagaaatgatcaaaattgggtcccacccattcattcattccttttttctcccgcgccgattacttcacaaaaattgatcggaccaacatcaatgttatttatctccttctgttgatcactttctttttcaaaattattgtactgatgggcggtcttttacttgtgcctattccacgcactcatccgactgatcaccgcgagaaagtcatct

SEQ ID NO: 34171 - DNA, 1008 bp, Heterodera glycines
tttttgagagaaattttgcatcgaacaaatgctctgcagcatgagtagaggggcggagagcaatggccattttattgttccgagaatttttaaatttcaagattaggccagaaaagtggctcctcttttttgagagaagttttgcatcgaacaaatgctctgcagcatgagtagaggggcggagagcaatggtcattttattgttccgagaatttttaaatttcacgattaggccagaaaagtggctcctcttttttgagagaaattttgcatcgaacaaatgctctgcagcatgagtagaggggcggagagcaatggccattttattgttccgagaatttttaaatttcaagattaggccagaaaagtggctcctcttttttgagagaaattttgcatcgaacaaatgctctgcagcatgagcagaggggcggagagcaatggccattttattgttccgagaatttttaaatttcaagattaggccagaaaagtggttcctcttttttgagagaaattttgcatcgaacaaatgctctgcagcatgagtagaggggcggagagcaatggccattttattgttccgagaatttttaaatttcaagattaggccagaaaagtggctcctcttttttgagagaaattttgcatcgaacaaatgctctgcagcatgagtagaggggcggagagcaatggccattttattgttccgagaatttttaaatttcaagataggccagaaaagtggctcctcttttttgagagaaattttgcatcgaacaaatgctctgcagcatgagtagaggggcggagagcaatgaccattttattgttccgagaatttttaaatttcaagattaggccagaaaagtggcttctctttttgagagaattttgcatcgaacaaatgctctgcagcatgagtagaggggcggagagcaatggccattttattggtccgagattttttaatttcaagattaggccagaaaagtggctcctcttttt

SEQ ID NO: 34172 - DNA, 818 bp, Heterodera glycines
aaaaaaaggcctaaatatgtgttaaaaaatgcaaaaatatgtgctaaaaattggaaaaaccaatggtatttttgcataaaaattccaaaaactcattctttatcatttttgcacgcacaattgcaaataaaaaacatttggaggtgtttgggggtaaaattagcggtgcatatcgatcgattcagtgccgacgattcagtgacgacgattcagtgtacgttgaaaaaccgacaattcagtgtcagaatacacccctgagaaatgaaaaatttcctcaaaaattttgttattttatacccctaaattgaaactttaacacctattttgaggtttttagaaccgaaaacctaaatattttggcagtttttagttttgaacacccaaaaatattaggcatattaaatatcagggctgccaaaaacatgcaaatgtatttttttcctgccttttccatgctataaataataggaaaaacacgttatttttttgtgtttgcgtagaaaaatcggtatttttatttgcatattttgcatatttcgagatttttgtgcatattttggctacttttcgtgcatatttttggcagcactgttaattatatctcaactttctgttcacattctgaaatttaaaaaaatttgggtccaaaaatatttgagacggaaccgtctcttttactactaagacggaaccggccccagatttatttagcatagagtataacaatacagatcaggcagaatttctaaccactcaatttatattgtatttttagtggctttttgaatgttttttgccaaattttctgacgctgaatt

SEQ ID NO: 34173 - DNA, 1021 bp, Heterodera glycines
  unsure (1)..(1021): unsure at all n locations
agacgaaaagtgaaaaattcaagggccgatcttggcctacttatgctgtacgcagtcaaaggagaaggaaaacaagagctattcggatgtgcatgatgattttttaataatataatcactcccgttagcccttgggaaaggcaattttatgaatatattttttattcacaattggggcgcaaatgtgcggggcgcaaatgtaggggcgcaaatgtaggggcgcaaatgtaggggcgcaaatgtaggggcgcaaatgtaggggcgcaaatgtgcggggcgcaaatgtaggggcgcaaatgtagcacctccaattcaatcgaattttatcaaaaagtaaaaatttggtttgccttttaagcaaacatcatacataactcccaatggaattgaactgccaaatttaaatgcactaaaaaatggcacataaatgaactttgaaaatgtccgaactatgccattgtgagaaaatgccaaaaatggaaaacatttttaaaaaatgcccatgggcttaagcacaaaaacattttgccaacaatcactcattaatttgaagaacttctcatcggcaaattaacaaaacaatggccgaatagaattgggccaattaaaaagtatgtatttgttgagtggtcgtgggaaaaattttgaacataaaaagttcaatttttctttgtacaaaatgccaaaaaatatattatttaaattttcaaattctgtttttattgttttagctaatttaaagagataaaaattaaaaaattaaaaaaattaatanattaaaaaaattttgcaacaaaaagaataaatngaattaagttttgaaactgacaccgcattttcattttttggcattttgtgcagaaaaattatgaggccccctgagaacattgacgtgtgtatgtgtgtaatgagaacgaattgcgctgncacggaaagcgtacaatnaaatacaaaagttgaggaccaccgnaagtcaaaaaaaaaaaattggggcagaaaaaatcttaaatttcccccaaaa

SEQ ID NO: 34174 - DNA, 873 bp, Heterodera glycines
gactaaatttagcatcttctaatcaatttagggaacaaaattagagaattttgaaaatttagattttcgactttttgttcgaattcgggtctgtgattcgaaatttgtcagaatgaatgtcagattcatgttcagcgactccgaaaacccttagaatcatattttcagtgacttttaaaaggtaaatatttttttcaaaaaagggtcctaccatcggcggacggcagtattaccgaaatgagaattgtcaatgccccccccccattggaaatcgttgcaaattccgcaaaaaccgttgccaaagaaagtcgtcggattcgaagccatttcaataaggtgagagaagaattggttgttttcaaatgtaatcgagtccatcatttcattttcacagatacatggattatgataccatcgcttttctccagcgttttcgttcacttttcgccacttgtcaaatcaatttggccatcgaaacgacgagtgttcgcatttcggagttcattttacttcaagcaatgtgccgaagatgttggaatgccctttggacttggatgatggaattttggcgtcgaagattgaagccttcaaagcggtgcttatctaattgagttattaatggggctagcgaataacgcatctttggttttttatccccccccccaccaccagccgaaaagtcatcctttcatatttctttaccattttcccatattttaggcttttgccaatgcttcttcccccgtcaatttattatcgtcattttatttattcggccgtcttttgctgggtccgctgtgccatttgatcggatcaacgattttactcgtgaacaattgacgttgaaaacagcaaataattcctggcgttttt

SEQ ID NO: 34175 - DNA, 1018 bp, Heterodera glycines
agatgagcaaatatacctgcattctggcgccattttgtcattatggtgataaaagatcgtgtagtccggggaaaaatttcaggaattaatttttgatttttttaaacgtaaaagcccctagaataaattaagatgatcaaatatacctgcattctggcgccattttgtcattatggtaataaaagatcgtgtagtccggggaaaaatttcaggaattaatttttgacttttttaaacgtaaaagcccccagaataaattaagatgagcaaatatacctgcattctgtcgccattttgtcaatatggtgataaaagatcgtgtagtccggggagaaatttcaggaattaatttttgacttttttaaacgtaaaagcccccagaataaattaagatgagcaaatatacctgcattctggcgccattttgtcattatggtgataaaagatcgtgtagtccggggaaaaatttcaggaattaatttttgatttttttaaacataaaagcccccagaataaattaagatgagcaaatatacctgcattctggtgccattttgtcattatggtgataaaagatcgtgtagtccggggaaaaatttcaggaattaatttttgatttttttaaacgtaaaagcccccagaataaattaagatgagcaaatatacctgcattctggtgccattttgtcattatggtaataaaagatcgtgtagtccggggaaaaatttcaggaatttatttttgacttttttaaacgtaaaagcccccagaataaaataagatgagcaaatatacctgcattctggcgccattttgtcattatggtgataaaagatcgtgtagtccggggaaaaatttcttgaatttatttttgacttttttaaacgtaaaagcccccagaataaattaagatgagcaaatatacctgcattctggtgccatcatgtcattatggtgataaaagatcgtgtagtccggcgaaaaatttcatgaatttatttttgacttttttaaacg

SEQ ID NO: 34176 - DNA, 1206 bp, Heterodera glycines
attcctctgactcatcatttcgttctccacttttactttttgaataaatatttgtctttactattttgttgtgccaaacgcacgacacaacacatattaattacacataaaacataaaaataaaagctatgcttctcaaattaaaatatagcaaatcattcccgaagaaaattaattaaagccaaaaatcagcaaaaatttctaagataaaactaatgcctttatatttgaaaaatccacatatatacaatatattattatacaaattaagatgagaaaaaaggcgacaattaatccaaaaaattaacaattgatttgaaaataaataataaactcaaaataatcagttgaaagagcagttcaatagaatcaggcttgagaacataatgaaatataatatttttatatttgagaattttacatattacaacaatgacttattatgagaaatattaataatcaggacaacaattcaaaaatcatatgcttactcatttttcttgcgatggagcaatactgcatgagtaaattaattatataaataaaataatacctcaaaaaaccccatctagatatgttattatttaattttaaattttgtaaatgattaaacttttaatcataactaaaattaactaaataaaattaaaattttgaaaaatataaatattcattaaaatattatattgacgaaattgataaccaactaaaaacaaaagaacagaaaaataaaaatgacttcaaccttaattaattctagggttcggaccccgcccccgtcacccccgcccccgccgggggcgggacaggttttttggcctcacccccgtccccgcccccgtgactctgacccccgccatcccccgcccccgcgaccttcacccccgcgggggcgcgggggtgaaaatacacccctaagaatgacatattaatggataaaaggcaaaaaaattatacaattttgatttttttaaccattttgacaaattttttatgaattaaagttaattttattattggtcattgatgtgtagtttggtgtagtggttagtgaatcaaccttgacattactttctgtcgtgagttcgattcaggttgacggtttcttttttaatttatttttttaattttaaaattcgcctggcgctgcctatcggcatcgcagggcccaaaaattcgtaaatcttattaaaaaaattctctaaa

SEQ ID NO: 34177 - DNA, 993 bp, Heterodera glycines
atcagcagccgaatggatcggtccaacgaaatttaatgtcttttttttcgtttttgccatagaaaacttcttaattctcgatattacaatacactgactactactgcttgttgatggtgattttccctcatttgaacacttttccagaggcatataattaattaaatttgtatttttcaaaaaattattttgaatgtcatttttgtgatcactttgatcaatgttgaccttgaaatgctccggaaaaccgcttttttcataaattattctcaaaaatgacggagtaagacaccatcagcatttctaccattctctacaccgtaattacccaataaagtaattaattgtccacgccaatttccttctctctaaattattattattattatttttgttgatcagtttagcattgtcacaccaccacaaattgccgctgtttgttgccatttaaaaaacaaaaaatatgcacttcatttcacttatcaaaatatattatgccttggccatgttaaatgcatatcacactaataataagtttgacctttgccagcaaaaccggtttatcaaaattagttaacttaaattagattttttgtttttcgaaactttccaaaagtttaaaaatcttttaaattcgaccggttttgtacgaccaccactttagtgacgtatttccccatttatttatcactttttcgaaataaattactaggatgatttaggcaacacatacgccccaattatgcatgaattgttggcattgaacacactgaagatcacgggcggccattttggctatgccaaattttttggtttaattcgtaatcccggcaaatcaccgcgggttcctttccggcggtggtctgtccgcggtatgctctcgagaggaatcctttgaaaaatataatttgataataaaagtatcataaatttgaccgttatcttccattaatgttctttccgttttaaccctacctacataaatatttttaa

SEQ ID NO: 34178 - DNA, 1051 bp, Heterodera glycines
ccagaatttaaaaatacagtttgctatggcttcgcatcactcgcttcaacgggtgctcagtgtaaatatcgactggccattcaaattctgcctttccagccttatggaaagatattatggaacttttggttccatctcagttgtcaacgccgcgactgcatcgttattatatcagtcgatagaattttcgaatcgcttttaaatcgtctcttttgcgtcccttaatcttcactctgagccgagttactgcggtctaaacacgtttttggtagaattgcggccagaatttaaaaatacagtttgctatggcttcgcatcacccgcttcaacgggtgctcagtgtaaatatcgactggccattcaaattctgcctttccagccttatggaaagatattatggaacttttggttccatctcagttgtcaacgccgcgactgcatcgttattatatcagtcgatagaattttcgaatcgcttttaaatcgtctcttttgcgtcccttaatcttcactctgagccgagttactgcggtctaaacacgtttttggtagaattgcggccagaatttaaaaatacagtttgctatggcttcgcatcacccgcttcaacgggtgctcagtgtaaatatagactggccattcaaattctgcctttccagccttatggaaagatattatggaacttttggttccatctcagttgtcaacgccgcgactgcatcgttattatatcagtcgatagaattttcgaatcgcttttaaatcgtctcttttgcgtcccttaatcttcactctgagccgagttactgcggtctaaacacgtttttggtagaattgcggccagaatttaaaaatacagtttgctatggcttcgcatcacccgcttccacgggtgctcagtgtaaatatagactggccattcaaattctgctttccagccttatggaaagatattatggaaactttggtccatctcagttgtcaacgccgcgactgcatcgttattatatcagtcgatagaattttcgaatcgcttttaaatcgtctcttt

SEQ ID NO: 34179 - DNA, 1026 bp, Heterodera glycines
cctcactttttcgctcactgtctatgtgtctgctgcccccgtccgccttccactatttcgccggcacgcttttgtgtctgggcagtgtttagttgcgcgctttgcacacactatttcttcgggatttttttgcctacccattttctatctctaattccctctctctctcgttcgttgaaattttttaaaacgaaattctgcgcggcaaaaatttcattcaaaaattttttgggggcgacggccggcgggggaattaaattgcacctgacatttgtaaatagtttctgggaatgcattggggagacaacattcccattcatttattatttaatggcattcattccttgacaatgactaacccatccgccgccggcgttatttaacccatcccttaaacgattacaaaaaaaacaaacaaaaagaaattacaaaatgccaattcccctcgggggaaaagggactcaaatttacatggtgatgctattgtaatttattttaaattaggtagataattaaatgtatttcaaatttttaaatagttaatcccttcaagaaataatttttaaaaattaagaaaattgatttcctttattccttcctttttttaatttcaatttaaattccctcggggaaaaacggactcaaatttaaattgtgatgccgctggaatttattattaaaatgagtagattatattaaatttaactttaaataattttcaaacatttaatccttataagaaaagaattcattaattttaaattttttaattaaaaatatagtgtcctttattccttttcaatatttcaattccccgagggattgaatttaattggcaaaatgaagatgccaaagggttttttaaatttattcattcgagaaattaaagctgagaaattaattttaaaaaagttttttgccctcacgatttttaaataattcagagaacttaagatcgatttttcaatttttgaaaaatttatttgaaatacaaaaatcccttatgcgctcgactaatctttgaat

SEQ ID NO: 34180 - DNA, 1114 bp, Heterodera glycines
  unsure (1)..(1114): unsure at all n locations
gtgtcgggttaattgttgttgttccattggcacaatgnatgaatagagaggtgccaaagctgctgatgggtcctctttttctagaatttgagggtaaatgcaacaaattttgccaaattctcaagaagtgatccttggagaccaaaaaattttaaaaaacgcgaaaatgtgagaatttttggaaactatttttgagatcctcaagagtctcgtcacttcatttaccagcatataatttgtcatcgacttcctcctcttcctcatcatttgatgcaaaactgacggagcgctgctgacgaaaataatcataattgtggacgcacaattctgacattttggttatttttcttttcttaaaaatagagcccttaagaatttttgcaaaacgattctcgttttagtgccaacttttgaaacaaaatttgacaaaagataatgaaaaaattccataaaataaatagggaaggcgaatgcttttccctgacaaaaaaaaatattttactcaaaggcatttccaaatccaattttggtcaatttgtgcacatcaatcccgcgtcattcctgtctctcatgccactgcagacgatgtctaatgacatttaatttagcgcagttaaggcgcggttctctttgcgttgattgacatgaaattcattagccgattaccgtagtaaaccaaaaaaagaatttaattaaaggaggagttactttttttttaatttaacaatatatatgtattgaaaatgtatgcattttcatttaaaaagaaagcatcaaaaaattatgcatggacaattttccttccatttggccattcatttgcacttaacttccacattccttcaatttttgtgacaaatgaaacgaaaaattaaacaaaaatttattgaatgaagtgtatttaaataagagttataaattgtttagtctttttttaaacttttctttcaatattttccacttttttccttttatatatttttggccctattggaattttaaaatttggtatcattcgaaagcttttgagaaccggtttaaaaataaagtttaaaccagggctcccagattaaaatattcaaaagcctcatttgacatgcaaaaaatcctcatt

SEQ ID NO: 34181 - DNA, 910 bp, Heterodera glycines
ttaaaatgtaaaataatctaattgaattgttactacaaatttcaaatcaaatatttcaaaaatccaagcaaaccagccaaaatttgtgcgttttttgaaaaatggcaaaaaatgccaaaaacgaaaacaaaaaatgtgccgtgccgtcgtccgcccactcacccggcaacagatgggaggagtaatccacaaaggtggcattccagtgccgatctcgccgcttggtgtccatcatttggatgtggtactccgtcttgccaatgtgcaccgcgttcggcatgttggccggacacaccgaactctgcggggtgggcgaaaaggtgttgctccgctcgccggtctctgacaaatgggcacaaattttgggattttttttttaatttccatcgaaaaaagggacaaatttttcgcttatacattttaaaaaattcgccaaaagaattttatctaaaatttttgtatttcaattttaaattgcgcgaaaaatttttgaattttgaaatcaaaaaatttaatgcgctattaaatgcaccccaaaaaggggtccactgcgtttcggcgctcccgtttcggcgccagcatgtttttggctataacttttttctttgtaaaccaaatccaacattgttggtgtcgttcgaaagcttaatctatttagaagctttttctaagctattgctttgcgattagacaattatcaaaacagttatgcatgaaaattgcgaaaaagtcgaaattttcaagttttttcttaataaaattttttacaggcttgaaaaacttttcgtttttgataaggctaatagagcatgttaaaagctttcgaatgataccaagattgttggatttggatgctaaagaaaaaagcttaagtggaaaaacgagctgcgccgaaacgcgtgggtccctt

SEQ ID NO: 34182 - DNA, 962 bp, Heterodera glycines
  unsure (1)..(962): unsure at all n locations
ctcgatgactgtgtgcgactcgagccatggtgaaaagcgagaactccacctcgacaaggcgttgaatgaaggagtaagcaatttgaatagtgtttgaagaagcgaaattggctggcctctcaaaatcgcaaaatttttggcttcattcgccaagttttggcctcattttgcactaaacgtttgaaaaaattatgagaggagaggtccattggtgcccacttgctcctcagtcaaattatggcggcagaaaattttgtcattttctcctaaaaattttcagaattgccattacaaaatacaaaatatcccctcccattccctaaatttgaaaaagacctcttcggaccccgaggggtgccgttaggccttaaaaattgaaaatgttgcgtgtatggaaagcattcggcattaaattttgaatttgtcgggagttgggagaagcaattattcttgaagcgtcttaagtactcatttttatgtaggtgctcgatgagaacggaaaattgaagcacggtggtcgtcggctgtccttgtttcaagggataggcaaaaaagtagcaaagtgctctgggggaacggacgttgaccgtggaaaaaagacaatctatttcgattcgaatcaaaccgatgtgtccatgttcggcaaggtgaagtttagactgtttaaaatacttaaaaacaatgcaatgttcgattttgtgaaattttagcgttcccattatttgcctccgctctaccaacccgatgcaagaccaccagtgatttatggaaatgatttttaattttttaacaagggagcaaccaagtcgaaagccagaannatccggagggaaggaagccgcacaccttttttgctcttcagcccganattttccggnntctanggtttcgacttgggtctaccccacccnccgggcgacgaccttttttgctttcctccaattttctgcacattttcaaaa

SEQ ID NO: 34183 - DNA, 900 bp, Heterodera glycines
ccgtgccgaactcacaaagttatgggagtgaaatggtgaaatatttgttttcaccacaaggcattttttctgaaaaccggattcaaaaatctggggtttggtataaccgttttagaaatagcgcagaaaacagcttcgatatcaagaaaccaagtcaagtccagaaaggaatattttaaaacgatttcgttttgttttggcattatgataccgaataactttcggaaattatggaaacaaaattggagaaattcgaataattttttgactgcaaatttttttccttttttgaattgggttcaaaaaaattttaagagaatttttgattattaatttgaagtcttgaatttatttgacaaatccaagacttaaaactgggagaagcaaggggctgtggctgggggcctaaaatttgggccacattggagaattaattctgatttctgaaaaagtcccagaaataactattttttctttccatacctacttgtagagctcgagctgctctttccaatggtcttatcccggtctcgatccgtgccgaactcacaaagttatggagtgaaatgtgaaatattgttttcaccacaaggcattttttctgaaaaccggattcaaaaatctggggtttggtataaccgttttagaaatagcgcagaaaacagcttcgatatcaagaaaccaagtcaagtccagaaaggaatattttaaaacgatttcgttttgttttggcattatgataccgaataactttcggaaattatggaaacaaaattggagaaattcgaataattttttgactgcaaatttttttccttttttgaattgggttcaaaaaaattttaagagaatttttgattattaatttgaagtcttggatttatttgacaaatccaagac

SEQ ID NO: 34184 - DNA, 1162 bp, Heterodera glycines
gatttaagtctctcccaatttttaaattttcattcgctcagaggcgtggcgcagaaacatcgaaaatcgactcgtttcgaccaaattcaacttcatttcgttcattgggcatgcccaaaacggaagtgttgtcgagctgctaggcaagaagcaaatgaatgtaagtgcgacggatcgtatccctcgaatatcaagagctcaggtgacagacaatatcattagcaagtaattataggaaattatatttcatttggattatagatctctgatgccctctattcaatgggtaacattgacgcgtataaagcggcgatagaggcagcaaataatctcgtacgtggtaccgtcgagtccaaataacatcggcagctagtatcgcacccactagagctggtgcggtcggaggtggaaagttccgcagatcgtcatggtcccccgcatagtattaagtttcacagctcctccgtcctcatctcgtactggtaccccgagtggtgatggtacagagactcgtactaatttttgccaactcgtactgccccaactcgtaatggtaccccgacccgtgataagtttcccaactcgtactgccccaactcgtactggtaacccgactcgtactaagtttcccaactcgtactggtaccccgactcgtactaagtttcccaactcgtactgccccaactcgtactggtaccccgaatcgtactaagtttcccaactcgtactggtaccccgactcgtactaagtttcccaactcgtactgccccaactcgtactggtaccccgaatcgtactaagtttcccaactcgtactgccccaactcgtactggtaccccgaatcgtactaagtttcccaactcgtactggtaccccgaatcgtactaagtttcccaactcgtactggtaccccaactcgtactaatttttcccaactcgtactgccccaactcgtaatggtaccccgactcgtactaagtttcccaactcgtactggtaccccgactcgtactggtaccccgaatcgtactatgcctccctactcgtactggtaccccgaatcgtactaagtttcccaactcgtactggtaccccgactggtactaattcttcccaaatcgtactgccccaattcttaatgccaccccgacccgtacta

SEQ ID NO: 34185 - DNA, 876 bp, Heterodera glycines
agtgattgtaatgctggtgggtggagtagcagtgattgtaatgctggtgggatgagtaccagtgattgaaatgctggtgtgagtagcagcgattgtaatgatgatgggttgagtaccagtgattgtaatgatggtggtttgagtaccagtgattgtaatgatggtgggttgagtaccagtgattgtaatgctggtgggttgagtaccagtgattgtaatgatggtggattgagtcccagtgattgaaatgctggagaattgagtaccagtgattgtaatgctgttgggtttagtaccagtgattgtaatgctgttgggttgagtaccagtgattgaaatgttggtggattgagtaccagtgattgaaatgctggtgggttgagtaccagtgattgaaatgctggtgggttgagtaccagtgattgaaatgcagaattgagtcccagtgattgaaatgctgttgggttgagtcccagtgattgaaatgctggtgggctgagtcccagtgattgaaatgctgttgggttgagtcccagtgattgaaatgctggtgggttgagtcccagtgattgaaatgctggtgggttgagtcccagtgattgaaatgctggtgggttgagtcccagtgattgaaatgctggtgggttgagtcccagtgattgaaatgcggagaattgagtgccagtgattgaaatgctggtgggttgagtaccagtgattgaaatgctggtgggtttagtcccagtgattggaatgctgttgggttgagtcccagtgattgaaatgttggtggattgagtcccagtgattgaaatgctggtgggttgagtcccagtgattgaaatgctgttgggttgagtcccagtgattgaaatg

SEQ ID NO: 34186 - DNA, 949 bp, Heterodera glycines
taattggccgagtgttgttagctttatgcctttttgtctgttccaattaaccctaattagggaactcactaatttgctcctcctctttcattgctttcggcgggcacaccctccccgccctcacatcgtcccaatagcgtttgttcaacaatttggcggggtgtggcctcggctccacgctccgctttcggccccctccgttcaaattcaaatggcccttcgtaatggcatttgccatcactctttttggggtgtcaaaagcttttctgccaatttctgccgaatatttttgttgcttatcgttcggattttcgctggacaattgttgagttttcatttgggaataatttctgtttgaattttgggaaggccttaaaatgccaagtccttttaaataatcttcgaaaacaaaagggatacattttcttcctattgaaaaatgaagcgacgaaaaatttcggccggcgttggttttatattttgggatggaatgccaagcccatgtgctgtgggagggatggggggagggaataaacaacatttaataattactaaataaaattactttgcttaaattacaatgcaacaaaaaattgttatgcaggactaaacatcgtattctaaccgaagcaatgcggtaacgaaagttttggtggtaattttttgaaattattaaaatgaataaatgaaaatattaaagatgatgacacttttgtttgtcaaacctacacttgtgatggtggaaaatgtaagaatcttttatttgtgcttcgttaattgacctaaatataaagcattaaataaaagtaattcacactaatgacgtcatctcaaatcacgaattattattaccataaaaatacaatttttcattttgattagatttctttttatctccgggttgacgaattgtgctttcagtgccctttactttccgcgaatgggccaa

SEQ ID NO: 34187 - DNA, 1209 bp, Heterodera glycines
  unsure (1)..(1209): unsure at all n locations
attttctcccggccgaaggccgggagcgccctgaaagcgttggaagggtcttacaactttttgaggagcatcncgggaaaaatataggttttccggtccaagggccaactgagtaccagggactgatttctcattttttcgtgcgtttgacggcccctaactttttctgtaaaactcgaatcaaaaactttccgctggtaggaacctaagttgaagtgttgtctaaaagtcaaaaaaaattccaggcctctacctatagtaggaagggctgcagaaaataggagaaattcagtatcaactttgtccacttcagtcccaggtgaataccgcgtcagcgtttgatctgagcgagggggctccagcggacttattgtagagctttgaaagctcgattttttaaattttaaaatttcgaaaattttcaaaatttttcgagttaggcctaaaaaacggttttcgggtttttgaattttaggattttttaacgatttttcccagagaaacggagaccacttccaaaacatagtttttcgagctctatcgactggtatttttttcggaaaaatttcgattttttcccggaaatagaaaaaaattttggcctgagcgggacatttgagtcccgggcctataactcggcaggagttaagtttatcgaaaaaacgccttagggcaaaattgtagagcttttaaaatgctatcgaatagtgtattatatggccggaaattttcaaaaattttcgagctaggccccctagaaattttcggaaattttttttgggttgaaaatgagggtgaaaaatttttttctgggtatttttaaggtgctgagtacgaatatgatgtctattttaagtttcagaatttttggaattttttaaaaattcgaaaatatttggcaattttttggccctcgggattttggcctaatatttgaaaattcataacaaatcgaagggtcgataaattttacaggaataaagccttaaaaatagagaaaaatcaggagaattttatgggatttaaatgaaatttatatcttcaaatgaaaaaaagttattcaagaatttctggaaattttcgatttttcagaaaaaaattcagaactcggttctgaaaagtcattctgtaaaagtaaaatactacaaaaatccgcaattttttgctctattaaataaaatttattttacatttttatcacttttttaa

SEQ ID NO: 34188 - DNA, 919 bp, Heterodera glycines
tcgtacaatggagtttcgtacaataggaatttttataaaggcttagaataagcataagcttttggattaagcttaggcctgagcctaggcctaacctatgcttaggcttgcttgggcttaggcctaagtttaatcttaggctttattttgtaaatttgttaaaacaatttttggacggttttaagcttttgaatccggagcaagaccgtgaagtaccatctatctttatttataatgaaagtggcattcttgaacccgagcgtttgtctcagaaatctatgacgaattaacatttaaaaattagcggaatttattaaaatcgtaaaatttttactgttatttgattatttatggttataaaatttaattaatattttgagtcacattaaatataaataagaaactatgtgaaggaaactaaatttatttatttaatataattttctgtactgaaatgaccccatccctctgaaagtctctcactgatatttttgtcacttcgcccacactgatgcaaatgggaccagagcgtttgggcccccgtttttgggcgaccgcgaccgggccaacaaaaaatggccacaacatctaatgtgattataggcattggtaattgccatgtgagcaaatcttggcggaagactacaacgaaatgaatacctattattccaatcatcagttatacaactaagacaaagcaacacagctttttaaattttgacagcaaatttgccgaaaaaaataaacaaaacgatatttcgatcactttttcccgatcacattttgcttatcactctattcttcacatctcaaatggagctcgacaatgattgctgctgctgcttttgatcaatgccgacgtcatcatacatgatcaaggggtggtctattaccaccccccccccccccatcgttcgtc

SEQ ID NO: 34189 - DNA, 1259 bp, Heterodera glycines
  unsure (1)..(1259): unsure at all n locations
tcagggagttgtatgtaaatagtgagtttcacactnnttacnaatagttgtgagctaattagaattcccctaatntaatttcgaattctccatataaattaatntaattcttgacactttttcgtatatttttacaatttccaataactattttctacaaaattttaatgattattttaagcccaatcagtagaaaccgaatttttaagttttacctattttttcttgcatttcttattgcattcaaagtttctttatttattttaaattctgaagaaaaaaagacaaattttgtcacgaactcgaaatgaattgatttacaatttttgtgggaaaaacgatagaaatgatattttctgggatttttatgcataattaacttgagagtgcacatatggcatttttctagttttcatcccctatttcagcattttaagcacataatttattacatattaaggatctttagcacataaaaagtgagccttatttatttggtcattttattggtattctatgtattttgttcactcttctatgaagtttttcaaaaaaaatcttaaacattttttttcgcattgtttggtatatatttggtggcttctatttttcttatatatttatgtgttttacttattttacattttttgcgatttttttttacatataattcccagtttttataataaaatacattatttcaattatagcacaccgtcgggaaaaagagaattggtgggacttttgcgtgccgggccgcgctgttgccacgcgggaatgcgcctgaacagtccaattgagcgtaatgtcgttcccttttcgctggggatccgacgttgggtcagcaaagtcgccaacaatcatttcatgtgtggctcacttggcgcatgtcctcgtcgaaagaaggttgcaaaccgccaattcgatgatggggatgattatatgtaaacagcggaatcggacggagtatgttattagttacaaaaaattaaaattggtaaaaagattttgaccgtccatcctttgtataaaagtcgatagttttttaaaaaatgagttttttttaattaaggaaaattttttaattaaaaaatatctaacaaatttcgctacttttaaaacataacttactgaatttcaaacactttcttagtcaataatgcataatttgtttgtttctgagaaaaaaataataattttcctaacaaaaaagtggtatggcccatttaagaaaccgataccattttatctcatgacct

SEQ ID NO: 34190 - DNA, 956 bp, Heterodera glycines
tgtgatgcttcttctaccttttctacgatgcttttcagccattcttcacggctttcacacagtatgtccccgtccttcttgtattttcgttctttgaagcgtggcaaagtgatgttcattatgttgaaagtgttgccggtaaaatctcgctcatcagtgtttccggcagtgccggtgatcgacgttatgtcggcctttttgctcagaaagaagccgagattatttttgtgggaaatgtgcagggacggcggggtgagctccacgtcctgcaatgactgaacacactgatgcagtccgttgctgtactgcgagttcttctcaatgatgccgctgttcatgttgtccaccggcattattctcagcggtgccgccatttgtaacattttaccaatgccgccgctgccgtcgttggcgttctgctcgggaaataaatggatgaacaattcagctttttgactaattcgggtttcgatcacttttatttgttttattgcccagacgtttcaacagcaaaattgattttcacttagataaacacttaagcgtgccggaaaagcttttactgtgaaaacttagggcgagtcggcggctttgaacgggtgctgctggcttttccgaagctaatgttctaccagctgaactaccgagagtctgccctcgccagctacccaattttctcaaacatcaattttcgattaacacattaatttttatctcggggaagtgtctcttcatcatgtatcaaaaagccaaatttttgattgaaattatttgacacaaattaaatttttgctgagaaaacaatagaggaaatgaatgggtggggagcagggctgggcgcaattggattttcaattacggaaatccgcaattcccaattacgggggtccaaaaaccccgcaatttccgtaatccccatttttcaaaaatctttttttaattttaaattttttttt

SEQ ID NO: 34191 - DNA, 189 bp, Heterodera glycines
gggggtggggacatttgttggggagaaatggacgtaggagagtagggcggaagcaggcggacagctgcttctgtcctccgacgatggcacaccgtccccccccccatccccccatcacaacgacaccaaataccctcgagcaagaaatgagcagagggtgacatgaccacggcaccccccgggattcat

SEQ ID NO: 34192 - DNA, 1018 bp, Heterodera glycines
  unsure (1)..(1018): unsure at all n locations
gattatggccaatcgaggcgnatttgttggccagcccttcctagagagagagagagagattagagtgaaaatgtgtggggaaggatatgccattttgcgattgtttgggatgagcaaagagagtggagagagggggggagagagagacacccgtccaaaagagaagatgcatcgattgatcagaagcggaggggaggacagcgagcgaatcagtgggtgggtgagtgatcggactgaagcaaaacagcagcgtaagaaaagtgccaaagccaagcgggcgatcgatggcacctcgccaccagcaggaagaagcgccaattctgtccggcattcggccgcaaaagcttgcattcggtgtttgacctgccgactcggcgctgccgcgcggaatgcctttccgtcatcacctgttgtccatcaatctgtccgttcagctgctgaagttcatttgctcatcatccccgggaatgccattatttgcataattggcgccaggtccaaacggcaaactcggctgaaaagttgagtgatcagcaactgatcaacaaataaatgaactggctttttcaaacacagagatttgccctcgaaaatcggactttgtcctcaaaatgccaagaaatagtctccaaaatgaatatgagaattacccaaaaaatgggagattggtccaaaaagcatagactcggggtgctttcgtttgttttggcactttgctgctgatttggctttttcgagtcgcttttacctgctgtactgcgatggttggcacacgttgcgattggggcggagtgttattggcggacgaattctgagcagcggcggacgaatggtaaaagggcgagccgaaatgggcaccctgaaaaagagaaatgataaatgattgtttaacagataattgagttacacataagctaatcagctgctgattactcaagaaacgattattcaaggaaccaattggttatttaatgaataaataaatcacaactgatcgatgtttgtaaagcaatatcag

SEQ ID NO: 34193 - DNA, 900 bp, Heterodera glycines
  unsure (1)..(900): unsure at all n locations
agaaggtgctcatccccagtttcgtcatccaaaggttttcttccccaccctttttcattaaatataatcactgttattgngattcagtttaattttgtgggcaaagttctgganccaaaagggcacgacttgcaaaatnatcgccaaatcatacaaatgtcacgtgtacattttggggcggggcagcactcgcgaccgaaccaaaggagcaggtaattctcactcaattttgtttttcttttcttttcatttcttactttcttttgttctcataatggctatttctatcgcttggtcttctcaaaccaaatttcccaggaaatgctcagcagcggcgacccacagtacgctcactacggtgggcctttacacgtcaaagtggagacgactgctccgcctgccgtcgcttatcagcgcgttgctggcgttctcgccgtccttgctgaactgctgcaaccagtgaatgaaaaaggatggcaatgagaaagtacattcagattaaggtcaaagacacacacattgagggcatcacaacggagcccaacccgaatttgaacgcattggaagggggcggggacagcgacgggggaggcgactcgaacggagccgaaggcaatggcgaagaagccggaggaccaagtaaagcttgatagttgtactgaaactgccctccttcttgacaagaattatttgtcctaacgaagaagttgtctagttgttaccaggggtattcagggttgacggccacaaaaatggcacccattttgaccgtgtttgaatttctaaccagaattccattaaaaatcacccattttcgaatttcggaaccaaaaagagagtggggtctatagagagttgtaatggacataaattggcttgccatttttttttgggggggga

SEQ ID NO: 34194 - DNA, 642 bp, Heterodera glycines
ccaaaaactcgatctttaggggtgtatttttttcgaaacttcgggtaaattgcccgaagccgaagcacgaagttcgaagctcaaaaaacccgaagtttttgaagccgaatgtatattatccgattgaagtttgggcatcaaagttttaggacaaattataatagtgaggtgcggggcattgtacgcaaaaatacaatttttttcattatttcgtaaaattcatttaaaaccaatgtttggcacaacagcaaatgttcttgaaaggaatggaaattagatgcccaaattcgtctcatttcaacgtgttttttgttgaaacattttttttttattttacaaaagtcaaaaaaaaatttttgtttttgctatgcctttcgaaaggctgtatgacatttcgcctactggacatttcacctactaagccaacatttggcgttccgcctactaagccaaaatcagagatttcgcttattgacattttgcctactgaacatctcgcctacggacacttcgcctactggacatttcgcctactaagccaacattggacgtttcgcctactaagccaaaatcagatattttgcctattgacattttgcctactgacacttcgcctactggacatttcgcctactaagccaa

SEQ ID NO: 34195 - DNA, 750 bp, Heterodera glycines
tttttataaaaaatttcaaaaaaagtgctaaaaatttggaaaataaatatagacttgtaggagtaaaaaattgcggttttttgggtgtatattaattacttttcagaaaatgtattttcagaattgagatctgaatttattctgaaatttgtaatttttccataatttcaggaatagcttttttaacttattaaaagatgtttttcttataatttgttatataaattataaaagaatggtattttaattttaaaaaaataaatataaattatttaatttcatcaaaaatttatttaatttaaataaaataatttattaattattaatagcacaaaacaatgtaaattaattaaaatcattgaaaaactagcgaaaataaatcccccccccccccccccgcgggtccttcggcccccgcccccccccccccgcccttcagagcacgacaaatatttcaacaaaaatttttaaaaattgactagagcaatcgaacgctaacggacgacctaatggaaaaaaatccccgaaggagagaatttaattaaatccattccttcgggggaccgtgccgggtgccgcggggtaagcagtgctggttcgtttcatcacggcaccgaaccttttggctagtcagcaatcgttgcttaacttgccagatcggacgggtgcgcatgattccactgttccaagcaccccaccaaaagcaaaacgatataaccaaaatataaggaaaaattttttaaaaatttt

SEQ ID NO: 34196 - DNA, 858 bp, Heterodera glycines
  unsure (1)..(858): unsure at all n locations
aatggtgcctttgttccaaatttgttggttggcacggagaaattcgatgacggaatggtcaatgtacctgaaaaaagaatgtttttttattaattgtttttgaatttcagttacttaatctgaaggtaattaaagcgaattttgtcgggcaacggacggtcaggcaatggaaatggcacagaattgccattgctcaatttaacgacacatagttttgcttctgttcccatcctttcaattctgattggtccccaaattggcaattcgcttttgccatcgaaatgtttgtccaccaaaacatcgaaacgaggcgaaagaagtgccattttgaggccagttgggcgcggtcaaaatgagggaaaatgtccatcaaaatgtcgttgcaaatccaactgaaattgtcaaaatatattgaagtgttcttaaaaatgaattcacaaattcttaaacgaataaattctcacattttcttcaaaattcgcttattcattttcatggccacgcggagacaatcagtttgtcccattcaaaatatctagacaaaggacccacagacaacgtaatgtttatttttttgaatttctatgttgcaattaaattgagaaattgccggaggcgacaaaaagagttgaaacatttacactttgttgaaaaaatgaatttttaagctcgcaacacccataattttaaatgcaatcagccgcttgcaattctgatctcccaattttggtatttagcatttattcagagcaataatacgagatgagcaatacaataatacaattataacgcggacaaacatccaatacaatacaattataacctccgacaaacatccnaatacatacaattataccc

SEQ ID NO: 34197 - DNA, 435 bp, Heterodera glycines
agtggcccaccagcagcaggggaaagggagggaggggaatacacccacgtatataaaggaaaatagggagagaaatggagggagagagagagagggggacaggcggtgagaggggcgagggattactgccctgggcagtacaaatatgcagccgaagagagcacagtgcacactgcccctccaccacctccagcaattctcatccatcacacccaaatccccccgccgaggggagggggggggggacaaagcggacagagaaagagtttaagaagaagaagcattgggagcactaagcagcagttggatgatgatgatgaaaagggaagaggaaggagaagcagaaaggcatcccctccctttgcttcctttcccccgaatcattcgtacccctcaagaagaggggggggggggggggtaagtataatctttttt

SEQ ID NO: 34198 - DNA, 869 bp, Heterodera glycines
cattttgtttcttttcctcttcctcctcctcttccccatcattttcccccaaagttgactcctcccctcgtcttcctttctctcctccttttccattttcttccgtttcctccttctcttcagtccgcttttcctcttccccatccgttgtgtcgttgttttgttcaaatttctgcttcaaaaattggtcgacaattgctttgatcagcaaaagtgtaaggcaaacggcggcgatcagaagaaatggcaaaagcaaaaaatggacaattctttgatcagttgcgattagaagtgactgaaaatttggggatgaaatttgcaattgttccaattataaatattatcccacttcttatagactccccgtccaatttgacccctaaaaagatttattcaccacctcatgtttggccattttttcgtcgatcgttgcgctgagaagcgactgaaaatatgcaaaatttatgactttgtcattaaagagtttaaagttgtaagcaattaaataatttttaaattcgaaatttcatttttgtaaatttttgaaaaaaagacatttttttattaatgcctccaaaaaattgtgacttaattactacataattagtacctgaatttcttttgcatttgccaatttggccatcgcctgcggaaaaattggaatttaaatttaaaagaatttaaatcatttttcacctgctgttgctccaatttgacataaattctgtccattttctctgtcacaatttccgtaagttcagtcgccgtttttgcaattaactgaaaattgttttttgaattgattacttttgtacttatcaaatatttacaaaaaaattgtcgaaatattcttgtaaaaatttacggaa

SEQ ID NO: 34199 - DNA, 739 bp, Heterodera glycines
  unsure (1)..(739): unsure at all n locations
gggatttggatatatcatagcaaaaacaaaacgaaattagagggatttgcatagcaaaaacaaatgaaattaaagggatttggatatatcatagcaaaaacaaaacgaaattagaggggggggggggatttggatatatcatagcaaaaacaaaacgaaattagagggatttgcatagcaaaaacaaatgaaattaaagggatttggatatatcatagcaaaaataaaacgaaattagagggatttgcatagcaaaaacaaatgaaattaaagggatttggatatatcatagcaaaaacaaaacgaaattagagggggggggggggggatttggatatatcatagcaaaaacaaaacgaaattagagggatttgcatagcatgtccgcatgttgtttttgggttttggttttttcgtggctttgccgtgccgtgttttgggggggggggggggtttgggtttttcgttgccggggccttgcgggttttgtggggtttgcgtggctgttcccgctgggttttgtggggtttggttttttctttgcgttgtttccccggtttttggggggtttgccttgctgcttctgctgtctttgtggggttttggttttttctttgccggttcgcgtcgctttttgggggggggggggggggcttaaagatntcatngcnnnnncnnnncgnnnttngaggcatttaaaggcaaaaacaaatgaaattaaagggatttggatatatca

SEQ ID NO: 34200 - DNA, 1312 bp, Heterodera glycines
tacaatgatgttgaacagcgtgacggtctgtgttgctcgtccggacgggcaattggtctacagagcatttcaaataattttatactatcgtttaaaaatattttaattttaaattttttattaaataattaattaattaataaaaaataaaatcttttcactctgtttatttgacatgaatattatttgaatattgtgatatggattatatttttgtttagtgcagcacaaaaacatacaaattatttaacatatatcaatgtgaattggtcaattaaaaattgccaagtatggtagccttttgcctattatggattttgaaaattacggtagccattttctgtgaattaatattaatatacatcacacatattaaattcgtcaatttggtgtaaaacaaatcaattaggtgcaatgaaaataatttttcgagttacggtaaccgtatgcattagtcatccacaaattcatttttttcacgcatttcaaatgtgctgcaaatgccccaatcacgcagaagtgtcactataaagtgctggtgctaattaacaatttgaaaaataaaaaacaaagtataaaagtgcccaaaatatgccaatcattaatttcaaaaaattttttagatcggccctttgtaaatataaaaattaaattttccgcagttaattaaccttaatataaaaaaagaaaaataaatatctccagaaccactcataaattttagtgccattttattatggcacaaaataaccaaataatcttacagattgttgttgttgttgtgccaatagcattggatgcagaagttttgctggcgctggcactcgctgccgcccgtgcggcggcggaaatagtcgcggtaccactcaccgagtgcttgacgctcgctgatgttgaactttacgctactgatgaccgaggaactattgactctgcaactttggacaaatcaaaagactataaccgactaaacgtctaggcgccgaaaaaccacgatattgcaccgagaaagagtgacgtttgcgcgatcttcaagctctgagggccactaccatgtaaaagttgtggtcatgaaaccgacattggaatttttgaaagaaaaataaaatacaaaattcaatatttgaatattgatactcgagagtctcgaccctcgtgatgtctttttctctatgattatgtgccacgccatacaaatgttcccctctcaatctctcaataaaacacacactcgccatgtctttggttctctgtccatcaatataaatttggatatctcacattaccttttgtttctctgtttacataaact

SEQ ID NO: 34201 - DNA, 1064 bp, Heterodera glycines
  unsure (1)..(1064): unsure at all n locations
gtcgatatttacactgagcacccgttgaaagcgggtgatgcgaagccatagcaaactgtatttttaaattctggccgcatttctaccaaaaacgtgtntagaccgcagtaactcggctcagagtgaagattaagggacgcaaaagagacgatntaaaagcgattcgaaaattctatcgactgatataataacgatgcagtcgcggcgttgacaactgagatggaaccaaaagttccataatatctttccataaggctggaaaggcagaatttgaatggccagtctatatttacactgagcacccgttgaagagggtgatgcgaatccatagcaaactgtatttttaaattctggcagcaattctaccaaaaacgtgtttagaccgcagtaactcggctcagagtgaagattaagggacgcaaaagagacgatttaaaagcgattcgaaaattctatcgactgatataataacgatgcagtcgcggcgttgacaactgagatggaaccaaaagttccataatatctttccataaggctggaaaggcagaatttgaatgaccagtcgatatttacactgagcacccgttgaagcgggtgatgcgaagccatagcaaactgtatttttaaattctggccgcaattctaccaaaaacgtgtttagaccgcagtaactcggctcagagtgaagattaagggacgcaaaagagacgatttaaaagcgattcgaaaattctatcgactgatataataacgatgcagtcgcggcgttgacaactgagatggaaccaaaagttccataatatctttccataaggctggaaaggcagaatttgaatggccagtcgatatttacactgagcacccgttgaagcgggtgatgcgaagccatagcaaactgtatttttaaattctggccgcaattctaccaaaaacgtgtttagaccgcagtaactcggctcagagtgaagattaagggacgcaaaagagatgatttaaaagcgattcgaaaattctatcaaaaaaaaggataacgatgcagtcgcggtgtgacaactgagatggaa

SEQ ID NO: 34202 - DNA, 628 bp, Heterodera glycines
  unsure (1)..(628): unsure at all n locations
aaaaaaatggtgtaagtaaaaatagtaattaagttgaaaaagattgtgaaataattttaaagtttgtaatttcttatataatagggtttatatatttaattatgaatgataaaattattagagtgaagaaaatggtatgtgatataaggttagaaaaaatggtgtaagtaaaaatagtaattatgataaaaaagtttttaaaataattttagaggattgaattgattatataatagtttttatatattggattatgaaagttaaaattattagagtggtgaaaatagtatgtgatgtaagtttaggaaaaaatggtgtaagtaaaaatagtaattaagtttaaaaagattntnaannaattttagnggatnnaattgnttntanaatngggtttatanatnnnattatgagngntaaaattatgagagtggngaaaattgnatgtgatntaagnntagnaaaaaatggtgtaagtaaaaatngtaattangntnaaaaagntnntnaaanaattttagngnttnnaattnnttntanaatngnntttatanattnnattatgagngntaaaattattagagtggngaaaatngnatgtgatntaagnntagnaaaaaatggtgtaagt

SEQ ID NO: 34203 - DNA, 1073 bp, Heterodera glycines
taaacacgtttttggtaaaatcgcgggccagaatttaaaaaatacagtttgctatggcttcgccatcacccgcttcaacgggtgctcagtgtaaatatcgactggccattcaaattctgcttttccagccttatggaaagatattatggaacttttggttccatctcagttgtcaacaccgcgactgcatcgttattatatcagtcgatagaattttcgaatcgcttttaaatcatctcttttgcgtcccttaatcttcactctgagccgagttactgcggtctaaacacgtttttggtagaattgcggccagaatttaaaaatacagtttgctatggcttcgcatcacccgcttcaacgggtgctcagtgtaaatatcgactggccattcaaattctgcctttccagccttatggaaagatattatggaacttttggttccatctcagttgtcaacgccgcgactgcatcgttattatatcagtcgatagaattttcgaatcgcttttaaatcgtctcttttgcgtcccttaatcttcactctgagccgagttactgcggtctaaacacgtttttggtagaattgcggccagaatttaaaaatacagtttgctatggcttcgcatcacccgcttcaacgggtgctcagtgtaaatatcgactggccattcaaattctgcctttccagccttatggaaagatattatggaacttttggttccatctcagttgtcaacgccgcgactgcatcgttattatatcagtcgatagaattttcgaatcgcttttaaatcgtctcttttgcgtcccttaatcttcactctgagccgagttactgcggtctaaacacgtttttggtagaattgcggccagaatttaaaaatacagtttgctatggcttcgcatcaccccgcttcaacgggtgctcagtgtaaatatcgactggccattcaaattctgcttttctaagcttatggaaagatattatggaaacttttagttcatctcagttgtcaacgccgcgactgcttcgttattatatccgtcgattaaattttccaatcgcttttaaa

SEQ ID NO: 34204 - DNA, 57 bp, Heterodera glycines
aatgccccgattttgtctggcagatcgcccgaccggacatctaccgacgttaatttt

SEQ ID NO: 34205 - DNA, 352 bp, Heterodera glycines
ccataaagtgaatgaatgaagtgatgaatatagtaaataatttgaagtgttaagagtgggagaggggggggggtaaaaaagggagggagagataaagaggaaagagagaatgagaagagagtgagagagagagggggaagttaagagggcaatgaataaaatatgaaggtaatggctgataaatgacaatttgagggataaaacaatggaaggagagagggagggggggggggaagggcgggaatgggaaaatttatggatgataatgttggcttggaggagcacggactgatgagtgatgaggatggatgaagcgagggagagatgagtgggggggggagcatcctgcgca

SEQ ID NO: 34206 - DNA, 1072 bp, Heterodera glycines
ccatgaaaatatcaatcatcgacctagtattctttggaatgctttttgcatttcttggaaatggtgcatctacttttcccttgaattcggctgtgatggaggtcgagaaggacgaagcggacaattcgactacggtggaggccgaagacaattcgactacggcggatgatgtgacagaggatgcggacaattcgactacggtggaggccgaagacaattcgactacggcggatgatgtgacagaggatgcggacaattcgactacggtggaggttgtgacagaggatgcggacaattcgactacggtggaggctgtgacagaggatgcggacaattcgactacggcggatgatgtgacagaggatgcggacagttcgactactttggaggatgtgacagaggatgcggacaattcgactacggtggaggctgtgacagaagatgcggacaattcgactacggcgaaggatgtgacagaggactcggacaattcgactacggtggagactgtgacagaggatgcggacaattcgactacggcggaggatgtgacagaggatgcggacaattcgactacggcggtgcttgattgtgcgacggagaatgcggacaattcgactaaggaggaaatccaagaggccacgatggaggctaagacagaggacgcggataattcgactacggttgaaattgggaacccagatgacgagtgataattgtcattttcttgatactttgacgagaattttgaatttgtgataaactgtggaaattaacagttacaaatcccttatttgtcagttaatttgttttttttttgaaaatctttggcctaaattacggattcttacggcaatttttttaattatggaaatctgcattccgtcattatggaggtccaaaatttgtgattttttgaaagtcaattttgcgaaagggtccggtcatgtaaactctgatacatcgactaattaaaaataaaattttatttgaaaaatcaaagtgatgcttttaatttttaaaaagttcttttacgaatcaagatataaagcatctctgcaccactttaggt

SEQ ID NO: 34207 - DNA, 140 bp, Heterodera glycines
ttagaagaggtacatggtgattagaagaggtacaatggtgattagaagaggaacaatggcgattagaagaggtacaacagtgattacaagaggtacaatggtgattagaagaggtacaatggtgattagaagaggtacaa

SEQ ID NO: 34208 - DNA, 381 bp, Heterodera glycines
ccatcatgttctcattcatgacattctcgccggatggtattaatgaaaaatgataaaatatgtcgtttcaaaaaacgagaaatgaaaaatcataattttttatttttcgggctaaaaataaataaaaacatttgtcgtggtgcggactcgaacctccgcacttttcccattgactgtcttataaataccactgagccacataagcaaatttcgcttgaaatttggagatctaaattgaaacgatgtatgaatgattgagacagacacatgaaaaataccttttaagataaatgaaattttatatgaaaatgtgttgatataacacttaccgacttgcataatttaaaaatttagaaaaatttttgtttaaggaatgggggg

SEQ ID NO: 34209 - DNA, 1632 bp, Heterodera glycines
  unsure (1)..(1632): unsure at all n locations
gcagcagacactttgctgctgtgttcgcccccacgtcgctccttccttggcgaanaagtgcccttgggggacaggctgggatcagactgcggacaaggctaatgggtgacgactacaaaaaagagaggaaaaaacagtagtatgcatacaccaaatacaaaaaataaatgaaataaaatttttgtaaaatcgaaaaaaatacagtaataaaaaaagaaagggtacaaaattgtttttatcatgtcaaacataatggctactgttggtattgatgatgatgatggttttggacctgctgaattcccttctcctcatccgcctttctcgtcgcttcgcttggcaccggtgaattttgcctttgctgttcccgttgctgctccactttgtcttcttctgcgccttcattttcctggccttcgtcttctttttccttttcctggccatgctcatctccatttttgccttcttccatcatcaatttttgttgttccacctttttactctcattttcttcccttttcacttttgtccatttcttttgcctatgcccaactactttttgctttgtctcgtccaatttctcctctacacattcttcttccgtaatctcatcctcctcctcctcatcaaggtattcgtctttgctgtttgtctcctcattattcgttttcaattgcaacggtggcggcggcggtggaatcgcctgtgcataaaactacagaaatcaaattttacaatcaggatttactgtaaatgttgaatattataacagggaaagtgcttgttttaccaagccacaaagctgaacccaaaaataaattttggtgaactagtattttgaatttggtacaaattacgacaaatagctcaattatcaaggtacccctctgaaaattatcaattgaagataataatcgcccactacctgtgaaggactgtatggacgatcagcatcatcgtcgttgacgccatcgccgtcttcatcatcatcatcattgtcgtcgtcgtcctcatcatcaatttccatcgggacatcagcgtcaatgattgtttcatcgcttacaacgtgaaggcatggcatcgacggttcaactgattgttgttgttgaacattttcttggtccgtcgtaccagtgttatcaggctggtaaagagatacaagaaaattgtcaaaaaatacaaaaaatattaaatatttttgtaacagttcctgaattacctgcaacatcatctttttctcctccggcggtgcaagttctggcggaggtggtggtggcggtatatcaatgccggaagatgccattccgacaaggccatatgcgcgtttgaagcccaaatttggtggtgccggcgccgtcgtcgcaacagaagcagcagatggcaccaattgcttgaaaacagacacatttggcggtggtgacggtggcggcggcggtggtacaacaacggcggcagcagaggacaccggcctgacattcaacacgggcaccgttgccttgaactttggtagtggcggaaggacggagggcgacgaaacaggcaatgcttcagcactgatgcgcttcagacgtgggtcgcaaggcggcgataggacagaattgnggcgagcatcgacaggaattgtggcacatc

SEQ ID NO: 34210 - DNA, 1272 bp, Heterodera glycines
  unsure (1)..(1272): unsure at all n locations
ctatcaattggcganaaatagtaggaaacgaaccgctttgttctatttaaaaaaaattttaatttagacaaatataaattagtgccccataaaaatgaaaaaaagagtagtttttcacttttgagctcctcctttccttctttctttttcttttttctttctctttctctctctcctgttttctctctctcgctctctctcactatctttttctctctctcccagtctctcactttctctctctcgctctctcccagtctctctcttctcttttctctctctctcttttctttctctctctcactttccctctcccaatctctctctctctaatctctttttctctatctctctcctttctctctctttccttctctctcctcttttctcgctctctcccagtctctctctctcctcttttctctctctctctctcgctctctcccagtctctctctctcctcttttctctctctctctctcgctctctcccagtctctctcttcttttctcactctcactctgtctcccagtctctctctctttttctcttttctctcactctctccttctctctatcctcttttctctctctcttctttctgtctccctcacagtctctcactttctctctctcgctatctctcactctctctctcctcttttctctctctctttttttctgtctttctctccttctctctatcctcttttctcactcaatctttctctctacctcttctctctctctttcttttctctctactctttctctctctctctctcactccctcttctctctctccatttttctctatctacctatcttttctctctctcttctttctctctctctctctctcgctctctcccagtctctctctctcttcttttctctcaccctctccttctctctatcctcttttctctctctctttttttctctttatctctctcccagtctttcgctctctctctcctctctttcgctctctaccagtctctctcttctcttttctctctctcttcttttctccctctctacccttctctctctccatttttctctctctatcttcttttatctctccccactttctctttctttttttctctctctgtatcgctctcgctctttttccttacatattccataaaagcatattttgtaaaattcgttttatttcattgattaatgttaaaaattaagcaaaaagttatatttaatttaaaagctaaaaaagtgaaaacaatttaataaacattaaatatg

SEQ ID NO: 34211 - DNA, 1336 bp, Heterodera glycines
  unsure (1)..(1336): unsure at all n locations
gtcgctgatcacgaatccgacatctattctaccaattccgaattccggaccctaattcgaacaaaaagtcgaaacttcaaatttttcgaatttccaattttagtctaaattagtttaaatgatcttttatcgaagcaataatgacttttacttcgtttctgtttgtttaaacaccaagtattgaactaaaatacgaaaatagaaaatttgaattttcgtctttttgttcgaatcaggtccggaattcggaattcgccaaaaaggaggccggttttgtgctcagcacaaaaaaatatttgtaagagttatgttcacgcaaaatccataaacttttaacaaaaatgcaaaaaaaatatatttttttgacgcgattacatttttggcgacgtactcaaaaaaatttcaaaaatttttcactaataaatcagttgaaaaataatcccccccgtctccatttatccccccgtatctaataatcctcccctttctgaggaggatgaacaataatccccccggggcgataattagagcaaatacgatatataagtttttagaagattactcggaaactgacttcagtcgaatgcattcaatgctcaatgaaatgataatttcgcaattgggaattcgtgcagttgaggaacccgcaattttttgtggcgatccattatacccacaccgtattgaacacattgcgtaagtttgctgttttaccaaggaggacttttcggatactcaaaacttggcaaaattaaatatttttccgcaccccccccccccatagggctgtgcgaaaaatgattctttccgggaaatggaaatcgtgaaccaggacacgaaaaccccagggaattcccgagtcgggaaccgagaaatttttaaactaatcttatatgtattaaatatagaaatttttaaataaagactatcgnnctcatcaaaattgaaagcaaaaattaaatttttgtaagaatttctctatttttgcaagattaaatgtattaaatgtaactagcaaatttattatgtgcatggattagggtggccgatggtgccgataggtagcgccgggcaaaattttgggatagtttgttaacagatttccaccaaaaatgagtcaggaaccggggattcggcacagccctaacctccccgcccccgcatttcagctttacacctcgcatacttcgtattcattacaaaacgaatgaatgtcggaatttggtattgaaaatgatgcgccgtatgattgccgaanaacgggaagaatgccgtcattacagttgtggtaatatggaaaaatttaaacaaacaaattatagctaggggccagctt

SEQ ID NO: 34212 - DNA, 889 bp, Heterodera glycines
tgatcgctgatgatgggccaaatgcaactgctggtcaagcgctgtgaaaatgtttgcacacgccgagaaaagatggaaagccaaagcaattgagttgttatgatgaatcagaacctccaagtttcgaattgatcaccaatttcaaagagatgtggccatattttagtaaaattaaaattgcatttatttccatttcccattgtttaggcatttctcaaatgccaaattgggggacgattcagtggaaggataaaaagacggacaaattgagcaaagtcaactttatgcttgacggagattccattgggtgagtggcatcagcttttgctttttaacaatcaaatttaaattgcacttcattcaggccattgtcgccaccaaagacggaccaaatgaatgaaaaaagtcaaccggaaatgaaccccgggctcagcagacagaggaaaaaagtgaatgaattgttgagaaatgaaaaatgatcgatcattatgaatggaaattgatctgatgattgcttctttcgtttgaaaatagagttcgaagttgtatgcactaaaaaatccaaatatgcattaaaaatcccccaaatatgccctaaaaactaaagaccggacaactggggtcggagggatcccgagtcgggatcccgactgaatcccgatcccgaccagtcccgaacattttggaacaacgatcgggacggatcaagggtcgggatcccgaccgaatcccgatcccgatcaatcccgaagatttttttgggatcccgcgggattatcgggatttgctcaaacccaattttttaggacattttgtgccaagttttgttcaaatgtttatccaagggaggtaattgatcaattcgattgaagaaaaaaagagatgtgaa

SEQ ID NO: 34213 - DNA, 1079 bp, Heterodera glycines
cccccaaaccggccccctcgaaaaaataggtttttttgttttttggggccagtcccccccgaacccgatgcgcccagatttatgggggagaccgaatccttcgggaatagtttcccctatagcccgtactttaaatctgcggtggatttttgctccccataaatgtttgagtaccccaaacggacacttgaaaaaatcgatttttttgtttttcgggggcagtccccccgaaccgatgcgcccagatttatggggagaccgaatccttccggaatagcttccctatagcctgtactttaattctgcgttggatttttgctccccataattgtttgagtaccccaaacggacacttgaaaaaatcgattttttttgttttcggggcagtccccccgaaccgatgcgcccagatttatggggagaccgaatccttcgggagtagcttccctatagcctgtactttaattctgcgttggatttttgctccccataattgtttgagtaccccaaacggacacttgaaaaaatcgatttttttgttttcggggcagtccccccgaaccgatgcgcccagatttatggggagaccgaatccttcgggaatagcttccctatagcctgtactttaattctgcgttggatttttgctccccataattgtttgagtaccccaaacggacacttgaaaaaatcgatttttttgttttcggggcagtccccccgaaccgatgcgcccagatttatggggagaccgaatccttcgggagtagcttccctatagcctgtactttaattctgcgttggatttttgctccccataaatgtttgagtaccccaaacggacacttgaaaaaatcgatttttttgttttcggggcagtccccccgaaccgatgcgcccagatttatggggagaccgaatccttccggaatagcttccctatagcctgtactttaattctgcgttggatttttgctccccataattgtttgagtaccccaaacggacacttgaaaaaatcgattttttttgttttcggggcagtcaccccgaaccgatgcgcccagatttatggggag

SEQ ID NO: 34214 - DNA, 1194 bp, Heterodera glycines
agtttttttttttgtgtatttaagctggttttgaaccaagaatgctagttttgaaacttttttgttcggattcgggtccggggttcggaattcagaacgatgttcttatagaattttacttatacactagaatttaaatccattcgataaataatttatttaggtcagggtccgctcgccgcagccaactcgccgcaattttcacctcgcggagccaactcgtcacggcgctatctcgccgccgtccatctcgccgcggtcaactcgccaagtatgggtgcgggtgaaacgacaaaatatgggtttggagatttgtccaaggttgggttatatcaataccaataaattaattttaataataaataaaataattattgaatttataatttatttttccaccggcctataaattaactattataaatatatttctttttaatatttatcaaaaagcaattcttacaagagtaataaaaacccaaacaaacaatctgtaaaccaatcattcaatcaattgcaacttactttaattaaaaacattcatcaattgcattattattattattatttttgttattttatatattattaaaaaaggaaaaaataaatactttaagcttttttgcctgcctattcatgggttagccagtgtaaatctctgagaatggcgatcttacttttgagtcttcttgatttgactttatatcaaatataagtataaagtcacaggattcgttgacgaattcattttaaaatttaatagaaatttgttaaaatataaaaaaaaatatattttttttttttgcttattttggtatatgtggttgttaaattaaaaaaaaattgtttcaagttaaataaaattcaaagataggatttaatattatgaaaatcatttttgaggctgaaaaatgtccatcctcggccatatccattcacaatcttaatcgttcaatttgccagcgaaattttttgcattcgaaaaatatggcggcgaaaaaaccaaaacttatgtcgccaaattaaaaaaaaaaattttttttcgcctgtccgtgtttttattcaaaccacgtccatcaaaaaatcacttccgctttaccaatgaatggcatttatccacatttgcggcgcatcatccatattttttatttaaattaataaatataatttctcataatataaaattaatcattt

SEQ ID NO: 34215 - DNA, 602 bp, Heterodera glycines
cgctaatttgtaagatcaaattacatatatacaacaaatgattgtcaacaaaaatgaactgtcaaatgtatctcttttcagcgcctcctttccattggcacatcaaatgcccgcactcattaaataattacccccactccccgccgccctcccccttcccaagtccgccacttccgcgtctcgcctcaggtaaagaaaaaaattgcttggaaaagcagtacatgggcgtggatggagattatgccgtgctgttgttgcggagatgatccccaatcccaccccgcgttcaaattgacatacatatcacaatgacgcgtccaccatttccggcacggccccattttcaaacattttgcctcggctgaggcttgccgaagttgacaaagtgggagagacggacggatggataattaatgatgtctatagaacaaaacaccaatggaaaggaggcgctgaaaagagatacatttgacagttcatttttgttgacaatcatttgttgtatatatgtaatttgatcttacaaattagcgcacacaccatgaaacgttttccactcaagaggatagctaggcgcagacatcctcctggtttcaggggat

SEQ ID NO: 34216 - DNA, 497 bp, Heterodera glycines
cgacaaccacaacaacggaggaaccgacaaccacaacaacggaggaaccgacaaccacaacaacggaggaaccgacaaccacaacaacggaggaaccgacaaccacaacaacggaggaaccgacaaccacaacaacggaggaaccgacaaccacaacaacggaggaaccgacaaccacaacaacggaggaaccgacaaccacaacaacggaggaaccgacaaccacaacaacggaggaaccgacaaccacaacaacggaggaaccgacaaccacaacaacggaggaaccgacaaccacaacaacggaggaaccgacaaccacaacaacggaggaaccgacaacctctacaacggaggaaccgacaaccacaacaacggaggaaccgacaaccacaacaacggaggaaccgacaatcacaacaacggaggaaccgacaaccacaacaacggaggaaccgacaaccacaacaacggagtaaccgactactacaacaacg

SEQ ID NO: 34217 - DNA, 916 bp, Heterodera glycines
ccgggacttgccgggacctgagaagccgggaccgggacctcgattttttttcgggaccgggaactgggaccaatcgggaatttttaaaaattcaaaaaaattcaaaaattttttacaaaattcaaattttaatttttttttcaactgaaaataacaaaattaaatttttattttgttttttatttaataaaatccaaaagttaaagctaaattaaattaatgaaaattttcaaacaaatttctttaggaagaaattgtcagggaaatttggcaaggacatccatttttaaaaatgaagaaaccaaaagaatcacttttacaccgaggaaaactcagaggaaaacaaatcattcactcaatcattcccaaaaaaggttaagtgatctactcgaacattgtgatggctttttggcttgttaacagaaaagacatttaaaattttgaccccatccatttcaaaagaaacttggtaaaagttggagaaagcataggcagaaccccaaaaacagagcagttcattgccgacagctttgggaaaaggcggagttaaattcgacattgccagcgtttcatggtagcgggtgatcaaaagtccatttcagaaaaaaaccgaattacaaaggggagggggtcggtttaaacatctcgatattccgccgaaaaaatgagaccgaatccttttggtgctgaagccatgagaaaaccgcgctacaatacgatcatcagataaccgttcaaagtctgccaagtcagaagatttaacaccaaaagatgacaatttttcaagcaaagggcgcaaatgtttaatccgagaggttcttgaaagcctgggaagtaacgagcagcgagtcagacatatctacaaagggaggaagacgaaaagtagtaagaaacaatgaaaaattgcaaaatcatc

SEQ ID NO: 34218 - DNA, 911 bp, Heterodera glycines
ttaattttaaattaattttaagaaatgattgtgtgaagatgggggaaataaattaaggttttttagtttttttgtttttatatttaaattaataaattaaaaatagagacggaacgggatcgggatcccctgggattagtttcgggaccctgacctcgggatccgtcccgaccttttttttgacttcatcgggattgatcgggatttcatcgggatcccgagtggagatgcctcccgatcacttggccaatcccacgggatcccgcgggattggagtcactataatttcgaaaattttccattttcttataaagatcttaccatattcaaatacgaaaaagtaaataagaaaaataatttgccctttgctaattttcttaacaaattccaaaaaaaatttccgccgaatctccaaaatctcactaatcttcaaaatttgaccaaaaaaactcataagttttaaaaacgattccctaaaaataattaaaaaaatttttacttgttttcgttcattgtgtttctgatgcttctttattggcatttgatcggcagatgggtcatctttttgccatacatttgtgccaacatgatcacttctaactaaaatagaaataaattggaattaaataatatttatttttaaaaactaaaatataaacaaattaccatgggcatcaaatattgttagcagcataatgaaaaaagaaaataaaccgatgaaaaacatattatttgttggcatttgtattaaagagagatttttcacataaaatttaataattagcacactaattggtttggcatttgtattcaagagaaattttcacataaaatttcataataattagcaaaaaaaatattaaaaattccctttgtaatttaaattattaaagttgttcattaaaaaaatg

SEQ ID NO: 34219 - DNA, 891 bp, Heterodera glycines
ttctatagaccttaagcttttgtttaataccaagaatataggtattgaccaagtaagaaaaaaagttatggcctaagaaattgggtatggtcattcatgggacgcataaaaccgactagaaccaagaaaaatacgcttttgcgtcgagcgccaaatttggacgagaagctttggccagctaattgtaagactgttgtttctggtgctgaattctaaccgtctccgattgtcacctttgactttgctttgtcttttcgaattgttcggagttcgctttgccaattgggcctttgctttttgccttcttttcccctttctctgtccacattgatcagctgctgctcgttcaacgccttcgttttatataaatcagcgaggcgagcaatcaatccgacgccaactcatccgaacccaacttttctcccatttagaaatctaattttgtcggatatttccatcgcttcctcaattgcgcactgacgaattcatttttcgccaattcttttttttgttactattcgttttttgacaaattaaattttggtttgaaacctgaaaagcaagtcaaatcgagaatttttaatgtatttcagcttatgttaagaatggttcttttttcaatttgggtatagtatagtcgtagcgcgacatttgcgccgcgacacttgcgccgcccaaacaaataattttagtaaagaacatatacaaactaaatatggttaaagaaaaataaatcttgtaccgcttctatttcccaacaaatgtctttcaatctaaaaaattcgacccgttttttagccttttacatacgcccctttttagacacatcgtttcaaaaaacgaggcatgtgtcaataaagagagagagtgcagagaaaaaacatctctcat

SEQ ID NO: 34220 - DNA, 984 bp, Heterodera glycines
gcaaaagccgcctgtttcacgcaacagcccggctgacccgacctttagagccaattcttttcccgaagttacgaatctaatttgccgacttcccttacctacattattctatcgactagaggctgttcaccttggagacctgctgcggatatcggtacgatcaggcaggagattcaaatagcttccctcgcattttcaagggccgtgtggagcgcacgagacaccacaggaaccgcggtgctttacgggcgcaacatccctatctcaggctgagccacttccaggcacgcacaccctaaaccagaaaagagaactctggctcggactccacacgacgtctgcgagttcatttgcgttaccgcgcaaaacagctcttgcgaaccgtcatttccctagcctggcgtgggaatgttaacccacttccctttcggcaaccggatggaccaactgcgcaagcacagaaaagtcgtcatccgtagtgtgttacggcgttagccggtgccttaggatcggctgacccacattcaactgctgttcacgtggaacccttctccacttcagtcttcaaggatctcacttgaatatttgctactaccaccaagatctgcactggtggaagctccggccgggcccacgcccaaagccttcaacgcaaccaccacgaccctcctacacgtcatggccagactacgcgacaagcacgtgtacaagccaatgacggtggagtataggtggcccgctccagcgccatccattttcagggctagttgattcggcaggtgagttgttacacactccttagcggattccgacttccatggccaccgtcctgctgtctatatcaaccaacaccttttatgaggtctaatgagcgggcactttggcaccttaactccacgtttggttcatcccacatcgccagttctgcttaccaaaatggcccacttggagctcaacatttcacgcctgggttcagagtcaagc

SEQ ID NO: 34221 - DNA, 807 bp, Heterodera glycines
aaaattaaataggaaataccaatttagaagggatctctcttctcgacatcaaatcccgagtctcgacagtatgatttgaatcaggcccgtatcagaaaatttttctgggggggggggcaccgaagcgctcttttttcttgctgttcgggccaaaaaatatttttcccagtgttatttttcaaaattttcaggattgatgcgaaaattagaaatttgtagtcgttctgtgccaaaaaatgacattaccatttttgcgtcaaatcttcaaaaaataatggtacaattagggtccgggggtgtcaattaggcgtcgccggtaaaatctaaaaatttgccccttatttaaaccatctgcccttagattattccattcggtgctagtgcgtttcctaaaaagtgccacccatgcgcgtttcctaaaagtgctattttaatagaatacctataaataaatgcaaatacaatttaattatttatttaaaaattttcattatagcatgaaataatccaacaaatgatgaatttttcattgttcattaaaattatcaccaaaaatatgcactgtccagcataaaatattttaaatataaaaaataaaatattattttttcgttcatttatttaatagacgtttagcaatgtaaaaaatttatagaatggagaaatatataaattttattaaacttatattcacttataatgttggcaaacaactgattgatagtctagacagacacttcttttcacggaaaaacaaaaaatatattcaatcgaatagattgtataataatatttatattataaaat

SEQ ID NO: 34222 - DNA, 1404 bp, Heterodera glycines
ttcagtaatttttttgaaattataagcaattttcttaacaaaattgcattaaaatactcaaaaattttcccggcggcgcctatcggcaccgccggaccattattttaccatatttttgaaaaattgatgttgttttattaaccgattttttttattgttttgactaaatataatctataaatattagatatttgattccttattattaaatttaaatgatttttcatttttggatttgctctcatttgaggagattttttattttaaattttctgaaatttaggttttataaatttctttgaccccgctcaaaaggtcgttgttaattttttttaaatagactctcatcctaaaaatttgccttttttgaaaaaaagagaaattcggttgcatttttttttttgatttattttttgttgtaatttatgacctttatatggaataaaaaacagaaaaaaaaaattaaaattaaggttcccaggcgaaatttccagaaaagatcatttgggaggcagtgctagcagctcaacgaggcattttttgaatttttagtgcatttattaaaagttttatttattaaaaattaataattaattataaacggaataaatgtaaaaattagaggagaagaaggactaatgtgaagtgaatgagtgaggaaatggagaagaggcgcgcgccaattgcagcagttttccaccacctccgaagaaaaatcgaaaaaatcaattgaaatgtttggcttttggagacgccacaaaaacaaactaaaaaaagcaaattacctaaaaatgcaataaaacgaaaaatacgcccttaagaatcggctctaaaatttcagaaaatacatccctaagaaatgaaaaatttctcaaaaatcatattttcttgacaagaatttttgattttaaaaattatgtgtttaaatattgatttggcttacttttgttgcttttttaaataaaattttgtcattttacatccctcgagggaggcggaatgtgatgccagaaaagtccacgaataaataccgctattctggaagttttggcgagatttgctgaaggcccatcaaaatggcatttttggaggcaaaaccttcacaagtgacgttaaatccaatccaatcctaaggcagaaattagttaattaggatataaatgcgaatattcaaaattttttttattaaattgcaaaattaaagccaaaaacatagtcaacttgctgagcaaaacatccaaaaccgaataaatattttgttattattcgcttaaattttatgtctctaatatgtaaggaaccgaaatattttttaagtgtttcggggctttatatataggtccactgcgtttgggcgctcacgtttcggctccagcctaagtttttggactataactttttctt

SEQ ID NO: 34223 - DNA, 925 bp, Heterodera glycines
ctttagagcactttctgaaaaaatatttatgaaacaaaaaaatcgattttttcaagtgtccgtttggggtactcaaacatttatggggagcaaaaatccaacgcagaattaaagtacaggctatagggaagctactcccgaaggattcggtctccccataaatctgggcgcatcggttcggggggactgccccgaaaacaaaaaaatcgattttttcaagtgtccgtttggggtactcaaacaattatggggagcaaaaatccaacgcagaattaaagtacaggctatagggaagctattcccgaaggattcggtctccccataaatctgggcgcatcggttcggggggactgccccgaaaacaaaaataaatcgattttttcaagtgtccgtttggggtactcaaacaattatggggagcaaaaatccaacgcagaattaaagtacaggctatagggaagctattccggaaggattcggtctccccataaatctgggcgcatcggttcggggggactgccccgaaaacaaaaaaatcgattttttcaagtgtccgtttggggtactcaaacaattatggggagcaaaaatccaacgcagaattaaagtacaggctatagggaagctattccggaaggattcggtctccccataaatctgggcgcatcggttcggggggactgccccgaaaacaaaaaaatcgattttttcaagtgtccgtttggggtactcaaacaattatggggagcaaaaatccaacgcagaattaaagtacaggctatagggaagctattccggaaggattcggtctccccataaatctgggcgcatcggttcggggggactgccccgaaaacaaaaaaatcgattttttcaagtgtccctctggggaatcaaacaattatggggagcaaaaatccaacgc

SEQ ID NO: 34224 - DNA, 897 bp, Heterodera glycines
taattttggttgatcaggaaaaaagttgttagcaacggcgtctaaaaggccggcgccgaagtgggcggttccccccaaacccatgttttttgatgaaatttaagacaaaacgccaaacttagtgaaattcttttgcgagattcttttcaattcaaactgatgaatgattaaaaaaaaagattttcacatggaccgtttattgttcaaaaattgccctaaaatcaaagattaaagatgttgaactatatattaaataaataaattaggtattaagatggaaaatatccttgaataattaattttaaaattggaaaatgataccatgatgtcttgtgtttgaccgtgaaaatgtttccaaggatttcgaggcgctttcatgagtctgaccgacattgacctcctcccccccccccccccccgattacgaaaatttggcttttctcatgaattatgagaagagattacaaagtatttaggtacgcaattaaattaaaagattttttaatcaaaatgcggatggagtacagggagctgatgagaaagcacatcgaaacgctcagagagcatatgaaagtgcgcgtgtttttgctgcacgccaaaaggaagggaatggcagcggctgagaagaaaaagtgccagacaaaattcaaagcattaatggacgaatttgacgaagccaaacggaagataaaggcggactttaagcggggaaatgcggacaaagtgcgaaatcgaagttaaatttaaattttaccattcaaatggagggaatgatggcgaagcattacgtggaaaatggccatttgcagagggagacgcgaatttttgcagcgaaactccaacaaattgtcaagggaaaaacgctgtcgcaaatgcgtcccgattgtacgttgtttt

SEQ ID NO: 34225 - DNA, 837 bp, Heterodera glycines
tacaaaatattttgagtggtagaacagttaaaataaagaattagacgatttttatttttgttaaattttccgccaatttcaattacgcggtgaagaacataaaatgtcatcaaataaaaattatgtgcctttgttaacaattaaaaatgtgtaaaggttcaaaatttgattaaaacattaaaaatgaattataattttcaatggtaataataacaaaattcgaacccgaaggacgaggatcccaggaaacgtggcttctcagaccgaagaacgactaaactgaggatatccacgccggaggagatccccgaaaacggaggcctccgtcgtccactccccgcctattacggcttcaccaatgcttgatccgccccctctatatccttgcccgttggtgtcctctcatcattccgcttcatcccttccattccgccagcatccgcttcatcttccgctgacatttgtgccaatcggacggagtccaagctgacgcctttggtctcgactaaccacagacaggacaccatcaagttgagcgtgccgagcagcacaaccgccaaataaacactcacagcccaaaaggagttgaggaagaccaactgaaaggtgcgactcggatgggagatgttaataaattaattagcaaattgggattcggatgggagatgttaattagctagctaaatcgggactcagttgggataggtaagctaaccgaaactcgttggaaattgttgaaaacatgaaaaatgttttggaaaaaatataaaaaatttcatggagggggagaaagccttagtgaacccaaacgacgcgacgcgttcaatggttgatgaa

SEQ ID NO: 34226 - DNA, 922 bp, Heterodera glycines
  unsure (1)..(922): unsure at all n locations
attgcgggaaattgcggggtttttggacccccgtaattgcggattgcggatttccgtaactgaggaaatctccgcnaattgcggattgcagatttccgtaattgaaaatccagttgcgcccagtcctggtctgggagcgagcctaaggcaaacgattcgaaaatggaatctttggaataattaatttaaattctaattctaattttaatttcggtccatatagatcagggatgtgatcagttcttatttataagaaatgttctgatttggagggttcaaatcttacaaaataaaaatgttcttatttgtaagaaatgttctgatttcgggttattgttcttattttgttcttatttcttaaatatattcaaaattttgaaattttatggcagaatgtcactattttatcaagaaaatataaggtttgcgcaaaatttggttattttttgacaaaaaactgttagcaaatcgcattaaaaattacaaaatttttcccggcggctcctatcggcgccaccggaccatctcccccttgttccccaaaagtagtcattttttcttctaattttcaaaattattcccttttcggtgggaattcaatcacaattttaacaattaaaatgagaaaatattgttatttttggattaaaatttgttcacaaaagtgaaagtgcattaaatttatttatttaattttatcaatcactgagttttttttggatcgacctagcacccttcaacactaacattactttgtcatgagttcgactccggctgacgttttcttttgaatttattattttttttctgattagttcaggatttatttgtgttcttatttctaagaaatgttttgattttggggaagtgccttattttaatctaaaagagggtaatttctgaaaaatttggctaatttcta

SEQ ID NO: 34227 - DNA, 1850 bp, Heterodera glycines
  unsure (1)..(1850): unsure at all n locations
cttcctttcagtatccctgcaaagtttggtgcgcttctcattagtttctgaaaaaaaagttaagcctaaactttttggcctgtttaaaaaggaattaaaaatttttaaaaattttattcatctccctttttgatagaaaaagcatcagagtgcctaaactaacatgtaaataaaatttggtgcgtttcagaaccctttctgaaaaaatatttaagaattaattttgcaaaaaataaataaaaacgaaagactcagattttcgaaaatttttttgagccagctagctcggcgctcatttcagtgtaagttagtcctttaccggggagtatccctgcaaagtttggtacgcttctgctcaattagcaaaaaatatgagtgatcgaattttcactaaaaaagttaagcctacattttttggcatatttaaaaagcaattaaaaaatttttaaaatttaataattttcctgcaccgaaggtactcactcggcctcttcgcggcctcgtggtgggccttcgcccccccccccctcccacgcccttcagagcacgacaaatatttcaacaaaaattttgaaaaattgactagagcaatcgaacgctaacggacgacctaatggaaaaaaatccccgaaggagagaatttaattaaatccattccttcgggggaccgtgccgggtgccgcggggtaagcagtgctggttcgtttcatcacggcaccgaaccttttggctagtcagcaatcgttgcttaacttgccagatcggacgggtgcgcatgactttctgaaaaaaatatttatgaaacaaaaaaatcgattttttcaagtgtccgtttggggtactcaaacatttatggggagcaaaaatccaacgcagaattaaagtacaggctatagggaagctactcccgaagattcggtctccccataaatctgggcgcatcggttcggggggactgccccgaaaacaaaaaaatctattttttcaagtgtccgtttggggtactcaaacatttatggggagcaaaaatccaacgcagaattaaagtacagactatagggaagctattcccgaaggattcggtctccccataaatctgggcgcatcggttcggggggactgccccgaaaacaaaaataaatcgattttttcaagtgtccgtttggggtactcaaacaattatggggagcaaaaatccaacgcagaattaaagtacaggctatagggaagctactcccgaaggattcggtctccccataaatctgggcgcatcggttcggggggactgccccgaaaacaaaaataaatcgattttttcaagtgtccgtttggggtactcaaacaattatggggagcaaaaatccaacgcagaattaaagtacaggctatagggaagctattccggaaggattcggtctccccattaatctgggcgcatcggttcggggggactgccccgaaaacaaaaaaatcgattttttcaagtgtccgtttggggtactcaaacaattatggggagcaaaaatccaacgcagaattaaagtacaggctatagggaagctattccggaaggattcggtctccccataaatctgggcgcatcggttcggggggactgccccgaaaagaaaaaaatcgattttttcaagtgtccgtttggggtactcaaacaattatggggagcaaaaatccaacgcagaattaaagtacaggctatagggaagctattcccgaaggattcggtctccccataaatctgggcgcatcggttcggggggactgccccgaaaacaaaaaaatcgattttttcaagtgtccgtttggggtactcaaaccanattatggggagc

SEQ ID NO: 34228 - DNA, 541 bp, Heterodera glycines
cagtatttttcgacttcagggtttgaaattggtgcatccttttttgagttctttgatcagcagctatcctgaaaacccttgtctgttaatactatcgatggtgccccccccccatttttggaagaaattttttttgttctgaaatgtcgtgaaaacatatttacgggggttttcagggtcgatgatcgcgaatctgacatccattttgccctatttcaaagaaaattcaaaattttgaaaattcacttttagttcaccccctaaatccgcttcctagttcactaagttattgctcacgaactgtacataaatgttgaagaattttttaagtcattgaattcacagcctttcttccatctctcttttattcgcgaatttttgtgtgaaatggactctgcaaaaccgatcgtgttttggaaggtcagcctaaatgaaaagccggctacagatgtagggcgagtcggtgaattgaaagctcttctctatgaatgattaaaaattggctaatcaaaaattctggggtgattggtttgtatttttt

SEQ ID NO: 34229 - DNA, 1027 bp, Heterodera glycines
aaattttgccattaattatgccattttttgatgtgggtcctgcttttctttcacaatatttaatactttcactttttggtgaccaataactaaatgccaaattttgctagtttttagtttggattttgcattttttaaaaaaattttttctaataatagccaaagagtgtcctttttggtgtgcaaaaaaaaaatttttctatcccctaagatttaaaaaaaaaattgtgagcctaaactaacaaatggcaccattttttctttcttccccatttgcatatcgttgttctacacacaaattgctcaaaattttctgaaaaatttcggcataattttgctttaatccttttttgaatgcttttttttgcttgttctttggccattgaatggcaattaaatatgtctaccaatgccacaaaaacaatacaaattgttttaaattttgccttgccacaatggacggtcccagcaggatttgagggcttggattgggtacagactgcaaatgctaatgacgagcctttttttgttggcatggcatacaacagctttttcagcgtaaatttttgggaaaagatgaggccgacgagcgccgcctttttgaaaattttggtgtatttgttaaaaaaaaacgagttcagtgtttgactttttacgccattttttgcggcgtcctttttttaatttttgggaaccgacgtaaaaaataaattgaaatttaaagacaaataaaaattgcttttgaaatttttaccattttttaactgattctcaccaaacaattgttaattttattgatttttggggaaaaaaattagcgaaatctttttgaaaattttgaaggttaggtgggcaaacaaggaaaaacgaaaaattttcagcacaaaattgacccctcctcctaggaccgtccctggccttgccagctataattattgctctccccaccatggggtggggatgggcgggcggcattcatttgcccatcatttccgtccgtccctctccaatccgccgtgttcactca

SEQ ID NO: 34230 - DNA, 742 bp, Heterodera glycines
gattgccaatcggcatgttcgggcaagcacgagtcggggccaaatctgcgcaaaaaatccggcacgggcagccccccctgcagaagcacctgaactgacatttgtggcaacatgccgcaaaatgtatctgaaaaattggccttgcctcgacataaaatgcgccgttggccaagtcttcgtgcgaagtcgggtcgaagaaggaagtggccaagcccgctcttccggctcgtccaatgcgatgtatgtacgtctcggtgtcagtttcgggcaaatcgtagttaatctaatgacaaataaaatgggaaaagtttctgatttggttaaatgatcgaaccggcaagaactgaccacgtgttcgacatttggtatgttcataccatgaactaaattaaagaaacatttacagtgactcaaaaaaatctttgaacaagcatatgttaaacgctaattaaataaatgcgtttgggcaaaagtctattcatttagtagctcaatatgtcagcttcagattcgcgaattatatatgaaataaatgtgatatggtcaaccaaatgagagatggtcaaaattctaacccaaaaagtttttgaacaaaagattattctacagtaactcaattttatgcagggaaaaattttgaaaaaatttccgctaagctaatttttggtgctgatcaaaaaagtctttttgggcaacttgatcagatcacttcttcatagtgatctgaaaaccgcaaatggct

SEQ ID NO: 34231 - DNA, 564 bp, Heterodera glycines
aaaaaaattatttttctgctatgaaaagttcaacccttgggtttcaggggcttccgatcgcgaatatgataccagataattgcaaaaaatcattgattttatcatgattttgaaaatcttagatttttcgaaattttgatcaacatgcgcaaatgctgcactttttcgagtgaagcaaccatatatgatcaagcactatttattaaccaatgagctgatcatagaacaatcggtacttccgtgctttgataccctcccctccccccactcacacatccagtctcaaagaagccttcctgtccgcacaatcttcctcatcatctcatcatcatcatcacatcatcatcctcatcatccctctcttctgttccattcatcttattcatccccccccccattactgccccggacccgccaaacgcccacaacctcactctcttccccgtttccactctcctcaccgcccattaataacttgtgtttgtccgtcgtccattggcgcggagaggaggcgagtaagtccatttgcatgaacattattatttttctttcacgagaatgaat

SEQ ID NO: 34232 - DNA, 576 bp, Heterodera glycines
  unsure (1)..(576): unsure at all n locations
atttttgaaaacgcaataatttggcatcagaaaatttaagaaatttgccaaaaaaaaccgtacaatccaaatttgtggacactgagctgcgtgatttcgagcatcagctgcacatggcgcagcaactcctttttggtcagcacatttcgcgagggcgtcgaatggtccgccgtttggatgagcacctgaaaaggcgtaaattttaaattcagtgcagataaaaggcaaatgcaaaatcaccttttgcatttttgaaaattttcaaaaaaaactggaaaaattttcaaaatttcatgattttttttctaaaatttttttttacaaacattcaatatgaggaaaaagacctaatttttaaatatcttaattattttcccggatttggattggtttaagtgcggcaaatactattttttggaaaattgggggagggtttcgacattctctanaaatttcgttttttttgggcacctcccgcacccccattcccacctgatacgatgaaatgggcgcttcgtcctcccgaattcgaacaacgttcgtcatatcctcggcaaaaagtgcgttgctcatatg

SEQ ID NO: 34233 - DNA, 749 bp, Heterodera glycines
tttttcccttttgggcaattttcaaaattttaaaaaaatgaaatttaaccctttcaaaagaaattggataaaaaaatttccagtcgaattgattttttttttggggtaaagtaaaaactccccgaaatttcatcatttgcaaaatatttttcctattgggggtcctcctatgtgcgttcccttttttcccgatccgtcgtcattttatgtcaaaatgttttcgccctttccgttttttggcaatgatttttcgcctcctattggcacttgtccaacccctcgagcccattggcaacagttgaagctgaactggttcaaaattgttttaataaaatgcgattctcgtgtttttctcatcagtattatccgtaaaaaataggaaaaccctaaaaatccaggctttatccaacgcaattatttttctgctatttgtgtgacatcattcgaaattcaacagcaaattttgctaattgccaaaaaatgaaccgacggtaagcacaaattcgtcatttatttaactaaactcttttcccatttcagttggatttgcaacgacgtttggatggacattttgcccagttttgaccatgcccaactcggcctcaaattggcacttctttcgccacgtttcaatgcgttggtggacaaacatttcgatggcaaaagcgaattgacaatttggagaactatcgaaattcgtcgcaaggacaaaggaccagaaccgaaactatctgtgtggatggatgaca

SEQ ID NO: 34234 - DNA, 652 bp, Heterodera glycines
  unsure (1)..(652): unsure at all n locations
gggcagtccccccgaaccgatgcgcacagatttatgggagaccgaatccttcgggaatagcttccctatagcctgtactttaattctgcgttggatttttgctccncataattgtttgagtaccacaaacggacacttgaaaaaatcgatttttttgttttcggggcagtccccccgagccgatgcgcccagatttatggggagaccgaatccttccggaatagcttccctatagcctgtactttaattctgcgttggatttttgctccccataattgtttgagtaccccaaacggacacttgaaaaaatcgatttttttgttttcggggcagtccccccgaaccgatgcgcccagatttatggggagaccgaatccttccggaatagcttccctatagcctgtactttaattctgcgttggatttttgctccccataattgtttgagtaccccaaacggacacttgaaaaaatcgatttttttgttttcggggcagtccccccgaaccgatgcgcccagatttatggggagaccgaatccttcgggaatagcttccctatagcctgtactttaattctgcgttggatttttgctccccataaatgtttgagtaccccaaacggacacttgaaaaaatcgatttttttgttt

SEQ ID NO: 34235 - DNA, 855 bp, Heterodera glycines
ttttttttaatcttttgaaaaaattgttatggaaatattaattctctcgtgttggggaacgggagaagttcgttttccccgcccaaatttttttttcattttcgaatttataacggaaccactcgaactgtaactcgaaaaacgtatataaatttggtattttggttccattgttcgaaattttacaagaaaataaaacgaaaaaatttttctcgctttttttcaaaattttatgatgaatcactaaatttttatcaaaaaattgccgtagtgcacccggggaaaacaaatgcatacattcgcaacacaacccaccacccataattggatgcattttgttaggtttgtgtcgtgcccggctccgggtttggccagcgtcctggcactttccatttccgcaccaccattttgccgcccattgacattttcgaggacatgctcaaccgtttcggcgccttccacaaacgctttttggccaagtaaatagacgataggcgaaattttttttatttctaatttaaaattttcaggtacaaataatatcttcgatgtgtgcctcccatatgtgtttgtaattattatgaatgatggatgatgtcacggtgttcggctgtgtgatcagagagattttttgtaataatacatatatagtataataatttaaaattgcgttatatccataatttgcttttaatttaatgactgattaattatattgtattgttattgtttgattatgtaatttcgagcatcgcgatacttccctttcctttaatagagacggaccggtcggtttttttcgatttcggtttttaaccgaaaccgttcgaccgaccctcttgtccggtctctagt

SEQ ID NO: 34236 - DNA, 728 bp, Heterodera glycines
gtgcgtgcgtgcgtgggtatgtgtgtgcgtgcgtgtgtgaaaattttggtgcaaagtgcatgtgatgtgcctgaaagtgtaggtgcaggtggttgttaagtgcaaatgtgtgcgtgttttcggtgcagggcagacacaagattaggtgaaaatgtgtgttatgtgcacgcgttttgggtctaggtaggtaagtgtgggtgtgtcaggtacaggttcaagtgtctttctttgcaactgcaggtgcaaataaaagttagatgcaaatgcatgtggttgtgtgcgtgctatggcgcaggtatgtgtgtgtgggtgtgtcagatgcttgtgcaagtgtgtttgtttgcaggttcatgcgttcagcgtatgtgcaaatgctgtgcgtgtgagtgtatttgtgcaatgtgtgagtgtctgcatgtgtaggtgcagatacgtaaggtgaaaatgcatatgtgtgagtgtatttttggtgcaggcatgtgtgtgtgtggtcaaatgcaggtgcaagtgtgtttgtttgcatgtgcatgcgttccgtgtacgtacatgcgtgccttctcatgtggtgttgtgcaaaagttaatgcaaagacaagtgcgatgttgtgcctggaagtataagtgtaggtgcatgtcaggtgcaaatgtgtgtatgtcagatacaggtgcaagtgtgtttgtttgcaggtgcaggtacaattgttgttttggtatgtaattgtaggtatt

SEQ ID NO: 34237 - DNA, 1003 bp, Heterodera glycines
ttgagtaccccaaacggacacttgaaaaaatcgatttttttgtttcataaatatttttttcagaaagtgctctaaagcgcaccaaattttatttacaacttaattttagcactctgatgctttagtatcaaaaaggaagatggagaaaaaaatttttaaaaaatttttccttatattttggttatatcgttttgcttttggtggggtgcttggaacagtggaatcatgcgcacccgtccgatctggcaagttaagcaacgattgctgactagccaaaaggttcggtgccgtgatgaaacgaaccagcactgcttaccccgcggcacccggcacggtcccccgaaggaatggatttaattaaattctctccttcggggatttttttccattaggtcgtccgttagcgttcaattgctctagtcaatttttaaaaatttttgttgaaatatttgtcgtgctctgaataaattattccttttattaattaaaaagaaagtttgaaatgtacaaggattgaatatttatttaaattgaaattaattttacaaattctaatttaaaaaatacaggagttctttaataaaagtaaataaattattattttaatttaaaacatttttcacaaaaaaacaatttaatttaaattaaaaaattttatttttattaagaaaaaaacactcttttaaatgaattaaaacattaaaaataacccaaaaatacatagaaaataatatacaccgcgcggattcgaacttggccccccccctcaaaatgatgcctcagaatccccaatcacacagggattctaaggtcttaacgatgtcagaagtaaaatctgatcacgcattcgtgatcagcagcccaaataacgcctaaagacatcttttttgaaggtttttgatgaaaaaatttttgcactcaaaaatcctgaacacccccctgtgggcacgaatcctaaaattccttttatttttttaatctttttttaaaaatgtgataaaaa

SEQ ID NO: 34238 - DNA, 1044 bp, Heterodera glycines
gccccctctttttcaggaatgttgaacgtgatcagtaaagttcgccaatttaggaatattacatttttgatagaggctaaggattgttcccattgggcccaatctcttcgagactggttcgagattgaatccgaggacatgcccacctgagcgcggtgtgcgggtagcattgggcaacaccggtgctgaactggcgcacgtactccttgttcagctgatcaattggattcgcaaaggtcgaattgaacaccagattgtgtacgcctctgcgcagcacccacaacggaatggtgaaggactcaaccagccggcattggtcgtccgcgctggcgcgcttttggctcgtcggacagccgcacagctcaccgccaatgcaaaccttttttaaggagccgatcataaatggcatcattttgcatttcatggcaattcttcactcattttgcgcagagttggcacaaatgccgaaaaatgatttgttgattctaatcagaatgttcgatcaaactaatcaattaatgttatgtggcatttgtaatcaacgtgatcagcagctgttccccccttttctgcactcacctcgccaagtgactgtttgcacacggcaccgttgcactgttcgcccggcggcgccggcttcgcgcatgggtccaacagcccaacatcggatgccacactcagacgaccgttgccaattgatctgacgggatcaaatggttcatcaatcactcccggtcctacagagttcggttatgcgaaaaggaaatttcttgatcttattaccgagtctcgaatttgtccaagggattcttggtccctcccggctcgatgaaataatttttcgcgaatggcacattcttgaattagctttcgttttttgttccaatcagttaaaatttccttcccccatcagcagctgatttacccattagagcgatgcaacgagctgatcagctgcttccaaagctcacagcgatcaatcggctcattgccccgatgcgttccgatggtaaaattgatcagcagtccgtccgaccatgaact

SEQ ID NO: 34239 - DNA, 1032 bp, Heterodera glycines
caaattgtcaggaaatgttcgtcgatgctcttccggcctcaattgtcagtctaaatcttacttcaaatcgtcttgttcggctgacaaaccgaatttgtcgactccagcaactcggcacacttcggctggaccacaaccttttcgaggaactgcccgaggatgtgagtatacaggggaaaaacgggagaaccctaatttgtaggactttctttgctcttcgcaccgatttttgcttgtaatttcataacagattttcaccaaaaaatgccaaatttttgcaattttgagcatttgacgaccatgaaaagttcgcccgttttccccctcgtttttggactgttttgggtcctcgaagttaaaaaagacgttttcaaaaaaaaatttccagctctgtctgatcaactcgttgtgtcatttgtcgctggtcgggctcaatcggctccaatttcttcccccgtctctttgtgttgtcaaatttactgcaccacgcttcattttgttggacatttctggcaatgaacatgcgccgttcatcaccgggcacggcacggctcacaatcaacattctgttcacaatgctgccaccacctcttcgacagttgtttctgttactgctccgccggcactttgtgaatttgctgctgccgcagtgcttaacaataagtgagaaaaatgggagcgggcaacgacgggtgtacttcatttccccccttgtcgtgccccgaaaaataaaaaaaaattttcaaacttcgaatttttaaataacaaaagttcatcaaaaaaaaaatcgctgaaaagtttttaaaatttgttttcttaaaatttcttactaagaaatttccaaaattttttaaatttccggagaaaacggcctgctcccacaacgggtatatccgctttatctcttttctccgatcctcggctttttttttgtctttactccattccccttcccaaaggacagtccctgacggatgttcgaatgctgacactgattcgtacatcatagtaattttaggcaaaaattgtgct

SEQ ID NO: 34240 - DNA, 1012 bp, Heterodera glycines
  unsure (1)..(1012): unsure at all n locations
tctactcaaacncggttcagaattcaataaaaataacattcacggtgcgaaaatggggtatgaaaagtttattgggggaaaaaaagactttacaaaataatacccctgggagaagggagtgggaaacatgacccctgggagaagggagtgggaaacatgacccctggttcagaaggaagtgggaaacatgatttcgaaattttcaattttttgtagtctaatctactcaaaccggttcagaattcaataaaaataacattcacggtgcgaaaaatggggtatgaaaagtttattggggaaaaaaagactttttacaaaataatacccctgggagaagggagtgggaaacatgatttcgaaattttcaattttttgtagtctaatctactcaaaccggttcagaattcaataaaaataacattcacggtgcgaaaaatggggtatgaaaagtttattggggaaaaaaagactttttacaaaataatacccctgggagaagggagtgggaaacatgatttcaaaattttaaattttttgtactctaagctactcaaaccggttcagaattcaataaaaataacattcacggtgcgaaaaatggggtatgaaaagtttattggggaaaaaaagactttttacaaaataatacccctgggagaagggagtgggaaacatgatttcgaaatttttactcaaacaggttcagaattcaataaaaataacataacatgatttcgaaattttcaattttttgtagtctaatctactcaaagcggttcagaattcaataaaaataacattcacggtgcgaaaaatggggtatgaaaagtttattgggaaaaaaaagactttttacaaataatacccctgcgagaagggagtgagaacatgatttaaaattttcaattttttgtactctaagctactcaaaccggttcagaattcaataatataacattcacggtgcgaaaaatggggtatgaaaagtttattggggaaaaaaagacttttt

SEQ ID NO: 34241 - DNA, 945 bp, Heterodera glycines
aatttttcaggttaattcaggtcatatagggctatcgaatgatagtaacatctctatattttgttcgttctaagaatgttttgatcagaatttgtgataatcaaaataattttatttttaattaaaaaatttatgttagaaattatttttgttttagttttcttgctattagtcgatagctctatgtgtcctctattagcctgcaaaatttcaaaaaacagttttttgttgaaatttttcatttgatggttttttatataacgcccattttgatgggttttattagagatcgacatttgaaaaaagcctggacctggattccatgttggacctggaccttgatttcctggacaaaaatccaggaaaattcaggtccaggaaaaatccaggttgccgaaaagagggcgcagaaaattgatccaaaaaatcgaaaaaagaaaaaattagaaatttaatttattttgtagcgcctgccgaaaattctaaaataaattagaaattaatctgttcctcataatatcacactctgtttctgggctcgactctcaactcgagaaattctctggccttttcataaattattgagccaattagcgaataaaatttaaaattaaaattaaaaataatttgctccactttagtcacagtgtctgtttccattgtgtgccaaatgaacagggcacaaatggcataggccggcacgagggcatacctttgggaaaaaaatgatggcaaaaatgccgaaaaaataattccaatcacttgacaagccaatgccgttgaaaaaggcgttgccaaatgtaaaaagtgaagtggcgattgtccgccagcaaatacgggtgctcaagtgtgaacaaatggacaattgagaacagtgaaaaagcaacaaaaagtgctgcagggagagcaaaacgaagaagcgaaacactgaaaataaattaataa

SEQ ID NO: 34242 - DNA, 552 bp, Heterodera glycines
attgttttgcttaaaagcattatgaaagaagctcaaaaaacgcatttcatttgaacgtcaaaagctgcgtcaataaaaaaagaaaaaaaaaacaattttttcggagtttttgaaaaaataattttggcaattggcattattaatattcagaatgccaaatattttttgtgttttttcaaaaaatctgtgacaaaaaatatttagaaaacaagttttttgaagttttctggccataacttttttgaaacacaacgaaaaatttttgaaattttgtcttctaattggctataaaatgataccaagaatgtttaatctagatgattttataaaaagttatggtcgattaaaattgttaaattattttatggtcctgtgaactgcagtaaagccaaaacgattcccattaagatttgcttgtttgaaaagataattcaagaaacaattatttattctggcatcaatctactgtataatcgcaaaagtgtgctaattgcaacaaaaaacgaacacctcggtaaacaaattcaaaactcaccctaaaaatttttattt

SEQ ID NO: 34243 - DNA, 1009 bp, Heterodera glycines
ccttatggctaaactaaagcctcggaggactgttatttttccttttttccttatttgtcaatggctttgtgcgcgctttaacacccttttgtacgaagtacttcctcggagggcaagtacttcgtccactacacaacaccttccaaccctctgttcggacgaagtgcttcctcagagggtaaacactaagtccgctacgtccctcgtgaagttatgcctcggaggacaataactacacgaaactatgaacactagacaagcctcagagggtccttgtctaggctctctaatttgcttttcccttcccctgtgtcaccgggattcgtcgagtcaatccgtggttcacagcaaatccacccaggagcgccaatttgtcccgattgctctgggtcgggccaaatgtgaattctaccggtgcggggtcggggcaagcagggacgaggaccggccaaatcaaacgccgagaattgattaagcaaaatttattccgggaaaaagcctcaaacttgggtaattaaacaaaaaatttgaaatggtgaacaaattatcacaaaattgatcacagataaaatgccatcaccgggggattaatcacaaatgaattggggaccgggatgggacaggaaatggagggcactggggccatagaacaaaaatcaataaccgggggtcaaagaatgatcacgaatggggttatcacagttaaaggcaaatggaagggaggggagagaaacggcaaaaatgcctaatgaattttggttgtgaaattgggggcatttttggccgcttaaataacaataaatttaaataaaaagtggcaaatgtgagcagaacaaaaatgggccgaaaattgggcacgaaatgaaaaacgggggacaaaatgaacagatgaacaaaatgggcggaaaacgggaaatttgggggatcttcggtcttttggagtttcattcccccgaattggggacgggggaaaaaaagttgggggttttgataaaatgggcattaattg

SEQ ID NO: 34244 - DNA, 738 bp, Heterodera glycines
ttactatttttatatagatctttccatttgtcacacctttccttcatcaaatcgcacagaaatgtgcaggggaacatcgttaccactgaagtcggccgacgtatggtggagattaatggtgaaactggaaagcgatttaaacttttgagttatgaggggtgggggggggataaaataattcttttagtatattgaattaagcctaattattttttgtaaaagccaattaatttcccaccggactgagtcttccgctgtttttcctttaacaattagcgtttgtcccggctcaaaaggttcggtgagtttgcttcggtaaggaattggctaaaaaatttgggatattttaaaaatgtgtttttgaatgattaaatgttacgtattgcgattcggcggccattagttcacttagggttaatttgtggatgtttgacggagttggggttgacaggtctaaaggaatacaaagataagaaattgagcctggccaataaaatttatcattatcagaaaatatgtcaaaatgagcgaaataattggaaaagggtaaataaaaagaataaaaacaaaaacagcggaggctaattatcgatcgtttgttgtttgtttgtacgctttcattgagggggacagagaaagaaagaaagaaaagccgaggcgaagcgaagtgagcaaaaaatgtgcaatttgtgcacggagcggaagaaattggaggagatagggaaaccaaatgaaaac

SEQ ID NO: 34245 - DNA, 729 bp, Heterodera glycines
tcattgggcgtacaacgacgccaataaattttaatggcgaattgcacaactttccaattgtaagcaaacaaatccggcaccgagaaatttatgaagattttggtccctaccgggagcacgaaaattttttctccagccaaattcaaatccgccaacaagctgcgttagcgcggcagcaacaaaacgcaaacttcggcgtaagggatgagtctttgccatgcgaacggcaacacaacgaattcgtcggacgacatctttttgaagatggacgtcaaatgatgcacccaacggagattccgaggcaaatgcatcaacaaccaccaagagaagagcttggctggcagcaaccaaacagtgttttgtaccgtccagtggcgcgacagcagcaaaattttccggtgtacgaaaatcaagtgcagccgccccaaagcgaaaatttagcggttttgaccagtctcgaatataatatggtccttgaaagaatcccagacctcaacggaaaggaagggacggacgaagtcaagcgttttttcaaaaaattcgacgcttataccgacagttggccgggtggaaaaagaattaaggcgcttgaaagtaaagtgtatggccgagctgaaagagcttttgaagcggcgaaagcagtcattccgataaagtatgaactgctttcgggtgaaatgatgcgacaattggaagaaacggactcaaaaaacttgaatgcttttgatg

SEQ ID NO: 34246 - DNA, 942 bp, Heterodera glycines
  unsure (1)..(942): unsure at all n locations
acggagggggggattcccccgggagacaggggaccccacccctttctctcgtcacagtccaatcaaacctttggggcattttcnnccaggaatgcaccgatttttcactttatcggaattgggaaggccgtaagtaattacatttgctcatggctttcgccccccccccctatttaattctttgattttttcccgaactttgttgatttttgctctgttgtgcctcaccaaaattaggggacaaagggacggtcagccgaaggaatggcgaagaacggcggaggcaaagaacatcatcatcatcacgccttaatctgaccgatttggctattcctccacatgaatgagttcacctcgaccctttttgagggggcggaggcaaaggcttatttaaatttggatggaaagggtatttaaattggggatttacatttgacttccccccccccccactaaatgcttctttcattttattttgtcttattttctgaatacacaaaatatcattgaaactgagcgaagttacaatttaccaacgctacacaaaatatttttccttaagcatcggcaatgctttgtgtaaatttaaacgatgaaaaatgcccaaacttctccggcgggtgggaattcctttcataatgaacatttagcctctttattctttgagagaaaatatttaattttatttaaattcaattgtttaattcaatcattcaatgacttttgtatcccccattcctttcacttttttaaagttttatttattgtattttaattatttcgtccgccgtcctttgtttttttttgaatttgatttaaaaaatttaaaaatgagtacctaataacatttaactttatttttcagtccatgttgacgaacatacgtccgaccatcgaatgtttgggtgggcatttccctcctccgccattcggtgggattga

SEQ ID NO: 34247 - DNA, 1449 bp, Heterodera glycines
gggggtaattaattaacgggatcgtcggtgaaaaatttcgcgcacttaaaattttaaattggtttggctgaggggggggggcggcggtgtagaggaagtgtgtacatcgtgaaaagagagagtcgtgccgaggagagggagtggacggcgtcccttggagaggcgtgcctaggaaagggagtggacggcgtccctagggaattagttgaagcgagcgaaaggagggtagagagtcaatgtgtcaaaggtaataatccgtgcaagcaattgaatgatgtgttgataaacatctaataataacatagcgaaaatgcccagatgtgaataaataaattgttaggaaagtactgcggattaacggtcagggagttgtagcaatggagaagggaggggatatggcccagatcgtcagagtttggccaacattcttcaaaattcctcaccaaaaaatgaaaggctggactaaatttgacagtttcatttgccacgaccacctgcagtgtgttagaccggtttcttatttgaaaccggtcttatgtttgcacaaaagtatccgtaatctaacggatttcttgagccgaggactaccggaaacaacaccaacgacagtgccgactccagcaaatgcaacggttgcatcgactacaacaattgctgcaacatcatcatcatcaaccaatttgcaatattggtggtggtctgcattgttttggttgcggttttgtgtatcgcacaggtcggtttcatttgattattttgtaattttgttaataaatttttgtactctaccaatacaggcggtgcgtttcgcattgaaattgcgccaatggttggcccatctcaatgctctactgctttgatgaaatgaacgcggcggtaccggcgcttcaaaaattcgggagtcgatgtgtatgcgggagttccatccgaagaattggtcaagcgtcttcctaagcccctcttgataattctcgatgacctaatgctgtctattgatgagaagtatttgtccgatttgttcaccaaaaagtcacagcatcaacaatttgcggtgggtccgtcacacaaaatttgtttgaacggaagattaaagtggcccgcctgtccgctcaatacctggtgttgatgagggcgccaaattctctgttgtctatccgtaacattggtgttcttctcttcccccgtaagctcgactttttccttgatgcctatcgcaaagcgactgcccgtctctatggctaattgttgattgatatgcatgcccgcgtccgatccatcgctacggctgcgaaccaacatatttaaggacgagcaggaggatgaagacgaaggaacagttgtattcatccccaaaaatggagcggcaaaatcaaaaacaacaacaacaagcaaaaaattggacatttgattaaagaaaatttgtgattggcttttgggccttggccagga

SEQ ID NO: 34248 - DNA, 520 bp, Heterodera glycines
attaaacgttaaatttttctccgcttattttttaaattaattttggccaaataatagcttgactaccattattctttgaaaataaagatatgatattgtagtcattttttgggtttaaaagtgaaattttttggcacaaattaatagtttaaaataatggaatgacgatttcttttatgaatatattaattatttttaattaaaaaaatgtcccatttccatgcttttcctctgattgttgcttatttttgaaggaatattatacataaataatatttcaaggtatttaatttatctaattattttcattaaagtattttatttttgtatgctaatcttttaattttacttggcatttgcattaaaattaagaatactttactattgaaattcacgatttaaggattatttaatctaatttttcaaaacaaaaagtaagagaataaataacgaatgatagaattaataaaaatacttgaaacatcgaaaactaacaaaatattcattggaacattaaaaa

SEQ ID NO: 34249 - DNA, 1340 bp, Heterodera glycines
  unsure (1)..(1340): unsure at all n locations
tcgctaattaattggcaaatatcatttttaaattttttaatggcacnaaaaaataagctcaaaaaatcagagaaggaaacaaaagtcatcgaaattaaaatgtgaaaatatttttattttattttagcaaatttttacgttcacaaaatgctctgtttcccgttttgtgtaagtgggattaagcggcacgtaaatggcaccaagccgaaggacagccaaataaagtgccaacgcgtcaacagtttttgaagttcgacataacacagtgtcacccttctgaatttgaaaaagaaaaaaattaattatatctttgatatttaatttaaataaaaataataaattttattaattaaaatttaatttaattgattattttaattaaaatgtaaaaaggttgattaacaccaaatttatttaaatatttatatccaaatgaatgtatttatttacttaaaataatgtttgaattaatcaatttattaattcatttaatgaaaattattttttgtttatttattttttggtaattaaataatatttttgtaaaatttattttgctaaaataaatattttttgattttttaaattaatatttcgcattttgtcttcttctctcccacctgaatgccgtactttttgttgagcaatgccgcaaaacgtccggctgccacgttcacgtcgttgtaacttcgggagctgccgtttttgagcaacaacagttttttagccgcgtactgcttggagtcagtggaggcagtgaagcctgccaactcgacaaagttggacgatcgccgaatttggcattttgggaaaagagtggcacaaatttttggcaatttttgtcgttggaaaagcatttaaacttttgaaagtgcgcctaaattggaaattatttattttgagtaaaagatttaataattttttttaatggagaaaaaatagattttattcattaagaatttatacattttgaagattaaatgttcaaaatttaataaaataaatagtttgaattggaaaaatatatttaaatttatgagtaggatttaagagaaaataaaaatttaacttttaaaattaatttttaaaatacattaaaatactgatttaaagtttttacatttatcatttttacgcatttatttttgaataaatgcgttagtaaattgaattgattaaacaaaaattttaggagaaagaaaatgtaatttaatattaattgggtccatcaaaagatggccaaattaaatggtatgattttgtaaaagtgaaaaacaaaaaggaatttttgataaaatatatggtaaccaaaatttaagataattaaatggaaaataaat

SEQ ID NO: 34250 - DNA, 217 bp, Heterodera glycines
cataatagcaacagacacaacttataattataaacttcctctcaaaaaaacaacatcacaagcaaataacactcacttattctatttgtacataatatatcttctccatgtcttcttcctttttcttcttcgcttctcttcatcaaatggcgttgctcttcgaagggtcgcctttggttgttggtttaacttcgcgcaaactcgtcgcattggaacg

SEQ ID NO: 34251 - DNA, 1115 bp, Heterodera glycines
tgtcatcaaacaatgggctctgcagatcatacataattcatgaatatgatctctccagggccaggccaagcatctaaatggaaacaaaaagttgtaaacatatattcatcaaaagaatattagtttgaatctatcccgttttcaaagtgctttaatggaaatagtactccatctatttccaaaacgttgcaatgatggtaaaaaatcaaaagactttggctaaaaaagactacttatgtctgtttatgagtgtgaaattagagagatttatttttgaaatttgaatggtaattgttttaaactaattggaaactcttaaattgaaaattgtatatttaatattaactagcggggtcagcgccttcggcgcatcccccgctaggtagtacgattgtattataggattatgaatgataaaatcgactggctcggccgcttcgcggcctcgcatccttttcttcccttttacatttcaatcgccgggactcaacccaacagcattctaatcacagggactcaacccaccagcattccaatcactggcactcaattctcctacatttcaatcactgggacaacccaccaacatttcaatcactgggactcaacccaacagcatttcaatcactgtgactcaacccaccagcattccaatcactggcactcaattctcctgcatttcaatcactgacactcaattctcctgcatttcaatcactggcactcaattctcctgcatttcaatcactggcactcaattctcctgcattccaatcactgagactcaattctcctgcatttcaatcactgggactcaacccaccagcattccaatcactgggactcaacccaccagcatttcaatcactgccactcaattctcctgcatttcaatcactgcaactcaactctactgcatttcaatcactgcgactcaacccaccagcatttcaatcactgcgactcaactctcctgcattccaatcactgccactcaactctcctgcattccaatcactgcgactcaacccaccagcattccaatcactgcgactcaactctcctgcatttcaatcactggaactcaactctcctgcatttcaatcactgggact

SEQ ID NO: 34252 - DNA, 572 bp, Heterodera glycines
gttgatcaaaataatataaaaatgaaaaaattgataattttttgaatttttcaaaaattataagtacagtacaaataatgaaccagtcttttgaaatttaaacgaaacacaaaaaatgtaagcaaaatctcaaaattattttttgccgcaatttttaaagctgactttttttcaataaatcaccggcttaaacattagcgcccaaatgattcaatgaagtgatcagattttttattcggaccatggtttctcataattgcactgattgatttgatttggtaatttattgttaaatattttgatcagctcacacattccttcattggaggagaacaacaaaatgttgttgaacgtgttggaaatgggcacccaaaagaacaggaacaagttggtggtttgtgttgttatgtgtttaggacggacaaagcacaaaatggccaaaaaaagcttattttggataaaatgtattttgaattgcttaacaaaaagtttatatatttttgaatagagttgagcgggaccgggacctgaacacggacaactgagtaccgaagtcccggctttgaccggga

SEQ ID NO: 34253 - DNA, 725 bp, Heterodera glycines
gtctccccataaatctgggcgcatcggttcggggggactgccccgaaaacaaaaaaatcgattttttcaagtgtccgtttggggtactcaaacaattatggggagcaaaaatccaacgcagaattaaagtacagactatagggaagctattcccgaaggattcggtctccccataaatctgggcgcatcggttcggggggactgccccgaaaacaaaaaaaatcgattttttcaagtgtccgtttgggttactcaaacatttatggggagcaaaaatccaacgcagaattaaagtacaggctatagggaagctattccggaaggattcggtctccccataaatctgggcgcatcggttcggggggactgccccgaaaacaaaaaaatcgattttttcaagtgtccgtttggggtactcaaacaattatggggagcaaaaatccaacgcagaattaaagtacaggctatagggaagctattccggaaggattcggtctccccataaatctgggcgcatcggttcggggggactgccccgaaaacaaaaaaatcgattttttcaagtgtccgtttggggtactcaaacaattatggggagcaaaaatccaacgcagaattaaagtacaggctatagggaagctattcccggaaggattcggcctccccataaatcttgggcgcatcggttcggggggactgccccgaaaacaaaaaaatcgattttt

SEQ ID NO: 34254 - DNA, 1391 bp, Heterodera glycines
gttttaattggctaatttcatttgacactcacatcgacccaagtgagtcctgcttttcgccgtgctttccctccacaacaatttggttgcccacaacagacacctgaaaatgggacagttttattgataaacagctttttttgattatatttccgcctgatcagtaaataaaaacatgaatttgaaagattattttataaaataaagggatttgaaaaagcagtctcgagagcctgggacctttttttgaaatctctagactcggtgaaagtatcgctagaaaagcgatcagaaagaatttgtagtaattattatccgatcagttaaatcatgactgattacgaatcactcactgatcactaatttcgttttttcacttctatatacctcatctcgatcaaatgacgtttgctgatcactaagataaactgatcagagcattttttcactctgatcgcaactaggaaaatgccacggatgaatgcattatctaccttcagttcttcgggtgcaaacatggcacagtccatgctgaccgacagactgtcgtcagacgagtggaacgagcccgaggtggcggtgccgaattggtagttgtggggctggacgaaggtggtgccggtgcccgtgccgagtccgcccaagtcggaggggaagccggagccaagagtggtctgaaaagggcatggggaagaactaattgacgataattaatgctaatgaagccacaattgacagtgcgaatggtaatgacatgaattaactgtacaaaatgctaaaccgacaaaatgccatgatttaatcctcgctaattaattaatcatattaatttttccaaatccagtctgtgaccaatgaatatgatcagtaagtggagattaatctcaatgactgatcaacccaattttataatgcgatcagaaacaatcagtgagttgcctttttatcgaaacttcataatccaactaattgaaattcttcctaaattgttttgatttattttattttttcaaattattttgttcaattgccttgattgtgttcagtggtgatgaggtgaacatccgcgtggtcattgtcggcgtactctcttcgatcactttgcgttcgaaagtgcttaaaaagggcagggcaattaaaaaacttaattagttaatttcaattttttaaggctcaatcggcaatcaaagtgccaaatctgtttggcactttcggagccgggccaaggccagggatttccccagccaattttccaaccgccaaagcgtcgcttaatttggcactttcacccactttggcacaaaataatgttttttttttaaattccttctttgcagcactcaccgattataggaggagctctggttgaagctgctgctcattttgctgct

SEQ ID NO: 34255 - DNA, 627 bp, Heterodera glycines
gggcgaggatacaagaaagcaggggagggagtgagataaggggagggagacggacagaaaaggagagagggagtgagataaggggagggggggagggagacggacagaaaaggagagagggagtgagataaggggagggggtgaggcacaccgttacagaaatttatattgattgtctgaaccgctttggagagattaaactagaaaattttgtgaattctgaaatcatggttcccactcccttctcccaggggtattattttgtaaagactttttttccccattaaacttttcaaaccccatttttctctccgtgaatgttatttttattgcattctgaaccgttttgagtagattagactagaaaaaattgaaaattgtgaaatcatgtttcccactcccttctcccagcggtattattttgtaaagtctttttttccccactagacttttcaaaccccatttttcgcaccgtgaatgttatttttatcgaattctgaaccgctttgagcaaattagactagaaaaaattgaaaattttgaaatcatgtttcccactcccttctcccaggggtattattttgtaaagtctttttttcccccataaacttttcataccccattttt

SEQ ID NO: 34256 - DNA, 795 bp, Heterodera glycines
atcaccagtggcccgatctgtgcgttttggtctgtcggtaatgaatttaagaatcagagcgcacaatgtccacactctcccttctttctctttctctccctccactctctttctctctgtctccctctctgtttctctccatttctctctctctcccccatcctcttccttcttcctcttcctctccctccactctctttctctctttctcttcctctctgtttctctccatctctctctctcccccatccgcttcctccttcctcttcctctccctccactctctttctctctctctctccccatcctcttccttcttcctctctctataatttttactctctttcccctctttctcttcctctctctttctctccatctctctttctctctctctctctctccccccatcctcttccttcttcatcttcctctcattttctccctctctttcttcccctcccctcgccctttctctcctctaaattatttaattcttttaattttatattcctatttccccgtcttttgtaaaggccattgactgtgccgacgagcaaattgttggtgccattttgtgcaagttggaccggaatgcattggatgaacgggactgcattttgtcacggggtccgtgccatgaattgggcgtagggatagaatggacctaaagtgccaaaatcagacttgaaacgaattgtttttctcggcaacaatgcaaaattttcgtttttttttttactctctttttatccttcaggctacatcggcatgctggcggtggaggagtcctac

SEQ ID NO: 34257 - DNA, 955 bp, Heterodera glycines
aaattaaaaataaattgctttggtagcctagagcttaaatttttatcagtcatgacaaacaattaaatttaaaaaaaaaaactcaaaatagttctacctttttccctaacattgtccgtaatttgctgttataaaactatggatccgaaattaagaacgagcaactatatactatatttatcaatggaagcttaacttcttaaaaataaaattgttttattactttcgatgtttattgcttaaggtgatcagtagggctgtcaaaaatatggatataaaatcgcaaaatatgggcataaatgccaaaaatatgaaataaatcgcgaaaatggataaatatggaaaatatgttcaagttggaaaaatcaaaattaaaaaaggtaacgcaatttttggaaataattattttttgtttttttagacagttcaaccctgaaatagtggtccgcaaatgtcggtccgcaaatgtcggctaaccccaacaaacaccttgaacatccaatcatcgcatggcttgtcacagtccttctcgtcactgccatcgccacagtcgtcctgcccgtcgcacagttggaatggccgtgtgcagttgtggttgctgcactggaactcgcccacagggcaaatccggtcgccgcacacctcgcggcccggctcgtcatcaccggccgcacaatccttctcgcctattattaaacataattaattaagtagcattaattatgtagccctattaattgcattatttcataatattagcgattgcttctgaggaaagctatgaagattttttgttgcttttttttttttttgaaaaacagtactaattgtctttttaccaagtaaagccaacccctgacaggcgatgccacattaaaatattacaatatctaataatttttaaagaaaaaagacatctttacctaagtcaaaaccttaaataggtattatggaa

SEQ ID NO: 34258 - DNA, 826 bp, Heterodera glycines
  unsure (1)..(826): unsure at all n locations
agcggaaaagagtgaggggaaagaaagagggggaaagagagagcgggaaagagagagagcgggaaagagtgaggggaaagagagagggggaaagagagagggggaaaaagtgagcgggaaagagagagagcgggaaagattgaggggaaagagagagggggaaagagagagcgggaaaaagagagagcggaaaagagtgagggggaaagagagagcgggaaagagagagagcggaaaagagtgaggggaaagagagagggggaaagagagagcgggaaagagagagagcggaaaagagtgaggggaaagagagagggggaaagagagagagcgggaaagagtgaggggaaagagagagggggggggggggggggtaaatggcaaaatttaaatgtcggaaaatctcaaaattgttaaccaatagcgaagaaaaaattatggaaatgatttttaggtttttacttatttttctgcgactttaattcaatgagaaaagcacgaaaaacacatttttagaacgaaattcttcatttgaacgcccctttggcactttcggcatttagccccattttcgcctctattcggcatttttaaacattttcttacccatgaaaaatatacacccataaggaccgaccgcttcaaattttttttaaagttgaaaaagtaacaaaaaaatttttagatttttggataaaaacaattaaaaatttctcttttaatattgactacaaatgaaaaaaccgaaaaatcgaattttctataagaaatcttttttttgctttttatagaaaaaagatgnaaatttaattcatttgtaactaaa

SEQ ID NO: 34259 - DNA, 713 bp, Heterodera glycines
cctggacttgaccctgggtttttttccatatttgacatggacctggattttctggacaaaaattcaggaaaaccctggtccaggaaaacccaggttgccgaaaaaggtctgaggattcaataagattttccagccctggctggatccaggcccaggtcgagcttgaaaaaatacactcactgtctactaacaatttcacgcgttcgttacgcgcgctctcattaaaaacagttctcttgtgttttgatggcaaattctttatcatttctccaaactctgttaagcattgtttagcctgaaatttaaaaatattttttaaaaaatattattcccaaaattgttaattccaaaataagtttttttttttgcgctttggtggagcttcaggatgaagcttggtgggcatttcctctctttttttcgtagtggcttatgcccatttatttggtccaattttcactcaaaagttcaattctcatctctaaaaagcaaataatcctttctgtttgtttttttaatgaattttttatcgaaaacagtgaatcggggcatagtacaaattggggcttttttttacctgttttaactgtccaacgggttaatggaaaatgcatgaaaaaccaattttaaattcttagaaaaattaaaaattttgaaaaaaacatttaaattgatcaaattctttaaaaagtgattgctttgatgttacaaac

SEQ ID NO: 34260 - DNA, 969 bp, Heterodera glycines
  unsure (1)..(969): unsure at all n locations
aggcatttaattaagattttcataaaaaattttgctaaaaagattcttaatatgtgcaaaagatgtataaaaagtaaataaaagttacaacccttctgcttcacatagtcctcaaattatgtttttatcgaaaaataaaattctatgcaggttagttgggtttcactacagcactcacaacaaacacaggccttacgctgaataatttgtattatttttctcaacaaaaatttttgctttttagaatatattaatttgttcttgagaattctttcgcttcatttgtagttttgtacacagtaaacacactttctaattgtcattaatggaacttaattattcaaaactgggccaagaagatgcctatttaagctgcaattatcaaaaataaaataattttctttggttttcccaaaaatggcatattttgctccttttccccccatttgtcttttccatttaatttttattttccaattgctcggccccgttttctgtgctaatgtttatttgaaaaagcaatacggtgagaacgagttccgtattgagtcatggggcaaaacgaactgttcactgaacggaattgacattgtgcagcttggaattggccgaccatgtgaagaatggccagattttggtaaaaagacaattaaaaaataattagccatttataattaacaaaaaaaataaataacactttataaatgatttttaagcaaccattttctgtgatggcaaaatacttgaggtaataattaagaattattaattaattacgtttacgtaatttattaggcagtgaattattggggcgagcgaatgcttttcatgcgcgactcaaagcatttcgttgaccgtcctctgctngaagatgccaaaaaagtggtcgatgaatttanaaccatttttgatgtgacggaatggaataaattcgtggtcagcgaaatgaacgaagcgcaagtggacaaa

SEQ ID NO: 34261 - DNA, 796 bp, Heterodera glycines
  unsure (1)..(796): unsure at all n locations
attggcaatcagttaaatctaacggagttataaaaaaacaattaaaaaaatataatttactgttttgaaaagaaaatatttgttgacccaagtttcgttttgttttttttgctgagtagctgtacacatagaataaaaaaagattgctaaaattgttgtattctttagcccaaatttattggtgtttttgaccattgatctcaatttcttatggatttttcgtgaatctgagggtaatgtcacacaagagagtggggctaccttggcatttgagtggtctgcgctcaaagatggcactttgctcggcgaaccattccaagcggggaatgcacccattgcttacgttgtgcacagaaagaacaacaaacagttcgttttcataaaacaccttctgctgttgtaaataagaacatttttgctttcctttgctcctccgtttcaccttttttcttagcaaagtgccgttttttaacattttttgctggagccatccccgatgaacaattgcccgttggggctgttgcggatgctgcggtgtcgttgtccgctccatttgtgcggtgtcctctcgcttttggcgctttatgcaaagctgaaggaaatcgacggaatggcgacccatcggatcggcaatcgacgaaagaagcactccttttttattatcaatcgctcatttccgcagcatcactccacggaataataaaaataatcgcattcgttcacattctgtcattacatcgttcgtctgtttatttatgtcagagggaatgtctgtcgaagacattanaagtgacta

SEQ ID NO: 34262 - DNA, 917 bp, Heterodera glycines
  unsure (1)..(917): unsure at all n locations
atttcacccaaaattgaccataaatcgtgccagatgtaaaatttcgggtctatttcacttcaggcgtcaacaaatgacctcttcaataataaaatttcaaaaaaaattaaaaaaatttaaagaattttttgaaaatttttttggtaaagtgcattaaaacctagtaagtaattctccataaaaagaaaaaaatttctttcttagatatttgtggaaaattttttaagattttgaaatttctgtttggaaataaaaaaaatttgcgattttgagcaaatttttaaagaaaatcaaggatttttagggtccggcggtgccgataggcgccgccgagaaattttttgaaaatttcgatgcgaaattgtataaaaatgaagaatttttggctatatcataaaccggtaaaaaccggtccaaaatgccggtttccggaccggtttggcattttcaaaatgaccggtttccgggcccggcctctcaaaaaccggtcaaaccggatttttccaaaaaaacgccggaccggtttgctgggcccggtaaaaaccggtaccgggcccggtccggtccgctctctacatttcagcgatttcttgaaattttttttgaaaaactagttcgtcaaaaaaatttataagatattttttttagaatttgttagaagaaaggctttattttaaaattgctatttcttctanatgtgtttttaaaaaaaattttttttttttgaaggtatggcttaaaaattgggcaattacttctcttatttttacacttcattttgtttcacgttgcagggtcaacgatgttcaaattcgaattgatgagctcaatttgcaatttgtgtaccgtttgggagtgatggcggacaaacattgggaatgtaagttgggcgtattgtctttacatattaaaacatt

SEQ ID NO: 34263 - DNA, 981 bp, Heterodera glycines
  unsure (1)..(981): unsure at all n locations
catttgtatgtgtataaaatttatcaaaaaaagagatagccatttttctgggatagagtataaatttaaaaattccctcaaaaataaaaggtctattgcgcaccgccctccctatcatgctcgagagcatttgtatgtgtataaaatttatcaaaaaaagagatagccatttttctgggataacctctaaatataaaaatcctctgtgaaataaaatggcgattgtgcacagccctccgtctcatacgcaagcgcttttgtgaggtataaaatttctcaaaaaaagagatagccatttgtctgggatagagtataaatttaaaaattccctcaaaaataaaaggtctattgcgcaccgccctccctatcatgctcgagagcatttgtatgtgtataaaatttatcaaaaaaagagatagccatttttctgggataacctctaaatataaaaatcctctgtgaaataaaatggcgattgtgcacagccctccgtctcatacgcaagcgcttttgtgaggtataaaatttatcaaaaaaagagatagccatttttctgggataacctctaaatataaaaatcctctgtgaaataaaatggcgattgtgcacagccctccgtctcatacgcaagcgcttttgtgaggtataaaatttctcaaaaaaagagatagccatttttctgggatagagtataaatttaaaaattccctcaaaaataaaaggtctattgcgcaccgccctccctatcatgctcgagagcatttgtatgtgtataaaatttatcaaaaaaagagatagccatttttctgggataacctctaaatttaaaaatcctctgtgaaataaaatggcgattgtgcacagccctccgtctcatacgcaagcgcttttgtgaggtataaaatttcctcaaaaaagagatagacattttctgggatagagtataatttanaaatccctcaaaataaaagtctattgcgc

SEQ ID NO: 34264 - DNA, 543 bp, Heterodera glycines
tactttttcacaagccgaagtaaaaatttttttaaatagtgttttgtctattttaccagctttatccggtccccggattcttaaattggatcgagaattttttcccgcatttacaattgatttcaaatcgctttgtagggattccagagcccgaaaattatttgatgatttagaaaaaagatatgagcgttcgaaatttggattttcttataatttttgtattagactatagacaataatgaattcactatagacaggtgcagaaaatttttctctattgatatgcaaaatttgaagcggatttaacatcagggaaaaaaattaaacatcggctaagcgaaggagaggtacccaagtgaacatgtgactgccgaatgaatctttcagggtaggtagattaccccccccctttgtattataaatttttttttatttttgttaaatgaagcttctggccgagatatgaagcttttccactttggccttttctatatcattttcaaagaaagtaaagagcaatgtgagcgtcggtgacctggtggt

SEQ ID NO: 34265 - DNA, 1432 bp, Heterodera glycines
  unsure (1)..(1432): unsure at all n locations
tcattgattcccctccaaaaatcttttattacggatttgccattttgttaaaatttaattattattattttgataatacattgttatttgagatgtttaagtgtacaatcttgatgattgagaatggaatgtaagtggaataattagaattaagtgataatttttaattcatataattttttggctttttaattttatgaattaaaaaaattgttaataaatataattaaaaaatgtaaattcaataaaaaaaaatttaagtttcggagtatttaacacattttaaatggtttaaattaaagtcttttaaagatgtaaagaatccgtcgtggtacaattttttcttgactcgtttttaattgaaaataatcaattaaattttttgaaaaaatctaattttttatacaaaagtttttaccgtccctggcgggattcccgttaataatttttttttcattttcccgttctcggaattttttttaccagactacttttatctatcagtttcattataggcacatttggagggagaaatatctgagcacagacaaatgtacatggacttggtaaacttcgctaatttaaaataattaaatggaacaaacagagcaataaaatgtggagaagtgtaatggagcaaaatgaaatgattcgcttggaacgctccgtcggtgtaatccgtcggcgaaggcaatgtaagcacattaaatggaagagattgccttgggtccaactagagcccggaaatttcaaatttgcggctctcgctgcgggattaagaattcaacaattttcggaaaagatcccccattttccaaaagatcagggattgcggactgggaccccgcaaaattctgcgtgggattctatccgccctcggggctctaagtccaacaattatttttttctcaagatgaatcttctccaacagccgtacccaaagtgtcatcgtcgtgcccacaggggccaaaaggcagtcccggagaaagcggggaaccgggttaggcttgaacaaggcattcttctgaccaaggccaattcaggcttggatggtgagccaggttctccggggtcgctcggtttaagccctgcggcagagcccccatcggaaaacccatatggggccggaggaaatggtcagagctgtggaaaatggtgaattgtcatggatgaaagctttatcagtgtattttcagcccagcaggacctatgggattaccaggcattccaaacaattgaaaaaataatttacgaatgtttaggttacaaaggaaaacgagggacacgtggagaaaaggggcaaaagggtacgacaaatttagttacactctcacaaacgattacttgagttgaaggtgctcctggcatgcctnggaagggacggacagcctggnggatgaagggccccggaggggggagaacggactgcccg

SEQ ID NO: 34266 - DNA, 821 bp, Heterodera glycines
attgaagacggaataccgaccgaggaaatgacaattgtttgatttgttacacaccaccgacagcaaaagcaaaagaaggaaatggcaaccagagaaaaagggttattgaaaagaaaagtttattccaatatttattttttgtagtcatccagcagtttgggcgagttgaagcgatcggacagtttgaccaaattgaaggaggaattgggcaacgaaccggcaaaattcacggagcacggcaaaatcgtcgatatccaggagccggtcacttacagaagtgaaggtatcagtgcaaacaaactctttatcacttaattgtttgtttttaacccggtagggtccatcagcggtcgtttgtcctccaacagcagttgggaggacgtggaaatgccccaggtgaaagtcgccgccatcgacaacggactcgcctttccgtttaagcaccccgaccaatggagagcatgtgggtttggccgggcacctaccaaaagcacagactgacattgacaccccaattcagaccctttccaatgggcaaaactttcgatggcacagatcccgttcagtgaagaaaccatccataaaatgttgccggttctcgaaaagagtgaatttttgcgcgagttaggcaatgatttgcggaacatttttacagttggaaaataatttaaaaaagaaacacaataataatttatacggataagggcttcgacgaaaagacgttcaacaaacagctcagtgtgctctatggccaaattttcaatctgcgcgaggcgttgagggaacggaagacgccggctcaattggctcaggtggggctt

SEQ ID NO: 34267 - DNA, 949 bp, Heterodera glycines
tcactcatattttttgctaattgagcagaagcgtaccaatctttgcagggatactccccggtaaaggactaacttacactgaaatgagcgccgagctagctggctcaaaaaaatttttcgaaaatctgagtctttcgtttttatttattttttgcaaaattaattcttaaatattttttcagaaagggttctgaaacgcaccaaattttatttacatgttagtttaggcactctgatgctttttctatcaaaaagggagatgaataaaatttttaaaaatttttaattcctttttaaacaggccaaaaagtttaggcttaacttttttttcagaaactgatcagaagcgcaccaaactttgcagggatactgaaaggaagagaaataacctattttaaatattatctagtcagttcatttaaataatttttatccaaaaaatttttttttgggttttcggggcagtccccctgaaccgatgcgcccagatttatggggagaccgaatccttcgggaatagcttccctatagtctgtactttaattctgcgttggatttttgctccccataaatgtttgagtaccccaaacggacacttgaaaaaatcgatttttttgttttcggggcagtccccccgaaccgatgcgcccagatttatggggagaccgaatccttccggaatagcttccctatagcctgtactttaattctgccgtggatttttgctccccataattgtttgagtaccccaacggacacttgaaaaatcgattatttttgttttcgggcagtccccccgaccgatgcgcccagatttatggggagaccgatccttcgggaatagcttcctatagcctgtactaaatctgcgtggattttactccccatattgtttgagtacccccaacggacacttgaaaaatcgattttttgttttcgggcagtcccc

SEQ ID NO: 34268 - DNA, 954 bp, Heterodera glycines
  unsure (1)..(954): unsure at all n locations
ctctcttcgtcgagcaccagcagagaacaacgcgtcgcattcgatttgatccgatggaccacctaactcagtttttcagaaagtcccggcatttttcatcacctccttgtgggacagatcaccaatcgattccccgttgactgcaattatgtgatcgccaggtctgagtccggaaagctgcaaatttaaaaatttctatgcccatttttgttttgctaattgaaatttacgtccgctgggctgccaatgtcaacggcaccaacaaattgtccttttcccctttcggcgtgcagattaaatccgtattcgcattctgcgctcgatttttccacaacacaaagacgagggattggaacggaacgcatcaaaaaaaaggcaaattttgaatgaaatgccaaaaaagggaaaagtcaaaaaagtaaattagaaaatgcttttgggtttatcctttcctacataagtatcctcaatttgatttgttttctgctcaaaaagcattgccaaatgggttaatttgttttggtaaagcctttcaattggccataattgggaaaggtcgcaaattcgcccgagtgaattgggccaattggaatcagtcaaagtgacatggccgcgaaaggctttgcgattgataagaaatgaatgaatggagctaaacgaattgcgatttaaaatagcgaaatgggaagggcgaaagagagaaagggaggggggaggagggattataaattatgaaatttaacagtgataaacaaactttagaatgtctgggcatgattaggatgtccaattatatggaatccgttttttctgggctttatgaggtacaaaacgcacgaaaaaatattattagtgaaaatggcctaagattttttttaaatggcacgaacganaatttgcagttttcgcagccaacaaaattggaacatcacagaggggggggggggggggggg

SEQ ID NO: 34269 - DNA, 905 bp, Heterodera glycines
tcaaaacttacagcaattattgctgcatgaaaaaccaactgtacaacttccatcgaggcaagctgttcaagaattaattaattaatcaattattattaattacacttactactgcaaatgccaacgttttggggggccgaaaaatggagaaaatgcaaaaggaagagaaaaatggaaaacgaagtgacaaaagagggaataatagaaagaagtgaatttgcaggaaacatcgcggaagggaataaaagaattaaatctattatttattaatgaagaacatatttaaattttggaaataatgagccgtttattttcatattaattaaattattattactaaaaaagtatatcaaatttaatttgataaagaatgaattggcaattgaataaaaagcaaaaagtgtttgtatttccttttatgcatcattttaaaatgaaaaaagtccagaaataaactcgttggaataaaattgtttgcacagtttcatttattttagaagcctacaaatcatatttattgcttgaggcgattaggaaagggattttataaagaaaataacataaaaaattcgctttttaattttcgtaaaaaatataattaatacaaaaaacagaaattccgtattttttaaaacagagatagctgtctgagaatagaattttcatgactcgggtagaagagaccaaaaaaaattgcgaatttctcgacccataggcaaacaatacagaaaagagcggcgcccatactttgccaaataaaaaaattaaccgctgagcaaattttaaaaataatctcatttatgaaactttctaatttttgaaccttttggaaatgagttaggaatggcaattttaagaaatgcgccagcgccgcaagaaaattagacaattttcataaatttatt

SEQ ID NO: 34270 - DNA, 1187 bp, Heterodera glycines
tgcaggttgaaataataataaatgcatttattttttttttcatttgaatttgaaaagaaatgtttacaatatttatgaaataaaattataaataatttaatccatgttcacgaaattaaaaaatttatttgaaattaaaaaaaaaattattttattttattttaaaatttttaatttgaaaaaaataaaaaatgtcaattctctttctgttttttctccgaacgtgcccattgtgaatgaaaaaagagatgaacacatgccactgaagtggcggcactcaacggcatttctttccttttttttattcttttcttccaaaaaagtgccaccacttttttgagtttgtcaaacaaaaaaaaatgaatgagcaaattttgtgccattatttaattggtgaaaagtctgtggtggtggcggcggtgacataaccaaattaaaagtttacacatgaatggaaaattggtagtgattttggatgggtttggcatttgtaaaatgccaattaacaaactgtaaatgccaaatgggataaaaaattgtgctgtgcccgccggaggcaaacaaagtttttttattgcaaatttgaaaaaatagtgacgaaatgccatacaaaacaaaaatatggccaacaaaagtttacacatgactagggatgggatttttaggtttttacctattttttttgcggcttagttatgatgagagaagcccaaaaatagcattttctcctaacaattttcgatttagagcgactttttagcacctaaaaacacctattttagcgttttggcacctaaaatagtttacaacctattttggcatttttcgaatttttagcacctattttgggattttcccagaaatttcatagtaaaaatgcaataaaaacgaaaaatacacccctaagaatcgatcccaaaaaatttaaaaatatacccctaaaaattgaccaaaatttcagaaaatattcccctaagaaatgaaaaattttctcaaaaattcgctccaaaatttatttatttattttcttgaccagttgcaattgtgcgggcgaaattgataaaaaattagtcacattttgaatttttgtacataaaaacactggattttttcaatttttaacacctattttggcctttttggggctttttagtacctattttgggatttttagcacctaaaaatcc

SEQ ID NO: 34271 - DNA, 1172 bp, Heterodera glycines
tttgtggagcctattggccttgccattgtctcatcactctctcccgggcatttctgggtttcaatttttacctccgccggatgtgtctccatttcgttcagtcgccgccgcttcagtctttgctggaagagaatggcattgaccaaagcgaacagactcggcgtatgtcgcgcattaattgggtcattagatttaaatgaaattcgttctttcttctcgcggacgaccgcactgacaacgagcattagaagaagataagcagcgtttttttttttggcaactgagagcaattcattaattcaggtgttagttacccttttctatttatgtgttcaacttattgaagaggatttactcattacattggcaaaaaccttccatttcgacaaataaatactttttaacaagtaggtaaacaaatgaagaaaagttaaaaaatagaaaggaaaattgaaaaatgagatcggaaaattcatcaaacggcaattcagtcagctattgctatcgtcgataaaagtgacatcggagagcaatgcgactttggacgcgagaggataaggctgaggagatagcaaagttatggacttcttctccgcatttacagcagtgacaatgacaaagccaatgcacggcttttttagaagtccctgatcgatggctgagttcggaggcatcagagccaacacatggttgaggagttgggacccaattggtacggagacaacctgaagggtgccagtattagaaggaacacattctttatattataaagtctaaaatttgccaaagtaaattcatggctaaaagcgaaagacaaaaaatattttgatatatttgaaaagatccgagttttgtgtttgatcataataattttctttaaagtcagattccctttttcttttatttataaaaccccaagaccaaacttttaattgttaccaagaatataagaattaacaagaaatttatggccaaataaactgaagactggacacccaaagtggactatagcgggagaacttcccccatttacctgagttcggtgatcctccagcaccattccgactggcacacacgaagccggcagctgttcagctccaattttggcaattaataattcctgttcgtccgacggtttgtcgtatgacagttcaaatgaatgtgggtaaaaa

SEQ ID NO: 34272 - DNA, 1278 bp, Heterodera glycines
ttttacttgggaaaaaaatccaaaattttttttttcattctttggggaggaaaaataaaaattactttattggcagggtggaacttaattgccatttttctttaaatcaaattattattttccaagtttttcttttttttttccagaaaaagaatcggccccctggcaatatttcattcaagtaatattcttacaatttctttgtgttaaagttttccaatttgaataataattatgtaatcaaaagtaattgaccaacaggtagaataataataataattaatgaggtgccaaaaattaatatcaaataatactcataatataagaggtgccaaaatttatataagctttttgaactccagcggtcatggtaagtctagtcacaggataagcgaggtttagttttcattgacactgcaattagtggaatcattaccgtggtttgcttttttggaattgctctatatccgtctcttgtttacatcgccgtcaaatttaagttaccctggttcgtacaaagatcaaatttctgactagacaacattaaatatcaatcatattggcatttcttttcatatatctagtagtgattcgagaaaaattaagagtattgcatctcatctttcagtacagcttccacgggtgtgtgacattttccgtggcatgacgccaaatttacagcttcttatacttaactgcatctcacctagcgtctataggcattttcggtgattgaaaaccgcgcctagcggaacctcacccttttagggtctattggttttttgaagcgttgaaaaccgcacctggcggaacctcaccctactggggtctattggttttttgacgcgatgaaagtcggcggtcgaaatgtggacggttcgttttcgtccacttgaagaccggcggcagaatgttgaaatccaaaaattactctcgtctggagatgtaataaatgaataacaaatgcgctttatgtcgtatgctttttagctgactgcgccaatgttcggtccgaggggttttgttgtagtccaattaaatatttatttattggagaaggaaaagaaagtcacaacaaatttggtgaacaaatatatatgcaactgaatgaagggaagaaaatctgagagggggaatgggagcatatttatgggcgagggaacaacatgaaataaggggaatcgattggattggcattatgtcacggacattcaaatcatcggcggcaatgcgccgaacacctccccccttaagcgctgttccgaggttacggtgaga

SEQ ID NO: 34273 - DNA, 978 bp, Heterodera glycines
tgttttaagccaaaaaattttttcgcagttgttattgcgatcataatgtgtcttttgatattcatgttccagtttttccctagtttgaaacctattttcagaaatttttcgattccggtgactacaacatgaacaagaacaagcctattccaccgccgataggccagaatttgactgctgccaacactcccaaactggccgttccgattgaaactgaacccgagaaaaaaatggaagaatcagctccgattattgtatcgcaattgctcccaatgatgcgtcccttggccggctcaatttcgggttgttcgatggatggcggcgaatctgacgatgagggcggacagcttcaggtttattgttagactcacagtcatcgatagggaacaaagggtttctttctcttcagtcaatttttcctgctcaaaacatttcttgaaaaactgacaattggttaattttgtctccttcagattcctcgacctgacacagtgccgcagcgcaaatcgtccattttacatccgtcagcacatagcaaattgagtcctcaaccgcacattcaccacgaacacactgacgagtcgttgaccttcccccagtcgtaaggagtgaaccgaaggcgaaaggagcgcaaatcgaaatggtgatcttccaacagcaattatagctgagatcggctttttgtttgatgtaaaatttacttggacttttgaggaatgacttttttgggcatgcttataattgatgcatttttctagcgagttggtatgtgcccattgtcagacatttaaagcccttttccataagcagttttttatttcaacttcggccaccatccttaagctttttcattatatatcattcgaaagttctgcctccattttaagaaaaagaattatctcgagtcggggaaatttgaagaaattaaatcgtcaatccggaaaaatgaacaatactgatgccatcgaaaattatgca

SEQ ID NO: 34274 - DNA, 936 bp, Heterodera glycines
attcgggtctgctgaaaagttagaagcaaaaataaaaaagcaaaagcaaatactcgacttcgacttgttgcatttgtcgcgttcattcatttttccgtccatttaattaccaaattaattcaaattgttttatttctttaatttacaccatttaaatgcatttatttggtattttcaacaattcatgggcccaatcaatttttccatttttggaaaatgttgcggaaagtgcaaaagggcgtaagaaaaaccgaggaatttggtgatgagagagaatcgctttgcgtcattccatctttttttattcatcaaaaatgccccccacatgcctcctttttcatttcctgttctttctctcctcttcttcctcctcttcattcttcctcctgcatattttacctccttttccttctcctctttctcctcttctattctacctcattatcctcttcctcttcttcctcctcctcctcttcgtggatggatttgctcatcaaatttccattcggattgaatggattttcctcttttgtccctccaccaagtgaatgattgtcataattgttgggttgcgaatattgtgaagcaaaaatggaagcggaagactgaacaaagggaagcaaaattaagaaaaaggaagggacgtacagaacggaggacagcggcggaagaagcggacgggcggaggtcgaagccgacgatgccgcggaggctggcggaggagcggcttttggtgcggattttgtacagcgaattctccgcaagttccgctcgttcctccgcgtcctccaaaagccgctgcatctgcttgtacttgttcaggttgaggttcgccagttgttcctgcatttcctttcccttttctttttctctccgcccttttccttctcaccgcctcttagttttgtcgtttgaacgtcttcaatttctgttgca

SEQ ID NO: 34275 - DNA, 974 bp, Heterodera glycines
  unsure (1)..(974): unsure at all n locations
cgccattctaacgaaaaacagaaataaatatggggaaaaaccttaatttgaataaaatttgattttactgaaatttggcttaacacagtgttatgatcgtagaatggcgacttttgaaccggaactgacctcacaaagccaaaagcacaattcatcgaagccacgagaagcagcctgggaaaaataatttaaatatatttaaatttttaatttaaaattgtattgtccttgagaattacgcagaatttccaagcggtctcgagacgacctttgacactctcgagcgaatcattaatgactactcacaatatgcagcgcagtccgtccctcatagtccggggtggacagattggcaccggcggcgtgccatgccttcagtgcgtccaagccgccggtgccggcggacagacaaagttcgacaccttgaaaatttttgaaaatttgatcgttagaaaatttggaaaaaaatttcaatgggaatcaccaatgcgaggccgtggaaccactaattggccgcctgcttggcgtaccatgctaatcacgaccaaattgcgtgatcggactgcgcacagtaacgcgttctcatcgttggcgtcgctggatggaaagtgtaaaaatgaacaacggagtcggatttttaggcaccgtaacgggggaataattagccataaatgattgaataccgtaaccgggcgaaattcgatttacttactacaacaaaatgatgattagaattggtttttagtgcaactcaattgttaattagtagagacccgcccgacaaattccatttaactacagtaactaactaattgccaattagtaccgtataacctgcccgatatattgcatctgactacagncaagtaactcaattgccaattaataccgtaatccgcccgacaaatccatatactatagtaacgtaattaaatgcattagtaccgtaatccgccgacaattacatctgacta

SEQ ID NO: 34276 - DNA, 757 bp, Heterodera glycines
  unsure (1)..(757): unsure at all n locations
ttagagcattttctgaaaaaatatttatgaattaatttttcaaaaaataaataaacagttaaaaactcagaatttctaaaaaaatttaaaaccaattacaattgtcattttttcaggttaagttagtcctgtaccggggagtatgcctataaaatttggtacgattttattgattattgaaagagctagaaccgaagaaaatctttttaatttaagcctaaactttttggcatgtttaaaaagcaattaaaaattttattcatctccctttttgatagtaaaagcatcagagagccttatttaacttgtacataaatttgatgcgtttcagagcactttctgaaaaaatatttatgaattaattttgcaaaaaataataaacagtgaaaaactcagaatttctaaaaaactttaaaagttatttctcttcctttcagtatccctgcaaagtttggtgcgcttctgataagtttctgaaaaaaaagttaagcctaaactttttggcctgtttaaaaaggaattaaaaatttttaaaaattttattcatctccctttttgatagaaaaggcatcagagtgcctaaactagcatgtaaataaaatttggtgcgtttcagagcagtttctgtaaaaatacttatgaattaattttgtaaaaaaataaataaataatgaaccctcctccttaataattttcctgcgcccaaggtctcactcagcctcttcgcggcctcgtgtngggccttcgcccccccccc

SEQ ID NO: 34277 - DNA, 849 bp, Heterodera glycines
tgagtaatgttgacgaaatgtttttagtattcaattttgaatttcaaatttgaatttcaaaattaatttaattatacaattcggaatttttgaaagggatttggtctaaaaaatatgaagattaaaattaatttaattttaatgttatttggtttttgaatgaagaataaatttaatttaattaaatttaatggaattaataaataaattattatttttaggatcatcattttttggccatagaattttgaaaaataataaaattttgaaaataaaatttaacccattaaaaaattgtcaaaaaaaagaattgctgtggaccgcgccggaacatttgcgccaaaacaaccgggccggcactgttgagggggacgtgtacagcttcgcaatcatctgcacggaactggtcaaccgcgagacggtgtggaacggtgtggagcgcgagcaggacattgacggtacggtaccgttgaacggaagttacggtagtggggggggggggggactcgagagagtcacaaaaaatgtgatcatcgtttcactctcgagattaattctcgaacagtctcgggttttcgagaattttccggggatcagttaatgtctcgacttatctgttacggataaagtactgactctcgggggatcggggtcaaaatgctttctctccaatctcgaagtctcgggatctcagtctatttttgcctcaacgtttaaaaaattaatttgttttttccccataaattttgtatcgcctaaaacggaccaatgtcccactacctcacaggccacaaagttcgcggaatgaagagatgtgtgaccaccaacgcctggagagggggagctgtg

SEQ ID NO: 34278 - DNA, 1031 bp, Heterodera glycines
ccgggacctgagaagccgggaccgggctcgatttttcttcggaaccgggaccaagcgggaatttttaaaaattcaataaaattttaaaaaattaaaaaaaaattaaattttaatttatttcaatgagaataatacaaaattaaattataatttttttgtgttttatttaataaaatccaaaagctagggctaaattaaattatgaaaattttcaaagcaaattttcttcaatcatttcaagtagacactaggccatttgcacaattgttaatgttacttttaaagaatatattaatatttttttttaaattttttcttttaactccaattttcatttctaatttttcacccagaccccattcttaccagtgcttgtttttcccgattcccggttgccctaccgggaccgggatcgggacctgagcttttcaaaatccgggaccgggacctcgggtgaccgggaattcccggcccggtcccgcttcactctactttatacatagagcaaatttaaataataagacattaggccaaagctccatttttaaattcaaatttaaaattttgaattcttttctgattgtcagtacaactattttaagatgtagatgtgagtaataaatgaatgaatgttattgtatttgttttattaaattttgccttttgtactttttaattttgcattatctattaaatttaaataaatgtcttctgaaatcgaaaacatcgtccccaatggcgcaatagatgaccatcagaaagaaatgaacaaattttcatggacattgaacgatttcgaaattgggaagccattgggaaagggcaaattcggcactgtttatttggcgcgggagcgagaaacgaaatatttaacggcactgaaagtgctgttcaagaaggacatggacaagcacggagtatcacatcagatgaagcgcgagatcgaaatccaataccatttgaggttggtggctgagttttgctggctcttaccgtcttcgattccatttcctctccccccagttaataat

SEQ ID NO: 34279 - DNA, 967 bp, Heterodera glycines
aaaaaccatcaaatgaaaatattttttgatataactttgttctagagcatctaaatttttaagtcttgatatcattaaatagcacaaagtgttttctattagcctacaaaattccaaaaagtttcgttaagtttcaagaaagttatgactaaaaatgttcaaaaaaacttggttttttgagcttctcaggtcataactttttttaaacttaaagaattttttaaaaacattccgtcatatcactgatatgacgtcatatatttgagtttgacttttaacattggctaattttgcttaaaaccaaccaaattttaaatattgatatcatttgatagcactaagtgttctttatcagtcagcaatcagcaaaattttaaaaaatttcgttaagtttctaaaagatatgactagaggaaactcaaaaacatggtttttgaatgaacatttttggccataactttttgaaagttaacaaatttttttaaatttttgtaagctaataatatagaacatttaaggctatagaatgataccaagaattattgcttaagagaaattttttttagtttttatggtttttaaatacagacataacatcttccaaaatgtctcgtccttttgttgaaaatatttaaaagaatttatatgtattatctaaattgaaaagtttaggcccactgttgtttacatgttttttgctgtgttgagtgcaacgattttttccggtaaagcaacaataaatgtggcacaattaaatacattagcgtaatcgggttaattaattttaaattttacgaatcataaatcgagcttcaattaacatatcaaaattattaaaacaattaaaagtaattatttcatcttcacttttaagccgaatttgtcaaatggttctgattctgatggaattaagaatggagaaaaggggattggaaaggaagaacaaaacgacgactatttatttgtc

SEQ ID NO: 34280 - DNA, 992 bp, Heterodera glycines
  unsure (1)..(992): unsure at all n locations
aaaaaacttttattgcgctacaaatgcttttaagcccgcnncgtgaggcgggacagttccaaaatttgcaccacattttactgtgaaagtccaagtaccttaattggacaactacgtgtcaatgagcacagtcgcctctgacctcttatggagcagaaaagggtgaatatcagatggggtgcgtcncatcctaaaaattcctcttttcgtctaactatccctccctttttgtgcactatttcgtttcaacattttatcaattttttgttgtcttttgaaataaattgtgaaaaaatatacgaaaattattttcgcttttaattatgatgtacaatgcttttaagccccgccgtgaggcggctactttttgtgcactattttcgtttttaaaattggatccggattttttggcttttttaaataaattgtgaaaaattcaaaacaaaaaacttttattgcgctacaaatgcttttaagccccgccgtgaggcgggacagttccaaaatttgcaccacattttactgtggaaagtccaagtaccttaattggacaactacgtgtcaatgagcacagtcgccgttggccagttgtgaaacagaaaaatgggaatatcagatggggtgcgtcccatcctaaaaattcctcttttcgtctaaccatccctccctttttgtgcactatttcgtttcaacattttatcaattttttgttgtcttttgaaataaattgtgaaaaaatatacgaaaattattttcgcttttaattatgatgtacaatgcttttaagccccgccgtgaggcggctcctttttgtgaactattttcgtttttaaaattggatccggattttttggcttttttaaataaattgtgaaaaattcaaaacaaaaaacttttattgcgttacaaatgcttttaagccccgccgtgaggcgggacagttccaaaatttgcaccacattttactgtggaaagtagaagtatattaattg

SEQ ID NO: 34281 - DNA, 714 bp, Heterodera glycines
ggaaagtgagtaggttgctgacatgcatgaataaatcggcaaggagctttgagggcaattagtaatatgggaccggggagggggagggggcggagggaactaaaagtatccacggacaacccccggggggggggagggaacgagtacacgggtcaaatccaaacaacctgacaaatgaagaatgaaaaattcaacaaccaaaggggcttaaaaatagacaatagggagagaaagaatttacaaaaaatgaaaacgatttattaagaaagccaaggattttctttgtttttttagtcgttccaaaaaaggaaaaatagcatttaaaacctatttggttgaacatttaataaacgcaatttattacacactcattcgttccttttaatcaccaaaaatatttttaatggattatttaaagctaaaataaataaatatggcgaaatgagaaaaaaaatcgagaaaggaacaatgtgaactatttggtatttgacactgggtctctgcaaatggaattttcaaaaatttgaaaaatattcagaaaaggaagtttttacattgggggatgagaaggtggataaaaagagtgttgagatatggtagtagaagatgcatttgggtgtcggatttgtgccgctgcagcgaacatcggagattgccatgggtaaacggaggcggcggaagggacagtcggtgcggtcaaaggggacgcagaag

SEQ ID NO: 34282 - DNA, 1116 bp, Heterodera glycines
  unsure (1)..(1116): unsure at all n locations
atggctatctctttttttggcaatctggtaatagaaatctctatggaaacaatgacagtggctgtcatcagttgttatgctctaaaaatgattttcgggccgtttgagtatatgtggggtatggacggtccaaaaaaatggctatctctttttttggcaatctggtaatagaaatctctttggaaacaatgacagtggctgtcatcagttgttatgctctaaaaatgattttcgggccgtttgagtatatgtggggtatggacggtccaaaaaaatggctatctctttttttggcaatctggtaatagaaatctctttggaaacaatgacagtggctgtcatcagttgttatgctctaaaaatgattttcgggccgtttgagtatatgtggggtatggacggtccaaaaaaatggctatctctttttttggcaatctggtaatagaaatctctttggaaacaatgacagtggctgtcatcagttgttatgctctaaaaatgattttcgggccgtttgagtatatgtgaggtatggacggtccaaaaaaatggctatctctttttttggcaatctggtaatagaaatctctttggaaacaatgacagtggctgtcatcagttgttatgctctaaaaatgattttcgggccgtttgagtatatgtgaggtatggacggtccaaaaaaatggctatctctttttttggcaatctggtaatagaaatctctttggaaacaatgacagtggctgtcatcagttgttatgctctaaaaatgattttcgggccgtttgagtatatgtgaggtatggacggtccaaaaaaatggctatctctttttttggcaatctggtaatagaaatctctttggaaacaatgacagtggctgtcatcagttgttatgctctaaaaatgattttcgggccgtttgagtatatgtggggtatggacggtccaaaaaaatggctatctctttttttggcaatctggtaatagaaatctctttggaaaaatgacagtggctgtcatcagttgttatgctctaaaaatgatttttcggggcgtttgagtatatgtgagngtatggacggtcccaaaaaatggctatctctttttttg

SEQ ID NO: 34283 - DNA, 1000 bp, Heterodera glycines
ttaacacggcgattcaattttgggctccaagttcaaataagtttattatttatttagtaatcagaacgccaaaactttgcaaaacttaaaattttccggggattttcccttgtaaaaatagaagagccgatctcgagttaaaaagcattttgataaaaaaacaaagcatcatcctataggttgggttaaaatatgtgtttatgcaaaatttcaagaaaatcgcaactttggaaaaaattttacgactgggcaaagttttttctttttctctcattttgacgcactatttccatgtctctaacatataagataacacatggttcatttttttgccagtaaacaatttttttaaacttttgactaattaagaaatattcttcagaatttccccttcaaaatgagcataaaatggttttgtttggtctattattgaaaaagttttaagctaaaaaaaaattcataaaatcaagggtaaaataaaatgtttaccttttattgtttgtatttgttcttttggcgttctgtttttattatttttttatttatttgctttaaaaaaatgaaatttatacacaaacacaaagaggatttgaacctgagacccactttttggtgactaactcacagaccactaagacgaaaaaaccaacttaattgtacttggagcccaaaattgaatcgccgtgtttaacaagactcaatattaaaagtgtgacttgagtatctttttttggcgtgccatttgactagaaattatctgttttatgccaaaatgttattttggtttttattgttaagttgcactttcccatggctaattgtaagacccaaaaaacaataattaaaatgtcgaatttggttggcgataaaattctcgagttgggaaagtaaaggattcaggagaattttttatatttttttgattccctttcaattttgagtcctaattcatttttcatctttagcttttcttgatcgacccaaattatgtattcgacct

SEQ ID NO: 34284 - DNA, 972 bp, Heterodera glycines
  unsure (1)..(972): unsure at all n locations
gtccgaagtccctttttcaatttgtcatcgatgtacagagaaaggtattcgggtgcttttggactgatattgagaaagtgttcaaagtccgactgaatgcactgcttgaattccctgtcgttattgaacgcttcgagcagaaaacggtcgaattgttctttgagtccaattaaactctaaaaaaataaagtccaaataccgagacagaaaagttcacctggatgaaaatgattggatttgaaactccgccgattggctctacggtttctccctgcggctgctgttgggtgttgtcgttgacaactgcggtccctttggcacgcaaaaatctgctcattgtatttgtcatcgtcttaggcccgctttcaactcttttgagcaattcgtacagacagcgcaaatctaatagcaaaaagtagacagatttatattgaaatgtaaaaccatcaattcggtcattgagcaacatgtaaacgagtcccgagttgtccatctccacaattgtcgtcatgttttttgttataagttcttcgttcagaacctaaaaagcaaatccaatttcgttattctcttcacagaattaacgtgaatgattttcgtctccgttattttgtccaaatagcgctccgatcgttggacctcctcaatcaaagattcgttgactttgtgaacgtaaacgcacgcgctgttctccgccaaaaacttttgacttgcacgacgatagaaatcggcagtttctcggaggaaaaggtcctcaaattggtgctcgtaataggcgcgattgtccaaacccaacgcaattaacatttggcacacatttttaaggtcaatcctaaaccaataggagtaattttttatgcagatcactttttaaggtaagaatgaaatttgtctttttagggatatttttcaacaatcattttgctctanagtcctanaaatattacaaaaagaggggcgctaaactgcact

SEQ ID NO: 34285 - DNA, 980 bp, Heterodera glycines
aattgagcagaagcgtaccaaactttgcagggatactccccggtaaaggactaacttacactgaaatgagcgccgagctagctggctcaaaaaaattttcgaaaatctgagtctttcgtttttatttattttttgcaaaattaattcttaaatattttttcagaaagggttctgaaacgcaccaaattttatttacatgttagtttaggcactctgatgctttttctatcaaaaagggagatgaataaaatttttaaaaatttttaattcctttttaaacaggccaaaaagtttaggcttaacttttttttcagaaactgatcagaagcgcaccaaactttgcagggatactgaaaggaagagaaataacctattttaaatattatctagtcagttcatttaaataatttttatccaaaaaatttttttttgggttttcggggcagtccccctgaaccgatgcgcccagatttatggggagaccgaatccttccggaatagcttcactatagcctgtactttaattctgcgttggatttttgctccccataattgtttgagtaccccaaacggacacttgaaaaaatcgatttatttttgttttcggggcagtccccccgaaccgatgcgcccagatttatggggagaccgaatccttcgggaatagcttccctatagcctgtactttaattctgcgttggatttttgctccccataattgtttgagtaccccaaacggacacttgaaaaaatcgatttatttttgttctcggggcagtccccccgaaccgatgcgcccagatttatggagagaccgaatccttcgggaatagcttccctatagcctgtactataattctgcggtggatttttgctccccataattgtttgagtaccccaaacggacacttgaaaaaatcgattttttttgttttcggggcagtccccccgaaccgatgcgcccagatttatggggagac

SEQ ID NO: 34286 - DNA, 842 bp, Heterodera glycines
ttgaagtcaaaaaattattcgaatttctccaattttgtttccataatttccgaatgttattcggtatcataatgccaaaccaaaacgaattcgttttaaaatattcttttctggacttgacttggtttctcaatatcgaagcttttttctccgcaatttctaaaacgcttataccaaaccctagatttttggttccgatgggtttcagaaaaaatcccgtgtggtgaaaacatatttcacatttcacttcataactttttgagttctgcacggatcgagaccgggataagaccattggaaagagcagctcgagctctacaagaagctatggaaagaaaaaatcgacatttcagggactttttcagaaatcatatttaattccccaatggggccccattttgggtccccagccacagccccatgcttctcccaattgtggcgaaaacaatatttcacatttcacttcataactttttgagttcggcagggatcgagaccgggataagaccattggaaagaacagctcgagctttacaagaagatatggaaagaaaaaatcgacatttcagggactttttcagaaatcatgtttaattccccaatggggccccattttggttcctcagccacagccccatgcttctcccaattttaagtcttggatttgtcaaataaattaacgatttcgaattaataataaaaaattctattataaattttttttgtagaggggaaaattctgaaccaaactactatttgaaaacccaatcaaaactgggaaaaaatttgaagtcaaaaaattattcgaatttctccaattttgtttccataatttccgaatg

SEQ ID NO: 34287 - DNA, 664 bp, Heterodera glycines
  unsure (1)..(664): unsure at all n locations
ttattttgaggcaattttttgaaaatcgtaaatatttntgccgcacactattagcgaatttttgttttaatgtatcactttaatgccattgtcatttgattttctaaagtagtaatatatttattttgcttttctaataattaaataatatagtttattagatttgtttttctttttttcttatcattttttattttaatctcaaatttaatataaattttttaaattattttattttctattttatttatatttgaattgaaaacataagtaaatcaaaacacttcaattaatcttttttttaaatttatataaatgaaaattataaaattacaatatcaactattatttattttattttcttgtatgatagtcctgactacttatcattgctatgtgagaattttttatattaaaaaatggatttatttattgaactattatttgatatgtttaataaaatttactttaaagtttacattaagtattgcttttttgtttttaaactttcttaaaagttcgtttattaatcaactatttgtaatatgtcctttgttgaagtaatcaatttgaaggagtaatatttctatttctgtcttaaatattattttattttgtaataattatttttgtgcataagttggaaatgaacggaccgggtcag

SEQ ID NO: 34288 - DNA, 893 bp, Heterodera glycines
  unsure (1)..(893): unsure at all n locations
cccaattntggccacccccccccctcccaatttctaccggcaattcccccggcgctgcttccgcccgaactgctgctgacttcgccccgttggtgctcctgctcagtccacaagtgcaaatagagccttttcagccacaacacacgtcggtcgggattgcgcatctgatcttgaagccgcttaatgaccttggaaaaaacattttgaaacggcaaaagccgaacaattagtgttcactttgtccaatcccatccaataatgagcaatttgttgcggtgccaaaaagtagagaaattcgttgtcattgattgagcagccgaaattgatggtccaacattccaccggcacctaaccgatgataaaaggctcaaccaactgacccaacattgccattttgctccgtttgtccttcttttcaaggacccatcgttacttacgctcatttcctccacgctgtgccgtcggtaaatagcttcaatgtccaagtcgtaggaatcgaccaattcaatggctttaatgtaggaagtgttaagaaagccttcgtcaagagttatcagcgctgaaatgttatttattttatgatcaaaaattcgacggaccagcgcccggcggacgcggactgaacgaagtttgcgcgcggttaatggccgcagcctccacaacttgcaaattcgcgcttgcctttgccacggcgatcatttccttctcgcggacatcgcggccatagaaaattctgcggagagagcagaaaaaggggggaggggagatggcattgacttggggtgatcggtttgacttggccgatcagctctgacgttcgctgctttgtgcccacctttgccacaccacattggcacatgcggcgtccagccgaaagtcgcacagtacgctcc

SEQ ID NO: 34289 - DNA, 883 bp, Heterodera glycines
gaataaatttttaaaaactgttgttaatttgtaagcattaaaaaaactaaataatcccaaaaatgaattattttttaccgaataaaatattacaaataaaataaattaatactataaaattaatttaaagtgaaaaaaaaattgaaaaaatgaattaatttattaaaaaggttacatttgtgctgcaatgtgtagtctttttgataaaataaaattttatctcttcagcataaaatcccgtcggcattttcaaatgcggcaggacataatgccagaaaatctttgaggaaccccctagtggatttatattttttctctcttcaaaatggcccaattttttagtgcctcggccgggtaatgcgcgaatttttcgtagtccgtcgcgtgggtggcgagcgcgaggttaaagtgcaccgcgccactgacatgcgtactgagaaatgcttgacgggacctgccgggtgaaaattgggggtttttaaatttgaaattcaaatttttttttggcgactcgtcgtttgggtccgcctcaaaatggccaaatttgtaggacgggggccgcgcattgggcacaaaagcgcagtcgagcagacgaacattcaccgaagctgtctgaaaagtgcatggaactttggacgatttgacgaaaatggtattccttacgaaaagccaaaataatttttaaaaatgaaatatttaaatctaatcgaattttattaaaaatttaaatcaacatgcaaattaattttaatttccaaaatataagtattttaattttttaattccgaatcgaacaaaaagtcgaaaatacaaattttccaaaatatgtgactttcagttcatttccatgcgttgaaaatcggctcagcacaaaattcgaatt

SEQ ID NO: 34290 - DNA, 757 bp, Heterodera glycines
ttgaggaaaattattcgtattgctgtcaatggatacccttttgtactagggttcgataaaatatgaacaatatttttccttgctagactttgggaggcctgaaacgcacgaaaaacatgtttttagcttagtttgaagcttctaagatgtttttctttctgaatttttttaataactcgcaaaatttgttacaacgattattatatgaattaaatttcagaattccaatattgattgtttaatgcttatttatcaggaatgagataaaaaataaatttgggtagtgtaagtgattaataattgagcaagtatatttcagggctcgcaagtttttttttttgaaaataagtacaaacgagattaaaactaggattttgaccaaaaaataagattttttaaaaacggctttttacattatagaaacaattaaaaacatggctatcaactgaaaccttcaaaatcggcatttggtcgattaaaaaaaaatcgttatttgggtcaaaaattagcattttggaaaattattcaaagtaaaaaaatcaataaaaatgttttctttttgcggcgtgctttttctaaaaaaattttggcaaccgggagggggtcggtccgccggcggtgccgataggcgccgccggaagtttgaaaatttgaatgcaatttgttaacagatattcaccaaaaaatgatcccttttgcgattcttagccattttcaaagaaaattggtagttttggggggccggcggggcccttag

SEQ ID NO: 34291 - DNA, 788 bp, Heterodera glycines
atcggatggcgaatggttggccatccgtctgagtggcgacttcaaatgccatttttggcattgttttgctaatggacaaaagtggacggacaaaggagaaaataaatggacaaagtgacgaaaaagcgaaggacaaaaggccaaagagaatgaaaggaaatgatcagctgagacattacggcacattcaattgacccaacaatatttgacttgatttccaatttaccactctgtttgtttgatgtcctttttttgtatatttttttgtttccctttttcatatttattttttctcttttcgaccatttcaaattgacatttttaaaatgatgaatgaaatttaccctttttcctttgcccaattttctttgactctcataaaattcagttttttaaattaaaatcccttttttttaccattcgccttttgctgctaatttctgatgcttttccaaaatcggtgcttcaccaattgagtgtaccttttgcttccgtttgtttctgctgtttcgttgttcacttaatgcccccaaagtcattgagagattcgcccggggaagtgaaagggtgggaaatttttagggaggcaaaagaatttttggaatttgaaaatgttttggtgggcgagcagggcatttaacaatggcggattatgtgaacactttgccacaataacaaattggtacgcaaaggacgaaaggaatggaaatgctctgtttggtgtgcggtgacagggccagcggacgacactacggtaaaaagggggggagacaatggggaagacacta

SEQ ID NO: 34292 - DNA, 909 bp, Heterodera glycines
  unsure (1)..(909): unsure at all n locations
ttttggcgttctgattactaaataaataataaacttattntgtacnttggagcccaaaattgaatcgccgtgagaaagagaaccttagtgactttttgtgcgttatgttccattgatttttcttttttgtctgtctgtcttcctcgcctttttctccccccccccttaagctatttattaagcatgattcgcattgtttgctctcctccgccaattattgatttttgatagagagaaaagacagcggcagcagagaagtgatgtgtgggtgtgtgcgaaacatttcgctctttttgtgagagggcggattaaaacaggggaatacgttcgctcgatcccacggaagatttttagtgaaaagggcgtatatttataaatatattttttatttacgcagtttcacgcgcttttctacgcattttactcgcttttgaagttacccttaaaccctcataacattagctaattgacattttttctcggtttctcaatcaattagaaatgtagaatctttctccttttcatactacgcgtaattccaagaaatcgatacaatcgataatagcagcgggcggaccagcaactgactaaccacattcaacaataaatgcatcttttcattctttgtttacgccctgagtttattatgtgtgaatgtgcgtgggccgatatcaaatatagttcaattgggtcggggtcacttcggcgcggaccatttcggcgccgcaaaatacatatttgggattttcttacatatttgtacatattttggatttttttcatatatattttcatttttttacatattttgagtatttttatggaaatttttggaaatcctcaaaaaaaaatccaaaatttcggcaaatatttttgtacatattttcattntttttacatattttgaaa

SEQ ID NO: 34293 - DNA, 978 bp, Heterodera glycines
  unsure (1)..(978): unsure at all n locations
gcgcgggattttttctccccataattgtgtgagtgtcccacacgcacacttgaaaaaatatatttttttgttttcggggcactgcccccgagacgagacgcccacatatatggggagagcgagtctctttggaatatattctctatatcccgtgctctatatttgcgcgggagtttttctccccatattagtgtgagtgtcccacacgcgcactcgaaaaaatatatttttttttgttttcggggcagtccccccgaaccgatgcgcccagatttatggggagaccgaatccttcgggaatagcttccctatagcctgtactttaattctgcgttggatttttgctccccataattgtttgagtaccccaaacggacacttgaaaaaatcgatttttttgttttcggggcagtccccccgaaccgatgcgcccagatttatggggagaccgaatccttcgggaatagcttccctatagcctgtactttaattctgcgttggatttttactccccataattgtttgagtaccccaaacggacacttgaaaaaatcgatttttttgttttcggggcagtccccccgagccgatgcgcccagatttatggggagaccgaatccttccggaatagcttccctatagcctgtactttaattctgcgttggatttttgctccccataattgtttgagtaccccaaacggacacttgaaaaaatcgatttttttgttttcggggcagtccccccgaaccgatgcgcccagatttatggggagaccgaatccttcgggaatagcttccctatagcctgtactttaattctgcgttggatttttgctccccataaatgtttgagtaccccaaacggacacttgaaaaaatcgatttttttgtttcataaatatttttttcagaaangtgctctaaagcgcaccaaattttatttacaacttaattttagcactctgatgctttagta

SEQ ID NO: 34294 - DNA, 736 bp, Heterodera glycines
ataaataaaaacgaaagactcagattttcgaaaattttttttgagccagctagctcggcgctcatttcagtgtaagttagtcctttaccggggagtatccctgcatagtttggaaagcaattaaaaaattttaaaatttaataattttcctgcaccgaaggtactcactcggcctcttcgcggcctcgtggtgggccttcgccccccccctcccacgcccttcagagcacgacaaatatttcaacaaaaattttgaaatcatgtttcccactcccttctcccaggggtattattttgtaaagtctttttttccccaataaacttttcaaaccccatttttcgcaccgtgaatgttatttttattgaattctgaaccgttttgagtagattagactagaaaaaattgaaaattttgaaatcatgtttcccactcccttctcccaggggtattattttgtaaagtctttttttccccaataaacttgtcaaaccccatttttcgcaccgtgaatgttatttttattgaattctgaaccgttttgagtagattagactagaaaaaattgaaaattttgaaatcatgtttcccactcccttctcccaggggtattattttgtaaagtcttttttttcccaataaacttttcataccccatttttcgcaccgtgaatgttatttttattgaattctgaaccgtttttgagtatattagactagaaaaaattgaaaatgttg

SEQ ID NO: 34295 - DNA, 1057 bp, Heterodera glycines
aaaaaaaagcaaagtcaagaccaaaacctttaaagcccttagccggttgaaataaatgaaaaaaaaagcaaagtcaaagcaaaaataggaactttattcaaatttaaaaaagttaatattttgtattttggattatgcatttaatcaaattttttctttctttataaatgttagttaattagtcagcgtctattttattttctgtaaaaatttccctctttatttaaaattaaattaatataatttcaggaataagacacttaatgtatagagaatgaattaacgtggtcgatgggaataaatggaaaaaaaagcaaagtcaaaacacaaaaccttaaagcactagccgattgaaataaatggaaaaaaaagcaaagtcaaagacaaaaccttaaagcactagccgattgaaataaatggaaaaaaaagcaaagtcaaagacaaaaccttaaagcactagccgattgaaataaatggaaaaaaaagcaaagtcaaagacaaaaccttaaagcactagccgattgaaataaatggaaaaaaaagcaaagtcaaagacaaaataggaactttatacaaatttaaaaaagtaatattttgtatattgtatatgcatttaatcaaatttctactttctttataaatgttagctaattagtcagcgtctatttattttctgtaaaaatttgcctctttatttaaaattaaattaatataatttcatgaaataagacactaaatgtatagagaatgaattaacgtggtcgattggaataaatggaaaaaaaagcaaagtcaaagacaaaaccttaaagcactagccgattgaaataaatggaaaaaaaagcaaagtcaaaacacaaaaccttaaagcactagccgattgaaataaatggaaaaaaaagcaaagtcaaaacacaaaaccctaaagcactagccgattgaaataaatggaaaaaaaagcaaagtcaagaacttattctacctaatttcatggtgactgacgaggcatttgactcccttaagagagccttcccttctcatgtacttgtacctaaaa

SEQ ID NO: 34296 - DNA, 207 bp, Heterodera glycines
  unsure (1)..(207): unsure at all n locations
tctgcttcccgacctgtcatccccgagatttcttccctttccaggaggggnannantanaaaanaganaaggtgattaatcactaacaatttttgttgtatatggtagttaattttttttattattagcaggattttttaaaaaaatagtattaagtgttttttattagactacaaaattccaaaaagtttcgttaagtttcaagaa

SEQ ID NO: 34297 - DNA, 575 bp, Heterodera glycines
  unsure (1)..(575): unsure at all n locations
ggggaatttggcagtgatcgccaatcagtggaacaagaaaagaagcaacagacaaagggcaaaacagcagcagaaaaggtgccggcaaagcaaagccaaggcgcaaaggcagcgacaaaaacaattaaaaatttaagaattattataaaaaagacaaatgaatggacggatgagcaaacaaattaaagtgggggagggggggagatgaagcacaaaatggaagaaaatggcaacaaaaccatttgcactgactgacaccccaccaccagcacagctcaccccccatcacatgcaatgggcgggtgggtcaatgccaaaatatcagtcaaaacatcccttcgccgcagtgtttacgacgccaaaagggcgacgcattccccggcaaaaaccgctttttgtcttttgctatttcatttaaataatcttcagctcacaaatgccatcaaaaatataaaaaacaattaataaacttttaagaattttggcccgaaaaaggaaaagtgaccgccgccgagggaacgcagcaaaagaattgngaaatgacctcgagaaacgaccgaccgacggaacacgtc

SEQ ID NO: 34298 - DNA, 854 bp, Heterodera glycines
tttcttccattgcttatggtatttatatgaattttcccttttaaggaatttctttgtcactcattttcggcatttcttcttttatttgccaataaattttcattttctccattttttctttctccgctattatttttcggctaattccaaattgcttcatccattttttaactgtgccataacttactctgattttcttacaaatttcggcataattttgttgccattcttttcttgaatattttcttcctttttgcttaaattcatttgttatttcagcaaatttctgcacaatttcaaatttttgctcatcagtttttgatttgtagcatttgtttgttttttgatttaatcccaattctttgatccatttataaatatattggcgatttgtgcccaatttttttgctatttttccttcaattttactccattcttttcttgggtattttcttcctttttgcttaattttctcttttatcttattgaattttccaattatttctctttttttctgttcttcgtttcttttttcttcccatttttctccaaatatttcatcaaatgttttttgttccaattttttattttcagatccgatctgatcagttagggtgatcaaaaataaaattaaacagaataataggcacaatttcaaatgcattattttaaaatattactaatttttaaaaataaaatgcacaatttggcagaatttgtttaatgttattattaaaatgattaactatataaatttgatgacgttaattagaaaatttttcgcctgtttattggctttttcaaaattaggacacgttatgtaaatgcaggacattctttgattttttacatta

SEQ ID NO: 34299 - DNA, 1028 bp, Heterodera glycines
cgaagaagccataaataaattctgtttttggaaagaaagaaatgtgtgccaaattttaaatttacaaatttaaataacttaaaaatgtgaaaatattttaaattaatactaagaataggcaaattataaaatttaattatgtatgggaatttatttaatatatgcaaaaaaaatttataataaactaataaattaggaatataatcgtgtttttccacaatgatacttaaagcaattaaaaagtgaatctttgtaaatataaaaaaataaaattaaaataatgtttaaaaaacatataaatttaaattaaattaaaattttaaattaatttaaatataaaatgggatttaaaacatttatctaataaaaaaaattatatttaagcaaaaataaattttttttaatttcttttaaaattgaaaatgagataacctcccaactctcgaatgcttttcctgctttgtaaaatgctgcttcttcccttgcccacctgttcaaacccgtcgatgccctccaccgtgtccgcgtcgcgcagcgtgcgctccaccgcctcatacggcaccacgtgcgtgccgttcacgaaacacacttgcatcactacctttgcggcttgagatggtgacgaaaaaaggtcgtcgccggggaaaattgggggccttcgtatgaaaaattggtcctggcgcaccccttgttcatgtatgttcctcatcccctcccccaagtcgtcatatattccccatgttatttgtttttgttttttttacctttatagcaatttgtataattcagcccatgaccaaaaccactgttgtgtgccccccgggtaattgtaaaataaacagcattattggtccttttacttattttttcactaaataaaaaaacccttcattgtttcaactatttgttcaaacgcattattaagataatgatggtcattctttgtgtattacctaatttgtagaatcaattaagtcggaattgtccacttattcgaagttcgtgggtcaaaatggacggttcaaaat

SEQ ID NO: 34300 - DNA, 814 bp, Heterodera glycines
agggaagctattcccgaagggattcggtctccccatatatctgggcgcatcggttcggggggactgccccgaaaacaaaaataaatcgattttttcaagtgtccgtttggggtactcaaacaattatggggagcaaaaatccaacgcagaattaaagtacaggctatagtgaagctattccggaaggattcggtctccccataaatctgggcgcatcggttcagggggactgccccgaaaacccaaaaaaaaattttttggataaaaattatttaaatgaactgactagataatatttaaaataggttatttctcttcctttcagtatccctgcaaagtttggtgcgcttctgatcagtttctgaaaaaaaagttaagcctaaactttttggcctgtttaaaaaggaattaaaaatttttaaaaattttattcatctccctttttgatagaaaaagcatcagagtgcctaaactaacatgtaaataaaatttggtgcgtttcagaaccctttctgaaaaaatatttaagaattaattttgcaaaaaataaataaaaacgaaagactcagattttcgaaaatttttttgagccagctagctcggcgctcatttcagtgtaagttagtcctttaccggggagtatccctgcaaagtttggtacgcttctgctcaattagcaaaaaatatgagtgatcgaattttcactaaaaaagttaagcctacattttttggcatatttaaaaagcaattaaaaaatttttaaaatttaataattttcctgcaccgaaggtactcactcggcctcttcgcggct

SEQ ID NO: 34301 - DNA, 1341 bp, Heterodera glycines
attttaagcatacattttttcctcatcagtggacgggggcacgccccgacgtgttgggtgggcaggcagagaagagtggtcgtgggaaaagcatcccccccgggcattttcatcagtattttctttatccactcactcatacgtagtggcacttttcaaataagcacccacccacccacgccaccaactaaaagcaaaaattccaccaatcgtgtggaagaaaagtaacaaaaataatccaatttttttttgaaatgggcagcagctgatgggggaaggaatgggtttcatgtcgttgtcgtcgtggtccactcactttcattggacaacaaatgacactttgctgcttgctctctctgtctgtttttgcccattttacggatctgctggtgcacctcaaatgcttgaaagtggacactttggtacctatttaggttgtttttgaacttgggaactatgataaccagtgttttcgtttgtctttcaattttattgaatccaatcagagactaaccaatgccatgccattggttatgaaatgaatgtccgtctgtatgtttgtaaaataaaatgtgtgtgtgtgtgatgtgagcaaagggcaataaagtgagttgaaaattgccactgaaaaaatttgtgtcttcagtcggtgcgttaatgaaaaataaataggtaaaataacaaaacggacattttcaaacgatcaaagtgggaacacaaataataagatgataatgattaaatgatcaataatcaatcaatgcgcgcgtctcatatcaaagccagaagaagagcaaaaaggagaaacaagcaaaaaagaaagaaagaaagcaattcaatcaaaaaaatcagatcatcaacggtctccccctctgctggccgcgttgttgttgctcaagaattcacggactgaaatgttcatgttagccggaccactgctcatcatcatatttgctgctgttgatcgctgctgattgtggtggtagtgttgctgatgctgctgctgctgttgcggttgttgatagaccaccgcaggagaagcggcagaacgtcggtgatgatgttgctgaacagctcggccacccgctgtcgctgaagatggcaacgacaaaacatgatgttgctgctgctgatggtacagttgctgttgttgttgcggcatcaccaattgcgctgttgtgtcgcctgatgatggtaatggtgacggcaaagaaggccccgttgttgttgtcagcagcgtgccgtgcggcatgggctgaagggtgcctggcggcatcaccgccaacggcagaacacgtggagagtcttgcaaccagcgaactgttttttggggtttgggaa

SEQ ID NO: 34302 - DNA, 1266 bp, Heterodera glycines
caaaactaagagattttgtactgatttttattgacaattctatttatttctcacgacttgcgacgtcattttaatgttgacaaattcgtcaattaattaattacctaattaattttttgctaattgttcctccgtttcgttcacagattaaaaaaaaaaagcaattggaaaggcaaaagttttaatgggaaaagagagaaatattaattaatcattattatcattttattagtttatttttgcgaaaggaaataaaagtcgacgcttataaatgaggaaaaagcaaaaataaaacattattttaaaatgtttaaaatatttattaatttaaattaataataataataattataattatttttttttaatgcgatttttccttttgcttatctttgcctattttgcctcaacatttgcccattaaaaatgttgctcaactcttccaaaatcactgttttcttgatggcattcttcattttggccttactttttgttggcattaaaacggaggaaacaaacggagatggcattggccaaccaaaagtgaaaagtgataatttgaaacactaaaatttgattccaaactttaagattggccaaaaatcggcggcaaatggctagaaaaaacattcaaaaaagtaaaattgactagaaaatttaaggtaggcccaacttggagaagaagccgagcgaaaagcgccaaaagcgacagtgggggggatggccacgaagcaaagccaattgaacgaattcggatgaatattcgattaatttaataaaattttttacttgccaaaaaaatgtttaaaaaaaacaaaacaaatttgttttgtaatgcttttactgacaaattcaattttgcgacgtcattttaatgttgacaaattcgtcaattaatcaattcattaattaattaattcttaaatggatggtaatgtcatgctaaattgtcccattatttctgttttgttttttccctctgatcattctctggcgttttccctttcctctctgataatttaataaatgaaatacaggtgctaggccacttcacaaaaggtgcaaatttgggcgcttcacaaattgtcataacttttgaaaaactcaataaaatttgttgaaatttagcaagctaataacgcaattcaagggctatcgtatgatactaagattgtgcaatttggtggtgtctgagaaaagttatgagttcatttagtcaaagatttagcaaaatttgcacgttttgtggagtggccaaccatggaa

SEQ ID NO: 34303 - DNA, 993 bp, Heterodera glycines
  unsure (1)..(993): unsure at all n locations
gacgggtgcgcatgactttctgaaaaaaatatttatgaaacaaaaaaatcgattttttcaagtgtccgtttggggtactcaaacatttatggggagcaaaaatccaacgcagaattaaagtacaggctatagggaagctattcccgaaggattcggtctccccataaatctgggcgcatcggttcggggggactgccccgaaaacaaaaaaatcgattttttcaagtgtccgtttggggtactcaaacaattatggggagcaaaaatccaacgcagaattaaagtacaggctatagggaagctattccggaaggattcggtctccccataaatctgggcgcatcggttcggggggactgccccgaaaacaaaaaaatcgattttttcaagtgtccgtttggggtactcaaacaattatggggagcaaaaatccaacgcagaattaaagtacaggctatagggaagctattcccgaaggattcggtctccccataaatctgggcgcatcggctcggggggactgccccgaaaacaaaaaaatcgattttttcaagtgtccgtttggggtactcaaacaattatggggagcaaaaatccaacgcagaattaaagtacaggctatagggaagctattcccgaaggattcggtctccccataaatctgggcgcatcggttcggggggactgccccgaaaacaaaaaaatcgattttttcaagtgtccgtttggggtactcaaacaattatggggagcaaaaatccaacgcagaattaaagtacaggctatagggaagctattcccgaaggattcggtctccccataaatctgggcgcatccggttcggngggactgccccganaacaaaataaatcgatttttttcagtgtccgtttggnggtactcaacattatggngagcaaaagtccacgcagattaaagtacagctatagtgagctattccggaggatcggtctcccataatctggcgcatcg

SEQ ID NO: 34304 - DNA, 1414 bp, Heterodera glycines
  unsure (1)..(1414): unsure at all n locations
gatttgatatttcgtcttttttgaccctagatttatgatcaacgttaataaatttgagatatgcttnaaaaattaggttacaagaaagagggacgaggtgccgccgattagcgcgccagggaaaatttttttttgaaaaacacctacattttttgttgataaaattttttcgtaatttgcctaataaaaagaaatgtgctcttcacaaatactgctgctgttcccccaccagtgtttttgcttttattagcatttttcgcttaaatccatcccctcccccctctcccgtcatctgtcagcaattgtgagaccaatacccactaaagcatttattgtaataattccaaatcatcgcatttacccttctcatttggcttattgggaggggctgtgggagatgagaataaaaaatgaaaatgatgatgattatgagaagaggaggatgacggaagggggggggggcaaaaatcgtttcaattttccattaatttaactcataaatcctaaaaattgtcaattttgcgaacgaacatttgaaattaattcaaaaaacaattttataagaaagaattcaaaagaatattttaaaaagttccgattgatgcaaatcgcgatcaatttggttcattgattttaacataattattttttaataaaattgtcatatttcatgggtttatgccaaaccctttaaaaaatggcaaatttcgctgattccaagaaatttatttgttaaatattcattccaattcattgaatttccccttaccatttggcttacaaattagtgggggggggggaggaagtgaataaaaattaaaatgatgagcgatgtgtaaaataagtggaggatgacggatgggggaggggggaggtggacaaaaatcctttgaattttctcgtaatttaactccaaaatacgaaaaatttatcaattttggagaatattttattagaataagtggcaaagaatagataaaaaattttccgactgatacaaatcgcgctcaatttcgtccattgtagcaaatatattcacattgaatgtataaaagaatataaattttcataccgtcagaaattacaaggtaaaaaaacaactatcgagacatatttgcgacaattagaggctaataataaaaaatgattaggatgcaaaggcacatcttttttttgtgtttttcaataaaattttatttttcaaacagttttaacaaggtaaaagggatcaaattaagaatgtgtcttcatactttttcatgcttttgagaaaatggataagaaattagctcccaaatttgagtgaaaataataaataggcaaaaaatccagtttattatatacccttgaaataaaaaaaacattttttcctatttctgtgacttacaatttgcctatttttgtggctacatat

SEQ ID NO: 34305 - DNA, 1271 bp, Heterodera glycines
tttattttttttgtgttatttgataagttcagcatttttatgcattaaattaattaacggtgtcttttcttcgtcctctgttttttaaaagctctttttaagcatttttattccttaatttaatttttaatacataatataacccctaatattacttaagattgattgatgattgatcgcttaatatattttcaataaactcactttcattttcatttatcattcattatacatatatctctcctccctttttccttatcatttaatgcctaattaattgtaatttaaattctttaaaattttgtgtctttaattctccggataaaatttcgtgaatcttttttcaattttaatttttccatttattacgtcccattctcataaattgccatttccatttccatgccaaagagttataaacttttattcctttttttttgactttctttcgtcaataaaaatcacacattttgtggttctgtgctgaaaatgcattggcaaaagaacggcgaaatgagtcgccgcgtttaagcgaatcgataaaatgcacagaaaatgagcaaaaaaaaaagcattttgcttcataaatttaaaatagacaaaaattattttgtttatacagttaatttatttagctaaatatatttttaattaattaattttttcgacttaaaatggccattcaaatgttcagcagctgcagcttaatcacttttgccattcttcttttttctatgttgattgaggcaagattcttggacaaacgaagtgagaagccgctaaaatttgcataattaggcccaatttggtattggtggttttatttttttgacagattttaagaggtatcttaacagctgattttgtttgacacttaattagcgcattaattaattgcttgggtgggaaggaatttccggttttttagcctctaatttccccatttttttggtttacattttaaaacaaaaataaattaaattttattttagtccaagtaaatcaaatgcattaattacctcctgtattaatttttaaatattctctgaggtgccaacattcgcttcgtcgttttggcattatttccctcttcttcagccgataattgcttttacggcatgcgccatcgcaacatcccttcgggtggccttgtcgcgaaaatgaccaagtggaacacgttcaacatgaagaagggcgaccggatgaatgagcacgactgtcgcgggtcgtttgccggctgtcagacgtattcatgcatcgatggtggcact

SEQ ID NO: 34306 - DNA, 832 bp, Heterodera glycines
tgaaattttattcaaaaattcggatatttgcttccattctcctggttgttatcgacatttcgatcgtgaagggcatttagcagtgcacgtgtttcaccaacttcccaacgaacttttctggagtgccgagatgagcaatttaaaattttaatcgaaaaaattattcataaaaaatcgttgcacttctgtgcatgtgctccattccctactcactgatcagccccgccaaacgagcaatgtccccttttccacgagcgtcttttctcgacatttgcgacatttgctcaccgctttgtcactctatccatttccttttcggctttggcgaagctttcaccgattcggccggggccgagaccaaaatgaacgcgttattgatccaattcaattccggaaaaaaagatcggacaagtcaccaataacaaatggtccaatcagtctcgaacattcacgaattggcctcgaccagtgaattgagcctctgatctatgacgagtagagatcggatacggacgggatccgtatacggatttttacggatccgtagtccgtaatccgtatttttttggccgatacggattttttacggactacggattttacggatttttaatccgtaagtccgtatcgatgttaagagtccgtaatcctgatccgtataaattatgacaattttaaaaaatccgtatacggatccgtatttttcctggatacggatttttacggaatacggattttccggatttcttgtccgtaaatccgtaatccgtatgtgtatctagtccgtaatcctgatcctgatacgtattttctcaaaatgccgatctctaat

SEQ ID NO: 34307 - DNA, 1226 bp, Heterodera glycines
caatcggcataatataacatccccgcttggggtcgtggctcacactacaaagttggcaataggtctctccgcattcatgttccttcttcgggttaaataaatatgtcttgtcacaaattacacagcgcttccataagttgcaagtctgatgtccctgatgataattatagcattcccaattgtaaaagtaacgtcgacacttcgtgcattcaatcttcactccactctccttttcacatggcattcctcccactctattgcaataataacatctcgcccggcaatcgaaagcatgcttaacatccttgtcgtaaaaacattcgcaatcaatgcagaatttcctccctcgattaaaaaagcagacgaaattcttcagaccatcccaatggccattctccaagaataacggcacgacattttcacgccccataggacctttccacaaaacacgtatcgatttcctcggatccgcagatttttcaaacgccacaacccggtactttccggggtaaatctcatcctgaaaaatttattaattttgcattttttcatttaaacccacccaatatttctgaacattcggcaattgctccacaccatagctatattcgttaatatcaattccacaattatgtaaaagttcaatagctgaatccctctgtctcacaatatttttcataaatcgattaaaaatgtttcgatgctcttccaaataaagctttgacgccaccaatgcataaaacaaacaaaatttatccgcatttgtaatccttaataaaattattattatttccatttattttttctttattatttaatttattttttaaatttttttttctgttttttttgctgctttgcttaattaaaaataattatttcttttttttctttactttaattattatttaatttttttttgattttttaaattttattttttatttatttaatattttttaatatatatttttttgatttttaaaatttaatttttatttattttggctcattaaattgttattttttaatatttttaatttatttttaggttttttgttgctttttttcattttttctttaaagaatttttgcttcattaataaatttaatgtatttattttaaatttatttattgttttttttattttaagttttttttctattttaatttattttattaaaaacacttaccctatccgctggtgttccttgaatccaaagtc

SEQ ID NO: 34308 - DNA, 1003 bp, Heterodera glycines
ttttttcttatcaaaaagggagaataaataaaatttttaaaaatttttaattcctttttaagcaggccaaaaagtttaggcttatctttttttcagaaactgatcagaagcgcaccaaactttgcagggatactgaaaggaagagaaataacctattttaaatattatctagtcagttcatttaaataatttttatccaaaaaatttttttttgggttttcggggcagtccccctgaaccgatgcgcccagatttatggggagaccgaatccttccggaatagcttcactatagcctgtactttaattctgcgttggatttttgctccccataattgtttgagtaccccaaacggacacttgaaaaaatcgatttatttttgttttcggggcagtccccccgaaccgatgcgcccagatttatggggagaccgaatccttcgggaatagcttccctatagcctgtactttaattctgcgttggatttttgctccccataattgtttgagtaccccaaacggacacttgaaaaaatcgatttttttgttttcggggcagtccccccgaaccgatgcgcccagatttatggggagaccgaatccttcgggaatagcttccctatagcctgtactttaattctgcgttggatttttgctccccataaatgtttgagtaccccaaacggacacttgaaaaaatcgatttttttgttttaggggcagtccccccgaaccgatgcgcccagatttatggggagaccgaatccttcgggaatagcttccctataacctgtactttaattctgcgttggatttttgctcccacataattgtttgagtaccctcaaacggacacttgaaaaaatcgatttttttgttttcggggcagtccccccgaaccgatgcgcccagatttatggggagaccgaatccttcgggaatagcttccctatagcctgtactttaattcagcgttggatttttgctccccaataattgtttga

SEQ ID NO: 34309 - DNA, 930 bp, Heterodera glycines
ttttctatacaaaggccgggcattttttcagtttggacccgcaaaagttagaaaatctacagaaattgcttctttttctttttttttgatgaaaccttgagaatgtgtttggaatagcctccgttgtcgtccttgcgaagctggtgcacaagcgaaagtcgccttaaaaaacggagggtaaaaattgaaaaaaaaattaatttttcacaattttaattttgttttcgctcaaatggcaattttgttgaaaaaacccaataaaattggcattcctttgggtttcctggaccataacatttcataagtttcaatgaacaaaataattttgactatcatttgaataaaaaattaagcgaaaaaaaatgaaaaatttgtcggcatttttttcaaattgcagaaaaatttgagatatttttctctttacagactctgtcttttgacaaatgaatttacaacagtccaaaaaaaaaccaggaaattgtattggatctgatgttcttacatacaattagctaaaatcgcatggactcgcaaaattttgatgggacacttaaaagtccataggacgcgtttctgtgaccctaatttttggccggaccgttcctttttcgcgttccttattgaaattttcttgggtagaaaaaagcgcgcaaatttttaacattcaattagtgcctcaaaacattctccatggaatgcacccaaattcgtggacatccgtcacaattttgggcccttcttttttcgtctgtcccttttgcttctttcttttcccgttgcttttctcgtcactgctgctgctgatcggctccggcggaatgtccaaataggaggcgcacaaaacgatggaaccgacgtcgacgcactgaaatttcaaaaaataaactattcggcaaatatcggagcgcctgagaatgggggggggggggg

SEQ ID NO: 34310 - DNA, 1004 bp, Heterodera glycines
tttgcgaccgctaatcacattgatatctcgatcaattctgtaccctgactaaaactttttagtgctattttcaatgggaaaattctcggagaatatctaaattttgtttgatttgaacttaagtttatgttttgcaaagttttggtgttctgattaattaataaaaaataagctaatttgcgtttggagcccaaaattgaatctctgtgtgctgttaataatccgctcctgctctgattatttacaaatttggtgatatttgtcattttctcaaattttcaatgagcggttacgtcggcatcaaattttgccccgaatggtattggttttgcttaaattccattaaccattcccaccaaaagcaataacatgctttacccgcgtgaagacaaacaaaatcggcagcttatgtacgtttgtcggaattgtgagcacagcgaaccggcggacaatccgtgcatttatgtgaacaaactgactcacgaagtcgagtgcgttttgtagtcaaattgcaatgaattattttaattgatcacccttaatgagttaagtgagctgacacaaattgtggcagatgttattcacgacccgactctgcccaagacggaggagcacccgtgccccaaatgcaaaaacgccgagtcggtgttcttccaggcgcagtcgcggcgagcggaggtttgaacctattttgactgaccatttaataccctttcatattataattagcaatttgacatggcatttgtttaatcagctggtcagatttttttctggttaatgcctaacgcgcaccgccgggtcccaatttcttatagccgaagtttgtctcaaaatggccaaaatttggcgaaaatagcagaaatattttgcaaaaatttctaatccgatttccgacataagaattcttccgaattccatcttttcctttcctaatttgttttctctttctttccccacccattctgagggagttgacagtgagatgcctattttttaaattc

SEQ ID NO: 34311 - DNA, 1039 bp, Heterodera glycines
atttgaagtcttgaatttatttgacaaatccaagacttataaactgggagaagcaaggggctgtggctgggggcctaaaatttgggccacattggagaattaattctgatttctgaaaaagtcccagaaataactattttttctttccataccttcttgtagagctcgagctgctctttccaatggtcttatcccggtctcgatccgtgccgaactcacaaagttatggagtgaaatgtgaaatattgttttcaccacaaggcattttttctgaaaaccggattcaaaaatctggggtttggtataaccgttttagaaatagcgtagaaaacagcttcgatatcaagaaaccaagtcaagtccagaaaggaatattttaaaacgatttcgttttgttttggcattatgataccgaataactttcggaaattatggaaacaaaattggagaaattcgaataattttttgactgcaaatttttttccttttttgaattgggttcaaaaaaattttaagagaatttttgattattaatttgaagtcttgaatttatttgacaaatccaagacttaaaactgggagaagcaaggggctgtggctgggggcctaaaatttgggccacattggagaattaattctgatttctgaaaaagtcccagaaataactattttttctttccatacgttcttgtagagctcgagctgctctttccaatggtcttatcccggtctcgatccgtgccgaactcacaaagttatggagtgaaatgtgaaatattgttttcaccacaaggcattttttctgaaaaccggattcaaaaatctggggtttggtataaccgttttagaaatagcgtagaaaacagcttcgatatcaagaaaccaagtcaagtccagaaaggaatattttaaaacgatttcgttttgttttggcattatgataccgaataactttcggaaaatatggaaacaaaattggagaaattcgaataattttttgactgccaattttttttccttttttgaattggggtcaaaa

SEQ ID NO: 34312 - DNA, 984 bp, Heterodera glycines
aagtttcatcgaacctagcgcactaaaatcgatataatctctccaaattttgcaggccttctccattgtaaaggactaacttaacctgaaaaaatgccaacgcttgttgtttttaaaatttttcgaaattctgactttttcattaattatttattattttgcaaaattaattcataaatattttttagaacgtgctctgaaacgcaccaaatgttaataaagttaaataaggctctctgatgctttttctatcaaaagggagatgaataacatctttttaaaatattttccttatattttggttatttcgttctactttcggtggggtgcttggaaaattggaatcatgcgtacccgtccgatctgacaagttaagcaacgctggctgactagtcaaaaggatgggggccgtgatgaaacgaaaccagcactgcttaccccgcggcacccggcacggacccccgaaggaatggaattaattaaattctctccttcggggattttttttccattaggtcgaccgttagctttcgattggtctagtcaaatttttttatttaaaaaaaaaatttgttttttgaaggcactctgatgctttttctatcaaaagggagatgaataaaatttttaaaaatttttaattcctttttaaacaggccaaaaagtttaggcgtatattttaaaagtttcatcgaacctagcgcactaaaatcgatataatctctccaaattttgcaggccttctccattgtaaaggtactaacttaacctgaaaaaatgccaacgctcgttgtttttaaaatttttcgaaattctgactttttcattaattatttattattttgcaaaattaattcataaatattttttagaacgtgctctgaaacgcaccaaatgttaattaaaagataaatcagcctctaagacgcagggtctgtcaaaggggataagaataaatataataaaaggtgtaatagttaggtg

SEQ ID NO: 34313 - DNA, 1425 bp, Heterodera glycines
attttcaaggaaaaatctgaaaaaattgctcaaaattttgtgccgactcagtatcaagaaaatcggaagaaaaaaatccgttcaactccctttgtgttccatccaaatcccatccttacgttacaacatcctactgtatcttcacatcccctactgtcctttttatatatatcaaaaacgtgtggcttctttttatactgttcaaatttctttttgtcgttgtcctttccgcccaacaatggaagtgatttgaccatctttcctaattgcttccatttttgcttggttgatgatgctgcagatgagcttgcttcttcgcttgaacttttttcttaaataacactttcgattttattgttcattttttgaaattataaaaatttttctcaaccaaaattcattttgttttatgttaaattattattatttatttattttttattatacaccaataatactaaattctttatgcaattttcagtgaaaaattcaaattcataatttttttccttctatattttcaatttttttgtccacttcttaatatctgtgtggaagatatggtgggtaaaaaaaaaattcggctagacgagagcttggaagtataaaaaatagcaaaaaaaaaaaaaaattaaattaaattaatcaattaattggacttataattttgggattagcgaaattattttattttttttatttaaaaaataaataaaactgaccagcaaaatattctcttgaaatgcgatatgtttcttcattaaaatatttattgctcttaatttcagctttttcttctgcattgttgatgtagatagttttttgatcaaagctaaccttaaaagcactgacattcaatttatttatttttgggtattttatttattttaccttgaattcgttcatgaattcctccttggtttttaactttttgctaaatctcaggcaatcatttgtttcaactttggcataaattttcttaatactcgaatttttggcatcaagtgtattttgggcaagcgaatacaacttttgagttaactaaatttttttaaaattaaattaagtcttgaataaataggactgtcattttttgaccaaaaaatttttttgaaaaatgcttgactaataataagctaaaaaaacaaccaaaaaaaaatgccattaaataaataggaaaattaaacattttctgtcggcacttttcattttttggcattcggtaaggttttggcgctgcttacccatgctttgtcagtgtaaaatccaatataaacagctcgtttgcaattttttatcgaattaaaagtttccttgcctactggagcctcaaattgaccatttttatccgtgaaaatgtcatcgatcatcaatttttctccacaaaaaatattaatcatctacaaaaaaacaaaaataaaaacc

SEQ ID NO: 34314 - DNA, 1001 bp, Heterodera glycines
aaaattttcaaaaacaccacccccctgatgagaaaggaaaaatttctcaaaaattcatctttcaaaattatttatttattttcttgttagaatttttgatatatctcattaatcatttggcataatatctttgctttttgaaggaaattttcaattttacacccctaattttggaactttttggcacctattttcccatttttagcacctattttgggggtttttagaacctaaaacctacctattttggcagtttttagcacctaaaaatatcatccctacttataatagaggaggacacctaaagctatcgctcaagatctttaatttgacaaagtttaagctaagttatgatttattattcagcaaataaaattaaaatattaattaatttaattattattatcattgatacttttttaggctcgacctaacaccgacccttttacaaaaatttccttgccgaaaatcgtatgagctttatctcaaaaggcttgaaatgtactcaatttgcaactgcaacagttaattttttgaggtcatttttttcgcattttatttcaattagaagtagagttcggaccccgcccccgtcacccccgtccccgcccccgcgactctgacccccgcaatgaatttttaaccatctttgacaaattttttatgaaataaagtaaattttgctgttaacttccaatatatttgtggtttagtggttagtgcttcaacactaaccgtatttcttgttaggagttcgataccggttgacgttttcatttgaatttatttttatctgattaatgcagggtttctttatgttcttatttctaagaaatgttctgattttagggcgtattttcatccaaaagaatgaaatttctgaaaaattttgctaatttctaacaaaattcataaaaaaaaattcccccggcggcgcctatcggcaccaccggcccccaaaaagcgtattttttcttaaaaaaattagcataaatcaataa

SEQ ID NO: 34315 - DNA, 455 bp, Heterodera glycines
ccccccccccaggggtcagagcccatttccattacggatcgaccattttttgcctgctgaagacttttttttgctctccgggccaaaaaaattttaaaaacagaaatttttaaagaaaaaaattttctgtttgaaaatttcttacaaatttattcccggctgtgttatgtctcggttatgtttcggcccggctgtgtttcaacggctgtgtttgtcctgttccggtttctggatttccgcttgggtggcggggttcacacccgggagcaggacaaaacgtcgtcgccggacaaaacgtagggggtctggcggtgccgataggcgccgccgggaagtttttttgtgtttttaatgcgatttattaacgaattttgtccaaaaaattaccaattttatgcttttaagcaaaattatagacgaaagggaaaaagttgatttaaggcgatcgtaaagat

SEQ ID NO: 34316 - DNA, 896 bp, Heterodera glycines
  unsure (1)..(896): unsure at all n locations
aaatggtttttttttatatttattattggtgttctctatgaaaaatcatatatctttttatttacatatacctataattgttttgaataattatatttatttaattggattacagattcaaattttgtttttttttattataccaatgtcaaatttattatcattttaaatatctatttgatttttatttggataggtaaaattatttattttttatataaattttgtttatattttacaactaaatttttaattcttaatatctttctatagccctaagagttctctattagcctataaaatttcaaaaactcgtcaagtttaaacaaagttatggccaaaagtacacatgaaaccggcttttcaatttttggccatacttttttgaacttaacgaataacatgaatttttgtgacagccttcaaataaatatcatcatatcgctttggataaataatttaattttataaaaaatttataaatttgttggataaaatcttaattactttattaaattataaacaattttctgttctattttaaaacgtccttattgttagcatattttatggagaatgccaaagaaagtttgtgttgccaattttagttattaatattatttcacaccttcatatttaaaatgcaatataatttttattaaactgataccaaaatataatttttttcttctacataattctttcctttctattatttgtagagtgcagcgggaccgggaattttgggcaaaaccgggacttggaactaagggnaaagccangagactagccactangccatttgcacacttgntatgttacttttaaagaatattttttttttttcctttgactctaatttcatcactaatttttcgctcagacccccattctta

SEQ ID NO: 34317 - DNA, 542 bp, Heterodera glycines
atataagtattattccgcaaaacgataaatcaaactagaccttttgaaaaatttataacaaatccacaaatagcccaattcactcaaaactcttgggacaaccaaatgtctatatatattcattcattattggtttattgtatttttttatagtaatagattttcaattaaaattgttttaaatttttattgtggaaagtataattaaactatgaatttttcttttccccaaatggattacattaaataaattgttttattatttaattgaaaaaaattatatgaaaaaaatttatttatagatttaaaaatatttggtttggatgttgtaaaatgtttggtttgtgcacacatttcgcattttgtcatatagcggacggctcgaattattactagagaccgactaaaaaggcaccaaaaatctcgaaaaaggcactataaaaggcatgaaaaattgaaaaaaaggcatgaaaaggcacgaaaatcccgaaaaaggcatgaaaaaaggcatttaaattttttttattaaggatttttaggga

SEQ ID NO: 34318 - DNA, 188 bp, Heterodera glycines
caccccaaccgaccgatggtcgacggatcatttcaatcgccggaacagtgaaatgcctttgaagggaaatgaattatcaaaacaaaaataaaattattgtaacaattgtgagaaatgaattactttttcctcctaattaccttcgttaatttcctttaataagtgaaattatttaaaattttggcaaa

SEQ ID NO: 34319 - DNA, 941 bp, Heterodera glycines
  unsure (1)..(941): unsure at all n locations
ctttcaatttgaaaaacgaaatttaaatttaattttttccttccaaattagcatattaattaacaaattaataaaataatacatcatcatatgttttgttctgctttgatagaaaaggttttgctcttgctgcttgtgtttctgcaatgctgcttcaccaacagttatggcagtatggcaattaaaaaatttttatttttaattatctaacaaaccctacggtggcccgagattgtgaattcaattttttgtacagtatccatgttttaaaattcaaaaacaaatcgcaacaagtcatttttagacatggttattccacacgttttggacttggtgtatttcgtgaagacaaaagtttttttaaattaggcctctctctattcggggttttcgcccctaaaaattttcactcctattaattacaagcaaaataatttgaaaaaaattcatgcaccgcgtacattcttccggaatttctcgttttcatattgttcattttttccaagaatatgattgttttgtgaccattcgtcaccgtagtggcacaccgccggacgaaatggtgcaatatgtcaagggaaatgctcaactgaatgccgacattgtgaacagtgattcgtcaaaaaattgtccacttggagaaccgactttttgggaaaagaattttctgggcaagaaaaaatcatttaaaggatgccataattttcggtgtttggatggtaagtttgggcttaataggtgcaaaattttggcaaataaattaaattaataaaatgtgtgaataagaaaaaaaaataatttgctcaaaatcatagggacatttttccganattcaagcaaaaataaatttaaaaaattgatttnaaaaattattaaaattgataagagcgacgagaaaggcaattgngcgccngccccagtttttggcgttnaaaaatttt

SEQ ID NO: 34320 - DNA, 91 bp, Heterodera glycines
cggtggtgctgctcaagcgtaaagacttcatgctgtactgcttcgatccgcatcatgcgcgggtgattggcctgccggtcaagctgctgca

SEQ ID NO: 34321 - DNA, 1094 bp, Heterodera glycines
  unsure (1)..(1094): unsure at all n locations
ttttgagcgagtaatatatgtacatactattnntttaaatttttcattttacagcctccgcggngtgtggtgatggctggtgatgctgtggtggtccctgacgtaactgcggaggcatttaaggcgatgttggcatttatttattcggatgatttgagtggactgaacggagacaatttgtttgacgtgctttacgcgggtcggaattataaaaaaaaaaaaaattttggaaaattctgcggatgcctcctttccccctccgcgatttgtagaaaaaattcctgactttaaaaggttgtaaaacatttttcgaaggatttcatggcgtagaactcaattctgtcattatttcgacatattaagaactccggagtcgaaaataatacaatttttcgattttttcggattgttcaaaaattgaaacaaagcaaaaatagttgcaaattcattaaaattatcaaaaaacaatttttccatacagattggagcatatgtagttgaaattttcgggaagttgtttgaattttttgacttttttgttcgaattcggatctgggatccggaatataaacggatgtcgggggaaccctcgacagcattaaaccttctcaaaattcaattaattaattaattcatgtaattattgtaattttgttttaagccaagaagtaccaaatcaatttgctggtcgatgcctgtgccgattttcccgtttctaatgtccaaaacattttcacagcatttgtaagagcacgcttttttggagaagaggtgaagccggggggttgttgcacttttgtattggaaattttcgggtgcactaagtttgagttatgaattttttactgaaaaaattagttttttataagaaaatttcaaaaaaatttttttggttgtcttgaaaatttcgagctttaccactttttgggattttaaatttgtcagagagaaaacggatctgcttgctactcattcccgaatcccccccccccccccctgaggttacgggggcggggggggggggggaggataagaccaagggtttatcattttttaaatcctaatatttatgaattttgcctaattaactatcc

SEQ ID NO: 34322 - DNA, 1621 bp, Heterodera glycines
  unsure (1)..(1621): unsure at all n locations
ttgcactcattccaatgccctttcatttcaattattacatttccatttttaatttgttatcattatccttttttcagttaaatctttgccattgcgctgctccgaagaaatgaacggatcgcccacaaatttctcgaaaaatgagaaaggctttgagccgatggcggaagtgcagctgctgaaggacgacgatcaattggtggtggaggagcgatgttctgcgttgtggaatgagatcaaggacgccggggtgttggacggggccgaattatcggcgagttttgacgaatcgatcggttgattgattgatttattaatgtggggatgttgcgcgagagaaagacgcggagagagagggcgatgaatctgatcagcaaatctgaaaagggcgagggaagggagtaaatatttatcggatcagcgggggaccggacgggcagcaaaaagtgcggaagcaagaaggaaccgatcaatgcaaaaggggattaagcggctaacggcggataaattatctgtcgataaatgagaaatgacattgctaaaacacattcctaaaatatttgctgattttctaattcctttcagaatgcttttttggctcagctccaatcggaaagtgaccaattggacgaacaggttcagaagctcgcgcaaaagtcggagacattggcagcgaatgcacagctcagactttgttcggtttggacagcgttggaggagctgaagcggaagaagcagcgaattgcgggggaaatggggggttagtggggggggggtgatcagcaggaacaggcgggctgataagaaatgggaggaaagggaacaaatgattagtggaagagataatgataatgatcaaagagaaaggggcaatgagaaagtgatcggataaagtcaaatcatcagagagaatgggagagagagagaagagagaaataatattcaatggtcagagaggaaagggcaangagagagtgatcagaaaaagtcaaatgatcaaggagagtgagggaataattaaacagggaaggataaagaaagagagagagataaaggtaatgatcagagaggaagaggcgatgatagagtaatcagatgagcagaaagaatgggagagagagagagagaatctcatggaggaaaggacaataagagagataatgataatgatcagagaggaaagtgcaactagagagtggttagaaaaagtcaaataatcaaggagagtgagagaataatcgtagagaaacggataataacatagataaagacgatgatcagaatgtacaatgagatcgataatgataatgatcagagagaaagaaggaagagaaaataatcaaaaaaatttaaattagagagaatgggggagtgattcgtcttccgttcaatttggcactgatttgttttcccatcgccacagattttcaccaccaccgaccacagattggcgctctccgcctcatcaacagtttccggaaatggctgaaacagaaggaggcgcaacagagtcaggtcaagcagcgcattgcccactcccacgacagtgagtcgtcattgcgcgagttggagcaggaacaacaagagcggaacatcattcagcggagtttgggggcacgga

SEQ ID NO: 34323 - DNA, 719 bp, Heterodera glycines
cgggcacagcgaatcagtgcaaatgccatgccaattggcactgcttggcttccccgcccccgcctctctccgcgccactcgtccatttctttccaattaattgtccctcatttctttgtccatttcagcttcgtttactccattcgttaccttttcccaatgctttcgtcccatcatcgcgaatcacttctcctccaatacggtcattcgcaagtgctttactcggacgaattctgcaaattgaccgacgaaattctgatcatcaaaaagttcttttttggcactctccggccaaaggttgtgctgctgaaggacattcgcgtggtgtacttcgacgagcaaaagaatcagcagaagaaatacgcacatcgccgtgtgtgggggcgggcgccgaattcgctttattgggctgccgacttcaaacggtaaaaggggcgaagggcggttcaattaaggcaaaaaagttgctaattgattcgacatatcattgactaatgggttgctttttattggcaggtgtttgcctggcgttgacaagtgcaaccgcagtgacgtcatcatcgacatggaagacggactgctcaaagggttcaccgtggccgatgcccagtcatttctgagcgtaattcgccttttcgcgccgatgtcgacgataattgtggacaatttggacattgcttaaggcacttttcgcctttaatttcggccattagtagtta

SEQ ID NO: 34324 - DNA, 981 bp, Heterodera glycines
  unsure (1)..(981): unsure at all n locations
gaattcgatgtcagattggagatcagcgtcctctaataccctcggataacaaattttcatggatttttatctcaaaaaaattttgcaaaacaaaagggtccccccttttgtttttgatagaattcaaaaggttactctttgcaaatagcggccccggttttgatcccaacttatataattaatttttctgaatcttgagtagcattttttatttattcactatgattggtcaaattcttcgatggaaatcacaaaggataatgatatgtaagcatttaaaggctttaacttgaaaatcccaaatttagtggaacatataatccgggacaactttcatgattacgacgttccgtccctgccgaccaatgcagttcgcccacatgtttgtgtgaattgataaattacttttagaaattaagaacttcaccctcatttagcaaaggaaacagttcacagatttgccatttgatcagcaggagaaggctttgttcgaagattttctgtccgtttgtcgcgtgggtccatttgccattggcaaaacaatcgtttaatttttgtttctttttagggcatcaatgggccattcattcaatgcgaacaattagacaataacgaaatcatttgggtatggacggcggagaattggaaacagaggacggataatcagaacattgagcggtggatgaacgtctgtttcagcatgggcaccactctttttgacttgcttttgtgcatcggacgtacgcctttttccgggggggggggacgtttatttgggtacttttttgggcttacacctcaaaatttaaaaaagtttcacattcaataatttaaacgcaaaaccgaaatggagaggtcctttatcgctactttaatttatgctatgtgaatggtacgcaattgtcccttaagcgtgccctttttgacattttttaaaattttgaggtgtaggccctaaaacggaaaannatacccattaat

SEQ ID NO: 34325 - DNA, 1283 bp, Heterodera glycines
atataattactctcctttctaattaatttaattggtttcttttatttaaaaaagagaatatattcttcttcgggttttattgtcataaatgaattaatgcatcatataataataaaaaacggataaagctatcttcatgattcacaatttaattttcaaaaatcgttaccgtaatctgtgcctaataaatttcaacaaaaaatgaattgtatgttaaatttcaaagctttcatattgtgttttacgctaatgaggcaacaatcggattacggtctgatgaaatgaaatacagtatcagactgaaagaggaaacaataaataatagcgaatgggttcaatttttgttgcctctgttttggcgttccgtcagcacttccgccgtttcactttccgccgtaggcatggcgaacagtacgccctggtactgtaccccattaatttccatcgacaccaccatggacgagggatcgttgcccgaaaaagtggctgttgtcgccggaggcaaattgccagcggacgaattgccatcagtggcattttttgattctaaaagaccgcggggataataacccgaaaccgaattaaatttgagaaatttatgattgggttcgaaaacaattttgaaggaaatgccctcggcgaatttttcaaaattaacaaaattcggtaattaatttgggaatttaaaatttttaatttccaaaatcattttttggaaaacagccatttcgtttcgtccaccttcgccgttgttcactttgatgttgaaacgcaacgcattttttagcaaatcgccaaacgggccgaggggtgacgcaacggaagtaccatcgccgcaggcgatggcattgtttttcggcacatttatcgacggggcacggccaacggatgatgaatgaggcccttggtcgctcacatttcgcattttctcagatgaaaaattatccgatcagcaattttctttgttacagtatcccttccttattggcactttttgccaattttccctccagaaattcgaattttggtcatgagcgccgcgtccggcggcagatagtgtatgaggcgggttgaggggggaggtggcataagtcgagagaggaagttgagggcgatgaaggtgcgggccggaggaggaggagtcgacactcttcctgattagaacatcgattcagtaattaagatggaggagagagtgcggtggcgtggggcttggggcagtggcaagttcaattgcgaaaagggaaaagcggaaaatgtgaagggacatttggatcaaatgg

SEQ ID NO: 34326 - DNA, 825 bp, Heterodera glycines
  unsure (1)..(825): unsure at all n locations
cttcatctcctattcatcgcttttccgcttcaacttatactttgcgtgttgacaaagtttgtgcacaatgatttacaatgtaccaaaagttatgaacaagtttgtttttccttttaagttgctctttttttcatcctgttttgttgtgttactactgtttcttctgccgatttcgactttcgagtatgtagggagttttaaacgggtgtatttcatttccatttcccctcgcatattcgcagaaatttattggcaatttcttctaatatttcttataaaaaaattttttaattttttttttaaattctatgttagtaaattttaaaaaattctcaaggggaaacgatgcggggggaggggggggggaatgagctgccccctttttaaaacttaacaataaaaatttcttttctttgctcaagaaattgctttggaaaacaaagtcaaggcgtatctatatggagtgaatttatcctttgtgtatgcacttggcggattgactgtcgcactcacgacaattatcattggaattttctgcggcctttacaatttcgaccattacaaggttgctcccctaacccttgaggagcaaaatgtcgggaagtgggcaatagtcaagaattggtgtcccgacaaaaaaatgttaaaaatttttcatgtattttttctatgctaaaaaatgcgctgatcacgaatctgaactactcagattttaaaaatcattgatttttgtccatgacttttcatcaactacttgatttttttattttttaaattattattaaaaanagtaatgaatttggtgttaaaaaatacactggtgac

SEQ ID NO: 34327 - DNA, 922 bp, Heterodera glycines
taattctgcgttggatttttgctccccataattgttttcttccccaaacggacacttgaaaaaatcgatttttttgttttcggggcagtccccccgaaccgatgcgcccagatttatggggagaccgaatccttccggaatagcttccctatagcctgtactttaattctgcgttggatttttgctccccataattgtttgagtaccccaaacggacacttgaaaaaatcgatttttttgttttcggggcagtccccccgaaccgatgcgcccagatttatggggagaccgaatccttcgggagtagcttccctatagcctgtactttaattctgcgttggatttttgctccccataattgtttgagtaccccaaacgaacacttgaaaaaatcgattttttttgttttcggggcagtccccccgaaccgatgcgcccagatttatggggagaccgaatccttcgggagtagcttccctatagcctgtactttaattctgcgttggatttttgctccccataattgtttgagtaccccaaacggacacttgaaaaaatcgatttttttgttttcggggcagtccccccgaaccgatgcgcccagatttatggggagaccgaatccttcgggagtagcttccctatagcctgtactttaattctgcgttggatttttgctccccataattgtttgagtaccccaaacggacacttgaaaaaatcgatttttttgttttcggggcagtccccccgaaccgatgcgcccagatttatggggagaccgaatccttccggaatagcttccctatagcctgtactttaattctgcgttggatttttgctccccataattgtttgagtaccccaaacggacacttgaaaaatcgatttttttgttttcgggcagtccccccgaacgatg

SEQ ID NO: 34328 - DNA, 1614 bp, Heterodera glycines
  unsure (1)..(1614): unsure at all n locations
ccatttatagaaaaacacattaaaaataaattaattttataaaaaaataaaaattaattaattaaaaagtcgtcatgacatgacanaaacatggatgcatncagacgaaacgaaggcncaacgtttcaaaggcaacggacgactttttgtgacacctgaaaaaatggagaaaatatttttcgaaatgtgtgaacgcttttggtccagcgaaaattatcatgagcaaaaagcaaattgcttggattttgttttcaattttgtgaacacattgtgcgagggaaacgcaccaaaaaagacggtaaatttgcgcaaagggacggacatttggacaacgggaacggacatttcatcaacagggacagcatgtcaatgcaaataaccgagaaaagattagacttggctaatgacgagttgtacggggaaaactttgaaaatttggagataaattctaaggagaaacaaaaaatatttgagaaaaattcaaaaatttctgagatatttgagatatgagtggcccacataattttcaaaatttgagtccaaatttttcattacaacattttgttcttttaagttatggcctgataattttattgaatttgataaatttatgtccagaaaatatgaaagaagcagctttaatttatttgatcccacatttcctcaatcggcgctcgataggaaacccattaaattgccaggtaatttttttcttttttggttaaatatttgaattttaaataaaacgatatatttacgactagtgatggacaatacgccgccgtggaagttttttaaattttatttaaaatttggacagatttttcattacaacttgggcttagggtcggtttttggctaattattaaaaaaaagaaattgtaatacgtggggcccggcggtgccgcctcagaaattttaatcttttatgtgcgatttcaaaccacaaactgaaaaattgatcaggctacgagccttatatattacatcatttattattgtcatttattatttaaaattaaagttataattgatacaaattgtcttttaaaataccacaaattggaaattttaatcaaaaatacgaattgcaattcaaacaaaaatgaagataataaagaagaaaacgaagttgctaactgttcaaattttgttttgctgcacacaactggccattttgataagccaataaaagaggaagaggattttgaaaatccaattttaattcacactttgccagaaaaaacggtgcaaaacggcaaaaacattgccatacaattcattctaaaggcatacacatgcaaaatgaaaagcagcaaaaacggtcaaacaagaacattggtcactgagttaaggctgatggacgaaacggtcagtcgaatacagtacattctttagttactgtaagaatcacaaatatcgaaaactgatctatttaagcttagaaatagaaaaatagtggcgatggcatggcaaaaacttacagtaggaaaagaccaaaatttttttatcgctgggcactcacaacctcaagaaaacaaacagaaaataaacattgttttccgacaacaaaattcctattcattgccaaanagtataattttttatattaaa

SEQ ID NO: 34329 - DNA, 896 bp, Heterodera glycines
tttcccgcgttaattaattaattgcctttttgtcttttctcccccagaccaaaaaatggacatccgcgtcttcgcctgtgctctacaacagcttcatacgatccaccaaagcttctggcttcggcatttaattatttcaatagaaaattgaataactggacttataatttgggacggagcataagatcggcttttttgatacaaatcggaaaaagttcagaccgtagtcggtctcaatttgtaaatacaattgtatttatgtataatttatgttccgggataacaaactgcaaagatgtcactgacatacatatgtaaataaatacacagcgttttcttcattgattatttgccaattgaccgaatttaaaacaatcaaagaacaatcaatgcctgcccagggggcgggggtggggggggggaagaaaatcggctttttaaaaaaggcggaaccttccgcgaaatctttaagcaattgccagaaattattttgtttggcggagagggcacagtgtttttgttcgcattatacacgttttaaatcgataataaataagacaaacagaagagatcgctaaatgaaaaggcaaaaaacgaatgaatgaaaatggcacggagcaaaagccaaaggcgaaagggacgccattcatttgtcagggcgtgtagaagtgatttccggtgacaaaccgtggcatcggtgcttcacctgaacaattacacacattattaagcaaatttggcactttgatttggcctaatttgtcaatttgcgcccaaattgttggcacaaatcgttgccccggcaaaacttacaattcgcatcactgcccacaaatcgcgcatttctcagcacggaaatgaaatcgccgttggagtggacaaaggcgtagtcgccg

SEQ ID NO: 34330 - DNA, 940 bp, Heterodera glycines
ggccgatgaaaattttgaaaattaattgttatttggtcactaaaaatggacaattttatagattattgggtctaaattcacagatttaaggaacaaatggaaaaatgcaattctaggctttttaattgttgttaaaaacgaccttaatttttgtcatcatattttattttaaaccagtatactttcggaaaatgttcaattcagttgttgtttcgagttcgtattctgacaaatttggcgggtatttattgtctgtttttaaaacaattttctctttggaaaaaaataatagatttgcgtagtaaagtctattatgctgttaagcacagccggaaatttatttggggttttgagttagatttacctatagatttacatttatctcaaatttaaaaaattttaacagtagtttgtccccttttctgggtggtataaaaaattttaaagttattaattaaatgtttacacacagaaacgacggagaaaaaaaggcccatgtcgacattccgcgggataattccaatcgagttgatgcgaagaaattggatggtctctttaaattattttaatacccttaaagcaatctaattcagaacagcgtacagaacatttcgctaaactcactgatgatctccgtccaaaaattaagggaaagttttgggcataaactgaatggaaaatagggcaagcgcgagtcggatgatttcttaaaatgatgattctgattcattcttattagcttttatattgattttgaaaatcttattaataaaaaacattaaaaaaatatttcgtgtttttatttgtaataaaagtaagagatttattaattgattggtgcgacacgaagattaaaaaaatatagtcatgtaataattcatttttgttttttaatcttatttcggccaaaaaaactttccctcacatatttcatacatat

SEQ ID NO: 34331 - DNA, 821 bp, Heterodera glycines
aaggacaaataatactcccaaacggctgcgtcacaatttgatgttgaagccgatgaaataggcattgctaaacaggacgagaagtcaaaataaacaacctccacccgccccagaactgtggtctccctcctcccaccaattgcgtctccatggagctcgtccttgtccaacaaagaatcaaaggtgggttttgcagaatgttgtctgctgttgttgttggccatgtgatttgactgttgcgactgtctgaaagttcacaattagtaaaagaaaaaaaaatttcaagggggaaaactgatgtgaggtacaccccaaaacaccgctggccgaaaattcgccgagatattaatggtaataaatttatcattagtgggtatttgcctttgtgccgtggacggctccactgaggcggtgacaatcagtttcggaatttcgccgacaatgatcgccgggatggagcacgccctgtgcaattcgccggccttttgttgctgtgaggacgacaatgagtttgagaaagtgccactggttgtgatgctaggagcgcacaaattggttgtgcttgtcgaagaggacggactgttgtgaagggatttgccaccggcggacgacgaaacggaggagacggaggagatgtgcacagcggaggacgaagtggtggtgcactgttgctaaatggcggaagggaaaatggtagaaaaaggaaaaattcggaaataaatggaaaattaattaaacattttgtcggtaaagtagttaaatgttcaagaaaaaactgtgctgcctcatttgtcagggacacaatcccgaaatttcttgaa

SEQ ID NO: 34332 - DNA, 1341 bp, Heterodera glycines
  unsure (1)..(1341): unsure at all n locations
tccccgagattgacgtgggcccccttctccacgagaagggtgactgaaaatggtgaaaaagtgctgataagaaataatcccggacgattgattccccgatttctgtgctgcctttgtcacatgcgagcagtagcggcgtcagggaggagtcgcttcntaagttcacgttggcaccatgagcgatcagcacacggcacatctccaactggcgcatattgacagcaatccacaggggcgtaacggctgaaaatggggcgaaaaagggatgaattaggcatcagcaacaattgccccccccccccccgccttcaaaattttgaaaaataaataaaataataggagactcagaattttgaaaattttttataaaatctgatgacaagctaatgtgataaatcaggttatttctcttcctttcagtatccctgcaaagtttggtgcgcttctgatcagtttgtgaaaaaaaagttaagcctaatctttttggcctgtttaaaaaggaattaaaaatttttaaaaattttattcatctccctttttgatagaaaaagcatcagagtgcataacctaccatgtaaataaaatttggtgcgtttcagagccctttatgaaaaaatatttaagaattaattttgcaaaaaataaataaaagcgaaagactcagattttcgaaaaattttttagagcaagctagctcggcgctcatttcagtgtaagtgagtcctcagccggggagtatccctgcaaagttcggtatgcttctgctcaattagcaaaaaatatgagtgatcaagctttcactaaaaagttaagcggtaaattttttggcatatttaaaaagcaattaaaaaatttttaaaattttattcacctccgttattgatagaaaaagcatcagagagccttattaacttgtaaataaaatttggtgcgtttcagaaccctttttgaaaaaatatttatgaattaattttgcaaaaaataaataaaaacgaaagactcagattttcgaaaattttttttgagccagctagctcggcgctcatttcagtgtaagttagtcctttaccggggagtatccctgcatagtttggtacgcttctgctcaattagcaaaaaatatgagtgatcgaattttcactaaaaaagttaagcctacattttttggcatatttaaaaagcaattaaaaaattttaaaatttaataattttcctgcaccgaaggtactcactcggcctcttcgcggcctcgtggtgggccttcgccccccccctcccacgcccttcagagcacgacaaatatttcaacaaaaatttgaaatcatgtttcccactcccttc

SEQ ID NO: 34333 - DNA, 1014 bp, Heterodera glycines
tttgccgtcatttgttgctttcgtggtcgcccactcccgtgccggtcctgccgcctatggcatctgccaagcgggatgtgccgcggtggtcgttgcctgctacggtgcggccggggtcgttttcggcactatcactgcaggtgttggcactccgccagcgattatggcctgcaacgcagcatacggatcgtgccaggccgcctgctgggctgcgttgttcacgccgacgctgtgatttttgagagccacccaaacttgggcaatggaatgaatgctttgacgaaagtgccatttattgtgatcgattttgaattgccaaattggcaaaaaaaatttttcattttcaaatcatttttaaatgaatttccatttttgtaaatgaatttttgggccgttttcagcccacaacgttttttatttattgataaatcggcacttttaatcggtttgaatgcaatttgaccaaaaaattgtgggtgagaaatgtgcgggtgattcatttggcaaatttatttatccgacaaatgctaacagaaaatcaaatgaataatttatatttatttaattggccaattatggaaatacattttatttttgctttaaaataaatttttctgaaaaagtacttttttcttaagaaattccgtgaaaattttctgatcattcatcgccgaacctaaaattcccctagaaatttaaaaattcgacctgaatattgctaatttgatgaagagaatttatcggggacaatgtctccccgatccccgaattttctcttcccgagggtcggggcccagccctattttcttcgatgatatctgacgaaacctacagtcatggtcataagtgttgtcccatcatgctttgaaaaaaataattgcgtataaaattgtcattttccaatttcaacagataagtagcataccattggatagcattttttatgggctgtccaatgagaccatattagcatttgtgacatggacatctatctgatttattttaccatatatc

SEQ ID NO: 34334 - DNA, 808 bp, Heterodera glycines
gttttcggggcagtccccctgaaccgatgcgcccagatttatggggagaccgaatccttccggaatagcttcactatagcctgtactttaattctgcgttggatttttgctccccataattgtttgagtaccccaaacggacacttgaaaaaatcgatttatttttgttttcggggcagtccccccgaaccgatgcgcccagatttatggggagaccgaatccttcgggaatagcttccctatagcctgtactttaattctgcgttggatttttgctccccataattgtttgagtaccccaaacggacacttgaaaaaatcgatttattttgttttcggggcagtccccccgaaccgatgcgcccagatttatggggagaccgaatccttcgggaatagcttccctatagcctgtactttaattctgcgttggatttttgctccccataattgtttgagtaccccaaacggacacttgaaaaaatcgatttttttgttttcggggcagtccccccgagccgatgcgcccagatttatggggagaccgaatccttccggaatagcttccctatagcctgtactttatttctgcgttggatttttgctccccataattgtttgagtaccccaaacggacacttgaaaaaatcgatttttttgttttcggggcagtccccccgaaccgatgcgccccagattatggggagaccgaatccttccgaatagcttcctatagcctgtactttaattctgcggtggattttgctccccataattgtttgagtaccccaaaacgacacttgaaaaa

SEQ ID NO: 34335 - DNA, 1286 bp, Heterodera glycines
  unsure (1)..(1286): unsure at all n locations
gaaatgacttagcttagattattgaccagttgattattgttgttgttattttgttatgttattaaatataccttgtggaggagtgggagcacatctaatctatagtccggtagtttgcaaatgtctttgactattcataatccctcgacacaagaccacatgagaatgagaattatcgcgatctgaaatttaacaaagatatggataactcattgagttgacattttctcctttataatagtagaaacgatcatggatatttattactacgctcttcgcttattacgcgaaaaaatcgagaaataggcattatatattgcacagaaaacacccagaaatattgcacagaacaatatagctaaataaaatctttttattaacgctattttaagtatcaaaacaaataaaaacttaatccagacacttaatctggatatatttcaattgttctaaggtatcttaaaataagggaaatttttaaacaaataaaattatcaagaactggcgaaatagacactaggggtaaatgagtccgctgatcataaatccgatctcagattttcatttctatacttttatctatgacttttcatctatttattcgggtctttcgaatttaggtttaggattagaattagagcaaaataaatattagactcggaatctacgtacccaaaaacccctagaaagacttttttgccatttttcaatttcttttttgcattttcctgaaatgttggatattatgaaaaagtgacgacagacgacaaatttacagtagattttgtcaattgtgattggacgacaattcacacgacagagacaaacgacaaacggaaaaacggcttattcaaacgacaaacgacataattttttgtcgtaacgaccaaatttgtcgtttgtcgttcgtaattgtgattggcccctgaagccgatgatttgaaaggcaatttcccctttcttttcatgttgttccctcgcccataaatatgcgtccattccctctattatgtctatggctgtgaattttagtgacgaaaaatcccaaaatagttaactaaaatagtgagtaaaaatgccaaaatagtgacaaaaagtccgaaatagtgacgaatagtgacataattttcagacaaaaattaagcaaaaataatttttattcactgattgcattgcaaatgagtaggggctgggatttttaagggcaaaaaaacaaataggtacataaaaaaataattttttnaataaaattctttgcacgaaaatactttttgagaaaatttttt

SEQ ID NO: 34336 - DNA, 714 bp, Heterodera glycines
tttccacgtaaaaatttttggacaaaatttttcaaatactaaatttttattcagttttcgcgcgagtgcctgttttttagcattagaattgttcagaagtatatgtatattgagggtgaccaagttttttttcaaattcaggataaagaacactaaaattcagatgtagacctcaaaattcagattattgcaaaacaagggatcagcggccaattttccaattttgcgaaggggtctccggccatgtaaattaatgtaaatcaatgaccttttttgctttcaacaccgcttttttcgcggcacgtttttctcaagacttttgggaacaaggagggccggcggtgccgataggcgccgccggtaaaaattttgtattttttaatgcgatttgttaacagaatttgtaaaaaaagaccaattgattaagttttgggtttttaggatgcttaacatgaaagaaaaaagttggaatattttttttaataaaaatttcaattaaaataaaaaatgtgaggaatattttatccaagtggggaattgaacccaggcgaaaaattatgaaggtagaaagtttaaccactacaccacatgttcatgcgtggaatcccatgactaaatgaaataaaatttaattttttctcatgaatttctccttcttcaccaatttgctagtcttttctcgaccagacccccattcttacgagcgcaaatttt

SEQ ID NO: 34337 - DNA, 961 bp, Heterodera glycines
  unsure (1)..(961): unsure at all n locations
agtgtccgtttgggggtactcaaacaattatgggggagcaaaaatccaacgcagaattaaagtacagactatagggaagctattcccgaaggattcggtctccccataaatctgggcgcatcggttcgggggaactgccccgaaaacaaaaaaatcgatttcttcaagtgtccgtttggggtactcaaacaattatggggagcaaaaatccaacgcagaattaaagtacaggctatagggaagctattcccgaaggattcggtctccccataaatctgggcgcatcggttcggggggactgccccgaaaacaaaaaaatcgattttttcaagtgtccgtttggggtactcaaacaattatggggagcaaaaatccaacgcagaattaaagtacagactatagggaagctattccggaaggattcggtctccccataaatctgggcgcatcggttcggggggactgccccgaaaacaaaaaaatcgattttttcaagtgtccgtttggggtactcaaacaattatggggagcaaaaatccaacgcagaattaaagtacagactatagggaagctactcccgaaggattcggtctccccataaatctgggcgcatcggttcggggggactgccccgaaaacaaaaaaatcgattttttcaagtgtccgtttggggtactcaaacaattatggggagcaaaaatccaacgcagaattaaagtacagactatagggaagctattcccgaaggattcggtctccccataaatctgggcgcatcggttcggggggactgccccgaaaacaaaaaaatcgattttttcaagtgtccgtttggggtactcaaacaattatggggagcaaaaatcaacgcagaataaagacagactatagggagctattccgnaggatcggtctcccataatctgggcgcatcggtcgggggactgccccgaaacaaaaa

SEQ ID NO: 34338 - DNA, 1233 bp, Heterodera glycines
ttgctgtatttaatttatgaaatttaaataattaactcaatattaacatttatttagttgaactcttaaaaacaaagtgttccataaagaatcaattaaataataagattaagatacaataaaaaaccgaacaggcgttgagaatataatgagcatacttatttaccgcagtgaccgatttgtaaggatattgaaatttaaaaattaaaaaaatatttaattaacaaaggtaaatttaattaataaagaaatttttacatatttagtcacataaaaagccatttaaataaatgaacgaatttaaaattaaatctatggatatcagacaataaaaagaattatattcaagaattatagtaacttattataaaacaaattaaatgaataatttaagcaaacacctaaacaaaaacttaaaagaaaatcacataaacaagtcttaataagctaatttaaaaaaatcgaagataatatttgttgtagaactcaaataaagccaaaatgaattaatgctaaaaactacaagtacaaacattttctaattcagtttattttcaaccaatagcgtataaaattcccacaatacaccccaaagaatcgactaaaaatttttcaaaaaaatatccctaagtatcgctcctaaatttaaaaaaaatacacatataaaatgaaatcaatctacaaaattttggccaataaccgaatatcagcagttcgtccccttccaacaaaattttatttgtattaagttgaatatttattcactgggccggtttggcattttacggcaaaaagagcaaaatttgtgtcttttcgaaaggtattttaataattataaaaagatttaataaaaatgaaatcatcaataaattaaataatgacattagcttatcgaataatattgtcggaatttccattccgatcgccaatcaatgatcggcgaattaagagggagggcgccccttcaccaactccccccgccgcgcgacggggtttaaccgttccatccctctgtccctcttcccttcaaattgttaattgtttttctgtgttcctcctccgccccgcgcacaaattaatcaacaattaattaaaccgcaacttttcgcccccgccccccaatttggcgaatgcgactccaaagaacgatgaacgcccaagtttcccgtttatcgccaattttgttcgttcgtttctttttagtgaactgtttatcattttatgcacaatttt

SEQ ID NO: 34339 - DNA, 936 bp, Heterodera glycines
ctcgcgctcgccgtcccggaatggcggcgctgacaatgagatggacaccagcaacgagaacggcaatgaggcgaaagtcaagaaggaagaggagaaccattcgcgcaggttcattagaacaaacgctttattattgggggggggaaactgaaaaagttcgttatttgtaaatgctttcgatgaaattggtttgttattccaaactatttttttgctatgttaagtgcgtcgccggctggctccgctgggaacgaagcgtcggatgactgattgttcagaccaatcggtgcgctgtgacggtatgttttttgctgcgaaaccatccaccccgtctctctcgttaaatggtgtacacacaaaggagtgcttaataatttaataggtttggtcttacttttcaatatttccttgagtgtacgcccttttttctgtttttgtcattttgaattttgttaaatttggatggatttcacacgtgctgtttggtctttggtcacacaattattttgctgatttcttcataaaccattgattatttgctgcattacagttgcaattttttgaggaaagccggcacattgttatccctcagaaggcatttctctcaaaaccatccattacgatatttgctgcgactaattctcttattcgataaattctctaaaccattcgtagtttttccctggtttcttaatgatgaactttgttttccatttcatgtgcagattccaaacccacgaccgtacggggagctcgggtgcacaaagagcgagcaggtgcacaatgagcacgcacattacctaatgaaaacagccagaacagacctgaaccaattcggacaagcacagcgttttgcgcgacattggtttgggttaaaagggacgaagtcggctttacttttctgtcccccgactcgaaaatacttttatttcaaaa

SEQ ID NO: 34340 - DNA, 871 bp, Heterodera glycines
aaatataattttcaaaaaaaaaattaaagctatccaattcgaatttggcaattttctaatattgcttgcattctgttaaatgcagcggcaggatcaaatgcaattgtcctttatttaaacaggtcattattattgaactaattaattaatggtcaacgaaatattgaaataaattcttttgtctaatttttattcactcaaaatagcatttttaattgtacaacataattattattttttcaatatttgattcaaaaaaagtctttttttataattattaaggtaagaaagatatgaattttttatgattttttaaaataaacttctaaagggtgtaatttttccgaaattttttttaataaattttaattctgagacgcagcaatagtaaaaaaaaaaaaaaaaaattaattatgcatatattgtaatggctatttcttgcttatctaatggctaaagaccggatttttaggtttttacctataaaagtgcaataaaagcggaaaaaacacccctaagaatcggcccaaaaattttcaaatatactcttaagaaatgaaaaagcattttcaaaattttttatttattttcttgaccagttgcaattgtgcgggcgaaattgatataaaattagtcatttttggaatttttgtgcgtacggacagtaatttttccaataactgaatgaatggctctcggaaaatacgtcaatggaaaatgcgtcagttatactgtatttctgaaataaagtactattcattagagaccggaaatttcaaatttgcggatcccgctgcgggattggactcaaaattttttgctggacggaatccccgcgggataatccccgcatcccgcatttaaaatttgc

SEQ ID NO: 34341 - DNA, 466 bp, Heterodera glycines
aaatttgactttttgtgcggattctgcgggatttcattgattttttgaaaattttaaagaacagaatgccaaaattgaaaaaatttaaaataaattcaaattaaatccatttttcaacacaaatttcatctagaatttgcaaaaaaaaaaatttcccggctgcgcctatcggcaccgtcggatcgacttttacttattaatcctgtagaaatgagtcaaaagatgtgacattaggtcattttttggtcaaaatcagttaagaaattgacaaaattttcaacaaaaaaaattccgacggcgcctatcggcaccactgccctttgttcctagttttttgaaaaaatttcgccgaaaaaagcagttttgaaaagcaaaaaatagtcaaattttgacggacgaaaacaaaacaggaaaacgaaactcaaaaagtgacgaaaaaaggggacgacacgaaatttcgcacacc

SEQ ID NO: 34342 - DNA, 977 bp, Heterodera glycines
  unsure (1)..(977): unsure at all n locations
tttgaaaaaatacagagaaaaattgccatacatttatttctttcattaggttatctaaatttttatgagaattgttattttgaaagcttaatntgagcaattcttcgccttccaaatttcagcaaaatgtaaaaaatggcacaaacccaaattaaatatcaaaaagccctgactttttaagtatccatctgtcagaagttaagtagtatttagttctctgtaagtggcaaaacaaaccccactngctgatgtgaatgggatgaatgggatatcattttttcaaatatgctcagatgctgtgagcagaatgccctggtcgcttttcttaatcattttcgcgctctgttcgccgcccatggcacagttttggccatccaaacacggaatgatcgcattttggagttcgtcgtgcgcaccatttggccccttcttcggcacaacattcgctccatcactttcagctacgactgcgatttgcgtcagctctcaccctccatgttgttcgatagtccatcacttcgctcaatcgcttcatttggtggcattttccccgcctttccgcccgacgacagtgccaatgcatgggatggcgaagcggtggccaaatggctgttgcgcccgcggccggacggcgtcccgaagatgcttcggatcgactttttccagattaatttatgggaagcaagaattgatggattgaaaacggtgatttgaatttgccattttcaaatattcaatttcggcactatcgggcccacaattcccttctcaattttcctcctaaatgttggcatttgcaaaaaaaattgacatcacttctcagcttaagtggtgctcgagaaatctcgagaccgcccaaacccattactttctcgattgagaccgactctcgagcattattaaaatcatattaatttaggtataaaattcattctcaaagctccaaatcaagcagaaaaatttcgttcttttggcat

SEQ ID NO: 34343 - DNA, 1166 bp, Heterodera glycines
  unsure (1)..(1166): unsure at all n locations
ttatctgcttcacataggcacatttcagctccacaaggcccaccggcgtcgcgccgccgtctccccacgtggtgccgtacgcttcaatgccacgggcgcgcaacgcattgataatgcccttgggagtgtttaattgataattagtgccataaggaccttttaatactatgccctcgggataaaattgatcatttaattggtaattgatattaatgagtgttccctgggttatttaattaataatggtgccttttcagggttcattaatatttttgacaaaatttcacattgaagcgcgttattttgttgctgactccgtgcacaataatcgccgcttcgtccccactcggcgccgcgccctgcgcccgtccgccggtgctgccgtccggtcccaaatcaccgcgttccaactgatggacgacggaaatgccgtagcttaaatggcgaattgcagcatttacttcgtttatgtgtcaggaaatttcataaagctatctcatcattctattcgataatcaaaaggtctctgatcactttttttggatttacaatcaatgtgccctctctgatcgatgatctgattatatgtctgacccattcttttgtgtttccctcttgatttgtgctgatacggtggcttgaggaccttacgaaattcggattatattcaggcagaaatatgcatatgcaaatttttatctgttggaaaaacccgtaaaccctataaagaattacatatacgaataagagtaaggattatgtttggctgggtacttatacggggtacggattaaccggctaacccgtaaaatccgtagcccgtaaaaacccgtataagtcgaaaaaaatatgcgttgcaagttaagtgtccgtaagaacccatgtacgagtccggcccgtattttatctatttattcaattttgtcttcatctgatctatttatcagttagtgctaatttttcaaatcacttttgtttaccgattgtgaatgaacacgcgaaagtcggcgctgaactcggcatttacagcgcataaaaatggggacagaagttggagcagtacgactttgacgtgcatctgctgaacagaacaacaaacaaaccaataataattngtgnggaaagagaaataattttgcatttattacatacatccatttggaaga

SEQ ID NO: 34344 - DNA, 768 bp, Heterodera glycines
aatggaggaaaagcaccgactgagggcggagggcggcaaatgcttctgaatgggaaaagcgaacggaatttaatttaattaatttagcagcaattagtcactttgagtctgcccgtgaagaaacacagcagaaaagcagtgattgaacagaccgaaatggtcaaaagtgatttgagatggaagaacggaggccaaaagatggacggaagaaagaacacaacgccaagacaaaagacaaccgaataaaaaagacaatgttcggcgaccatcgaaaacagagatggagaggacacttctgatgctaaacattttgtatttgaattaatgacagtaactggcctcacattaattacctttaatctgttggcacttttgcatttgctccctatgggggatggcaattcgagcggacattgtgccgagaaggaattgccaggcccgggccaaaagccaacccatcgcgacggaatttgatggggctaagcgccaaaagagaaaggatggaactacgaaaagcacaaacagtgccgacagctgaacgagtagacacttcataggacgacgccgaaagagtattgagctgaatttgaagagaaaaaggagcggcggagagagtgtcaaaagaaattgcaattggacggagacggcccacagatggagcagaggccgcggctgactgatctgaggagcaaaacattggaagagcagcgaatgccaaagggtactccgatcagttccaatgtccaatccacgtcggtcatctgatga

SEQ ID NO: 34345 - DNA, 1457 bp, Heterodera glycines
  unsure (1)..(1457): unsure at all n locations
caattgcatgattgttctttctcatttgcattccatctcatatttccatagcgttctcacatctttttcgccattttccaaaaacatttcgaaaaatattcatatttgaataataaaattatgaaataccaatatttattactgcattcaanaaacaggctttaccgctggcaattgatttgtcatatttgggttttttgcttaattattttattaattaattaaatgatcattaaatggaaagcaaaaaccttcggcagatattctgaagaaatattcatacaaaatatgcaaatattttttgtatttttggcacttttcttttaaatcctctccaactttggcacattgccaattttttctcattaaatacataagaccaaaaaaggccccatattgttgtaaataaaattcctttgatttcacagagtttgaataatattctttaagcatcctataaaatttctcaaaatttgtctcttgacctttcacaaattcagtaaaaattgcatcatcagtcttaattttggcattaattaaaacaatttgtttttaaaagactcacccatacaaaataatcatcaaaaatcgatcggacaattatgtcatacgtaacgaaaattccataattatcttccctttttgcccgttgttccgcttttttaaacatttcccctaaaatttcgttaaaattctgccggaatattccgtcgacactttcatttgtttggcacccataagctgtgtcaattgccaattgtaaaatcatttcgttaattggcacttttggtttttcgttgaccaattttacattataattcaatctatgctcatttaacaattttggttcaaaatgataagtgaagagcttgtttaattttcttttatacatcatcaccgcactgtatttatgaaaataaaattgcgaaattttggccagacaattcaccgcataaattattgggccttcaatttcaattaggccatcaaattcaatttcatttttaaatacaaattttggcttcactgtgggaattccggcgtattctctgcacaaatattcgtacaaaatgtccaaatatttgcgatatttttggcattccgtccgttcattttcatcaaattcttttgctatttttacacatttccaattctttctcatataatacaaaatgccaaagtgtatctcatatttttccattgaatattcactgatttgtattttctgatcatttctcacaaatgcaattagcattttgtcgtctccctaattaaaaaatgattcgaccaattaattaactgttaattaactcactgatgaaattgcattcgaaatgtgaattagaaaaaaatgaatgataatatgaaaaggagttttcgaaaaagaacaaaacattatgttttcttaaattaaataaattgaatgatttaatgaaacataaatgcacattgattat

SEQ ID NO: 34346 - DNA, 792 bp, Heterodera glycines
attagagccaccccttggtctgcagttgtgagcaactgaagcgtgctaaaaaagtacacttcagtaccaggtgaataacacgccgggcttttatctgagggaaatgtgcccagcagacttattgtagagcttggaaagctcgattttttgaaatttcaaaatttcgaaaattttcaaaatttttcgagttaggcctaaaagtaggttttggggtttttgaattttaggattttttaacgatttttcccgggaaaacggaggccacttccaacacatagtttttcgagctctatcgaatggtatttttttcggaaaaatttcagttttttcccggaaatagaaaaattttttggcctgagcgggacatttgagtcccgggcccataactcgttaggggttgatttaatcgaaaaaatgccttagagctaaattgtagagcttttaaaatgctatcgaatggtgtgatatatggtcggaaatttttaaaaatttccgagctaggccccctagaaatttttggaatttttttttgtgttgaaaattggggtaaaaaatatttttcaggggttaattaaggtgctgagcacgaatatgacctttgttttccgtttcaaaatttttggaatttagtgttcacgtgaacagcacagtacaagtgaccagctgatgtacggtacaatgcgcatgggtttccagaaacgatgtccattacttatggtatggcatataatatttaaagtgcagatggggtactgtagggatcgcgtttgtactaatttaaagagacaaagg

SEQ ID NO: 34347 - DNA, 841 bp, Heterodera glycines
caataaaatttcaataaagttttatttcatcttctatactaccttgtgaaaattaaatttgtcaaattgcttagttttttcatacaaatcaaaatatgtcccgtctctatattctttttaattaatttggttcatatttatatcaggttttattgaatttttcatagaatttttgaccaaatgccataaaaacgaggctgtaatcgaaattttaccaaataatgacatatttttgttaataaatatatatatattttttaatttagttggacagagacaacagcgcttgtgcgaagccaaatgttgacctgttgatcatgtttgacaatgtgatttcaccagagcgggataacgacaatctgaaaatgaattcaaaccgttaccttttacttgacctattaggtacaattaaaatgcaattaaacttactaattacctattttatttaattagctaattaaattttaattatttttttaaggctcacttccttcggacggcctcgttcgtgttgcactaatttccgctggtggcccacgccttgaataccgtcttgtggacccgcaagaccgtgacgcggtggcgacacgcgttgagcgcatgcgaccgcttaacggtgcgccaaactatgcggcaggcatcgaacgcgcattggaccactacgcgagcgcagggcgtgacgatgcacgtgccattctgctgattgtggcaatggaattggcactgtcgactcgcagacacaacgccaaactgttgaaatgcggatcaaacaggtggccggcgctgagtttgaactttttctttttaaaaattttaattggttttagacatcggcattgat

SEQ ID NO: 34348 - DNA, 815 bp, Heterodera glycines
cacaatttccgcaactcttgcggtaatggaacatattttgaagaggctctgcggaacggattagcatcggggttacgagatagaaaattgtcctaaaaagagatagccatttttctgagaattaattcacaatttccgcagctcttgcggtaatggaaaaaattttgaagaggctctgcggaacggattagcatcggggttacgagatagaaaattgtcctaaaaagagatagccatttttctgagaattaattcacaatttccgcagctcttgcggtaatggaaaaaattttgaagaggctctgcggaacggattagcatcggggttacgagatagaaaattgtcctaaaaagagatagccatttttctgagaattaattcacaatttccgcagctcttgcggtaatggaaaaaattttgaagaggctctgcggaacggattagcatcggggttacgagatagaaaattgtcctaaaaagagatagccatttttctgagaattaattcacaatttccgcagctcttgcggtaatggaaaaaattttgaagaggctctgcggaacggattagcatcggggttacgagatagaaaattgtcctaaaaagagatagccatttttctgagaattattcacaatttccgcagctcttgcggtaatggaaaaatttttgaagaggctctgcggaacggattagcatcggggttacgagatagaaaattgtcctagaaagagatagccatttttctgagaatgattcacaatttccgcaactcttgcgggtatggataaaatttttgaagaggctctgcgg

SEQ ID NO: 34349 - DNA, 393 bp, Heterodera glycines
gcgccctttgaggccgcgaagcggccgactgtccccaaaaaattaaaaaacgggcgcgaagcgcccgtcctgagtccgcgaagcggccgaatgttgcccacaaaattaaaaaacaggcgcgaatcttgaggccgcgaagcggcagaatgtcccccaaacaattaaaaaacgggcgcgaagcgccgtcctgaggccgcgaagcggccgaatgttctctacaaaattaaaaaacgggcgcgaagcgcccttcctgaggccgcgaagcggccgaatgcccccgaaaaaattaaaaaacgggcgcgaagcgcccgtcctgaggccgcggagcggtcgaatgttctctacaaaattaaaagacgggcgcgaagcgctcgtcctgaggccgcgaagcgg

SEQ ID NO: 34350 - DNA, 951 bp, Heterodera glycines
  unsure (1)..(951): unsure at all n locations
attttttaaatttattttccgtcaggagcaagagcataattctgtattcatgcagtattaccnaatttcanaaatagaggctttttgccttgnatctaataaatttacattaaaattttcaatcgataactcgttctgttttacatttttttgaatagtttttttttacatttttctctaactaagaaattctcaaacacaaattatggtgcgttttgctgggcttcgtggcaccacatttattttactcgatggaacggaacttcctctagtcgggcttggcacatatggattgttgacccaaaatgacgtcgatgttgcagttgatacggcactattgagtggttatcgtttgtttgacactgcaaattattaccagaacgaattggagttaggaaacgcttttaaagttaatgagcattttttgtttcaatggtttatgtatgactttattttcagaaattattgcctaagcataatttgaaacgtgaagatgtttttattgtgacgaaggcaaacattcgctcacccaaggttgaggaaaatgcaattgcaatggttgaacattcacttcaatctttgcagacagagtataattatatattagagttcgacctggacttggatctagccctgcaggctcacatctccaggctattttgcagcaacaccaatttttgtcagaaaaaaatccaagcctggtttttttttctgaacctgagttatcctgaattttgcgcagtaaatccagactcaacctgggatccagtccaggctttttagttgaactttaatttacactatcattttgcttaagttacattgacttattgcttgtccattatcctaaagattggggtaaatcagacaacaattcgaggaatgctgaacacagaatgcaaatttatcaagtattagaacattataaaggtagaattgtgtacatacatg

SEQ ID NO: 34351 - DNA, 695 bp, Heterodera glycines
tgctggtgggttgagtcccagtgattgaaatgcaggtccccctagtgccagtgattggaatgctggtgggttgagtccctgtgattggaatgctggtgggttgagtcccagtgattgaaatgctgttgggttgagtcccagtgattggaatgctggtgggttgagtcccagtgattgaaatgctgttgggttgagtcccagtgattgaaatgctggtgggttgagtcccagtgattgaaatgcaggagaattgagtgccagtgattggaatgctggtgggttgagtcccagtgattgaaatgctgttgggttgagtcccagtgattgaaatgttggtgggttgagtcccagtgattgaaatgcaggagaattgagtgccagtgattggaatgctgtgggttgagtccaagtgattgaaatgctgttgggttgagtcccagtgattgaaatgctggtgggctgagtcccagtgattgaaatgctgttgggttgagtcccagtgattgaaatgctggagaattgagtgccagtgattggaatgctgtgggttgagtcccagtgattgaaatgctgttgggttgagtcccagtgattgaaatgctggtgggctgagtcccagtgattgaaatgctgttgggttgagtcccaatgattgaaatgctggtgggttgagtcccagtgattgaaatgctgga

SEQ ID NO: 34352 - DNA, 790 bp, Heterodera glycines
atttgcggcgccgatcacttgcggcgcccagccaaagttctcccccagatttgtttttcaaaacaacaatttaattctattcttttcaaaaataactaaaaaacgaaatttcgtttcgctctgtgctctttttttgtcatttttgggtttcctttcgtatttcaaaattcttttttcgatttgtttcgttttcgaaaataatttttgtcatttttgtgcatccctggtaggggttttaatataagaagtcccattagattcatcttggcaatgaaaaacgaagaaaagtatcagcaaaatcgcctgcggccatatgagattgatgcaacccgaggcattgctgagcgtccatgattgaaaaaatacataaaaaatgatgcagcaattaagcaaatgatcattgcatacgatatcaaagagaatcgcaatgacgctgatgtgctttcccacttgtacgcattacaatatcgtttagggatgaagggtttgaagcgtgggattagaattttaacgatgaaaataaaagaattgttgttgataaaaattttgtcactttgggtgggcgccgcaaatgtcggcgccgcaagtgtcactttgggtgggcgccgcaagtgtcggcgccgcaaatgtcgcatcatcccgaaaaataaagggccaaaggtcgagagaaatggaagaaatatgccgaaaaagtgagagagtaaaaaaatgggagagaaatgggagaaatatgccgaaaaagtgagagagtgaaaaaatgggagagaaatgggagaaatatgccgaaaaa

SEQ ID NO: 34353 - DNA, 1021 bp, Heterodera glycines
gttagatattctgggttgcagagattgtttggcgccagtactcctacacttatttgccgaacattcggttaaggaaatggtaaaggaagacaccgacgatcaagcagtaccaaaagggacaccgatgccaataatggaatcggactaaaaagggaataaaatgtttttaaaaaattatttatattaattagcgggacagacttttaatgtgaaaaatccgggcgtgtaaatgacgaaaatgccctctttgaccgtgacgggctgtttgttatacatcaacgaagaactttccacgcgaatttctaacgtgtaacgaccgtccgacagcccagagaatacaacgccggtctgatttctctgttaattaattaatttattttaaatttttgtttttagaatcaattgcttttgaattatgagaaaagaggcaacctcaaacagtgacgaaaagcaacagacacacaaaaataaggaaaaaaataatgcaaaaatcaaaaagtgtttgttgttggggtggtttcgagtgttgtgtttcactctcggacaaattgacttttataggcaatgtttgttatcagagtactggcaaaaagaaaaacggaaaaataggattttattgccggaaaaataataaggggcaggagtgaaggagatgggtggatgggcgttggtcaaacattgggtggggagcggacaaagtcgcgaaaacaaatttagcttgggaaagacaaatggatgggcaaaacaatttgtgcgggattaaagtgcaaaaggcaaaacaattttaaatggtttgtcggggagtgtcaacagacaaatggtcaaagacatttgacggacggcacaaatggaaaagaaacaaagttttttttgctggggaagtcaattacgtgaacatctattgaaattatatagagatattgtgtggtttgtgagaagcaatagaaaaaaatccgtaatttgaccgagacctgtcaaaaacccaaaatttagacaaaaaaaaaatatgcgatgcctgccg

SEQ ID NO: 34354 - DNA, 1270 bp, Heterodera glycines
aaattaataattaatttaaaattttagcctcagaatccccaatcacacagggattctgagggcttaacgatgtattaactgaaatctgatttcagattcgtgatcagcgtcataaataacccctaaaaactaatattaaataaataaggaaaagtttttaattaaagattaaaaatcacatgcattttaatttaaaattttttataataaaatactcgtttttcgttttattaattaaaaacaacgttgaaaattaataattgaatatttatttaatttgaaatgaaattaatttttttgcaaattcaaaaaataaataatgaaaatttttaattaaaaaaaattaatttaaatagtttacaaccaaactgttttaatttattaaatgcagtgaaaattacccaaaaaatgaacagaaaaataatgtacaccgaccggatccgaactcccccccccccccagaagatgactcagaatccccaatcacacagggattctgaggtcttgactatgtcaaaggtaaaatctgatcacgtattcgtgatcagcggcccaaataacccataaagacatatttttggatgatttttgattttcaattaataaaaatatgtaaaaacagcaaaaaatacaaagaaaataatttacacagtccggactcgaacttcgccccccccctcaaaatgatgcctcagaatccccaatcacacagggattctgaggtcttaacgatgtcaaaagtaaaatctgattgcgtattcgtgatcagcggcccaaataacccataaagacatatttttggatgatttttgattttcaattaataaaaatatgtaaaaacagcaaaaaatacaaagaaataatttacacagtccggactcgaacttcgccccccccaaaaaagatgcctcagaatccccaatcacacagggattctgaggtcttaaccatgtctaaagtaaaatctgattacatattcgtgatcagcggcccaaataacccctaaaaacatgtttttggaagatttttgacgaaaaaatttttcaactcaataatcctatgctcacccctttggtcccgaatccaaaatcacttttatttttataacaattcttaaaaagtgataaaaagtcaaataaatttatataatagacaaaaaattacgaatttttgaagtattttactcttctctaatgacttttcaaaaccaaaatataaattttttttctgaaaaatcgaaaatttcaaaaaattctggaataattttttt

SEQ ID NO: 34355 - DNA, 1212 bp, Heterodera glycines
gggtattattttctaaagtcttttattcctcaatgaacttttcattccccatttttcgcaccgtgaatgttatttttattgagttctgataccgttttgagtagaatagactagtaaaaattgcaaattttgaaatcaagtttcccactcctttctcccaggggtattattttgtaaagtctttttttccccaataaactcttcatctcacattttaggcatccgtgaatgttatttgtttttaattcagagctgtttcgagtagattacactagaaaaaatgtaaatttatgtcatcatgtttccctctcctactctaacaggggtaatacagtgtaaattagttttttcaaaataaactcttcaaaatacatttattacgccgcgatagttaccgccgggaaaattttgttaacagattttgtccaaaaaattacaaaattatgcgattttgagcaaattttgcaagaaaaatagggatttttagggtccggcggtgccgataggcgccgccgggaaatttttaaaaatttcagttcaatttattaacagaaattgtacaaaacttgctagttttttgaaaagaaaaatttaaaaaatttccgacttttcatcaaaaatttcggaagtcgaattcctaccccaaaaatgtcggaaatcggaagtctttccgtgccatacctggtgcctatcgacatctgcgagaaattttatgaaatttaatgcgatttggtaacagattttgtctaaaattgaccaaatgacgcagtttttgactcaatttctacaggattattaagaaaagcctatccggcggtgccgataggcgccgccggggaaatttcacaaattttgaatgaaatttgcgatgaaaaatgagttaactttaattaaatttattatttaatttatttaaaaatatttggcattctgtcttagaaaaattttcaaaaaaatcaataaaatcccgcataatcccgcacaaaaaatcaaatttgcggatcccgctgcgggattggaactcaaaattctttgcgggacgggatcccgcgggattaatcccgcaaatcccgcaatcccgcaaatcccgcattttccaaaaaatgcgggattgcggactgggatcccgcaaaatcccgcgcgggatcccgtcccgcgccgggctctactaatttcatcttcctttttttctacactattttgcaaattttg

SEQ ID NO: 34356 - DNA, 1008 bp, Heterodera glycines
  unsure (1)..(1008): unsure at all n locations
agtcaattccccaatataaaataattaatgttaattactggtaaaattttctgtgccattttgacaaattccgtttaacaaatttattaaaataacgcgggatggattctttgtgattgcgaaaaattttgttttccatttcctgttcccggaaatttttttacctagctcttgtgctaactgtaatggcaccttcagccgaagcgtaaaaaaagaaaaagaaagaaaaaacggaattcgtggtgttgaaaatttctaaaaaaaaatattctggaaaatctagaagcttcattattcgagatcggcttattagaaggaattctcgtgaatttacttttgttgcaatttttcattctaagatcatgattgactttttgcccgttcccgatttttgtaagtttgttgtaagtttatgctttgttcatcaaattaagcattcttggtacatgttcgatagctcaattgtttactgttattctattactaagtttcaaaaaattaaaataaggtacaaaaaataaaaagtcagttttttgagcacagccctgacttttttttttgtaaatgaaagtaaattctctaaattttgcaaattaattgagtttttcatgtggtttcgaactgtactcagaatattatggtccaaaaaaaagttccagtgatttgtcctgctccgaccggcaggtggcgaaccccgggttcgggtgtcccttaaattttcataccctacaaaaactttcggtagcatcaattttggccaaaaatgatccggaccaaattgaatttttgcttttggatttttaaatacgagttttttagtgccacattttttttttcttaaaactagagatcggactgtacccggatccaggcctgtatttttcctggatccaggtacgggtacaggccatttttcggcaacctgtattttcctgtattaatttttaatcattattntttggcgaaatgtctgaaaaaatgatggaaaatttcaaaaaaatatcattt

SEQ ID NO: 34357 - DNA, 973 bp, Heterodera glycines
ggggacctctagagtccattcccggtagggatttaatagtgactttcagagcttttcattttttgtcaataactatttttcgtgcgttttcaaacacactattagtgctttattcacgctacaacagaagacaaaagttggtgtccaattcccggtagggatttaatagtgactttcagagatagccattttttgtcaataactatttttcgtgcgttttcaaacacactattagtgctttattcacgctacaacaaaagacaaaagttgatgtccaattcccggtagggatttaatagtgactttcagagatagccattttttgtcaataactatttttcgtgcgttttcaaacacactattagtgctttattcacgctacaacagaagacaaaagttggtgtccaattcccggtagggatttaatagtgactttcagagatagccattttttgtcaataactatttttcgtgcgttttcaaacacactattagtgctttattcacgctacaacaaaagacaaaagttgatgtccaattcccggtagggatttaatagtgactttcagagatagccattttttgtcaataactatttttcgtgcgttttcaaacacactattagtgctttattcacgctacaacagaagacaaaagttggtgtccaattcccggtagggatttaatagtgactttcagagatagccattttttgtcaagaactatttttcgtgcgttttcaaacacactattagtgctttattcaccgctacaacaaaaaacaaaagttgtgtccaattcccggtagggatttaatagtgactttcagagatagccattttttgtcaataactatttttcgtgcgttttcaaacacactattagtgctttattcacgctacaacagaagacaaaagttggtgtccaattcccggtagggattaatagtgactttcagagataggcatttttt

SEQ ID NO: 34358 - DNA, 1198 bp, Heterodera glycines
gaattatgcaaaggccgaaaagccttgaaaactgagactttggcatttgccaagcttaacaaggttttctaacgagtttaatggagggtaaccaacacgaacccccctgggactttccctggaagctaatttgtgctaattgccctcattataggatgatgagacaaatgtctattcgccgtggaccgttcgtgtttggccgggttccgctcacctttaccttccagtccgaagttgccaggcgtgtagtcggcgaaccggtcagtggtgtgccgttccgttgttggggaatgcctttttcagctctatcccaattaggatttttttaatttccaaaataaattttttttttttttaaattttcccgtaaaataaaatcatttttgctgtaagtgcaccgactttcgctctcgcatcggagtgacgtgccaaaatttgaccgagccgcgcattctcttcaatgtacctggttagtgttttgaattgttatgttttttgaaatttatttattttttctctaattgactatttttagttacaaattttgtctccattttatctttttcgatccctcaagactttttttgattttattacatgtccaaatgggtccgtcaatagcatgcttttcctttttcatgttctccgaacctccaactgtttttacaaaagactggattttttgggagcagcaggggggagtatttgttcaatggatcgggaaaatttgttaattgtttgcctgattatttttaatttaaatttggcactcgcttttcccccaggcaaatgttttactcctcggcctgacattgacgtgtgcgttgtgcagtttctgcctcgattggagccgctcattcccaccgcttacattgtgcgatttgtgaaatatttctttttacaaaattccatttttttgaaaaatgggcaaattttagcaaaatttttgaaaattttataattttcaaaaaaatgagcgttcaattacttttctgtatttccacataaaatgttgttgtcccttctgtcacaggtggcggacaaagtgttccgtactcttttccactacaaacggcgctttctcggcaaggctgttcagctgctgtacccgcgggcggtggcgttggaaatgggccatcacctgttgacgtgggtgtgcccgcctattttgggtcaaaaattagaaaaaattaaatgg

SEQ ID NO: 34359 - DNA, 960 bp, Heterodera glycines
attaaaaaatcaaatcgaaattcgatcatcgctttttcccccctgttggaggcgcccgtcccatctttggacgaagagacaatgcacacgacggacaatctgttcacgctgctgaagatggactttgtcactttcgtcgaactgttcaaaatgcagcccgcgttcgtcatgttggaagttgatgatcaggtaggcagagcacttgattaatgagccgaacattggtctaatcactgtgggccgatcattgggctaatcaatgggtcaatcattgggctgatcagtggtgatcagcgacaaatagtgggccaatcattgggctgacctattggattcatcattgggctgatcagtgggccgatgattgggctgatcagtggtgactagcggctaatcagtggccctgtcattgggaggactgatcagattcaaaagcattccgatcacttcgctcttcaggtccgtctggtgaacagtttggccatttcgctgcttggcctttgtgagcgataccattcttcgcgatggaaggccgaaacagtgctcaaattgtccaacggattttgcccaatttttattttctacaaaaacgaacaattttttggaagtgccgagtttaggttggaaatgcaatttggagaataattgggcagaaatttgtttgtacagaaaggccaatttggtgtactgtaggacaatgcgaagtttcaacagagtgcagccgaccattgaggagtatttgctgctgcgggcgattgccatgtctcattcaggtgactcatcaccataccgtcatagccaaatacatacgcatatgcaaacacaatatgcaaataacttttcccattggcgcgaaatacaaatgccaaacttttttttattttcagcttttgatggactttctgcgacggcgcggcgcctcctcaaaatgaggccgaacattacgccgatgcgctgctt

SEQ ID NO: 34360 - DNA, 769 bp, Heterodera glycines
ggttcggaattgatcgaaatggatgccggattcgtgatgagcgaccccgaaaaccccccgaaacatgttttcatgatttttgaaattaaaaaagaaaattcgaaaaatgttcgaattcgggttcgggattggaaatagaacgaaatggaggtcggattcgtgctcagcgcctcaaaacacccctagaaacattttataagaattttcagaaaaaatttaaaaaaaaaattttcgggaccaatgatcgacatgattgccgaccaagcctttagaagacccctttttacctcaatttttcgagttttaaacccggttcaaaaaccgggtttttggcacttccgcaactggagaactattcttgcatagctcgtcgagacgaatcgattggtatatcatttgtaccatttttttggggcctgactaataaagtacacccattcatccaccgatgtccatgcccatttctcagttcgatagccctccaaataaacattcattcggttttctttatgccccccccccctccgaattcattgctccgtcgaccttgggatggatggccactcatccgatgaacgacagtccgaccgaccatctgtccgccgttttctgctgtacaaacattgccattgttggtcatcccccgttgggaacattcacttgttcaatgataaaatgcatacggcgatggtttctgctgattgaccaactttttgtccaggacaattgccgaactttgtcactttaattttgaaaattaaaatgactt

SEQ ID NO: 34361 - DNA, 966 bp, Heterodera glycines
acgacgatttgtgacggaatataacaaacccagcgtggcacaggtgaatggttttgtaaaaagttttgcgtggcttatccaccaatttgttgctttttctgccaatttgacataatttctgttttcagggctttttcctcttgctgaccgcttctccggcaattctccaaatttaattcggcccattctccgctttttcagtccaatttcgctaaacactttctggcccaacttggccaaggttcgtgctccgcttggccccatttgcctttgttcgtttctctctgtgccgaccccgcctttgccgaagcatttaccgctcttaacggtgtccattgtttggccgaagtcatcgaagggttttccgacgaatggcacccattcgaaccgtaacatttcaccaaattttctgtttcaattttaatttggacagaaatgcacctccgctgttctcgcttatgcgttcccttctcacatttatgcagcaattccccgtcctttgcccttgggccgacttttccccgcaatttgtccataaaatggcacttttcgtaaatggacattcgaaattggagcaaaacgactcgcgagcactcgcacttggcactctcctcgttttggtggaacggtggtcagtcagagattggcgcttctttttcgactgtaatcaatgggcttaatccagcgaccatttgcacgaaagcataagggaaagactaagtgtcgagtctttgatcagacatttggacaattcggacgaacgcatcgccctcagttcactttcgctgatcaatgccatttacgaattggcagaccgaggcgaaagacttacgattatcaaagtgattggacggaaaccgcggggattccgacggaaaacgggaaaaagggcaacgaaagtgaaaaatcagtcaccgaatgtttttccccgttttgtcaaattctcaatgaacgcccattcattgc

SEQ ID NO: 34362 - DNA, 755 bp, Heterodera glycines
ttttcggggcagtccccccgaaccgatgcgcccagatttacggggagaccgaatccttcgggaatagcttccctatagcctgtactttaattctgcgttggatttttgctccccataaatgtttgagtaccccaaacggacacttgaaaaaatcgatttttttgtttcataaatatttttttcagaaagtcatgcgcacccgtccgatctggcaagttaagcaacgattgctgactagccaaaaggttcggtgccgtgatgaaacgaaccagcactgcttaccccgcggcacccggcacggtcccccgaaggaatggatttaattaaattctctccttcggggatttttttccattaggtcgtccgttagcgttcgattgctctagtcaatttttcaaaatttttgttgaaatatttgtcgtgctctgaagggcgtgggaggggggggggcgaaggcccaccacgaggccgcgaagaggccgagtgagtaccttcggtgcaggaaaattattaaattttaaaaattttttaattgctttttaaatatgccaaaaaatgtaggcttaacttttttagagaaaattcgatcactcatattttttgctaattgagcagaagcgtaccaaactttgcagggatactccccgagaaaggactaacttacactgaaatgagcgccgagctacctggatcaaaaaatttttcgaaaatctgagtctttcgtctttatttatttgcaaaattaattcataaat

SEQ ID NO: 34363 - DNA, 642 bp, Heterodera glycines
cgaaggcaaattggaatggaatgaattggggaaatgagtggaaggaattaatgggagagggggacaaatcaatatttggtccgttcaaagaacaaacccaatgacaacaatatttgaattatgggtcgccccaacaggctcttatacgatacttggaattttcaatctttttatttaatatacggtttaaaatcaatgaagaaaatacttttcaccttttctttaaactaaaaaaaatttgcttattaatgaaatccctcccacaaatcatccgaaacaacagggccaaattccaagaatttaaaaagaggatgatattggtcgcagaaataggcacacttttagtaaatcaaattgttaattttaaacaagaaatgttttatgcaaagattttaattttaaattgtccaaggattttattaatgtttttgcatatattattaacaaaaaaataaaattatttcattctaatgtttaaacatataatttttttacaactttcttttataacaaaaatagaaaaatataataacattaaacacttgttttgaaaaaattctgattaagcttaaaattaccgtttaaaataatgaaaatatttataaattgatacattgtgtgcctgtgccgtcgctcaactgc

SEQ ID NO: 34364 - DNA, 941 bp, Heterodera glycines
  unsure (1)..(941): unsure at all n locations
tttttaaattttcaatttttaaaacgaaattcccacatctttcattaattggtttcagtgcaatgctggaagttaatccaccgattccattttggcactcccaactcagcacattcacataggcagcccatgccatgtccttccatttgagacaaaagtgatccatttctccggtcgattgaaatccgagttgatcacggctattgattcggtcactgaagcattcccatcccggcatcatatgacgccaaaagtgtgttttgctcagtgccaatgctttggccatgtcctccgcctccgatgttgtgccatcctcgacgaccacttcaatcgcaccaacgacagagatggcaccaaaagtgatcagcaggagagtgatcattgaaggaacagtgatagtgatcagtgaattggcaaatttttacgcattctgtgcaaattttaaatttgaaaaagttagttgtattaattttttttgatcaacgggaatgtttgttctgttcaatttaattaaatttttgactattttttatttaattttacatttaattattgaaattatagaataaaataatttagagagattttatctaataatattacgattcaattgccatattaatgaatatatttttttacagaaaaagatgatagctattgtacaacaatacattaaggaaattcatacattttacatgtaataattccccttttttgaatagccaatttttgggcaataataatttttctagctaatatccacaattatttgcaatgttaatttatgacgcaagcaattattaatgtggatttttgcttgattttgtcgccatttttcattgtgaaatataaaatatgtgttgctgttaaaatgaatggaaatatattngattatataaatttattatatggaaatatttatattttcatccatctatgaa

SEQ ID NO: 34365 - DNA, 1409 bp, Heterodera glycines
tgatgaaatataatatataacgaaaatgcacatcgctgtccgtgtgctttgggatgtggtggacatcgagcggagactgagcacggcaccgctgggaaattggcacgggcgcaatttcaaaatttgaaattgaaatggattttcgaatcccaaatcctggcctgtgggcaagaaaaaacttcaaacaagatgaaggagagcaaaggataaagcccgttggaggaagacttggcaaaaaagtcgatggagggatgtgccgggctttaaaaagattgtgcacatcgtggaggatggaggttatcggtgatgaactgctcagtgtcatggaccagtgatttgaaagaggccgatttctcagtcgatgaagcgcccaaagcacccaatttttttttaattaggagtacggtacggtagttaattagtaaattgctaattattttttaaaataaacatgttcctcgaataaatggcaatttgcacaaaaaagtttcgaaaaattttgttataaatttaaaaagggacaaaaatagatttcaaaagatttataattaattaattacttcaaatttacgcataaaaactaaaaaccaaattctaagtaatcaatttttaatttaaaaaaaatgtaaaaagaaaagaaaaattcatacaaaaaaatgatcgtaattcatgtatgtttgtacatagattgtgatactttatgattaatttagttaataattaaattatcagtaaaagaacaaaataaaaagaataaagaataaaaattttgtagtatcataattaattaatttaattactgaataaaagtaattagattaaaatttatataaattatggatgagcaaagagtacaatttttttttgagaattttttgcctgtaatttgcaaaatttcattgactgtacattagcattaaaaaagttggtttacagtgaaaataaagcattttcactcacaccaaagcggagagcgaaggatgtcgccacaaaagcaaagaacactggggcagagaagcaaagaggatgagggataaagcaaaatagtgcacaattttcaggacagacaaacagagcaaaaacggaatgggcagggaaaagaaaaagatcccacagaaatagaataggcaaatctttgtttctctgtccctacttttaacccatcccatttttggaagaaaattgaggaatacaatatataaagaattgaaaattgtatgttgttgtgtgctttgggatgttggaaaacgagcggagactgaggcacggcacagctgggacggaagaggcacgggcgcaattttcaagatttaagaagaattttcgaattaagagaaacatgctaatgcctgcgggcacaatacaattcaaacgagcttcggcttaaaagcccgaggaggaagacttgg

SEQ ID NO: 34366 - DNA, 485 bp, Heterodera glycines
atcaattttattttatttttcatcggctttaagcacctatttaattttaatttttatccgagaaaaatgtggggatgagttgactgtggatgacctgcgactgcgccgaaatttctttggcttaatttcttaaacgtcccagccaacatttattaattaaattattaccttatatgcgaataagtacggtaattcgaatcttgctttgccacaactgtcaatttaaaaaatggcatttttttaatcccaaattttattcgctcactcgccactcaaagtcaaatttatgtactcgaaaaggattggagtgtgggattgcatcagattccagcagattcggttcttgaactcaaccgcaaaagtgaacggcgaagcgccactcagaccggactcttcttcatgtttgttgatttgtatactgtaattaaaaaaaagattttacgcatataacgaatattatggactaaatatattattaattagcc

SEQ ID NO: 34367 - DNA, 941 bp, Heterodera glycines
  unsure (1)..(941): unsure at all n locations
gtcttaattttattcgtcagataatttnttttctaaaacaatctcacccaatgtaaaatacgaatataataatagaagcattaagttataccatcaaatatgccatgatttttggaatgagtgaggtgccatgatatgtaaaaaaacaaatgttacattacctcatatataataataaaattatgaatatgaaaaatcggataaaaattaatacattaaaattaaaaaatattaaaaatatttaaaatttaacgagtgacaaaatatatattcttttatcatatatgtattggagaatcagtttgcaaacagaatgcctaatttgctgccgatacagaaggcattctaaatggaagcagtaaaattacggagcacaaatgttagaggttaacaaacatttaaaaaacataaaactaaaacaaaataattaatttaaatccaaaacatttttaaataaaaaacccccttttttgtcgaatttaagtagaagaattcaatgctgtataaccccaaccgtgatgatacaaaagatgcgcacaccaattaataaataaatacacgtcaaaataaatttctcaacacaaaaatgatgatcgaagataaataatatttattttaaaagctgataatataaaagcatatattaatatttattttttgtacctaaccatttatttttctaagcatttaaattacgattaaaattgtgtaaaactatttatattagtaaattttcatttccactggaatgaaagagcatttctaacacattttttcctcgtggaataaacagttcaaattaaataaagtgtaaagtatgttgatataatttctaaatctttttaaataatcaattagccaaaatccttgatccaaaaaatacaaaaaatcatttaaacttatatattcattataaaaaaagaatgacaaaaaaataagca

SEQ ID NO: 34368 - DNA, 783 bp, Heterodera glycines
gtgggccaaaccgaaattttgtgaaaataagccaatgctcatctaaaaattcgctagtagccataatgaagtaaaatgaaatttgtcttggccaaaacgacccgcactcaaaatttaggcttttttaaacaaagatggataatatcatcctcagcgtcttaggggcttaatgtcaatgataaagaagatgacttaaatcttgaattttgagtggagttggcggcgcgaaatatgttgagttgattggcaccgtgtcagtcaaagcggtggaaatgccgccaagacacaggccgttacgttttgccactattgtgccagtagagagcagaaataaattattttttattgaagaaaattagaaaatagaacacaaagaaatggtcagagaaaggagcaaaatggagggagaaaatgcgaaggcaaatgaaaagggaaaaggtgcggaaggaaatttccggaatgatggccctaattttgggcactttttcaacacaattcatgacaatctttcactaacagggtcccaaaaaattgacttatttggtggtacgcctgcggggcagtgcccataacttgatggatgggttctcacttactgcccataattatttcatcagcgtagaccttttgaaaggtcaaacgggatgatgtcaaacgggctgaccggctccgaaagattggccgacatttgcggctcgacttttgcggcgccgacacttgcggcgcccagccaaaatgacaattgcggcgccgacatttgcggcgcccacccaaagtgataaa

SEQ ID NO: 34369 - DNA, 807 bp, Heterodera glycines
cgaaattttttctgaaggcaacaatcaagaaattaatttattctatcgatatcaatgggacgacaaacgatcgaatcatcaaagacaacgttttttttaaattcgattcgctcgttaattcaccggaatataaccgtcatcgaaaaaaagagttccttttgactagcaatttctaacgatttcttcatgtataagcagtgatatttgtaaaaaaggtgctaggaaaatcgattagtgatcgctcgagagtgagattctgggttctagaaattctcatcgtttttttctcgttctgatagtgaggtggtcaaaaaattctttttcacaccaattctcgagtctcggggacaaaattcgatacgacccccgagcatcgctaaaatgaatgaccggccaaatgacaaatgatgtgtctgtcttctcgtctttcctctttctctgcctcactctctccgccactattacaccaaaatatcgatcgaaatttgcattgtcagagatgaaacgcgggcataaaaccgccttgagaggggggcggtgggtgttgacgttgatgtgccgcagcagcatcgggcagtgcaggtgcgactgccaacgacgaagccgcgttttggctgcgggtgagcaacgacaccgaccgagtccggcgcgccaggtgccgcagctgcgcctccgctgctgacggtcggcagcacacgcgcacgcagttgctcaaaaggaccgaccatttgggcacgcattttgatcagcatccgctccgggccagtgaacgcgcagcgctgcaattccacggcacgagcactgacg

SEQ ID NO: 34370 - DNA, 897 bp, Heterodera glycines
agagcggtggggaaaatttaaattaaatttaatatatatatataaaaaaagcaaaatatctgattgaatctagtgagatacgtgagcaaatttgaattttgattaaaaattaaatattccgtaggcccgcgtagaaataaaaaatacttttataaaattaattttttttcaactataattttgagaataaaaaaatatttattatccataatattaaaaattacttaatttaaattttaatataagtacaatcatattataatatttaaatttattaaataaatatttttaaatttacttaaaaacaattacccattttgatagttaaattaaattttagataaatttttaatgttgcatttttaaaattatagtccaattttgttccctgatcaccagaaatgtaatgatcagtaataaacttgtacatctgtacaaatgaatttggatagttgtagcgtcgtcgctactcaactcattgttattgagcgcggagggcagagagtacaacaaaaaaaaaaaaattggcgttacgtttacgcacgcgccaccgccaaataaatttcctttttttctctgcctttgtacagtttcgtgcgcatatttctttctcattttggctggccttgttaatgcctttttttctctaccttgaacttttattcacaattttcaattcgtctgatttctctaactgtatgcactatttcttttctgttacaatgtttcgtgcctttacatgtgctatatgtaacgctccctcatcgctagtcgcatgattttcgtgagaagacgaaaggtgaagcgcgcgcaattaaattctgctacgtttttttttcgattttcttgcggctgagatttactgctccggcttcaacttttatttttcaattttcg

SEQ ID NO: 34371 - DNA, 669 bp, Heterodera glycines
ggactgccccgaaaacaaaaaatcgattttttcaagtgtccggttggggtactcgaacaacttatggggagctaaaatccaacgccgaattaaagtacaggatatagggaatttattcccgaaggattcggtctccccattaatctgggtgcatctgttcggggggactgccccgagaacaaaaaaatctattttttcgagtgcttgggtgtggcactcgaacatgtatgggtagagataatgccaacttcagaattgaagtgcccagtagagggcagctattgccgcatgagtgtgcctccccatatgtatgggcgcgtcggatttgggggactgccccgaaaacacgaataactagatttttacccgcgcttgcgaggaggacgcgcacaattatggagagctccgatcctgcgcatgatgtagtagtacagactatagagaagatattctcgaaggactccgtctccccatatatgtgggcgcataggctcggggggtgtgccgcgaaaacaaaaaaatatattttttctagagtgcgtttgcggtactcgcacaattatggggagcaaaaatccaacgcacaattagagtacaggctataggagagctattctcgaaggattctgtctccccataaatctgagcgcatcggttcgggggggactg

SEQ ID NO: 34372 - DNA, 1071 bp, Heterodera glycines
  unsure (1)..(1071): unsure at all n locations
aaagacaacaaaatattctgccgactttntgatgaaatatccgccccttgtgatcaaatatggcaaattgatcaaaattcaaattttccaattgatcaaaatgaattaaattcggaggatacaattaattggcaatgataagaagaacgactgattcaatgatcagcaaaaatatgaattttttaaaaattttacgcaaaaaaaaggaataaagaaatgggggaaatactcgacaaaaattcataataaaattgagcaaaaaattgctgaaaaaaatactgtgtcgtgctgggtcgtttcttaaatccgccaagtggtaggaaaataaaaaatgtcacacatataaattcataacttggcttaaatacaataaacttaatatttaatgataccacttaatagctctaggtattctctatttgaatataaattttgaaaatttctttacaaaatataaaaaagttatggttacaaaagttcataaagttatcctatttaattgtctcaccagctagcagctacctataatttggtgattttttatataacggctcagcaccaaatgaattagttggtgtcaatgcaccaaaaggtcaccagtccaaaacggcaattaataaaatgccactgatccaaaaagtcaccaaattaaaattaatgtactgattttaaacataaatgcaagtgtcaaataatgttttttgttttaaaaatgaatcaaattgtgatcagtgacaccgaaaaacccttaaaataagtctttatgatattaaaatttaaattaaaaaaaaaatgtttttatttttatttatttttaattttttgaagaaaaaaatttatttatttatttttcacaactttaaacagatggaaaaagcaaaatttttataaattttcttaattttgctattagacctatgaattattgtgctttatttgatttttcgccttttatcggtgcgttttccattttaagtggcatttttttaattttcgtaaattgttgctaattttcttattcataaaaatatgaaattattccaggtacaggtcgagatctactaaaaaata

SEQ ID NO: 34373 - DNA, 616 bp, Heterodera glycines
ttcaaggagcgaaggggggtggggaagggtgaagtgcccccccgcactactgaaaattgaaaaaaaaaatcggctcacaaatcgggcccgttggtcgtcgctgagcatacggtactccatgcgcaccaccctgcccaggctgaaggcgggcgtgcccgactgtcgccgtgcacgcggcaacggcaccgcaaatggtgccatggtcgctgcgaatggcgtcgacgacgaaccaccgcccaccgtgcattggtcgtgcgcggaagagacgccttaaaagttcaaaaaatttgagtcttctccagccctatttatttggatataggatggaggtgggccgacccgagcagagagcagctctttcagatatcagtccatgccccgaaaatttaaaaaaaatttctatgaaaatgtcaaaaaaaaaatttgaaaaattttttaacgatttattgagaaaatttacgggaaaaattactttagtaattctaacaaacttaaaattgctagaaaatattccaaaatatttctttcttgaatttgaatacaggttttttgggaatattgccaattaaattacttgtaaatattaaaacaaatctttgctcctacagaatgatga

SEQ ID NO: 34374 - DNA, 554 bp, Heterodera glycines
agaaatctgggattttttaaaatttttcagggaataaattaatagctcgtcagaaaaaattcataatcaaaaattctatggatgtgagagggatgaaaaaggaaaagtgcggaattccgcacaattaaatggggccgggcggcacacgaccaaaaattatgttcgccaagtcaagtgaaaacccattaaaaacaaacaaataaaaaaatgtttctgggaatttttcccgaaaattccgtcatttttgcacaaatttcattgtcctcctccgtctgcttccgttgttttttttcgttcaaaatttgcttcatgtttggcaaaatgccgcagcaaatgcttgttgctgttgctcattgtcaaaaatgttcggtgcacttgcagctcgtttaatctgttgttgtgtgctcagctcatcaatggttggcaatccgtcgcctttaaaattgtgggaaaataattattaattaatttttaaagttcatccatttttgaaaatttaatttaaaaaaccctttacgatcgcccggcagtgccgaaagacgcctccggggtta

SEQ ID NO: 34375 - DNA, 1005 bp, Heterodera glycines
  unsure (1)..(1005): unsure at all n locations
gggtaattaatttgaatggtgtcgcgtgcctccgaggaacgggcacaagcaggtcatgttcaggcatgcgtaacgctccgccacccaccctgggcggcggttgtgccgccaactcggccaagcgtggcncggcggtggcaaggcagtccgatgccgtggtacggcggcggcaggtcgtccgcggtcacaatgcgaccctcggcctcggcctgaggggaattttcagaaatttatatgaaaaaaaagatttatggaagggaccagtcaacttaaaaaaaaatttcataaaatggatatttcggaacagttgcgtttgttctgtcgacccctttttgttgtagatttccgtgggttttcgaggtcttactgacacagaaaagcaatgtccatgttgttgaattctgacccagaccaaaaattcgaacagagttcaaaatccaaatttaaaaaattcaatgttattttgttggagtcggtctattttgttagaggacataccaatcggaaattgataaatcccactaattgtcagtacctacatttagaaaaaaaatggggtagaaaacgaaaacccgtaaaaagattaatgaaaaaattttcaatcaattccatccagcagaacggcacctttcgggcctcggcccaaatttgtgccaccattttgcatccgtgccgaacgtgcgccggcacggagtcacagtaattgtccgagttggctgtcacttgtggggggacaatgtgaggcgggggagacggggcagtcagcactgtgttgacggcaaaactgctgagcaacagcagaattgcgatggggaaattagtcatttttagtgttaggctaaaaaaataggcatgaaaatggaagaagattggtggtggtctggtaaaaggtaatgaagccatcctatttttggcattttaattccttttttgaggatttcagcgctagttaaaaagtcatatgtatattttgaattttcataactaaaagagtgacccttttgg

SEQ ID NO: 34376 - DNA, 781 bp, Heterodera glycines
ctaaaatgtgaataattaagggtgaaattttggctcgcggacgaacaactgagtagtaatggctctgagcctattacatctgaacatgttgaaactgcgtcgctttttattgttcctcctcctcccaaacaacgacgtacattacttgattccttgtcagaaatggcctcaaccagcaaatcttttggtaatttttaaaagattacttttattatgcataaaaatttaaagtgcaaatcgaatcgacatttgacgatgaattcaaaaaatattgttcggttgatttgattgggcaggaattggaccctttggattggtggaaaataaacgaaggactatttcccattatcactgcgcttgcaaaacgatatctttcggccccggcaacaacgattggaagcgagcaacttttcagtgttgcgcgtgatgtgtttgactatcgtcgatcaaaattgaaggctgaacatgccgaaatgctcatttttttgaacaaatcaattccgaaaattcgattttattgatttaaaaattttgcttttttattttttctttaataaacgtattgccgctcaaaatttgtgcataaaaatatttttgtgagtttaattaaattttcgaattactcccgctcccgcccgggactcccgttaaaaatggacgggatttgaacgggatcgggatttttacgggaatcccgttcgggactcccgtcccggaaaattttgaactcccgatcccgctcccgctcccggaattttttttttaccggactcaatttaaa

SEQ ID NO: 34377 - DNA, 1373 bp, Heterodera glycines
gtcctcaaattacggtgcttcgaccatcgaactcgttggctctggccaaacggtttggcgcgctccttcggtcattcatcgcgccgcttccgccattctcccaacttcgtaaagcgatgcgatttgccccccccccccaaaaaagtgcgcttttcatcacattttatcacctcatcttcaccagcacatcgcgcacatatttctccatttttactcctccgtttccttcttccacaaacattcactcttttccatccattcaatccctttttccctctttttcccttttttccctcactttttgtgccgatcatttcaaatttcttttcaattcgttttgccttttaaatgcttttcttctttttcgctcttctcattccgtggttggccacttcacaaaaagtggcaaatttgttgactaaattaactcataacttttctcagacacaaccaaattgcacaatcttgatatcaaacgatagcccttaaattgctttattagcttgctaatttcaaaaaatattattaagtttttcaaaagttatgacaattgttccagttttttgccttgaacttttgaaaaacttaataaaattttttgaaatttagcaagctaataaagcaattcaagggctatcgtatgacaccaagattgtgcaatttggttgcgtctgagaaaagttatgagtggatttactcacaaatttagcaaattttgcgcttttcgtcggtcgacccaccacggatattatcattgaacaaaataagaattattaattaattacttgttggttggccatggcataacagaaggggttgatcggcgagttcatgtagcaaaggaggtaactgaacagggcagaggattatggcattacgggccaaaaagtgccattcaatctttggataaaaagttggggactgattcaaatatcgattcaaatgaatgaccaatagtcagatgaatgtcctatgaaacagtgatcatagatttgaaaatgaaaagcaactgatcagaaaagtttcctgatcaatccgacgatggagtagtgtataaaaaagtgttaacaaaatgccatcccccattctccgtgcctgattgtgtacaacgcttgaaagcctgccgagctggaacagcgctcgcagaagccgtacaccgtggcaagcacataaaacggtgtccagaaaaggatgaaagtgccgagaatgactgtgatggtgcgcaaggctttgcgcgcgcggttctcagaacgcgactgggagccctgaggaaaaaactgcagaaaatgagaaattaatgggagagatatggtggtaaaatggagggattaaattgattgataatacgaccattaaatggggcaaaataatta

SEQ ID NO: 34378 - DNA, 662 bp, Heterodera glycines
aattactcttttcagcaatgaatataaattatcgccattgtaactgtgaaaatgactaatgtttatttggtctggcaccacacagatcaaatccaagtcggacccgtccaattcggagttcatcaaaaaggagccgttccttaggatttttgcttttggcactttttctaataaaggaacttttgaaaaataattttttagaaaaattactgtcatctgtgttcgcgattggaatattctgaacccattcctcaattaacttttggatttgtccgttgaaatcgccaatttcagcccttttgctttgcttaattgaatacggttcaatgaattcatttatctgtaatgattgcagaatacagtaatggattatgcataaataagatagtaattcagttgaaaattttccaattttttacctcttgtgacattttgaggtctttctccaaactttcggcacttgttctgatcagtcggtactgacttctttcataaacagatgacaacgaattattaattgcttaataaaatttttttttaattctcgtaatataaatattttctctaaataactttactaatttttattagatatttttctctcatagggttgagccccgcccccgcccccgtccacgggggcgagaaatttctcaccccgc

SEQ ID NO: 34379 - DNA, 846 bp, Heterodera glycines
  unsure (1)..(846): unsure at all n locations
taattcattttaaaattccgtctccacgctctttgatcggtcattatttcatttcagggcacaaattatacgaacatgggctaacaaattcggacaatcacgagcgcatccacctgatcatccatgtgctgcttgtggacgcggtttttgatcgcttggcgcgcgacctttgccgcaagacggcatttgaagtccaattccgcaactgggccgcgttggccaaacaaatggagttccagaaggaggagatccgcagcttcgtgtgcaacccgttgaacaatgtgaactgcttgctgactggtggtggtggtcttgtttggcccaggatttatggccaaattttagggctaattatcaggcccaaatccgcgaccgaccaatgggttgactaaatttgccaataaaggggggcgattttcggcacaaaaaattgtcataatttcagggatgtcccggcgggtgaagcgaaacccggcttagaccccaaaattcgggaacaacaactcggaatccattcccaaaaagtctaaaaatttatttgttcaagagattttttcaaaatttaaattcagatttaaaaaatgtcattttttaaaaaaattacattaattttttatccactcaaatacttcaagttaaagaacagaatgcatgatatatcattaaattaaaactgaaactttgacgaattaatctttttaaataaattaaattctcaatttttagaatttccatggggttgactttcgaattcgacccgcaaatgaactcgacctttgacgaaaacagagatgattgngaaccactggaagaaaagtcaagagaaaatttcatcatgnagttttt

SEQ ID NO: 34380 - DNA, 1030 bp, Heterodera glycines
  unsure (1)..(1030): unsure at all n locations
aaattcaaaaaaaataatgaaattctttaagttaaaaaaaataaatttaaataatttaaaagaaatcttcaaaaattaattaaaaacattgtaaaataagccaaaaatacaaagaaaaataatcgttacaccgtccggattcgaacccgccgccccccccccccctcagaacatgtcccagaatccccaatcacacagggattctgagggcttaacgatgtcaaacgtaaaatctgatcacgtattcgtgatcagcgtcataaaatagccctaatgacatgtttttgaaagatttttgtcgaaaaaattttttcactcaaaaaccatgacccccctttggtcccgaatcccaaaatcacttttatttctataacttttttcaaaaaagtgataaaaatgccaaataaaatttatataatagagcaaaaaactgcggatttttgtagtattttatttttccagaatatcttttcagaaccgagttatgaatttttttctgaaaattcgaatttttccagaaattctggaataacttttttccttttttagatagaaattccaaataaagtccataaaattctcctgatttttctctatttttaaggctttattcctgtaaaattgatcaacccttcgatttgttatgaattttcaaatattaggccaaaatcctgagggccaaaaaattgccaaatattttcgaatttttaaaaaattccaaaaattctgaaacttaaaatagacatcatattcctactcagcaccttaaaaatacccagaaaaaaatttttcaccctctttttcaacccaaaaaaatttccgaaaatttctagggggcctagctcgaaaatttttgaaaatttccggccatataatacactattcgatagcattttaaaagctctacaattttgctctaaggcaattttggctaaaacgatccctgacgagttataggcccgggactcaaatggtccgctcangccaaaaattttttctattttcgggaaaatcgaaatttttcgaaaaa

SEQ ID NO: 34381 - DNA, 943 bp, Heterodera glycines
acaatggcatgaaaagtgatcagggcaaagtcaaacaattctttgaaaagtgatcggacaaagccaaacaatggcatgaaaagtgatcgggcaaagtcaaacaatggcatgaaaagtgatcgggcaaagtcaaactatggcacgaaaagtgatcggacaaagccaaacaatggcatgaaaagtgatcgggcaaagtcaaacaatggcatgaaaagtgatcgggcaaagtcaaactatggcgtgaaaagtgatcggacaaagccaaacaatggcatgaaaagtgatcggacaaagccaaacaatggcatgaaaagtgatcgggcaaagtcaaacaatggcatgaaaagtgatcgggcaaagccaaacaatggcataaaaagtgatcggacaaagccaaacaatggcatgaaaagtgatcggacaaagccaaacaatggcatgaaaagtgatcgggcaaagtcaaacaatggcatgaaaagtgatcggacaaagccaaacaatggcatgaaaagtgatcgggcaaagtcaaacaatggcatgaaaagtgatcgggcaaagtcaaactatggcgtgaaaagtgatcgggcaaagtcaaacaatggcacgaaaagtgatcggacaaagccaaacaatggcatgaaaagtgatcgggcaaagtcaaacaatggcatgaaaagtgatcggacaaagtcaaacaatggcatgaaaagtgatcgggcaaagtcaaacaatggcatgaaaagtgatcgggcaaagtcaaactatggcatgaaaagtgatcggacaaagccaaacaatggcatgaaaagtgatcgggcaaagtcaaacaatggcatgaaaagtgatcggacaaagccaaccaatggatgaaaagtggtcgggcaaaagcaaacaatggcatgaaaagggatcggccaaagccaaacaatggcatgaaaagtga

SEQ ID NO: 34382 - DNA, 1244 bp, Heterodera glycines
cgttttagttttctcagcctgaacaaaaaatttttttcccttgcaaaatctcgttaatctaaataagatttttaaaaaatccttatttattaattacttatactttcacaaaatgtgaatttctttaattaattaaaaaataataattattatttgagaattttctcattttaatttaaccattaaattttttcttatcttttttttctggaaattttcaatcaaatttaaatccatgtttaatttttctgtaaaataaatttaaaaaaaaaacatttttagaagttcaaaaaaacgctactccaaaaagtttggcctgaccaaacaaagcacaacatcagcggcggattacttcaatttttcgtcgtccatcggcgaagaaattttggacgaaaatttgcgccaagaaaaattgagcagtgaaagcagttcaaatgtgacgggatggagatgaaaccgaaaatatacatctaaaaattgaacaattaagaaatttgaacctaaaaatttgatgaaattttgtccattttttgtatgtaataatttttttttgtcttcttccaattttatcaatattttgagctttttccatcataaaaattatatttttaagaagaagaattaataattgtcaaattttaacgtaattcagcaaaaattctaaaaacttttttttcaaataatcaaaaatttctgcaaaatatttcatttcttaaaaggaaataattctgcaaatttttaatagaaaattaaacgaaaatcaattttaaaaataaaccaaatcaattaaccaaaattttaaataaaaaattagttcatattccttaataatttatgcgtttatcattattattaatttttttttctaaaaatgaacgaaaaattttattagtttaaagaggaacttagcactttttaattacttttattgattttgttggtaatttttgtgagcttaaaaatgcaaatttccaattattttttcattattttacaaaataattcgtataatgaattacttcggcaatcaaatggcatttaaatttttattttttataattttactcaaagcctcaaaccaaaaactgcttgaaaaaaccaaaattctcggggtctgtaaattattgaggaatagattgatattatagtagggcctggatttacatggacaaaaaaaaatccaaaatatggattataatatatacgaaaaaatcgcaaaatatggacgaaacatggacaaaaac

SEQ ID NO: 34383 - DNA, 953 bp, Heterodera glycines
  unsure (1)..(953): unsure at all n locations
gcgatggtgtcaacttccaattattgggaggaaaccaagtgcacgtcggctgacgcaaagaccctaacagactaaaacgcgcctaggtagcgaagctcacaaagcgcgaagcgctttttcccagcccagatccgacggttcacgcacccgctagttactatatatgttatattgacaaggagtttcgtttcaaaaaacaaaatctcccggccgaaggccgggagctccctgaaagtggtggaagggtcttacaactttttgaggagaatccgggaaaactatagagaaaaattcagcgcggacgactgagtcccggggaccgatttctcactttttcttgcagtttagggcccgtaactttttttctaaaactcggatcaaaaaattcccgctgtgagggcactccgcagaagtgtcctctataatccagtattttttattttttgatcagaccaaatcccggacctgtacagacacggagactcagttaatttttttttcccacttcagtaccaggtgaatgccgcgccagggtttgaactgagccagggggtgccagcggcactattgtagagcttcgaaagctcgattttttcagattttaaaatttcgaaaattttcaaaatttttcgagttaggcctaaaaaacggttttcgggttttttaattttatgattttttaacgaattttcccagagaaacggagagcacttccaaaacatagtttttcgagctctatcgactggtatttttttcggaaaaatttcgatttttcccggaaatagaaaaattttttggcctgagcgggacatttgagtcccgggcctataactcgtcagggatcgtttttagccaaaaattgccttagagcaaaattgtagagcttttanaatgctatcgaatagtgtattatatggccggaaattttcaaaaattttcgagctaggccccct

SEQ ID NO: 34384 - DNA, 962 bp, Heterodera glycines
gtgtgtgtcacaaagtaaacaaaaaatttaaataaagttttgacgcgattgtttttatttggatggaagaaatgaagtgaaaaaacagagataatagagataagtttcattgtaagaaagagtgaagaagagagagagatgaagacagttaggaacaaagagcggagagtaaaggagagagaaatgattagagaaacaggaaaaaagagagagaaagtatgggagtgaatgagacagagacaaataagagagagagagataaaaataagagaagcgagagagaggggggaaagagagagaaaagaggagagagagaagaggagagagagagagaaagaaaaaaggagagagatagaaaagaggagagagagagagaagaagagaggagagagagagagagaaaaagagaagagggagaaagaggagagagagagagaaagaaaaaagagagacaagaggagagagatagaaaagaggagagagagagaaaagaggagggagagagagaaaagagaagggagagaagaggagagagagagagagaaagaaaaaaggagagagaggaagagagagagaaaaagagaagagggagaaagaaagagaggagggaggagggagtgaagaggagagagatagaaagacgagagagagagagagaaaagaggagagagggaagagagagagaaagaaagagaggggggagagagagagaaaagaggagagagagagagaggagagagagagagagaaagaaaaaaggagagagaggaagagagaggagagagagagagaggaagagagagagaaaaagagaagagggagaaagaaagagaggagagaaaagaggagggagtgaagaggagagagatagaaagaggagagagagagagaaaagaggagggagagaagaggagagagagagagagaaagaaaaaaggagagagaggaagagagaggagaga

SEQ ID NO: 34385 - DNA, 882 bp, Heterodera glycines
aaataatgcgcataaaatatgcaccaaaaatcgtgaaatcccttcataaaaagtgaaaaatatgcacataaaattttccaattcgagggtgtaatttctcaaaatttcttcaaatttgttaaacataaagtaaaatcttcaaaaatggctaaatgtggtattaaaaatcattttaggagaaaaaaacacgatacagcttaaaatttactcattttagcgaaaaatcaacctgaaaagcaaaattttgcttatttttgacataaattaaccattttttgagaaaatttatttattcaatatttttcgtgaaaattttgctaaaaaattatttttttggaaaattttccggtttttgaggtcaaaaaggccaatttgtctgttgggggccgatctattgaggttttttggaaaaacgccaaaatatgcacataaaatatgcacgaaatgccaaaatatgcacataaatcgcgaaatatgcacaaatatgcaaaatatgcatatggaaatccatcctagaagcttcaagccatgctaaaaacatgtttttcatgcgtttcaggcctcccacagtccaggaaaaaatatgcatatgcatataattctatgccctagtgatcgtattttggagttcatttttcgcaacatttggccaatgatcgcgacaaacattcatggcttgcaattgtccaaacgaagtttccgccgtttgcgtcagttggccccgtcatttctcaacgactgtccatcgcttcactttgtgtcctattatgacgatcttttcaccgaatttccggccaatgacaatgccacggcatcggatagacaagcggtggccaaatggcttttcactccacttcaaaacgatgtgccaaaggtgttcaa

SEQ ID NO: 34386 - DNA, 499 bp, Heterodera glycines
cttaatgcataatcgcaaggctatgtatacaaattttccttgagtatgaaaaagattttttattccgaccgattgatccgtaaacaattaagagaaatgctaatttattaatacataataaactaaaaaggaaagtgttttggtctctcgatttggcgaattatattccccaacaaaaatgccatcatccttcattcttcgggcggcacaattcactgattcatcgtccgccggtaggagtgccggtattttcccacccgtttctgttgacaacatcggcgagccaattggcatcattccactgactctttgcccaatcactaaaataaaggacaattaaattcaaataaatattttaattttctaaattttgtggaaaataataattcaaattaataataattatttaattttaaatacattttccatttttgaatataccatttttattaaatttatgcgcttacagtgtcgagtcaatgggatggccccatcctcc

SEQ ID NO: 34387 - DNA, 993 bp, Heterodera glycines
gtgatgtcattatttaattggtattttctgactttacccgtgaaataaaaattatttacctatttaaagccattttattccaaaaaattctgtatgtttaaatttattacaaacttgtgtctatctgtgatgtcattatttaattggtattttctgaaaaatacccgtgaaataaaaattatttgcctatttaaagccattttattccaaaaaattctgtatgtttaaatttattataaacttgtgtctttctgtgatgtcattgtttaattggtattttctgaaaatacccgtgaaataaaaattatttgcctatttaaagccattttattccaaaaaattctgtatgtttaaatttattacaaacttgtgtctatctgtgatgtcattatttaattggtattttctgaaaaatacccgtgaaataaaaattatttgcctatttaaagccattttattccaaaaaattctgtatgtttaaatttattacaaacttgtgtctatctgtgatgtcattatttaattggtattttctgaaaaatacccgtgaaataaaaattatttgcctatttaaagccattttattccaaaaaattctgtatgtttaaatttattacaaacttgtgtctatctgtgatgtcattatttaattggtattttctgaaaaatacccgtgaaataaaaattatttgcctatttaaagccattttattccaaaaaattctgtatgtttaaatttattacaaacttgtgtctatctgtgatgtcattatttaattggtattttctgaaaaatacccgtgaaataaaaattatttgcctatttaaagccattttattccaaaaaattctgtatgtttaaatttattataaacttgtgtctttctgtgatgtcattgtttaattggtaatttctgaaaatacccgtgaaataaaaattatttgccctattaaagccattttattccaaaaaattctgtatgtttaaattta

SEQ ID NO: 34388 - DNA, 687 bp, Heterodera glycines
tttttaaaatttaaaccaaattgttcataaattcgtgaactctcaaatatctcattctttatcaatttcgctagcataattacaacaaaatcatttcaaagttttaggcgttaatcttcaggaaacaaagaaacccaatgtcgaattaaagcagaattggttttggagcatggatttgagtgcaaatagcctttttttgcaaaaaaataaataaatctaaatctaaaaaaattgtctaaatattgctaaaaactccaaaaagaccaaaacattttttatacggaaaaaactcgctctgattgaaaagaaaacagttaaacatgctgagcttttcatgcgcaaaattttccaaaaaagctttaaattatataaatcctaatcctaggaattaatatgtaaataatgtacactaattatcgaattttagaaaaaaatttcaaaaaataaaccataaaattcaaaaaaaggttaattttattcctttcgaacgtgaaaagattggtttttttcaacgcagaaattttttatttgttcattcagaaacagacgtgatctggcggtgccgacaccgccgtgaaaatttcttgaaatttttaatgagtttattaaaggcttttgaccaaaaattttccttttccatctgacaaaggaacatttccgacccgggactgcttcaaatccctttaa

SEQ ID NO: 34389 - DNA, 1410 bp, Heterodera glycines
  unsure (1)..(1410): unsure at all n locations
acaaatcaccggccaattaaatactaataataaaattacatatattcatttttccaataattaaataatatttttgtctgttttatgattataaacaagagtgatcaaataaattcagtgattaaagtacatttttaaaaataaaatattttcatctaaaaatcaaatgaataacgtgaatttgagtgatttgggctaataggccaaggaacgccgcggcatcaattaagtgcgatttaatgttggactgaattatcccgaaatatcttcatcattcaacattgtgtagtgcctaatggaagcccattgtgcattggaattgcttgattagcatttgaaaatcgtttaaacacaaatggaaaccccgtttgaaatgcctggcgatattccgtactaaaataaaaaacaatattgtttaattattttcaaataattattcttaaagcttccttttttaggcacaaaaatcgcgaaataagctcttaaaaggcacaaaaaatcgcaaaataagcattaaataggcactaaaataggcaaatacttttttgtgaacgctttttaggtagcaaaacacgtcaaagttaaataattcaattgtaaataaaattatgaaattgtttaaagttttttcgacaagaacaaatttttaaaccagaaatttttattaagaaaaaattattaaattttgggatcaatttttgaattttcaattcttaggggtttattttctgaaaaataggcattataaaagtcaacgtagacgactcctcaaaccaagcggaaaacgcgttttttatgcttaatatattgaaattagtgcgcagaaaaaaagacatatgcctcaaaatacgagctctaataataactaatttaatttacgcttatttcattaaaatgtcgatgttttaatgaagtcggcaaataattaggcaaaaaattgaaacggaaacataacgaaaggggtaaagagactgagaaagtaaagcaatttcaaatatgtaaaatttagtattttctgaactcaaggcagttaaggaaattaattacccatttgatttattaaaatacgaaagaatggcattaatttttgcttggtacgagattttgctttcatcgaattaatttttttcctttatttcacgaatcacaaacacctgctgttgtttgtttcaatttaaaccaattccttccccaaaagtacaaaagactgtcattaattggattatcattttgaatgaaatgatttagaattttggaaaacaaaaaaatcttgcatttgtgaaaatgctatatactcgtgcattttgaaaactgaatcccagtcaaatcccaacgaaatttcactcaaatacacacaaaacgaatttattattaatcgagattatgcactgcaacnggtggttattttct

SEQ ID NO: 34390 - DNA, 1031 bp, Heterodera glycines
aaaccccgtaaaagattccgaattttctggaaagtaaaaaaaagtcacatttttgcttggccaaaagtgcacagtgcgccgatgtgccagtcgagcacacgaaacacgagcaaacagtgccgaagacagtcggacggctctgagccgggcccggcgtaaggcccactgaaattgggaagggatggaaaaacggggtaagaaaatgaaaaaaaattgaatttttaatataaattttagactcaaagctaacgaatgaaaacccaagttttgctccgttttatttggcggcggatttacgaaatttcggcacggcattttagcggaccgacttgaacagtcggatggaatgggtttccaacaataagccatgtccgttaacggcattccgctaatttaaacggtgccgaaaataatatttttgaaaaattcagaaaatgaaaactaaccgaatttcgtggtgcacaaattcgtctaattgttcagcaattgcgtgcacttcgtcaggcgttgaccaacaacagtcaaaatttgtctgaaattttaccgcttaaaaaatgccattgtaaaacaggtatgtaactccaaaaccttaccaagatgtccaagtattggtccggtcgttgtgccaattcccgaccggtgcctgcaccggcacgaaatgccatggcatgcaaaaactgtagtgacagttgaaaaggagagaatgtggcgtggtattctcctggaggggaggcattttttgattttggtccattgtttattagaaaaaaaagccggaaaagggaccaccagtaaaacccataaaaaagttcccggaattcggcaatttttacgaaaaaattagtggggttcgaaacacagaggaccggatctaataaaaaataacagaagcctatgctgacacgcatttgcttgcaaaattttgtgtttatcccgagttcggacagggcaatggtcaaaccggaatttgtatgaaccccatcattatccactttttattaggaaaagcgggacccagaaaatggggtgga

SEQ ID NO: 34391 - DNA, 848 bp, Heterodera glycines
tcgcctatgaccaaatggttcgcgactgtccgaaaacgtgcaatgtttgcccgggagtttgtgaagatttgggcaccgaatgtcccgaccgattgttttattgtgggagagaggtgggcagaaaaaacactattgaaactaattaagaaaagaattttaaaataataattatgaatgtgcatgttttgttcatctacggcagggacgtgccgaaggtagggaattgaccgtttcgttaattttcagccctacattgacctgatgaattggcaatgcccgcgaagttgcaaccgatgcggaaacagaaggcgaccacggagcagattataataaaaaggaagaaacagaaaactaattttgtgatcattcaaatttaaagcaaaatcggaaaaagaatagggcccaaaagcatcatttaactgtcaaaaagcatcatttattgaggaatattttatgaggttttctagctaaattttattaaatataaagggaaattgtggtccacttgtgccgataggcgtcgtagggatttttttttagaattttaatgcaatttgtcgtgtccagacattttcgtccagtacatttgcgcctatgtcaaaaatcggattcaaacttaaattttttcaaggcaatcatggaatgaaaaaatgtaatttgaagccggatttgtacataggcgtaaatgtctgtgccgcaaaggttctggtcggttttatgcgtcccatgaatcaccattttgtataattttattttttgctaaatgcaatatacaaaaaattatcctcaaaaaaggtgaatttattttttaatgccagtatttgaccttttcttggatttataaaatc

SEQ ID NO: 34392 - DNA, 1104 bp, Heterodera glycines
agaaaagcgaattcgaattcttccaattggcaaatcgccttgtttaattcttcggcactgaacgaaccgaactgagtgactttaaaatgtcgttctttttgttggtttgaaatgccattttttagtttcacaagtttactttcatcaatagtttcagcaattttttcccacaatgtgtttgttgatgagcttaattaactcagagttttatcaatttcagtttacaataattatcattttattacattaaattaattatttaaatttttgtttctcactcaaatgcaatttggtcaatgtcctcgtgaataaaatataatttgtcatgtacaaattgcaattcttcacttctgatgctcgcactttgcatgaaactatcccatttttcgtcaaatttgtccaaaatttgatcattttccgtccttttttcttccctttttatgaattttaatttcgtttcgatcgctcgcacaaataaaataatatttttcgttatttcaatgtttttgccgtccaatttctttagtaatacattttcaaaagtttctttcaccaccaaatcgtctaataaatctaaatttctttcttatttaattcctttttaaattaaaatttgcctcctaattttccgattccaatttctgccaatgtttttgtgccattttccccgccgttttgcccattttcaattaaattcgccttttttgtccccttttttggcgttttgccctcttttttgtcctctttttcctcccccaattcgttgcttcttttttccgtcatttcttttttcccttttttgttattacttttttccttttccttcccattttttgctccttttttcgttgctttttctttcttttttgcctttttgttttggctttgtcttatccatttttcgttttcttcgtataattccatcagttcgtccgtttccgaattttgtctgtaaatttcggttatttccttataaatttgctcttcttcgtcctgtccctttttttctcttattttttctttttctttattttttgaatttttccttagaatttcttccgttgtatttgcgttttttgcgcatttcattttcatttcaaattg

SEQ ID NO: 34393 - DNA, 849 bp, Heterodera glycines
ttaactgaatttttggtgcagagattaacgttataatttaggtctgattaatatgtagaataataaaaaataggccaaatgttaggctcgtgtgggaattgaacccacgcgtccacccaacccgggggcagctctaccattgagatacctttagaaacagccggactgagtacaacctgagcttgaactatcagatcaatgagaacacacaagcaatgcttgtaatttttccgatcgatatttcctttgccattatatatccaatccacaatgtgcttgtgatcttaattcgcgcctaccgatcagctttcacaaaagcggattttgtctcatattgctactgggccaatacggtaatcattaattgaataatttgaatttaataattcaaaatttagccgctttttcttcattcgctcgtcactgttttgttgtacatccgctttatcaacagaagctcgaaaattacgaaaagaagaaattttgtgaaaaggaatttaaatgaagtagggaaaacccatttcaaatttttggaggaacagtggaacagaaaaagtgcattttcaaccgattaaattaggatgcacttaattttttatgcattaaccattttttccaaataaagattttggtataatttataagtacttagccaacagaattgtttttctttaatttatatttaatacatatcgtggggcgacattcagttcgtttttttggggttgaaatttgtaaatcgagcttgggatcctcaaatgtggggacctcaaatgtcgggatcctcaaatgtcgtgatcctcaaggatcctcaaaagtcgtgtacttgaatgccgtgatcctgaaatg

SEQ ID NO: 34394 - DNA, 255 bp, Heterodera glycines
ttcttgagcagattgtgaacgttgataatcaactcaatgagctgaccttccgcgaggcagagatctcccagctgtataagaaagatcacccaacttatcgtgcgctgctggaaaaacgccagacgctggagcaagaacgcaaacgcctgaataagcgggtatcggcaatgccttccacccaacaggaagtgttgcgtttaagtcgtgacgtagaagcgggccgtgcggtatatctgcaattacttaaccgccagc

SEQ ID NO: 34395 - DNA, 1333 bp, Heterodera glycines
aaaaatttttttgggttgaaaatgggggtcaaaaatattattctggggtaatataaggtgctgagcacgaatatgatgtctattttcagtttcagaatatttggaattttttaaaaattctttattatttggcaattttttggccatctgggatgttggcactaatattagaaaattcataactaacctcagggtaagtcaatttttatccaacaaagcattaaaaatagagaaaaatcaggagaattttatgggatttatttaggatttctagcatcaataagaaaaaagatattccagaagttatggaaattttagatttttcagaaaaaaattgataactgcgttctgaaaagaaattagcgaaaagtaaaatactacaaaaatcctcaacttttttctctataatataaaaaacattttacatgcttatccgaaaagcacaacaaaaattagaaacgggcgcgaagcgcccgtctgaggccgcgaagcggcctaaaaatcgctgataattttttaaaaattccaaatcttttcacaacccgatagctaatctaggtagcgaagctcaagaagcgcgaagcgctttttcccagctaaatagccgacggttcacgcacccgctagttaatatatacgttatattgacaaggagtttcgttgctaaaaccattttctcccggccgaaggccgggagcgccctgaaagtagtggaagggtcttacaactttttgaggcgcatccgggaaaactatagagaaaaattcagcgcggacgactgagtcccggggaccgatttctcactttttcttgcgtttgttagcccataactttttttctaaaactcggatcaaaaaattcccgctggtaggattttaagttgaagtgttggctaaaagttaaaaaaaattccaggcctctacctataataggaagggctatagaagcgcggacaaattcagtaccaactttgtccacttcagtcccaggcgaataactcattagggtttgagctgagcgagggggtgccagcagacttattgtagagttcaataagctcgatttttccagattttaaaatttcgaaaattttcaaaattttttgagctaggcctaaaaaacggttttcgggtttttgaattttaggattttttaacgaattttcccagaaaaacggagaccactttcaagcaaccgtttttcgagctctatcgattggtgggatttttgaaaaaaattcgattttttcccggaaatagaaaaaaattttggcctcagcgggacatttgagtgccgggcccccataactcgttaggggttggttttatcgaaa

SEQ ID NO: 34396 - DNA, 1643 bp, Heterodera glycines
  unsure (1)..(1643): unsure at all n locations
tccgatttntgaagtaaaaatcaaacaatgatgatcattctttgcctaaaaaatggtttgaattttttaaatattgaatgtcgtaattgacttgggtctaaaatttgaccatcattatcaacataatcctgatcagaatttttttttatagtaatctcgctattttgaatcagctcgactgccttttccccgggtttggctacttcatcctgatcaattcattacctgaactaatcatttccgattcttagacttttctcccctcgagcttccgccctctttttctgatcactttttcagcattttttcccgtctccgccaaaaaagggaagggttttgctacgcattctttctgatcagtccattgtaacattgatcagtctgtctcgaccaatccactcgctttacctctcctccccgcccccttcggcttgaactctcccaattccaaataggcaatgcaattttcccattttcgtcatacagtccgtcatccttcccgcctcccccccccccccctccaatccatcccaaaagcgtcgattggtccggaaagtgaaaccccacaagccaagcaaggacgacgagaagaagaggtgctctccatccgacgacgccgattgatttgtgtggggcgggaaagacaaacaaaaattattcccccctccccccgggggggggggggcttttcaatcatagcattttccggagaaaagcatcgtcgccgctgctcttcaaatggtcacagtgaaatgaatgaatctcatcttgaatgatgatgacgatgatgatggtggtcgttgatgattcatcgcccacttaaaggaattaaaccgcactaattgcccgtccctttcaattaatttttttttctactttctgtgctgcccacaaaatgatttgcagcagtttcttgtcgataagaatattatgagattgtgttgtgatgtccatcctaaaaatgattgattgaccgcttaattttacttttcataattatcgcctggggcataaaaaaatatttttttaaggtaatcattaatttaaaataataattccataaacgtacaatatatagtcgaaataaatattcgtacaataataataaatggacatatagaaaaggaataagagattatgctttttttagataatgttaaatgagcaaatgaaattaagcgcaataattattgtttcaatcttatttcagcaaaagtcaatagataatcttcttgtataagaaattatctaaatacaccccttaatatttggaaaatttaaaatattttttttggttgataaagcatatgatatgatcgggtagttcatcgtctgcccgtgcagaaatttcttcatgtttttttttgattacaatgctaatcaaatataatttctatgaggtaaatatgggaaaagtcaatgaatttcgtggagatgaaggaattttcatgaaaatgccgatgaaatgaaagtgccaaatctgtcatcatattttttctgtagaatcatcttttattctattatattccagaatttaacaattgctttttacaattcagcgtgttcctccggggaatttacttttgtattatcatccatgttgttcattcattcatcaaattcttgcagaatcttttgttcaa

SEQ ID NO: 34397 - DNA, 1040 bp, Heterodera glycines
atgatgataagcatattgtcaaaggaatgcacaaaaaaccttagtgatggcaccctcttcacagaagaagcgattgacgggagaaaattgaaaattggcacaagaacgaattgtatgggatgagatggacggggggagcactttactctgtcagaacgaacacatgccgaaccgggattgttttttgcttggatttgtccttcccctccccccttggccatgccgtcgtcgcttttctcaacaattggcaaacattgcactccgcgctaccaaaggctgctgctcattcacccaaactttggcaaaatgatacggaaagaagtgttgtgtatataaaatgggcggacgaacggaaaatgccaataatttttagcgcaaatgaaaatgaatgagcgaatgaaaagagtcggcatcgacactttggcctgtcacatatcaatcagtcccattcactcattgacaacaaaatgcctaattattactttcccattattattttatataactttcgtatgcaaatgtaaacaaaacaattggcagaccaaacatggcatttcccaccaaataaaaggttgtggggttcattctgtgtgtccctttggcatttgccccccccccgcctttttctcgttctgtctcctaatttataatgtgccaccgcggcgtccctttcttctgacaaccaaattggtggcattcgctgctgttgacaaacgttagtccttttcggcctctccatttcatctcaaattaaaattggtcggctccttcccaattttccatttatccccaaaatcgctcttttgattaggcaaattacttttccatttaatattctgttgatctgattaatttaattgttataaaaatgatcaaatttatggaaaatctaaaacctattgatctgaagaggggggggggatacatttgctttaaataacaatgcactttccaatttatgaatgtataggaaatcaattaaaataatttttattttattattttgaaaaataatttatgttaataattgattatttcat

SEQ ID NO: 34398 - DNA, 1016 bp, Heterodera glycines
  unsure (1)..(1016): unsure at all n locations
caggtatatttgctcatcttaatttattcttggggatcttttgtttaaaaaagtcaaaaataaattcaagaaatttttccccggactacacgatcttttatcaccataatgacaaaatggcgccagaatgcaggtatatttgctcatcttattttattctgggggcttttacgtttaaaaaaatcaaaaattaattcctgaaatttttccccggactacacgatcttttattaccataatgacaaaatggcaccagaatgcaggtatatttgctcatcttaatttattctgggggcttttacgtttaaaaaagtcaaaaataaattcctgaaatttttccccggactacacgatcttttattaccataatgacaaaatggcaccagaatgcaggtatatttgctcatcttattttattctgggggcttttacgtttaaaaaaatcaaaaattaattcctgaaatttttccccggactacacgatcttttattaccataatgacaaaatggcaccagaatgcaggtatatttgctcatcttaatttattcttggggcttttacgtttaaaaaagtcaaaaataaattcaagaaatttttccccggactacacgatcttttatcaccataatgacaaaatggcgccagaatgcaggtatatttgctcatcttattttattctgggggcttttacgtttaaaaaaatcaaaaattaattcctgaaatttttccccggactacacgatcttttattaccataatgacaaaatggccccagaatgcaggtatatttgctcatcttaatttattctgggggcttttacgtttaaaaaagtcaaaaataaattcctgatatttttccacggactacacgatcttttattaccataatgacaaaatggcaccagaatgcaggtatatttgctcatcttaatttattctgngggcttttacgtttaaaaagtcaaaattaattcctgaaattttccccgnactacacgatcttttattacccata

SEQ ID NO: 34399 - DNA, 964 bp, Heterodera glycines
tcatagaaactattaatttaaaaaaacacagaaaatttctgtggaaatattaatcacctgaactgcgtttgatgccgccttaaaaatggaaataaattcagaaaaagtattttcctaataaaaaagcacttggaatgccgcgtcgcatgcaaagcatttggccatcgacgcaaaataaacggcgtcctccgcctgcgcgtccaccttttcggccgcccgcttcacaaggcctttggacgcctccaaatgcatggccatttcggcgagtttgaaggagacgccctcaaaagaaattgtgcatttgccgaagcgtttaaaaaattcaaaaaaaaaaaaaaattcgaacacatgtaggaagaaggacatttgatttaaatattggcgttccattttgatgttcattccccatttattattgatttacaactttgactttttcacaatatttcccgcccttttcccacgttcagtcattatggttttatcattctgatttcattccccatatttctccatccctctccaatccgtctcttctctaaatatattattttccttctccaaataagtaaatatatatattctccatccatcgccaattgacttagtgatccaaatccgaaccccggcattctctcccctcttcctttaatcgtacttggcgctcctggccgacattcgaactgcaccgccttttggaagacatcgaattgctcgccgattgccgacaagccagcaaagcacgtgaaaaagcagcgccgtccgcccactcaattcgccgaaaatggaagaatattttggtcaggcaagttttcgaaagagaatgttggcacaaggccaccgactgcgagaaagtcttgcctgtgaaggcaacaaaaaccggattttggctgaaactgcattcgggtttcggcagaaatgaagaaattgggaatttggggggcgtcagtgcattcccatttcg

SEQ ID NO: 34400 - DNA, 521 bp, Heterodera glycines
aatcccgctggcccaaatggtggggattatgaaggttttaatgaatttattatgaaaaagtggttaaaatttgtggcgttttttaggagactctccaattggcacacactgctgccaatgaaaaatttgaaaggaaaaggaacaaaaaatgaacaaatccgctgctgctgctgcacttggctttctctcattggctaacggaatgccagtccaacagggcatttgcgtcactgccaagtgacaaaacgacgaatccgaaaaattggccaaatgaagtgaaaacggtcactgatgggtgagcagcagggatgggccgaggtttcgcttttcgcatttcgcctttcgcattattcgcattttttggcgtttcgcatttcgctttttggcgcgaaatgcgacttttacacccctaagaattggattaaattcccataaaatttttcaaaattttacctataaattggctaattttcagtgaaaaactgtttataaatgatcaaaatttccattttttttccccc

SEQ ID NO: 34401 - DNA, 1709 bp, Heterodera glycines
cgcgtgtgccatggccacaaattctatggacaaaggtgggacgcggttctgttcaagaaaacagagcattttgggaattctggcaatctttcgactcccttctctgcttcggctcacttcgcctttcagcaggccgtgccaatctttccggcgtcgcctcctccgccaatagcgctcttttcggcattggcactgctgcggtacgtccgtcctcctcctcaaccgcgtccagcacttcgacgcccacccaatctaccactgcccagcggcgtccgattgttctgtcggcaaaagcatcgccgtctccgccgccgccaccgccgcttttgaacataaaaagtggcggaagaacggcacaaagggtggcggtgacaacaaaagaaaaacagaaaacgaagcagagagaagagagggagcacaacgaaacggaagacgaaatattcttgggaggggaaggtaaatgggcgaggggagaaagagagagagagtgtgtgttagagagagcgagagagttggaaaacgatggatggcggagtgacccattttatgccaaatttagtctcattgaatggtccaacaaaatttgtggagaatgccattgtgaagccgaaagtgccgccaaagcctgacaaaaacgcactgatcggagtcggacaacagcagcagaagaagcgaaaggaagaggtgggaggggacagagaatgaggacagattggaatttaaaatgtaacaattactaattgtcagatcaatcagaatttggtcggtcccttggagagcattctgaaggatgtgcgatcgatgaacgaggcattggacgtgttggagtcgccgaccggaaatggcggaatagcaggaagtaccagcagtcagaaggttggcacagcggggacagaaacggtcgcggagggagcagatcatcagcaggtagtataatcagatgatcgataagagtcaaacaatcatcagcaacggatggattaattaccgtgattggccaagagtgtgtgtctgtttcctatcttttccgatcgtttccgtctcccccttttcaccattgatcactgactgatcaattaccataattggtgtcattttcgtttgtcccttttccgatcgcttccctttcctccgtcggcccctcgcgccgtcgtcgtctgcccgatgccatttccgtggaaagtgacgactgtccgtccgtgcgcaccgttcatttgttcaacaacggcgacaatcgcgtgccctacacattgacagtgcgcgacctaagcggcggagtgtcgcagcagcgaacgacgacaagcgaagtgtgaggaaaaatgggaaaatgggtaccgtaactgtgtgctgacacaacaatatacagtagtcgtgaggagactcagtggtacggtagtggttcagcgacgtccgccagcagtggcggcttcggacgaagtcgcattgccacagcgctggaaggctgcccaatggcattgagtggcgggggcgggggacagcggcacaaatcgcttgaattggtaaaaaccattattttttattaatcaatgctagattatccctcccccccccctttttataggtccaccggaagcgactgccccctcagggcgccttctcttcgcaggaccattcaatctcggcacatcctttttaaatgacatttagtagtcaaaattgctttaaattgttaaggcgacgtcgcccga

SEQ ID NO: 34402 - DNA, 240 bp, Heterodera glycines
cggtgtcatctatgttactagatcggggatcgatccccgggcggccgctcgagcaggacctgcagaagctagcttgatggggatcagattgtcgtttcccgccttcagtttaaactatcaagagagggaggtgggtggcggaagaagaaaagggtggggggagtatgagtatgatggtcaatatggagaaaaagaaagaggaaggccaattttttcaattcaaaaatgtagatgtccgca

SEQ ID NO: 34403 - DNA, 1305 bp, Heterodera glycines
ttatatgaaattatagttgactaaaatatgggagggcattttgacgagagaattggcaatgaatgccgcgccgtccggcacaaagaaaagaaaaaggcactttttggcgggcattttccatgcccataaatttttttttcttcttctcttctttcccattggccataaatttggttgaaacaatgggcacagaataaattgaatgtgttggttaaggccaaggctttctttcgcccacgcgcaaataaatttttaatcatttcttataaaaaaaaatttcttaaaaatttatatggcaaaataaaagtcgaccccaattgtccaatggatacttttctgtttttagaccccccccccccgaaattttcaaattaaaaatattttccatagtaatttgtgacgctgatcacaaatatgaattacggtattttcgatggcactttcatcaaaaattcgaatttcggcccaaaaaataatccggagtaaaaattgagttgtggccggccaattggtctttcattatttatttctttgcagaatgaatgtggcataaaatgaagaaacattaaaattgtttagattaactataaatattttattataaaaatatgttttaatttagaaagcaaaatagattttacaattagtttttatttttattttaaaattaagatgcggtttttaagggagaaaattttaaaacaatttaattgcatttattgaattaaaaaataataaaattgaattttaaagaaaaataaaattattctcttttttagatgaatttcttctttttagaataaaacgcaaaaaatgttttcttttattgaaacttaatttttcgatttttttattttatgttacaacttaatttatatgtagaaatttttaggtaccaataggaggcgtaaaatcaaagagtttcagggataaaaaagtttcgaaataaaaccgcagaaaaaaataataaaaattattaaatctgtgtccttatgatatttatatacaaaaattatttgttaaagataatttttctggaatttataaaaaattggcatcgccttgagcaaagattcatttaaaaaacccaagggcagtggtggaaaatcaaaagcagaaattcaatattcgtgtgcttttgcaactcttttttttttaatttgctgattgtgtgtaaaattaatgaaaataaatcaattacttataaatagggctgggatttgtatgtgctaaaaatcctgaaatatgtaataaaatatgtgctaaaaaacaaaaaaaaggcctaaatatgtgttaaaaaatgca

SEQ ID NO: 34404 - DNA, 836 bp, Heterodera glycines
ttatttgttttttgcataattaattcataaatatttttttcagaaactgctctgaaacgcaccaaattttatttgcaagttattttaggcactcagatgctttcactatcaaaaagggagatgaataaaaaatctaaaaatttttaattgctttttaaatatgcgaaaaattttaggcttaactttttttttataaactggtcagaagcgaaccagattttgcgagagcatcaaaaagacaaggaaaagcactgctatgatgctaactccagtaattctgaatttaaaattttttattaatttttaaagcttcactattttatttttttagcaaaatcaattcataaatattttttcagaaactgctctgaaacgcaccaaatgttaattaaaagttaaataaggctctctgatgctttttctatcaaaagggagatgaataaaatttttaaaaatttttaattcctttttaaacaggccaaaaagtttaggcttatattttaaaaagtttcatcgaacctagcgcactaaaatcgatataatctctccaaattttgcaggccttctccattgtaaaggactaacttaacctgaaaaaatgccaacgcttgttgtttttaaaatttttcgaaattctgactttttcattacttatttattttttgcaaaattaattcataagtattttttcagaaagtgctctgaaacgcaccaaatgttaattaaaagttaaataaggctctctgatgctttttctatcaaaagggagatgaataaatattttaaaaatttttaattccttttaaacaggccaaaaagtttaggcttatatttaa

SEQ ID NO: 34405 - DNA, 1044 bp, Heterodera glycines
attgataagttgggacggatggacgggaaatgaaaaacgatcaaagcgggcggaagcgggagaacctgttgaaggaagcagaatggactcacggacgaagggaagaagcgacttcgttcgtcctttcgtccgtccgtttcactgtttctcccccccccccccgcccattttccccacttaacgcattggccaattacaatacaacgaatgatgcattttatgtgatcgataagcacgagaaaaatacgatgcagaggttaatgaaggaagttggaaagagtttggaagcaaatgaagtggaagaagaacaaatggtggcggaggacaattgaggggtgaagggatgaggtgatgagcaattgcggtttgagtccacgggggaggggacaaatcggaaaaatggccattgggggggggaaggagggggttatcatcatatcagcgagagaaaagcacgggaatgggaatgaatgcatggatggagcagcagcagaaaggcggtggttgcgaaagtttaaacacaaataaatggacaaatggacgacgggggaacaaatgagcaaagagtgccctccccattgctaatgcatctgctgactgatcaatggtgcctttggctaattgccctgatatgtttcccatcttcgttttttgcattcgtcgcgcttttccccggggcgccgttcgccgttttcaaacggaaaatttgggcgacaattgggggatgggctgccacgagtagcggaggaacatgaacagaagggaaaggttagcagcggagaacacaaagaggaagaagtagtcgaactgggcgaacacgcggttccattccttttccacctgaacaaacgaaacaaaacgaaaccattggccaaccgccgaaagcatttcaccgtcaaatgccttttccgcttctcaattttcttcgaaatatgcgcttgagcacgacgaattccttcagttgcgaattgacgggccaccaaaacgcgcggggtcgacgaaaagggctaaaaaaatggaaggcaattattcagctaaaacttc

SEQ ID NO: 34406 - DNA, 830 bp, Heterodera glycines
  unsure (1)..(830): unsure at all n locations
ctttagcccctcagccccgccccccccccccccctgcccttttaattggaagnctggaggacaacagcccatacattttcctttgcttgttctactcattgtcaaaaagtactaataataattccagtccatgatgagaccgtttttgggggttcgtcgaattatctctgtttaccgcacaatttccggtttacgacccttcgattgcgttcaacggacattgacagttcccatcgaagggaaagcgccgaaacgatgcaccgccgaggaagcagttcgggacatcgaatcaggttggttttgctgaaaaatacatttttggttaaggcggaataatttaagggtgatttatcggaaaatataacaaaactattatttgcctccatttcgtgattaaaccctcagatgaacacatttacttgcatcatgccatgtcgtgtcccaccgatttactgagggctttcggcaaacacatcgaaaagaacgatttgagaggaatccgtgcaagccatgccttaacttgcggcgaagtgagtgccgctaaaaccaaaaaccaataaaatacacaaattttgaaggtcccatggactgatgagaagctccatgaccgagttcggagtacgaccattttcatttgttcgaattttcggaaattggtgaaccagggttcgtatttggtggatggaacgttacctaaacaaaccaacaggaaaagccgactatttgcccgtctttctgtcccaatccgcgcgtctttacgatgaaaaagttcttcgagttgatactgtaatgcttttgaactttccaattaacagtaagagtcttccctt

SEQ ID NO: 34407 - DNA, 906 bp, Heterodera glycines
ttctcaatattttaatgttaatgctaaaaatataatattatctcaaaaaaatcaaaacttaaattgtacaatataaaatgaatattattagtaaatattaaataaaactttatttaaacatatagaaatgtcgcaatttgcgaatttttcccctcatttgattattgtccccaccattgccaatccgttgccctcatcgggatatttcttcccctccccgccccctttttcatcacataagcattgttgagatttcccacggtgataagagctttattctgcccatgtgtcttcccctggctcttccgtttttgctttccccttttttttcttctcacttgctttatctcctttgttttttcaactcgtcccagcttccgccccttttttgctattaattcgccttcagtaaataaagtgattaaaaccaaattcggtctttgcttttgaggttttccgattcgtaaaatttggggtaattatttttccacgaatcgcgacacaacggccgggaatgagcgcccatttccgaaccaccattggtctaatccatcccgatgctgtccaaactgtgagtaaccagcgaaatttccctgtcccagcccgtccccagggccaacccgataatgttttccagcgacaaatccaaaccatcatccatgacctggatgatgaagcaactgacgttagcgatttcttaacccaattaaccgacatgagtgaccgatggatgagcctccgtaccagcatgactggcaacgaacgaactgcggataacactatttatgatgacttcgttgccgcaaccccattcccacagactttgaatgaccttaaaaggtacagccgttccctccgagaccagcgccgtaaattggcaaaccgcaattccccatgcaaatgttc

SEQ ID NO: 34408 - DNA, 1071 bp, Heterodera glycines
taaccaggtttttggtagaattgcggccagaatttaaaaatacagtttgctatggcttcgcatcacccgcttcaacgggtgctcagtgtaaatatcgactggccattcaaattctgcctttccagccttatggaaagatattatggaacttttggttccatctcagttgtcaacgccgcgactgcatcgttattatatcagtcgatagaattttcgaatcgcttttaaatcgtctcttttgcgtcccttaatcttcactctgagccgagttactgcggtctaaacacgtttttggtagaattgcggccagaatttaaaaatacagtttgctatggcttcgcatcacccgcttcaacgggtgctcagtgtaaatatcgactggccattcaaattctgcctttccagccttatggaaagatattatggaacttttggttccatctcagttgtcaacgccgcgactgcatcgttattatatcagtcgatagaattttcgaatcgcttttaaatcgtctcttttgcgtcccttaatcttcactctgagccgagttactgcggtctaaacacgtttttggtagaattgcggccagaatttaaaaatacagtttgctatggcttcgcatcacccgcttcaacgggtgctcagtgtaaatatcgactggccattcaaattctgcctttccagccttatggaaagatattatggaacttttggttccatctcagttgtcaacgccgcgactgcatcgttattatatcagtcgatagaattttcgaatcgcttttaaatcgtctcttttgcgtcccttaatcttcactctgagccgagttactgcggtctaaacacgtttttggtagaattgcggccagaatttaaaaatacagtttgctatggcttcgcatcacccgcttcaacgggtgctcagtgtaaatatcgactggccattcaaattctgcctttccagcctttatggaagatattatgagatctcttgggtccatctcagctgtcaacgccgcgactgcatcgttattatatcagtcgatagaattttcgaatcgcttttaaat

SEQ ID NO: 34409 - DNA, 733 bp, Heterodera glycines
aaaaatcccaaaatatgtacaaatatgtataaaaaccccgaaatatgtaaataaaagtcggtttttgttcgcaaacacaaaaagaaagtgtttttcctgctatttagagcatggagaagccaggaaaaaaaatgtatttacataaaattgacatccctataaatcacccatttgttacaccaaaagcacccccactcacccattcatttgtgttggcatcgctgattttgattgttgcaccaggatcattctgatcacattttgtgaagttcatatcaagccgaatgcatgaatataagtcattatttgagcgttttggcgtatcttcatcaaggtagtaggtcatgccattcttatcattgcacatcaattccccaatataattcaagacagtgtttggccttacgcatatttcaatggacaaattaggcggaattaaaaaacaaatgatggtggtgacagtaatgatgagaaaagcatgctctaaaagatttctataaaattattatttttttaataagtgaaatgggtaatcactgagtaaaccgtgagtaaaaaagaaactatagatttattattttctaaaagaatgaaactaaaattttcaaaaatattaaaaaattaattttaaaatttatctttcttaggttttcaaaaaaacattcaaagatgtttgattgcattgagcattcttttggaattgtttaatataaacacaaattttagacatttt

SEQ ID NO: 34410 - DNA, 916 bp, Heterodera glycines
tacatcaaataaatcagccctttctgatcagtcatataagattcggtgatagcccggacaaagcccgctgatcagaacaaaataaacaaaacaaacacccaatcaggtcaggttatctgctgaccagaacagacagatcggttttatagacaaactgaaggaccaaaacagttgatccttccatggcatatttgtttcccctttattaatttttgaacacatggaagtggcatgattagtttgaaatgccggaggggcgcccagtcagcgtccgccacattactaactaataaaaacgctgtctgactacgatcatctgttgatcagaacgtttttccactgatcagttgctgcccttcccctgagaagtgaaagtcgcacccatcgcgaggcctccggtgatgtattgggtgaggggaaagtcgcaaaaggtcgcgccggccaatgccatcgcggagcaaagaatggcaccaacgacaaggccaagcatgtcgacgacgccgatgaagaagaggattttgtagcaggacagctgcagatgcttccaaatggagcacatgcaaagcgcgtacaaaaactgagcccgaaaagaaattattgcatttaatgggagaaacgaaaatatgtgccattttaggactaactgaacatccttagattcagtggaaaacttaatatatgtaaacacaattgggttagctttgaattcgtacattggggcgaataatgcacaaattacaaaaggaaaatgttacagtatccattttcatatcattttcattgaattttgaatgaatttaaatttgatttttacttctgacaccacggccaaaatgagctgcacaatggcgagcaaagggtgcgaattggccggcgctgaaattgtggtgctgacgttggcacatccgtactcagc

SEQ ID NO: 34411 - DNA, 1199 bp, Heterodera glycines
ttttattttaatgcttttaactgccctttataggcttttattttgccgtttttctcccctctctttctctaattttctctctgcaaatggcacttggcctgttagccaaccgatttgggcttttgggcgcctttgtcggcaaatacgctatttcgtctgtgctcatcactttggcactgctaatgccatcgctaatcaccgcctttttttgggttaaatttgaagttgggctcgacgaaggctttgttccagaaaacgcaccttcgaggagagaaatcagcgcacagaaggaattttttggagagacagtaacaaaaattaaaaaaagaatgagaattctggtaattttatgcacacatagaaccggtcaaaagaatggtatatggcactgatcggagtggccaaggcgcccgaggggaatatgctccaagcagattatttcggggaactcagtgcattctatgatcgggtcactcaacacactgtgatccgtggacctcggggttaaccatcggcgaacgccgtcaaatttggaaatgcctttagggaatttcacctacgctcaaatatgtgccgcccccctctgcgaaataaatgaccaactccaaaaattgatggtaattacatagtcagtggtgttttgtattcgctggcccccaagaacaatgtttggctgaaaattcttggccaagtgcaaatgcgatatccggtaagtcgcgtgttcggctacgacgtgaacattggcaaggtgagcacttctcgagaacaggcgcaagaacattggcatttgtctaaacagcacgtgttcgatcggacagtggacgaaaatggcgaactgatcggggccaaattcgttgctttttacttcgcatcttttagccgtgaagagcacagagaaaaggaattggaactgttcgaacaaacggtagaaaggtgggcaaattgtgcgaaggtgggaaaaagcctttgctaattggtaagggaagcggaaaagcacaacgcgcgaaaggacaggcgggtggagttaatcgcgcacgggtccaacacagtggccaaggaaatggccagaggggtactcgacgccgcaacaaataaactcatcggtgtgccattgtcaccctttgccaggaccgtagtcatcccttggtcaggtttggctctgtctgtgttctcctacttggccctgcactctttttgcc

SEQ ID NO: 34412 - DNA, 951 bp, Heterodera glycines
  unsure (1)..(951): unsure at all n locations
ttctgcgttggatttttgctccccataaatgtttgactacccaaacggacacttgaaaaaatcgatttttttgttttcggggcagtccccccgaaccgatgcgcccagatttatggggagaccgaatccttcgggaatagcttccctatagcctgtactttaattctgcgttggatttttgctccccataaatgtttgagtaccccaaacggacacttgaaaaaatcgatttttttgttttcggggcagtccccccgaaccgatgcgcccagatttatggggagaccgaatccttccggaatagcttccctatagcctgtactttaattctgcgttggatttttgctccccataattgtttgagtaccccaaacggacacttgaaaaaatcgatttttttgttttcggggcagtccccccgaaccgatgcgcccagatttatggggagaccgaatccttccggaatagcttccctatagcctgtactttaattctgcgttggatttttgctccccataattgtttgagtaccccaaacggacacttgaaaaaatcgatttttttgttttcggggcagtccccccgaaccgatgcgcccagatttatggggagaccgaatccttccggaatagcttccctatagcctgtactttaattctgcgttggatttttgctccccataattgtttgagtaccccaaacggacacttgaaaaaatcgatttttttgttttcggggcagtccccccgaaccgatgcgcccagatttatggggagaccgaatccttccggaatagcttccctatagcctgtactttaattctgcgttggatttttgctccccataattgtttgagtaccccaaacggacactcgaaaaatcgatttatttgtgttttcggagcagtccccccgaaccgatgcgcccagatttatggngagacccgatcct

SEQ ID NO: 34413 - DNA, 1002 bp, Heterodera glycines
aataatgcaataaaaaatatacaacggaaaaagggatttcgtttccgaaatttatccaacaataaagaataaaatctataatctagtttttcttgatgctctttttatgacaaaaatttttttaaataggaagcaattattttgccttttccattgacatattcattcacttactccaatttttccccttcattatccttttttttgtgccaaagtgggcctcctaccatatgtaaatccaattccctggcatttttcacatattttataatcgacgtgccagatcatcgatatttaagccccacagcaattaattagaaaccgaataagaaggcattttcattatcgacgaggccaattcatcggtatttcagtccccaaaaataatcaactcatttctcctaatcaagtcttgagtctctggaaatttgttttgccaattttgggtcacgcccggagccgggcacggatttttttaggtaggaagcacggattatggctttttacgttgattttaaaagctaacatttttgtctttatttttataaagctaaaaatgtgcttcttaaatgaaaaatttttatctttaaatataaaatgatcatgcttgcattaggttaagtatctctctatttgtattaattgttcattcatttctttttcaccattgattcgatcagaaccggcaatattctgtacttgtgtctctttgctagcccttggaataggaaaaattcaaaaatttaaatttaaaaattataataaattacggctccgtcatctacgatttatggtctagcaaaattcattttaattgtgttttcttttgttttattttgtcaaatattacccatttttataaacaaatttgaagaaaattttataattttaccaaaaaaatccctgagaaaatttgtgaaacaaagctcaaaatttcacttctttgaaaaaagtaaattaaaatttatgtcaactaaaaaatacattataatgctcttttat

SEQ ID NO: 34414 - DNA, 915 bp, Heterodera glycines
  unsure (1)..(915): unsure at all n locations
aaacaacattttgagagagaagcgttaattaggtaaatgctaattcatttgattaatntgggctaattagtcaaggtcagatttataaagacacaagtgcaaaatttagtcttagccaaaaataaataatttataatggatcaaataaaaataatatttaaatttaaattcctaacttttttgtgatatttgagaaaatataacccagaaaagttgtattcttttttttcaatttttacaaatttttaaatttattttatatatttaaaaaaaattttgtgatttttctaaggacacttaaatatgtatcatcattctttcttctaaacaatctatgtacaaatccatttgttttgtatgcatttttttattttttggcgtttcgtcattgcgccaaaaaacgaaatcgcccacttttttggctgtgcttttttttgccgttgtgccaaaaatggattttcgtcccccgcggacaccgaccgacgagggattctatggcatatgtaaaagtcataagcagagagcattgaacaaattaagggtccgggtggaattaaattagggggggggggggggtctttatttttatatacgaatactttttaaattactttcatttaaaatgagagataaaggaaatttaattgacttatatttaaataatcggccgaaaaacctgaatctgaaggattccaacaattcttaaaagatatttataaaatcaaaatacgcaataactttatattctagtaccctatattttttatcccctgacacaataaatcatcaatggaatagttaaatttattttagatactagaaaaataatcacatttaaccccgagaattaagttatattaattccgctaatataattggaatttttatgaaataggaagaaaagttaaaaatgca

SEQ ID NO: 34415 - DNA, 1565 bp, Heterodera glycines
aagggcatcacagacctgttattgctcaatttcgtgcggctgaacaccgaaaatccctctaagaagttgtgcccacagaagcaatgagccaactatttagtaggctagagtctcgctcgttatcggaatcaattaaccaacgcaaagcacatacgactaggaactttatacaaatttaaaaaagtaatattttgtatatgcatttaatcaaatttctactttctttataaatgttagctaattagtcagcgtctatttattttctgtaaaaatttgcctctttatttaaaattaaattaatataatttcatgaaataagtcactaaatgtatagagaatgaattaacgtggtcgattggaataaatggaaaaaaaagcaaagtcaaaacacaaaaccttaaagcactagccgattgaaataaatggaaaaaaaagcaaagtcaaagacaaaaccttaaagcactagccgattgaaataaatggacaaaaaagcaaagtcaaagacaaaaccttaaagcactagccgattgaaataaatggaaaaaaagcaaagtcaaagacaaaaccttaaagcactagccgaagcaaagtcaaagacaaaaccttaaagcactagccgattgaaataaatggaaaaaaaagcaaagtcaaagacaaaaccttaaagcactagccgaagcaaagtcaaagacaaaaccttaaagcactagccgattgaaataaatggaaaaaaaagcaaagtcaaaacacaaaaccttaaagcactagccgattgaaataaatggacaaaaaagcaaagtcaaagacaaaaccttaaagcactagccgattgaaataaatggaaaaaaaagcaaagtcaaagacaaaataggaactttatacaaatttaaaaaagtaatattttgtatattgtatatgcatttaatcaaatttctactttctttataaatgttagctaattagtcagcgtctatttattttctgtaaaaatttgcctctttatttaaaattaaattaatataatttcatgaaataagacactaaatgtatagagaatgaattaacgtggtcgattggaataaatggaaaaaaaagcaaagtcaaaacacaaaaccttaaagcactagccgattgaaataaatggaaaaaaaagcaaagtcaaagacaaaaccttaaagcactagccgattgaaataaatggaaaaaaaagcaaagtcaaagacaaaaccttaaagcactagccgattgaaataaatggaaaaaaaagcaaagtcaaagacaaaaccttaaagcactagccgattgaaataaatggaaaaaaaagcaaagtcaaagacaaaataggaactttatacaaatttaaaaaagtaatattttgtatattgtatatgcatttaatcaaatttctactttctttataaatgttagctaattagtcagcgtctatttattttctgtacaaatttgcctctttatttaaaattaaattaatataatttcatgaaataagacactacatgtatagagaatgattaacgtggtcgattggaataaatggaaaaaaa

SEQ ID NO: 34416 - DNA, 1353 bp, Heterodera glycines
agtttaaaacattgatgcgaaccaaactaaaacgtttatgaaaattttgcagcaatggagagattttcgagaaattaattaaggattctttcaaataattcaaaaacgacaaaaaggaagaaaagagtaggtttcgtaaataattgtattaggctgaagaacaatgaaagtgaaaagaaatgaggggacgaatgaatgaatggccaatccatccaaaaaaggcattctcatacaaaggataatcgctcagttggggggggggggagagaatgcgcgaagacagcgggggggggattgaaaatccaaggaaagaattgggcaaatgtcgttgaaaattaatgaaaaaagagttctgaattgtgcttatttggaggggttgagtcttagaaatcaaactaaatccataaaaagtacttagaggcgcctattggtactacctgaatcttcaaacaccaaacaaaaaatggcccattttcggacaaaattttcgaattatgtaaaaaatattgagtgacggaataaaatgaaaggcactgtcaaaatatttgaaagaaaagcaaaatgaaaatgccgaatatgcattcccaaaacgaagaatgacccgttgaatagagagaatggcgaagtatcagttaaacggactttgcccaaagcaatggaaagccaaaaaaagagagagagaggcgagggagagagaacgagtggagaaagagaggaggagagagaggaaggagagtgaaggggagagaaggaatgatggccaaaggcgaaaaaattgaggggtatggaaagggagaaaggaggatgacttttgggcaatttaggaggggggggggggtcatttggtgtcattacgagtcaaatgcggcaaacacaaaaagtcaagcagttcaccaagcccctttatgcatttccaatttgttgcgcttcaatgagagcaaaagccctcccctgcgcaagggtcatagaagaaatggcaatgttcaaacaaagaaattgatacggtggcaaagcataaaccatcctccttcacagtttatttttattgcacaaaccaagaaaggatattatgacgagatgaaatcggatcgcctttcccttttgggcactcattcccccccccctttttggcctttgtgcaacggcacaataccgccgccgtttaggggatttgaagggtcaaaagaaatcgacgggtgatcagtgaacacccaccagacaatcatttggcccaaaaatcccacgtttttttttgagggggggggcggaaagcaaagaacgaacggaacaattgaccactggcgcacatataaataacaacaaacacataaatgctaatgatccttctctttg

SEQ ID NO: 34417 - DNA, 939 bp, Heterodera glycines
acaaagacagcgaattcctttcccaagaacggacaaaatgtataatgaaatgaatggtattgattctaaacaacggacggcagaaaagtgaccagtggactgcataaatatgaacaaaaactcagaggacagcttagcacacagatggggcgaggtggaccaattggttggccgaaggacaaaaaaaacaatgtttttttccttcaaattttggtcctttaaacctctcaaattgggaggggacgccacagaaaatgcaatcatcggatgttccatttttaaaagctttcttaaagggtgaaaagggttaacgaatattttatcggttgtacgaggagaattgaaaagaaaaggaacctttttgaaaaaatttggaaggtggaaaaatgctttttatggggggaggggtgaacccagcaaatccaaagcgcacaagtactgaaaatttctcgagatttgagaccaagtgacccaaaaatcgagattgaatccgagacttaacccagggagtcgagaccgacttgactcagagacaaggacttggtcccgcaactcgagaccctaacctgtcgagacttatctcgagtcgagactctggaacagcactaggatacagcatcagtaataatttatcatatccagtacaagaatgaatatttttacctgctgtgcagagtgatgggagccgggcgtcgactgtgagggcgggtacgggctgaggaactcggagttcggactgtgcagacattccgctcccgtggcctgcccatcgcctgagcggaaaatgcaataaacatttacatttaatttgcaagaagaaaattcaatgcaaaataaagaaatgaacaattggtaggaaaatcattcacaccttcggcacaccctccgcccgcggcattcccgccacagattgacatgccgacgaggcccggtgaaggc

SEQ ID NO: 34418 - DNA, 992 bp, Heterodera glycines
ttaatcgcaatttaattatttcagtaaaaccaaatccctctttatgttttctttgctttggcaagtgtcagcttttcctttgtctattcgttcacaattcaattggcaccatttgcattgacggcgcatgaacagaaaaatgaattttgtaactgacgaaagaaatggtggtggcaccaaaccccccaccattagagtttttacacatttttgaaaatagttaaatttctaaacaatttaaacaaaaaaaatcagtaatttgccgaaaatatgggccacctcttgaaactgttgacccaatcagggttcctttgttcgttcaaaaacgcaattgcttgggttggccatctttgatcgatgagaattgacggtgaaatgagacgacgcaaatagtccaacgaccaccatcgacaaagcccaagtggcgaatgtttgacacaaaaattggccatatttcaccagcaaaaatgtcccaaatcggctggcgaatccacaaatgtaattcagtgcctcttttgtcgaaaatttggtgatttgaacgaagaaagccatgacagagtgatcaatgtacctaaaatggatggaatgcttttattcccatataaaagtttctttggctcttgtggagtttagacccaatactgtaaatttagttgaaacggaaatttgatttttaccaaatttgagtttggggttcgaaatgagtcgaaacggaaattcaaagcgaattttgctggacaacggacggtcggacaatggaaatggcacagaattgacagcgccgataagcacaaataattgtggtgccgttgttctgacactgaccttgtgacgaatttcgattgctctccaaattgtcaattcgctctcgtcatcaacatgtttgtccacaaacgcattgaaacgtggcgaaagcaatgccaatttgaggccgagttgaagacggtcaaaaaaggaaatgtcatcaaatgtcgttgcacacacgcatctga

SEQ ID NO: 34419 - DNA, 374 bp, Heterodera glycines
gccggaccctaaaaatcctttttttttcaattttactcaaaattgcaaaatttggccattttgtggacaaatctgttaacaaatcaaattaaaaattacaaaaattttcccggtggcgcctatcggcaccgccggcccctcaattccccaagttttttggaaaaagcgccgcaaaaaaatcaacgtcgatttttcatgctcagaatctcacaaaatgcttatttcgaacaaaaaaatagctcaaattgatcatggacagtcaaaaatataacatttgaacattttaaacgtgttttgaataaatttgtaaaaatgaggcttttcgacccaaaatgaggctttttaaaattttcatctggcaaccctgattatat

SEQ ID NO: 34420 - DNA, 888 bp, Heterodera glycines
ttcctggtgctgctttttggcatatttttaacgccagctgcagtgaatggtgaaattgatacgttcaaatatcgtccatattttggcgaacctgtgaaccatcattatcatcatagctcggcagaggtctctgacctcggggccggatggtaagaaacagggaattaaaaattttttaatttaataaataaatgattttcgatatttttaaaataaagtgtccatttttcattattacaaattcaaaattacaatattatttacaggagaataatacagattaattaaaacatttttaataaaattaatttttaaatgatttaaatttaaaatttcagggatttttgaacgaccaaacgctgtttgatttacacgtcaatttttgctgaaaacttgattgtttcacttattattcattgataaataatgatttaatgactttcatcatatttaataatttaataatcaaatttcaaaaaaaatttctcgagcggcgtcgcctggtggcaccgccagacaattcttattttgtgaaacaaaataaataaattttgaagttgtttatatattaaaatttattaattattgaatgctttaattggagtaaaccaaatcccgtcttggcaaatttggactttaatcccacgtaaataattaatggaagagagaaaataaatttttcctttatagtatgttcaacctttagaaatttttcctaaaaatttggggtgatctgggaattgaacccaggacctctcgcacccaaagcgagaatcataccactagaccaatcacccgaatgcttttcctcgggggcatacgcaatttatgatctcataagcgcgtatttacagcaaatgtggaacggttaaataaacagtcattttt

SEQ ID NO: 34421 - DNA, 1058 bp, Heterodera glycines
taagtgaaatggcgtttgaaatataaggatgcgttttgtttatgttctaaaaaagtatgtcctgtaatgaatgcataaccgatacctttgggattttgtaccgagcacaaaaaaatttttattttgcattttttatatgttaaaaaatgcgctgatcaagaatttgaggtatggatgaaaatcgtagaaaaaatccaatgatttagcaaaatgcaatctcagattcatgatcagtgcacttttaaaaaacatgtacaaatcaaagaattttattaaacaaaaaaattcgtaatttttttctgttgtctttttacgtcggatacaaattagaaataattatccagtaaggaaataaaattcaaatacattaaaatgctcactttctgcacttggacaaccatcgcagcttttgctccagcgccatcgccttgcttcaaaccgtctgcaaaaaaaataaaatttcaattgcgacgtacggttcgaatttttttaaacccactttcaactatgcggacacttttgtccattccgatgccaagaaatgagctgttggtccggaagtagggcgaatcagcgttggtgaagcggtgttcctccggacgcatcagataaatggaggacgcactgtagtgcatgaattgtccattcctgtcaaatggcagagttagtgagtgtaaaaaatatgtgaaaattgggcgaaataaacgactaatgaaaattgggcatagaccccttggtattttacggcacaaaattttttttgtgacggcacctttttgtggttggttcacaatttacaaaagaaaaaaatttaaaacatgaagttgtaagtccgtacagaaagatagaaatcacattcagagagtgctaatgtcaagaggtgttccccgcgccccgtttttgtaaaattaaaaaaaaaattttttaatttttgagcgatgttttaaattttttgacgaatcacaaagttttacaactattttgactaaaaagttgcggaagttcaattaggaaaatttttcatttttttaaaagaaatttcgtttaaaaatctttcg

SEQ ID NO: 34422 - DNA, 978 bp, Heterodera glycines
acttttatgccacctaaacattgttgcgggctcaccactggcgcttttttctatttttttaaattttgaggcgtggcctattttcataactttatttttatggggtttcatttggaattttgaatttcttttattgtgatagctttatattatgtcttttgtgcaaagtttgaagataaaaagctaaggaatttttggaaatatgtacaatttcaactgttaaaaagatgaaaaatccacacaaaaattcaataaggtttttagaccagcaaatgatatgagaatgacaaaaaaattttatgaccttaaaattccttaatgtgtagaattttaagttaaaaatgtaaaaagaaaagaaaatttaataaataaaaaaattattacattttatgagaattttattattattgcagaataaaatgaaaaatattaaagtacgcaattagcagataaatctttacttttgtatatgcctaacttaaacaaataaaatttttactgcaaaacgaattgcataaaaatgttaagtcgagattaattaaattattcgtttatcttataattattatttctaatatttaaacagagaattaaaaatctttttttaaagaacccctttttttattccattaaagtattttgaagattatataacttaaaatttaaagaatttgttgaatcttaataaagttaacgcaagtagttcattattttttattgataaaaaataaaaatgaaatataactcctattagttagaaataattgtatgaattaaatggaaataaaattgacaaataattaataaccaaaaaacgcgaaatggacattattaataggcacaaaaataggcaaatgaaaatttttcttaacactttttaggtagcaaaacacataaaaaacttttaaaaaaaacttaattttaatttgtggttcaattataaatgaaattatggaaataatttttaaaggttttttt

SEQ ID NO: 34423 - DNA, 754 bp, Heterodera glycines
cttcattttaattatattttttgaccaaccaaattaatcccattggaacggaaaagaaaaaattggaacaaaaatcatttgatgaaatattatggggaaaaatgggaagaaaaagaagaaaaacaacgaattgaagagagaaaaaaagagaaataattggcaaattccataaaataaaagaaaaaataaagcaaaagggaagaaaatattcagcaaaaaaatggaatcaaattaattcgaaaattgcgaaaaaattggggacaaatcgtcaatatatttataaatggaggcaccactcggcacttttcccttgcctaaatcatgcgaccagcaaacatcatcgcccaattatttgtttgcctccccgacccctacgcctcactccccttgggaaagggacacgaacggcattagcgaatcggaacggcaatttgaagagtgagtggagagactcccccaccagccaagagtgagtctttgacacaagccaattattttttacggtccaagtcaattaacttttaatcattaaaattatatttgtaaccaaaaagtgacatgaataatcaaaaggcgtcagaaattgcacttttattaattgggctcattagatcctttacctaggcaataaatgagttgggcaacaattagttacttttcattttcaacatttgttaaaaagccatggtgatgcattttaatttaaatttgttacaaaattttctataattcatataagaatttattggcatat

SEQ ID NO: 34424 - DNA, 880 bp, Heterodera glycines
cgacctccgcccgctgttcgggggggggggtctcgtcactctttcgtccccaactgcaccaaccattcgtccccaactgcaccaaccaatgctgacacacacacacaaacaacgggccgctgctggaggggcggcgctcgcccgtggcgcgaagggttgttggccaaatgttatcgattaactgggagggaatggacgaggggaggagggcgagcacagaaaatgggggggggggggtaaataaatgagggaaagaccgaaaccaaagggaggggaatgactctcgccaaaatgcgagtgaggggaacaaggacaccgagaaattgaaaacgaaaggttgagaaaagacgggtaatgatgagaggggagccggggggggggggggaagcgggcgggcggagataatgaaaataacagccagcgccggaggggagggagaaagaacaacggcggtgtggggggggggggaaaacatctcacacggtagatgcgcaagctcacaataaaattatgatctgtaaaaggcaactaatacaatataaaacctaagcctatgcctaagactagacaaaagaatctgatccttttaaagagattttgagcacaattaatgcatacatgcctccaaattagcccaaattttattacgtatttcttgggagtttggtcaatattttgatgattttgtgtttgctgacacaaaactccaatttttcgagatctgattatttaataaactcaattttatgttgagataaaattctgaaaagattcatactaagctatcttttgatactgatcaaaaaagtcttttggatcaacttgatcagatcactccttcatggggatttgaaaagtcaaaaatgccttgataacggga

SEQ ID NO: 34425 - DNA, 701 bp, Heterodera glycines
ttgccgtttttaccctgctcaatttgccaattccccccccttaggcgatagtttgggccattgcacttcccccgcccttttctttgactaactgccggcccgacaatccaattccctcccccccccgcccttccctttcgcctaactttcgttttaaagacacactccccgtccattccttcaacttcggtttaaatttgctcacttcaatccttcatttaaaaacacgaacattccctaagggcatatttcctcaattttgcccggcattttccgtctttttgtccctccctttctcaaactgttttctttccaaatccgattctctgttctgtgcatatttatgtttctcgcatctcttgatttttgtcgagaataaaggcgctttatgcgctggggcggggggaggggggggggggatccgcaatttttttctctataatataaattttattttaaatttttatcacatttttaaaaaaagatataaaaataaaagtgattttgtgattcgggtccaaagggggtggacaggatttttgattgaaaaaattttttcacaaaaatcttccaaaaacatgtcattaagggtaatttgggccgctgatcatgaatacgtgatcagattttacgtttgacatcgttaagccctagaatccctgtgtgattggggattctgagacatcattttgagggggggg

SEQ ID NO: 34426 - DNA, 958 bp, Heterodera glycines
ctgctcaacagtaataggaattccaactgcattctcactctattacgccgatactaattgttctggaatttgtttctctgcgcgtttgtttgtgaaaaatttggaaaattggctatctctttttctgctcaacagtaataggaattccaactgcattctcagaataattacgccgatactaattgttctggaatttgtttctcggcgcgtttgtttgggaaaaatttggaaaattggctatctctttttctgctcaacagtaataggaattccaactgcattctcagaataattacgccgatactaattgttctggaatttgtttctctgcgcgtttgtttgtgaaaaatttggaaaattggctatctctttttctgctcaacagtaataggaattccaactgcattctcagaataattacgccgatactaattgttctggaatttgtttctcagcgcgtttgtttgggaaaaatttggaaaattggctatctctttttctgctcaacagtaataggaattccaaccgcattctcagaataattacgccgatactaattgttctggaatttgtttctcggcgcgtttgtttgggaaaaatttggaaaattggctatctctttttctgctcaacagtaataggaattccaaccgcattctcagaataattacgccgatactaattgttctggaatttgtttctctgcgcgtttgtttgtgaaaaatttggaaaattggctatctctttttctgctcaacagtaataggaattccaaccgcattctcagaataattacgccgatactaattgttctggaatttgtttctcggcgcgtttgtttgggaaaatttggaaaattggctatctctttttctgctcaacagtaataggaaatccaccgcattctcagaataattacgccgatactaattgttctggaatttgtttctcggcgcgt

SEQ ID NO: 34427 - DNA, 920 bp, Heterodera glycines
agttaatttgaatggcttgaaaatcaaaatttccatgtaaaatttgctaattaaaatacctccattagtttattgaggcgttgaattagagaacatatttccaaaaggcgcggaacaatgagttggcataaccacaaaattacttattatacaaaaattaacgaagttttctttctgtatcccaagaaaattgcgggccgaaaaaactcggatagggagttcaggacggtcaactgaaaaaaaaagttcgggtaggatttcgagttggtaaaattgtacgggcaggttttggcatgtgccaacaaaaaaaaaagtgccaggggtgagttttatttacatatttttacttaaatgcctgaagaaagttataacaaatcttgtgccaaaaaattgccatggtagcgcaataaaaccgttcaagcactaatttgaatgactaatgaccttcgtccccctcggtttcgctttcgttgtaaccattgtaggcggcgccaccgtgagatggagctaattgtgccacccgaagaagtgacaacagtaaagcaatccagaaaatttggttgcgaagcattctgtttttgtgagacaaataatttaaaaatggacttttttaacaaatatttaatatatttattttttttattatttacgaattaaattatcttaaataattttatatttttattgaaaataattttattgcttatacattttacaatatttattataaataaatttattatttttatatatttgagcaataaatgaatgaaatactggtagaaacataaaagtaagattacgtgttaacgttttgcgtaagcatatgggcatttatagaattaaaattgattgaaaaaaattatttcatatttgcatattttattataataatgaaaagattatataaattttacata

SEQ ID NO: 34428 - DNA, 982 bp, Heterodera glycines
tagtagcgacgaccctaatttttctggatttctttctgggcgagtttggctctgaaattttgaaaaaacgtctatctctttttctgctcaacactcaaatgaactccaaccacattttcggaatagtagcgacgaccctaatttttctggattttctttctgggcgagtttggctctgaaaattttgaaaaaacgtctatctctttttctgctcaacactcaaatgaattccaaccacattttcggaatagtagcgacgaccctaatttttctggattttctttctgggcgagtttggctctgaaaattttgaaaaaacgtctatctctttttctgctcaacactcacatgaattccaaccacattttcggaatagtagcgacgaccctaatttttctggattttctttctgggcgagtttggctctgaaaattttgaaaaaacgtctatctctttttctgctcaacactcaaatgaactccaaccacattttcggaataatagcgacgaccctaatttttctggattttctttctgggcgagtttggctctgaaaattttgaaaaaacgtctatctctttttctgctcaacactcaaatgaattccaaccacattttcggaatagtagcgacgaccctaatttttctggattttctttctgggcgagtttggctctgaaaattttgaaaaaacgtctatctctttttctgctcaacactcacatgaattccaaccacattttcggaatagtagcgacgaccctaatttttctggattttctttctgggcgagtttggctctgaaaattttgaaaaaacgtctatctctttttctgctcaacactcaaatgaactccaaccacattttcggaataatagcgacgaccctaatttttctggattttctttctgggcgagtttggctctgaaaatttgaaaaaacatcgatctctttttctgctcaacactcacagaattccaa

SEQ ID NO: 34429 - DNA, 698 bp, Heterodera glycines
atgttggaccaatttaacatattctgttcattcacttggtggcaaagtgacatcgatggacatgtcgaaacagtcgggcctgaatcactcgaagcttaagccaaagggagggataaagcaaaggtcggaccaggtcagcctcgtcgtgccattgtcgtccctttggctcgggtgactgaactgcgggttggccaactgcaaagtgatcggactgataattgaccagtgctgaccgataccttaatggattcggtgcattcttcgcccgtcaactctctgcagcatgggccccgccgggcatccttcagccgagtgatgaacagattcttgctgatcaccgcctgttgttgcgagtgatcaaaaatgcagaattatgtttaaattctttttatattttacctcatatgatcgttcgcccactttccgcacagaacccgtcccaatcggcacgtccctgtcgttgtacaccaccgtatttccattcttgtccgcaaccaccttgaaggacaagccctttcttccaccctcttgtactgtctcttcctttccttctccgactctctcatccccctgcactatctcttcctctatttctttctcccctccctctctcttgcctttcctgcgctttttccctgtgcgtcgtagcattgtgatatccccggcgtctccgccgtgcaataatacttttccgcgcg

SEQ ID NO: 34430 - DNA, 716 bp, Heterodera glycines
caagaacacagatattaaacaagcacaatccgcacaggtaaagtctttgtcagactacaatccttcgaaggggcaggtccttttacaggaatgcagaaaataaggtaggtccagatgccatttctggtgcgaatccaccaccatagcatgtcagatccgcaatcacacagaggggcaggccctcgaacaatgctttcagatccacaattccgagaaggggcagctacatgcactcttgaaatgtaactcactatgtatttcagatacacggtcactaccatagcaaatctaaaactctatgaatggaagggccaggtcctagaacacatatggtcaggaccacattcccccgaagggtcaggtccacgaccaatgctggtcaggaccacaatcccccgaaggggcaggtccacgaccgttatgatcaggaccacaatcccccgaaggggcaggtccatgaccaatgctggtcaggaccacaatcccccgaaggggcaggtccacgaccgtttggtcaggaccacgatcccccgaaggggtaggtccacgaccaatgcgtatatcctacgttacctctcaccagtccactggtcttggcaaagtgcgggaccagcttcgccccggatgttggccggtaacgataaggaaacctttgtaaaccttttggaccacaatcacccgacggggcaggcccacgaaccacaatcctcaggggg

SEQ ID NO: 34431 - DNA, 1073 bp, Heterodera glycines
  unsure (1)..(1073): unsure at all n locations
tttttgaaaaaatctttaaaattttacaaattgtaaaaaaggataaactggttctgacatccatttcagccctttcaaaccccggagccgacttgaaccaaaaattaaacatcaagttttaacaattcacatttataagacaaaaaaatggttcaaattcacgaaaaaatatgtccttatgttcgcttaaagtgtttttatatcgagtttaaatntaaaacagtgatntacaaataaaagtgagacaatatcttgcgatagtttagaagcattcacatttagtattagtaattaaattttatttagttcaataatatttctctttctttaatttttttatttaaaattaattatttttctgtgctaataattaattatattcatttttcaatttttcgtaaatagtttacaaactgtatctattttatcattttttgacgcatgacttttatttggcctttgattaagtttcaattttttaatccatttattttgtgtcaattttccccaattttttcaatagttttgtttgaaatattcatttattattttaaattgtttaacaatcgaagggtccatgcattaatgaacccgggttgcagcagtccctgactttttataattttggcttgtcataattaatttattttatattttattgaaaccgtttttcgttaaattattcgcttttcatactaatgtagcgcaattttttttatataaaaaagtaaatttttatgcaaatgtttatttaatgccttctcattggcaacgttaaatatacatataaatttcaaaatatgatttttttataaataattttttgttttaatagtaatatttaaaattaaatactttgttaagaacatttttttatttgaaatgatttcgtcatgtttaaagacaaggttctattatttaaggcattacaggacttaatgaatcgaatttcttgaatttttttattaaatttttgaatattcacttttaaaatttgttacattatttattaattcgagtatatatttctaatacgacaagctctcctgcataaagaggttaattaagttggt

SEQ ID NO: 34432 - DNA, 776 bp, Heterodera glycines
cggcacttttgtgccattgttctttcattgacaccatctttggcatttttattgcccgtcacgcgtttcatcgatggcatttgttgtgccggttgcagttgttgcttttccgttgttgcggcgcatggttgtgctgcggtgcccgcgggcgttgttgttgccgtttttggcgacgcttttcgcttcgaaaccactgcagtgccgtcgctatttttggcataatttttgttgtctttggcagattgttgttgttctactttttctgttgctggtgctgctgttacttttttctacaaaaaaataaataaaattaattttttacaaaaatctaaatgaaaaaaacctaaaaatattattttttagataatcggtttggaaaattaagctcaaaaagcatagattagcttaggcataatctgctccgttgatattaaatttgagaattttggagccaattttttttgataacaaaagaaaatggcgccaatcaattggcgataattgacccaaaattctgaaatttttactaaatttaattggttatcaatttagatcccgctaatttgtttccccctcacaactgtcggtgccgtcgttgtcgcgctcgtcctgcgcttcttccccaacttgggactgtctttgaccccgccgccgccgcttttgagcggcgacgcttgctgtgccgtcgttgtcgctgctgccgtgccatcattgcctgtcgccagcggttgttgcgacttctccgacagcggtggcggagacgacatttgctcatc

SEQ ID NO: 34433 - DNA, 949 bp, Heterodera glycines
  unsure (1)..(949): unsure at all n locations
cccctctgccacgctgggaacatttgtatggtacaacatttctcgcaaaaaagagagccatttttctggcatagagaataaatttaaaaattccctgtagaatagaatggccattgctctccgcgcccctctgcccatgctgggaacatttgtatggtacaaaatttctcgcaaaaaagagatagccatttttctggcatagagaataaatttaaaaattccctgtagaatagaatggccattgctctccgcgcccctctgcccacgctgggaacatttgtatggtacaaaatttctcgcaaaaaagagagccatttttctggcatagagaataaatttaaaaattccctgtagaatagaatggccattgctctccgcgcccctctgcccatgctgggaacatttgtatggtacaaaatttctcgcaaaaaagagatagccatttttctggcatagagaataaatttaaaaattccctgtagaatagaatggccattgctctccgcgcccctctgcccatgctgggaacatttgtatggtacaaaatttctcgcaaaaaagagatagccatttttctggcatagagaataaatttaaaaattccctgtagaatagaatggccattgctctccgcgcccctctgcccacgctgggaacatttgtatggtacaaaatttctcgcaaaaaagagagccatttttctggcatagagaataaatttaaaaattccctgtagaatagaatggccattgctctccgcgcccctctgcccatgctgggaacatttgtatggtacaaaatttctcgcaaaaaagagatagccatttttctggcatagagaataaatttaaaaattccctgtagaatagaatggccattgctctccgcgcccctctgcccatgctgngaaaaatttctcgcaaaaaagagatagccatttttctggcat

SEQ ID NO: 34434 - DNA, 644 bp, Heterodera glycines
  unsure (1)..(644): unsure at all n locations
tttataaatcccaaaattagtaaaacatcgcttaagtttgacgaaaaggcattcatttctcgggcttaatgggtgcgcgcgccaatgaaatccgccaagaacacttggccatttttgttgaccgcactgtttttgttgtccgcattttcgtattcagtgctaattttttccgtcatctgtgcccaatttttgacaatttcctcgcactttttgcgaatttcaaagcgtttcgtaagctttgctcgcttccacattacactccttgaaaaaagagcaaattttaggcaattcatttaaagaaagtattaaagaaacaaacaaatcgcaaatgttcttggccatgcactgtattttatttccaattttgacattagcaaatgaaggagaaggctgaaaaattttataaaattatttgaaaaaagaaatacttgtttatgattccaattactgggcttttgtggaactaaaactttgtttttcatcttattaacaaatcccacaaaaaattaataatacttaagaaattgattgggctcataaaagttgattagaccataaaagttgtcttttctcaatttctttgcncaaaattttttttttcatttgaattttccctattggtcattttgattttggcactttcg

SEQ ID NO: 34435 - DNA, 767 bp, Heterodera glycines
  unsure (1)..(767): unsure at all n locations
gagcgaaaatccaacgcagaatttcctcaaggggagagggaaggnaagcccgaaggagagaggactcttcaaaaagcagggcgcagcggagcggggggacggccccgaaaacaaaaaaaaaccgagagcaacaagaggccgcaaggggcacgcaaacaggaaaggggagcaaaaacccaacgcagaaccaaagaacaggccacagggaagccaggcccgaaggaggcggacaccccaaaaagccgggcgcagcggaacggggggaccgccccgaaaacaaaaaaaccgaccacagcaagcgaccgccgcggggcacgcaaacaaccagggggagcaaaaaaccaacgcagaacgaaagcacaggcaagagggaagccacaccggaaggacgcggacaccccagaaaacagggcgcaccggaacggggggacagccccgaaaacaaaaaaagcgagcagagcaagcgaccgacgggggcacacaaacaaccacggggagcaaaaaaccaaagcagaaacaaagaacaggctacagggaagccaaacccgaaggaggcggccgccccacaaaacagggcgcaccggcacggggggactgccccgaaaacaaaaaaatcgattttttcaagtgtccgtttggggtactcaaactattatggggatgcaagatccaacgcagaattgaagtacaggctatagggaagctatttcccgaaagattcggtctccccataaatctgggcgcatcggttcggggggactgccccg

SEQ ID NO: 34436 - DNA, 655 bp, Heterodera glycines
tttgatttactaattgtaagtgtcggggaatttgagcaaaagaagttaactgataaacagataaaacacacaaatgtatgcatatacaggcataaaaatgtaaaatgtaatcaatttaaatttgtcaataacggaattttctctcaaaattagggaaattttgtatttattcgttcgtcaacaataaaaaaaaacagacggccaatgtcgaaaattggctctattccgccatattttggtcgtagttttcactcagcatggcagtttccatcataattatggacaaaattgggtgccaaaatggaattatcgacttttggccagacgatggcatagcggaaaatgtaaaatgagccgggagctttccgttgtaggcgattccctcatcaggaataaaaattgactttatactagagttgagcgggaccgggaattttgggcaaaacggggaccgggacttgccgggaccgggacctcaatttttttcgggaccggaaaattagaaaaattcaaaaaaattttaaaaaatccaaaaaaaatttttaaaattgaattttaattaatttcaattgaaacaatacaaaattaaatttttattttgttaataaaatccaaaagttaaagctaaattaaattaatgaaaattttcaaacaa

SEQ ID NO: 34437 - DNA, 1239 bp, Heterodera glycines
  unsure (1)..(1239): unsure at all n locations
tcatccacaattctgtccttttcaattttaattttcagtgaatggtgccggtttggcgatggtaagtcggccggggcgtgggaagtcggcgatttgttatcggacactaaaatttcgaacagaaatcaaaaatacgagtgtctcgtcggtcacattaaattgcgatgaatttgtaagatattatttcccttgttccgctaggccaccatggacatcatcaaattgcacggcggcgaacccgcaaattttttggacgttggtggcggcgcaacagttgaacaggtggtggggtcgggtttttcatcaatggtaaattggatggaaagctgaaaaaattgagaaattttctgaaattttgcattagcataatacacacacacacacacacttattgttagaactatcgtggcaaacaaatgcataatttggttaacaacgaaaaagttttggcccaaaaaattattcatccggagatgtttttttggtgtgtttttcctcccgaccaattaaaaaaaacaaaaaacaatatttttgttttttctctgattctgagatttgctccaatttgcgccaccgaataaattttaattcatttgaatttggtccaaaatttccaaattttttgtctgtgaatttaatttaaatgctttatcccttccttttttttgcaggtgtacgaggcgttcaaaatcatcactgcggacgagaagaaggtcaatgccattctggtgaacattttcggtggcattatgcgctgcgatgtgatcgcccaaggcattatcaaagcggcggtcggtgaattcgcttttttctctttttttcttacaattcgccataggaaaataaaaatagcaaagccacgggaattgctcaattttctgataatttagtgcaattaaataacaaatctcgccaaattattttcatacggcactatccggagcaggacataactccgccggccgaaacttcgccaagaaaaaatttcaaacagaaatttttcaagaaaaaaatcgtagaaagatgttttctaagaaaatttgaaggaaaaaaattttcagcgattttttcaaaatttgatgatcaatactaagttttttcaaaaaaaaattgaaggaatttttttaaagtttttttctacgaaaagtttctaacatttttttcttgaaagattcctaagtttgaaaaaaattctncgcggagttttgtggagcactgngcaccatcgagccattaaat

SEQ ID NO: 34438 - DNA, 867 bp, Heterodera glycines
gtttttggggaagccgatagagcttgttaagagctttcgatatgataccaatattgttggatttggtaaacaaagaaaagagttatgatgctctaaacttggttcagactaaaccggccagactaaactgtcccagtccgagaaaaaattgaaaaactctcgcctctcgtcctctcgcctctcgccaactctcgtgtttttggggactctcgcctctcgccaaactctcgctctcgtctttttggggactctcgcctctcgccaaactctcgctctcgtcttttctgagacaagtcacacccctgatacgtaacatgcgaattttctaatgattaaattacaattaaaaatacatccggaaaatgtgttttctggtaagcaaattacaattaaatacaccgtaaaatatgaattttccaatgattaaattacaataaaaatacatccggaaaatgtgttttctggtaagcaaattacaattaaatacaccgtaaaatatgaattttccaatgattaaattacaataaaaatacatccggaaaatgtgttttctggtaagcaaattacaattaaatacaccgtaaaatatgaattttccaatgattaaattacaataaaaatacatccggaaaatgtgttttctcatgagcaaattaacacatacgtaaaatgcgaattttccaatttaaaatagcagggacgggggggagaaccgtaccccccacctcccccccccccccaagagtccaaagtgctttccgccgccaaaaaattctttctgattcgtgcattacagaccgagaggcgtcgaatgatatatcattcgtcgaattcggaagaggtacacatattcttcaattttaccaa

SEQ ID NO: 34439 - DNA, 1023 bp, Heterodera glycines
  unsure (1)..(1023): unsure at all n locations
aaaagggggcaagtcttctggcagacnncatgttaatgtttggacgagtcggttcagttcggacgaaagggacaggggggagattctgacaaattgtctaattggccttaattggcagtgccacccttcgcaatggaaggacaagaaaaacaatacacattcattgaaaatcaaatggcggacattttctgtttggtcggcggagacccaaagccgaacatcgaatggttgtggcagaacaaagcattggacacaaactcatcaaaatatggcacttttggtggtaaaacatttaaaattggaagaacaatccacgaaatgccatttttgaagatggaaatttgcgaatttcgaaagtgaaggcatcggatgacggattttacacgtgccgagcgacgaatcgggcggggaccgaagacgtggtgattagggtgagtgagtggtcgccctgagagatagccgatccatgggcggaggagtgatcagcagatgatcacttagaaattagaatgacctattgatcgatcaaactaactaatttattgattagataaatgattggattgccatttcccaggtgcttgtgataagtgcgccagaaatgagtgacccgaacactgaagagcatttgtcggcaacggtcggcgaaccgttcgtattgcagtgccctctgctgatgcgaaaacccttgccactaacgaacattcgctggacattcaatggcacttttgttccatcagatgccgatggattgtcggaagatgggcggcgaatgcgagtgccaaaggcgaccattggtcattccggggaatacaaatgcgtggcgaagaacgaggcgggaggggcggaaaagcgatttgttgtcgcaataatgggtgaatcttttgtaagacagagtaagaggaagtggggaggggaagagaagaggaaagaagagagagatagtgtgagagatggaaagagaggagggagagagaggggtggaaagataggaaagggaccgagtgcgaaaggggagagtga

SEQ ID NO: 34440 - DNA, 1127 bp, Heterodera glycines
aaaggggtgggacaccccccgggaagggggggggggaagcagttacttgggcatgaattgtttcattaggcgtctccctttcctcccctggcagtgttagcggatgacaaagacgcgccctgggaggacatggacgccctcaaaatgcgtttccgtggcctcaccatgccgcagtgtgggcatggcccgggtggtcggatgcgttcgcagttggccgaattgctaaggcgtcgcttgggctttggccatgccatcgcccgtgactacggtaatcaccgattttgagatggaatctttcattcattcatttccgtttagccgaaaatctttgcgaatttttcgacgcctttcgcaaagaattcgacttgaaaagtacggacaaattgcacgaagtgatccgtcttcacagcgtgcacaattacttccatcccggcgacaatttcaacaaattcgagcagttcggccggaaacagcggttcgactccgccttctttcagcaattaatggcaattttctttggcgggtaatccaacggaacacagaaagtcattcccactgaacgcactttaacaaggctgagaaaaaacataaaatattgttccccaatttggcatttctttccctttttggcattttccgtttttctcgcccttgtaattctcccccccccccccattttctgtgcaatatttttgttttcattcgttgcattttccatcctcctcttctcccccccccctcattttcctcatcttccggttagttttacgatagaattgtccttattctgctgcccattcattcccattggtctttgccctcatttgtatttcgtccgataaattctaaagtaattaatttgattgattaattggtcaattacccaattcaaacgaaaaaaggcattgggcgaagtcgaaaaaaatggaacaccaaaaaagtggggaatggaggagatttattggaacaaatggataaaaggaaaaagaaaaggacaacagaaaagtcgaaaatggacaaaaggacaaaagacggacaaaaggacactcattacattccaatttaaacaacatttccacatacaatcaatatatacatacacaaaagagcaaaaaaaaacccctccc

SEQ ID NO: 34441 - DNA, 1079 bp, Heterodera glycines
attccttcgattgaggaggaaaaaaggtggcgccggaaaagcaatgaatgaaccggcacaaacaaagctgggcacccgccccattgcgacgacagcccattttgaggcgggaggacggagagcgaaagtcggcaccactgagacagccctggacaagcaaatcggtggacatttcgcggtatttccataaagcacaaaggtcgccctcacaatgggaagcgcatcttttgagaaggggggggggagagaaatacgggcggaaattgtggaaacgcacttaagggaagaagcatcatcagttgttcgacagttaaagcatttaatagcgaaaaaagggagaaagaggaggaaaagtgtgaaaatgaaggcaaagggaagaaagaatggcatttcaagaagcacaggccgagaatgggaagaacacactgaagggaagtcgagaatgggcggagagcggagggggggggggagaaacaatgcccccgagggatttttttagacaaatagacacaaaggaaaagccttttcaccccctgcttgactttctccaagtagtcacgttttgtcactctgacctcttctcaattttcacccgaattattaattcgaacaaatttggcccattcgtgggaaaaactccttggatggataaggtggcgaagattgaattaaaagtggaaaatataaaatatattttgaacaatctaatttctttgctctcacaagagtttcaagtgatattaaaattcggatgaggttttttagctaaattttgaaaatataaatgaattggtaatccgtagtattcgatagacgcctcagggaaattttttaatggattattgtgcaaaattaatattagggcttgtaatcacatgcattttttctggattagaaatagcctaaagcacatttttgctttgtattcgtgacataataattatgaacccataattaatattttttaaatttgtacaaccctcaaatagagacaaatctgaaaactcgcaaatcaggatatttttactcttcagaaagtcaatctccagtttcaggacactttaaacactgctattcaa

SEQ ID NO: 34442 - DNA, 1039 bp, Heterodera glycines
aaagaggctagagcactaagaaatagtgttccttcccagagagtgcacatggtaaatggaaaagaagaggcacaagatgaacttctcaacttaaataaataattcaatttatatatgttcttttctcagcaaataggggagtaattaatatgagctaacaataattaaggtgtttatcaaggtcccttatcacaaatataacctttttgttctcatcagatatcatctctgacaaagactcaactaaatgaaatgaatttgatcagattttatgcaattcattgcctttatcccctcctgctgactgacttgtttcataatttattttattttttcatttaatttcaaagcagaaattatgttaaatttatgattagatgaaatcaatatcaaaataaatgttacataatgatccagggactggatttgtatggattttcatatttttttgcacactcattcggcctaaaaccacctaaatagtatttttagcttggtttgatgcttctaggatgccttgttacttacatattttccatatttcagatttttttccatatttccatatttgacatccatatttcggcattttcacaaaaattcagaaaataccacccatagatggaaaaatttttggaaaatacgccctaaaatcgaaaaattttgggaaaatttccaaaaattacacaaaaaatttttcattagcaattcgtgtaaaattgattttttgcaaaaatttactaatttttgtttttttttctaagtaaattcaatttttttagtaaagaaaaataggatgcctcaattatcaaattttataattcatgtattacccatatttcgtccatattttgcgaatttttcgtcaatattataatctatattttggatttttctgtacatataaatccggtccctattcataaccaattcaactgacaaaactttatcagttaataatttatgtgaaaagaatggaaaaataaggccaacttttgctgaaatatttggccaaaaatgggacaatgaaaaaatggaa

SEQ ID NO: 34443 - DNA, 551 bp, Heterodera glycines
aaaagggggggggagtaacatccgtactaccgtattatctctaattatcaccccggggggattattgttcaacctcctcagaaagggggggggggagttttaacattaaaaactcattttttgatcgggaccaattgggggggggggggggttgcatacaaaatttggatgggatttgcgaaagaaaattggtttatctttaattgattttattgtaaatttatttagtttggcattctgtcttttgtattttcaaaaacaatacaattcggatcccgcatatcgcgcaggttccatttttttcgagacttttcttaaccatttttttttaaattcaattaggtacatattataattccaaaaacacataaaaagaaatttgtaagttttttctctccataaattgaatttttcactgccgtattgctgcgccggtggcccctatggtggctcggagatatttttaaattctttttgtgaacgaatttatgggggttaggggatgacgtaagcgtcaccgagcaacatttgagaaatttgaacgtactgaa

SEQ ID NO: 34444 - DNA, 1245 bp, Heterodera glycines
aagatttagctttttatgcattcatttttgttttttgtttttattaaacagagcatagagctttgtttttgttttgcttaattgcctattcaattaggaccactaataattgtaataatttttattattttcaaattagtaacatctttttccttatttttgttcaccattcctcattggtatcggacttgtttccatgacctgttcataaagtgccttgcgcattagaccgagcacaaaaatgccgaggctggtgcaaaggtcagcggcagcgagcaatgttagcaactgaaagaaaatttgaatgaattatttcttcaacatataaaaaagaattttaaaatggtaaaaatatgcaattattcgaagtattaaaataataaaaaaatcaaaatcaaaatgctcatagaagaaatttaatcaaaaatttaattaaaacaaaattataataaactaaagaaataaaaagttgaattaaattcatttttaagaagtttgctgaaatcttgtatccttaaattttattttttattaaagaataaataaagataaattattttaaaaaataaatttgttgctttaatgaattaaaaaaatatattacctcattatggcataacatttgctttgaactaatgaagacaaaaagtgttatgacacaaatcattgaagagaaggcgccaacctcacaaattaattaattttttttaagttaattattttaattatttttacaattatgtcgatgctatggaattggatcaacgaaatcagctcactgtcgtcataattagacggtcttgcctgtattggatccatttttaaatgaaaatttgtcttaaaattaaatttaaaatattttaaatttcaggaataaaaaaaatatgcaataaaaattttgaaatatcagcaagtaaaatacaaaaaattcggaaggattttgtaaatgttttcaaacttaaaaacataaaaatttaaattataaaatccagcaaaaatgcagatcaatgaattacaaaaatttgaaaattgtcaaattaattctgaccaatgctcaaaaaaataataaaattgatgtatttgtaatataaatttgtcaaaatttttaatttaaaagattagccatcctaaaaaattttttcctaaaggcactttttatttcattgaaaaaattagggattttaattacgaaatgaattaaaaaatcttcacttataattattaattatttacattgccattttt

SEQ ID NO: 34445 - DNA, 851 bp, Heterodera glycines
tttgaagctgttggatatacgttaatattatgaaatctctgtccagctttgaatgaattttctgaatttttattggcgctaaaattactataggatttgctattaaaaatgattatacacttaaaaattcatctttatgttagcaatatttatatattttgctaaaaattgtaacggaaattgaggatggaatttcgtcctctgtgtgcatcaaacattcattgcgaaatgctcaaaaatttaaaaataatttcaaactaattttgcctatctgtttacccgagtaaataataaaatttctttagcatattattcaaagcttttttgtaaggttttctttttgttctgcggttgtttggcttagaaaatgtaggaggtgaatagagattaattaattaaattttcatcacagttatttgaagctgttggatatacgttaatattatgaaatctctgtccagctttgaatgaattttctgaatttttattggcgctaaaattactataggatttgctattaaaaatgattatacacttaaaaattcatttttatgttagcaatatttatatattttgctaaaaattgtaacggaaattgaggatggaatttcgtcctctgtgtgcatcaaacattcattgcgaaatgctcaaaaatttaaaaataatttcaaatgaattttgcctatctgtttacccgagtaaataataaaatttctttagcatattattcaaagcttttttgtaaggttttctttttgttctgcggttgtttggcttaaaaatgtaggaggtgaatagagattaattattaaattttcatcacagttatttgaagctgttggatatacgtt

SEQ ID NO: 34446 - DNA, 958 bp, Heterodera glycines
  unsure (1)..(958): unsure at all n locations
agtgtccgttntggggtactcaaacaattatgggggagcaataatccaacgcagaattaaagtacaggctatagggaagctattcccgaaggattcggtctccccataaatctgggcgcatcggttcggggggactgaccgaaaacaaaaaaatcgattttttcaagtgtccgtttggggtactcaaacaattatggggagcaaaaatccaacgcagaattaaagtacaggctatagggaagctattcccgagggattcggtgtccccataaatctgggcgcatcggttcggggggactgaccgaaaacaaaaaaatcgattttttcaagtgtccgtttggggtactcaaacaattatggggagcaaaaatccaaagcagaattaaagtacaggctatagggaagctattcccgaaggattcggcctccccataaatctgggcgcatcggttcggggggactgccccgaaaacaaaaaaatcgattttttcaagtgtccgtttggggtactcaaacaattatggggagcaaaaatccaacgcagaattaaagtacaggctatagggaagctattcccgaaggattcggtctccccataaatctgggcgcatcggttcggggggactgccccgaaaacaaaaaaatcgattttttcaagtgtccgtttggggtactcaaacaattattaaaaatttttagattttttattcatctccctttttgatagtgaaagcatctgagtgcctaaaataacttgtaaataaaatttggtgcgtttcagagcagtttgtgaaaaaatatttatgaattaattttgctaaaaaaataaaatagtgaagctttaaaaattaataaaaaattttaaattcagaattactggaagtagcatcatagcagtgcttttcttgtcttttgatgcctcgcaaatctggtcgctctgatcagttataaaaaaagt

SEQ ID NO: 34447 - DNA, 1241 bp, Heterodera glycines
  unsure (1)..(1241): unsure at all n locations
ttggggtttgccccgttttgcttcacacgggatatttanatgattgtatcccttgcatttatattttcagcactgggagcctttataaacctcctctgcccgaagcgccaacaccgacacaggcaccgcccgactcatttttggccaggagtcagcgacgccctcgccgtggcatttctcgcgcagaatccctcggctatccatcggttgaaacgtttggttaaaaaatactggacatcgctattaaatgagtcttattctagcatattacagcctaactctcactctggcaaaaattaaaaatttcccgtcatttactataggtattaattttaaaaatcttccattttcgtaccaaattttgagttacttttgaaaaaatgttgaaaatatttattagataaatttccaatttcaagaaggcatcactaccttgtgtaaaacattccttctgctcagaatcgtcgtgtccagctgtactgctcgcccttccattggcaaggcatgtggaatttcccaccgccagtcggtgcccaggaggcgacactcaccgaattgggtcggacagtcgcccgtttgcccttggagccgcaacttgcgcgtttgctgctgttcggcatcgctttgcgctgtattggccccgttattacgctggtggccgcactgtctcaccgtgacccatgtatgcccgaccgatccttgcaaaaacccaaaatcaaaaatttttcaaagttgtaatcgcatccactgatgagcagaaacaaatggccaacatagtgagggacgaattctccaagatggattacagtgaccatttggtaaatcacagagggtggattagttgtactttatctctcttccttttcgttcatcagatgcttatccgtgcgttcaatgccttttcgagggttaacggctcctgcagagaacaatggtgttgggcccgactgatcagcgagtcggcgatgcgaatgatttgtggaattcggtaaagcaaaaatgatttttcaattcttaattgtcttcctttaggcatcaattgttcattgagcttcgtcgtcttcatcttctgccttctcgcatgacgaatcctgacgacaacatgaacaatctcaatttgttcgcctccagttggcccatggtccagggatgcattgtggcgggcgcttacccaaacattggcttcgtccgatttggctcgaaactgaatcgaattcgcaccatgtaagccaaagttatta

SEQ ID NO: 34448 - DNA, 1418 bp, Heterodera glycines
gttcacaaaatataaaaatcacttggcctttatttgatcattatttttcaaatccctttcaaatacagtcaactttggcacgggccaattccggttgtttgttggcaaactcactcacaaataacggggaatggcacattttaatttctatttgtactccggttttgcaccccacaaaaaaagcaaatatatttatttgtaaatttcattacagtttttcattattctttacttcttttcaactgtgccgactttgggcacttcccccccccccccccgcccccaacagctgtaccattggttgaaatgccgaaatgccaaaacaatgaatgccacctttatttccattaaacgtaggttttgcactccaaaaattctatttatattttcaattattcatttatctctcgtgcctatctaatattttttgatttttaaaaatttttgttcccaaaataaaaaaatcacttggcttatttgctcattattttcaatccctttcaaacagtgctcactttggcatgggccattttcggttttttggcggcaaactcaccccccaataattagtcacagcttaaataaattccatttcaaatgtctttaaattcggctacattttccttcctaattataattgcgagcaaaatcactttgccattattggtccattcattatttctaaattattcatttaaacagtgccgatttttgacactctttcccccaacaatcatggcacaaaaaattccaaaacgatgaatggcacattttttcccatatgaaatattcatttttacacttcttttatcgctttcttcttgggtcttctgaactaattataactcttggaaaaatcatttgtacatttgtaattccgttttgcaccacacaaaacattattatttacattataattactttattttttattctactttcttcttctgtcactctttcatcgttatttccattgaacttattttgcactccaaaaattctatttatattatcattatctatttatttattgtttcccaaaagataaaaatcaattggcctttattggcccattatttttttccattaaacaatgctcactttggcatgggccattttcggttttttggcggcaaactctctgccactgaacttcggttttgcatcccacaaatcatatttagttataaaataagctttttttctccttttttcttccttcactctctcgtgccctctcgatcattattcttttctattcaaactagggttaagccccgagccctcggggggcaaaaagtcgggggtcggggacctcgggggacgacatgtcgggggtcgggtcggggaataggtccaaaaaacgtctcggttcgggtcgggggccgggaggctcggggtcgaggcttaaccctaat

SEQ ID NO: 34449 - DNA, 960 bp, Heterodera glycines
ttttcagaaagggttctgaaacgcaccaaattttatttatttgttagtttaggcactctgatgctttttctatcaaaaagggagatgaataaaatttttaaaaatttttaattcctttttaaacaggccaaaaagtttaggcttaacttttttttcagaaactgatcagaagcgccccaaactttgcagggatactgaaaggaaaagaattaacctgttttatcacattagcttgtcatcagtttttataaaaaattttcaaaattctgagtctcctattattttatttatttttcaaaattttgaagggcggggggggggggggggaaaattcaattgattgcgaaatttttggaaaaattggcgccaaaaattttccgcttccatttgcttcagaaaattggtcatgcattgctttatcttaattgataaaaaataaattattatctaattgaaattattttaaattgacctcaaatttatatttaaaactacatttctcgcaaattggtaacattgaatgatttttaatttaatctttcgaaattttaaattagaaaaaatttataaaaataatagaaatattcaaaaaaaattgagagaaaaatcaagctatttgtgaccatttttttaaattttgatgtgatttttacacccataagcaaatgcaaatttccaagggcattcttggaaaaaggattttcgaagtgacaagggccatttccaagggcatccttggcatccaaggacggattcttgtaaatcgagattaagctgacagaccaatttcaatttggtcgagcattttcttccatccaattgtccttgtttttgaatgctttatttcgaaatgatttttgctcttcaaattgaatgcattaaatattttttccaatgcttttcctcccatttctgtttgttgtggcttttttcttttcccttccattcaaacccgaaaaa

SEQ ID NO: 34450 - DNA, 818 bp, Heterodera glycines
ttttgttgtcgcaaataaaaattccaaaattaaatttgttaattttaataattttcatgtgaaatcgtttgttggcaaaggcattcgcttgccaagtggaaggcacgcattggtgatggaaattgtgctccttgagcattattatctgatcaaaatgaatggcactgaattgggccaaaaattttggccaaaagaatggtggaacgaattccaatggcacggtgtcaattcggtgaaggtgctgtgctcggttttgctcagaaaattacgtggaatttttttagggcctatgatttttcggttactaaattaaatttctcaaaaaatgctaacttttctttccatcactattgataaaaaaaatttcttagcaattgtcatgatgaaagcaaatttttgcgcaaatttttttttactttttttttcattttcaagtgtccattataatttaaaagatttatggcgaattaaattttgttaagaagcaaaaaatattataattgattgattcattgttattaaatgccggcccaacttttcaacatcgaaaaattaaaaataaggtaaagaaagtttaagaatttcaagagaaaaaattaaatttatatacaatcaaaaaattcattaaaaattaagtcagagaaaaaaaaaaagattaatttaattaattaattctttttttttaaaatcctcctcattcgtcgtttcaattcaaaaaagtcaccgtttaagcactgtaaatagcactaaattttttcaaaataatcatgaaaaaaagccccaaaaggaaaactcagcaccaaaaattggaaaaaagc

SEQ ID NO: 34451 - DNA, 869 bp, Heterodera glycines
  unsure (1)..(869): unsure at all n locations
catcacttcattttccaatcaacaattacttgagttcacaaattcttttatttttctgagacacttcgacgacataatttctttaaatttaaatttctcgactacaatcaacaaaattctggatntattttctaaattctggtgttaatcagcgaaacatattccgacaattccatcaaaaacggccgacacgcggagaagaccgaattctttagaggaagaaggactaaacgaaggacaaaccgaaagggataaaaggctttggctcatccatcaaaaaaggcagttgcgtaatatggatttagacgccctgcggcgtcgaattgtgactctcgagcaagagatgcgtgaaaatggtggaactcgctctgggctcccaatgccgaccacatttgacgggacgactgatttgcaggattatttgaagtcctttaatttaatcgcgaccgcccacaattggacacccgcacgatttgtgcaagttctcccgctgttcctcagaggatcggcaagggcaacttacgagaacatcgaaccggatattaaagataattggcgaagtctaattgatgccatggcggataagttgaaacaaatgtctccaagtctgacagcaagacagaaattggcacaacggaaacaactgactggagaatcgctggaagaattcgcgcaagcgattcggaacctcgtcttacgtgcttatcccgacaattctctcgagatggactttggaaatttggtgctcggtgctttggaaaatgatgtgaaacaagcaaacgaagtccgacttcgacaattccgttcgtaaattgcgcgagattttttcgagcgaatatggcaccacgactgaaggaaagagtgatgta

SEQ ID NO: 34452 - DNA, 750 bp, Heterodera glycines
cgtacataatcgtccacgacttttcgtcactttctctgtatcattttgagtttgcctgttttttgtcgttttattttatattttcacttgccataattcagctccctgccgccagttttccttctgttcgcgttgtttaccacaattcgaactccgattgccattggatagttcaggcggacatttccatgagtcaaatcactccgtcgttgagttacgaacgccgcctttcccagcatttacgagttgcacttaaactcaagctcagctacccctcctttctgcttcagtccagcattaagtgagtgatatcatcgatgctaatttaaatttgagagttgccctttatacaaattcttaaaatgctgcaaaaaaaaaattttttttagatttcgagcatttttgccaatttatggaaaaaacttaggaacaatttatttgctagtctttatattttaaactttgaaattttaaaaaccaattcacgcgagatactgccaaatccctgtgcgggatccctaatttttcctcgcacaaaaaaatgagattcatcttcagaatccgcaccagcatgtccaccttcgaattctgcttcgtcctctgtgacaatcaagaggatatcgtacaggcctttgtcagtggcgttgtatttccatttattgcctttaatactgcccggtttatttaccgacgactgagaaatggaaagacaaggtaggaaaaaattcaaacgtactattttaagtgtaa

SEQ ID NO: 34453 - DNA, 1212 bp, Heterodera glycines
  unsure (1)..(1212): unsure at all n locations
aacttcaagcatgacccatcctcaatcggtcgctgcgcatggcattcgagagcacggcgacgaagcatcgtgtgaagatttgctgtacaacttcgaggacgagctcaagcaaatgtccaaggcgtgctttgaaaaggagcgtttattcgaaaaggaaatacgccgacgcaatcgcttagttcgtaatcattaagtatttttatatatctttttaaaacgagggatacatctcatttgttttggattaacaaaattttaaggaacgttttgcgcgatgttcgactgaaaattcctcggcgggccgtgccgaggacgacgacaattcccagcacggaaacaacgagtccaaactgtcacagcaaattgttcgccgccgttctcaacagcatatcatgaatctgagagtctcgttgaagtctgaaaatgttgatcgcgactggacgcccaaagagccggtgaggaaacgacgaagcgggggccgtcgtttcttcggatcgaggtgagcattgggcgtgggatatttgcttatcgtaggtcattatgggatcgctcggcttcaccttattncaggggtaggaagccaatgtcgcgtaaggcgcgggatgtgatgatcaaactgcgcgaggtcagcatgcgacttggcggtgctcagtatttcaagaagcgcagcaacgaagccatttcttgtgaggtaaaatgtggtggtaattgctgggcaatacgaaatgatttactgatcggaggctgtcttttaccccatttatcatatgacagctaaaatatacaataaaaatcactatgctcccttgtcgcctttcctcattgtttttcgtatttatttcccctttttcagaaatgtggcaaactcgtcatcaatcgtctgtctgatcacgcttactctcacttggaggggtgcgacctgttcaagtgccaacagtgcaacttggtattgtggaattcacttggtctcccactgtgttcacatttatgttgtcttttagggtcacttttcgcgtgagacgattgttcgtcatttgaaggactttcacaattcgcacgaggctccgatggacaatcgccttcgttttgcacaagtgaccatcgttttgacttggttttaatttaaataattttactcaaggaaatcaaagattccattcgcgattgttacccacaactttttatcgatgcaccgatcccgacgaaagagga

SEQ ID NO: 34454 - DNA, 905 bp, Heterodera glycines
  unsure (1)..(905): unsure at all n locations
ccattttgaatcccgaacccggattcgaacaaaaagtccaaaaattagttttcaaaaaattcacatttatgcaacaaaaacaactcaaatgcatgaattaactcaaataagctcattcacatgggtaaaattgtgaaatatgcagccaaaaattgtaaaaaatattcgcatggtccccaaaacgctgacgccaaacaaattcgggaaaatatgtatcgtcggttgtgtttccgaattgctgtttgaaattacgttttaactttttccacatcgattcgacattctgagtgtgggcaaggcggttagcaggattgacaaatttagcgaatgattgacagtctaatgggtgttgaggcaaattgggaatgccacggtatgatcgccactaatccgatacaatagtggtccccgggaggatatattgttggataagtgggataagacggttcgctccacgtgatccactggtaccataaaaacgcgttcccagctggagtcacgttcgacgccaccgaatagccaaatttcctgcttttccagaacacgcccaacaacattttttcttttcacaacaagcgtctcgtcgatttctacgaaacgtcctacaaaagagacaaaacaaatggaattggcgaaaatccgggctgccaatcgtatttggttggcgcacgaagaattcagcgcaaacgtcacggcagaacctatcgaatttggacttagagaaaccttcaaaaaacgttcagaccaaataccccgtttctttgcgacaattctttgatttacatctccaagttccataaggacgaccttcctttgattttatcgcgccattacaatgaggacacgattgacgagcgtgcagaagacccaaactgtcagncaagcatcgaaatgctgaagctgcg

SEQ ID NO: 34455 - DNA, 886 bp, Heterodera glycines
  unsure (1)..(886): unsure at all n locations
tctaattntgttccaccaaacaaaggctgattgattgattgattgtttgattcttctactgtcattggacgaactgacaaaagagaacagcggacgaacaccggactccgacaattggaattttgaagaaatcgactgcaagtaattggacttggaatgagcgacttgcttatggcgtgtttgcatacaatataacaccctcaaacgtcaccggattttctccattctcgttaatgtttgggaaacatgccaactttccgttggatgaagccatcggttttccgttaacccggtctatacaatagtcgaccgagggtgaattttgggtggaactcgaagtgtacgggaacagaacacgagttctgtgaaaaattaactctgggagagcttgacccggcacttggcactgcagaaattggatgtgccatagtccaaacgccattgcaggctttgatggccgttttccttctgagaggaggcaccgtcccgtccatgtcggctgcccgcaattttatcaaaatgatcctcgaaggcggcccgggaatggaaatatgcctttttaacgattccagcatgtcgacttcttcatcaccttccctccttacgtacatgccaaaactgctcaatatgaggaattgttcatgaaaatgcgctcttttattgaccaggcgcattttcgttctattagcaccacggaaaatggtcgctcaattttggaaatcttccgtttcggcaactccttcaaccaacaccttatttcgcctgagggagttttaaaagacgctgggattcgagcactanaagcgtggctttttacccaatccccgtttccaggggataaggctttgaatatccgcactgtaaagtccgtcatccaaaagccctc

SEQ ID NO: 34456 - DNA, 696 bp, Heterodera glycines
tgccggcactgtgcatggctttgggcccgaaatttgggcgcgcttccgcacggacccattcaaagtgccatcagtgcttaacgcacccattgtatggcaaggggaaggggagacgaagtgcaaaggcaaattcgaaggtgatcccggagggggcgcacactttgcatgtcgagtggcagggagtgcacgacgcacacggccgagtcgcgggatacatcgtggagatacggacgagcgacgcaccgcagtggacagaaatgggcggagtggtcagtgctaatccaaactctgctgacgacacttttggcttttccaatggccccacattttcaggtccgacatgagccgagccgcaggacatacaaaacgcgattggacggattggagccggacacgctgtattttgtgcgcatcaaagtggtggaccatcgccaacgcgtcagtgacgcatcgcctgaggcacaggggcgtacgggctgcgcaccgccgaccttaccgcccacaaatgttgagttgacatcgcctgtagactggcgtcatgtgcgcgtatcgtggcagccgccctccaaagagagttggctgtgctccgccattcgctaccgcatcgaatacaaaaacggcactcaaccggcgcgggaggcggaagtgccgacgtaagattaggtcgcactattacaaaaggagttgcttaattaa

SEQ ID NO: 34457 - DNA, 208 bp, Heterodera glycines
tgctgcaattttcacttcacaaaaggggggaaagccaaaaatggaacgaaattcaaaagttgtgggacaaatggaggcgaaaatttaagaggaaatttaaaaatgcaaacaaaatgccaaatttcaaaaaagtaatggaagaattgaaggacaaaatggaacaattgagagcggaaaaggaagaggaagacaaaaaagagggaacgaa

SEQ ID NO: 34458 - DNA, 667 bp, Heterodera glycines
ttgatttctgaaaaacaaatctcttacagcggccaaattgtcggagcccggctgaccgcccggcaacacaaccgcgtcgtaccgcttgtcaaggacgtccttgaacagtgcgtccacccgcagcttggccttacgcgccagctcaatttgggcacggtcctaaaaggcgatgaaaaattatgtaaaaccatttggcattcggtgcctttttattttaaccggatgaggggggggggggcattcgggcaaaacgacaaattcaaattcgaccaattcttaaaattacagacccgaatttgggaattccatgtttctcgaaacatttttaggttcagctttgagtcatgattggctttggcacggtcaattgtgaccgatgaaaagcctgtctcggcagggtctgggtcgtttcggcgccagcgccccagtcttcggactataactgtttttttttctttgctaaccaaatccaaacaatcttgggtatcattcgaaagcttaacgtgcttagaagctatttcaaagctattgtttcgcgattatgaacaattagccaaaaaaccacttttcgctttttgtataatgctaaagaggagcacgtgaagagctttcaaatgataataccaacaatgttagatttggttgacaaaagaaaaaagttatagtc

SEQ ID NO: 34459 - DNA, 690 bp, Heterodera glycines
ttttagatttttagggccggtttcatcgggaccgatttcccgatctcgggatttcgatcccgaactgctccccacgaaccggcccaaaaaatccaaaaatttaatttactactatattaaccatgctctatttaatggcatcaattttagatttttagggccggtttcatcgggaccgatttcccgatctcgggatttcgatcccgaactgctccccacgaaccggcccaaaaaatccaaaaattgaatttactactatattaaccatgctctatttaatggcatcaattttagatttttagggccggtttcatcgggaccgatttcccgatctcgggatttcgatcccgaacttccccacgaaccggcccaaaaaatccaaaaatttaatttactactctattaaacatgctctatttaatggcatcaattttagatttttagggccggtttcatcgggaccgatttcccgatctcgggatttcgatcccgaactgctccccacgaaccggaccaaaaaatccaaaaatttaatttactactctattaaacatgctctatttaatggcatcaattttagatttttagggccggtttcatcgggaccgatttcccgatctcgggatttcgatcccgaactgctccccacgaaccggcccaaaaaatccaaaaatttaatttactactata

SEQ ID NO: 34460 - DNA, 1291 bp, Heterodera glycines
  unsure (1)..(1291): unsure at all n locations
aaaaatttagaccaaagaaanataatttttgattttaaaattgataataattattgaaaatttcttacaaattcataacaaaataattaataattagggacgtcaattttacgtaaatacatatttttccccggattctccacgctctaaataccgtatatcgctctaattatagcccagtctctattaatcccgcagtctccaattataccccagtctacgaggtgttttgaaaaataatccctctatcataatcccccagtctctaattgtccccccttttctgaggaggttgaaaaataatcccccatgggctataattagagcatatacggtagtaggaaaaacactttcttttttgtgtttgcgaacaaaaattgggacttttatttacatatttttacatatttcggggttttatacatattttacatatttcaagattttatacatattttggactttttcggactttttcatacatttttttacatatttttaggattttttatagaaattttcggaaattctcaaaaaaatctaaaatttcggcaaatttttcgtacatatttttattacatattttgagaatttttgaaaatttataaaatttctatgaaaaataaaaattaaccaaactaatttttaaaatactaaaatgtgattctaggcctatttaggtcatttttatggcattttgtttcaccctttccgaagaattttttttccaaaaaataaccattttaaaaattttatttacatatttgggacatattttgggtttttcttacatatttcgggattttttttttacatatttatgtacatattttgaccactttttgtacatatttttgacatccctattaataatatttattataaaaagtttggcactcgtacttatttggcagaaaaacccatttttcttatgaacccgtggatgctctatccacccaccaagtttcattcagaaatcccacggacacctggggaccttcctttgtgagttcttactttgcagatacagcaacaaaaacgaaaaattaatcccctgaaaatcgacttaaaattcttaaaaaatgatctcactttttcaaaaattaaaaaaataggccaaaattctaaaaacttcaatttcaaaaagcaaaaaatttgacattttttatcacctaattttccatttttaatacctttttgagctttttaaagttctttcaaatctatcattgttagaaagcgatcaaatgataccaaaaatcgacaactgtaaaagattttgctgattcca

SEQ ID NO: 34461 - DNA, 1100 bp, Heterodera glycines
tatctaaatatacacatataaataataattaacatatgtaatcttatccaaaacctcttcccctcgtgccctcttcgctgagttgtgaaagtccaggatagcaacgcacatcaattcgtgtgtatttgtttatgcgggcatcaattgcctgcttaaaagcctttgagacgcgtctccaacggacctgaaaaaagcaaattaaaataatatatttatattatgttgatatttcctaaaaacttttgcctatccgataaaaataacctggtcaaagatggagcaatgagcaatgatatgagaagcaagacgatattgatcgctggtggacggactcgaggaaacacggggcggaagaagacgacggatgccatcgaaaaaatatagcggaagagtcaatgccatttttcaggaaaaggcagcgagcgaatagggagggaatatgtgtaatttattcaatttacaaacactaaaaaataaaattgaagaaattgccaaattttaatttgcaattctctcagcaattgtaagagaaattgaatggtgcaatttttaggagtcggcgacagttcaaacagagttacagaactgggacttaaccgttcaatatgtacctaaaaagcaagaatgttcaaaattgtcgcgattgcttcctctaggctaaattgtcaattcccgttttctgtttcagattttaaaaaaatcttaatgccaccaagcagcacaccaataacggtctgtaatttcgaagcaaatgcttttatcaaaatgtcgctctattaaaaaccaaattattaaatgattgtcaaacattatgccaaattgattaaaattaatcactaaatttaaaagttttgacgattttccccaaaagcctcaaaatttctcatagccataaaaatcctcaaatcctcattaaaaaagaatcctcactgacctatcaaaaccacaaaatgaggataaattctcaggtctgggttaaatggctataaaaattataaaacaaatttgggtcgaatggtattgtgggttttaatattgttgacgaaatgtccatttggaaaaggaaggaaccaattgaactgttaatgggagtaaacacg

SEQ ID NO: 34462 - DNA, 654 bp, Heterodera glycines
ttgagtaccccaaactggacactatgaagagatcttccttttttgttttcgtgggcagtccccccgaaccgatgctcccagatttatggggagaccgaatccttcgggaatagcttccctatagcctgtactttaattctgcgttggatttttgctccccataattgtttgagtaccccaaacggacacttgaaaaaatcgatttttttgttttcggggcagtccccccgaaccgatgcgcccagatttatggggagaccgaatccttccggaatagcttccctatagcctgtactttaattctgcgttggatttttgctccccataattgtttgagtaccccaaacggacacttgaaaaaatcgatttttttgttttcggggcagtccccccgaaccgatgcgcccagatttatggggagaccgactgcttccggaatagcttgcctatagcctgtactttaattctgcaatggatgtttgttccccataattgtttgagtactccaaacggacacttgaaaaaatcaatatttttgttttcggggcagtccccccgaaccgatgcgcccagatttatggtgagatcgaattcttccggaatagcttccctatagcctgcactttaagtctgcgaaggatttttgctccccat

SEQ ID NO: 34463 - DNA, 619 bp, Heterodera glycines
cgtattgaaatgacccgccccctccgatcaccccacactcatacttttttcgcttcggctcaccacggaattaatcaaatgcttttaactatttttggaattttatccaattcaatgtgagctaaaaataaatattatttgggcatggattaaacaaattgacggcttttcgccaattaatttcgattatcgcgtgactggaaattgagacgggctaattaaagaattgaggatttaaaaagaccctttttacagatgtttgcattgaatattaagcaaatttcattatttcttcattttttcgttctaatgatggccttacaattttttaatagctgtcaacaaaattttagtcatttcaatttttaaacagaaagcaattgctcaaattaaaaaaaataacacgtgctgctggtgtaaaatttgttgacagcttatcaattcgacggaaaagctcatttttgaggcacttagaaattcttcgtttgatgaattaaaacaaatccgtgaaataatttgggagacaaagatttcgcgttaccaccccataaagtttaaagaaaaagatcattcgggtgctaattggggaattggagcgttgatcacgaaatttagctgc

SEQ ID NO: 34464 - DNA, 889 bp, Heterodera glycines
acaacagcaacaacaacagaacgatttgcgccaaaaagctaacacggcgatggatttggtggagagtggactgctagctgattcgttgcgtgaagaaggcgtgcagagggctgagctaaagcggaaggcgaaagtcgcgctcgatctgattgatgccggtttgaccggcgatgcactgcatgaggagggacaacgttggaagaaggccaaaactgcactcagcgttctcggaaacatgttgttggccgattcacttccggaaaagaagactgcggagctcccgcttccgccagccgaaaaaattgaatcactgccacttccaccactcgaaaaaatgaaaacacccccacttccacctgccgacaaaatgccttcgccgctcccaccatgatcaaaagtggaaagtgatgagcaacaattctacgacagcatttctgcggctaccactatgatggacagcgcctcaatgcagcagcaggcgccgctcaaaagaaaacagctgactccaaaaggcaaaagcaacaatggtatgaagaaggcagctgagccgcagcatcatcacaatgtgggggacatggacaagactcttgacgaattttttgagagcgttagcgcagcgacgaccaatttgtctatataaattgttgtttcatgcaattgtattgaattttaattaattcattaatacgaaatgctgaattctttctccaataaagatatttgctttaaattaccatttggattaattatttccggtccctcctcctctggtaaaacccaattcctattgaaatttgttgccgaatgcgatgaactaattacaccaaaacccgcctccaccctttactggtttggtgaaatgaagccagctgtacccattctgcaaaag

SEQ ID NO: 34465 - DNA, 1136 bp, Heterodera glycines
aattcattttaaattgaaacatgatattctttaattttttattcaaaatttaaaaattatttttgataaaattttcaccaaaaaataatttaattcaaatgaaaaatttttatttattattaataaaattaaaaatattttaaatgaataaaaattgaaaaacagaaaataaatggtagaaaattaatgtacaccgtccggatccgaacctgccccctcccccctcaaaatgatgcctcagaatccccaatcacacagggattctgaggtcttgactatgtcaaaagtaaaatctgatcacgtattcgtgatcagcggcccaaataacccctaaagacatgtttttggaagatttttgtcgaaaaaattttttcactcaaaaatcctgtccaccccctttggtcccgaatcccaaaatcacttttatttttgtatctttttttaaaaatgtgataaaaaggtcaaataaaatttatataatagagcaaaaaattgcggatttttgtagtattttactcttctctaatgacttttcagaaccgagatataaatttttttctgaaaaatagaaaatttccagaatttctggaataactttttttgtttttgcggtataaatttcaaataaatctcataaaattcacccgattttttgctattttttatgctttaaatgagctgaattggaccattttgaggcgagttatgaattttcaaaaaatcacttaaattctcaaatccaaaaaattgacgatttttcaaaatttttttacctccctccaaaaaatccaaaacgcaatataaagtgcatattcgtgttcagcacctcaaattagcccagaaaagtattttttggcaattttaggagcaaaaaaatttttcacgaaatgcaaatccatggggtcccccctttggttttgcatttaaaaattcatttttattttatatctttttttatattaaagataaaaatatgggataaagcacattagatagagcttaaaattctctacaaaaatgctctaagacaatttttcgctaaaatcaacccctgacgagttataagcccgggactgaaatgtcccggtcaggccaaaaaatttttctatttccggaaaattttgaaattttcaaaa

SEQ ID NO: 34466 - DNA, 682 bp, Heterodera glycines
ttgaaggctgtgtatcatttgagcggtcgtagtcgtcgtcaacaaggatggggaaaggaggggtccgtcaggaccctccatttgggcggcgaatgatggaaaggatgcaagcaaacactgctcccccgggctttcccatccatcttcccccccccccctgagggcacaaaatctatgaaattccccgcaatgcgaccctcttgctttgctagtagaactttctcttcgctctcttggtctctccacccttcacgctgcctcatcttgcaatgcccttctcacccattctccgtcagtaaactgctcacgacactcgctcgccctcataccgtgcgcatcgatggacccgtatggagacactgccttttatgagctcgcggtacgtatggaaattacaaagattggtcatataccctcgaaatatatttgacccggagaaggaccagacgtcatccgccgaaaggcccccgaacgaatttttcgaccataacttttttctttctcaaccaaattaaacattcttggtattattcgaaagcattcgaaaaatgctattagcctgcaaattttccaaaatttttatttatacacaaaaaaatcagagccaaaaaaagttcgaattactggggttttgagttccttctggccataacttttttgaaacttaaccaaaatttttgag

SEQ ID NO: 34467 - DNA, 1307 bp, Heterodera glycines
atctactcaaaacggttcagaattcaataaaaataacatcttctgtagcgaaaaaaggggtttgaaaagtttattttgaaaaatagactttacaaaataatacccctgggagaagggagtgggaaacatgatttcaaaattttcaattttttctagtctaatctactcaaaacggttcagaattcaataaaaataacattcacggtgcgaaaaatggggtttgaaaagtttattttgaaaaaaagactttacaaaataatacccctgggagaagggagtgggaaacatgatttcaaaattttcaattttttatagtctaatctactcaaaacggttcagaattcgataaaaataacattcacggtgcgaaaaatggggtttgaaaagtttattggggaaaaaaagactttacaaaataatacccctgggagaagggagtgggaaacatgatttcaaaattttcaattttttctagtctaatctactcaaaacggttcagaattcaataaaaataacattcacggtgcgaaaaatggggtttgacaagtttattggggaaaaaagactttacaaaataatacccctgggagaagggagtgggaaacatgatttccaaattttcaattttttctagtctaatctactcaaaacggttcagaattcaataaaaataacattcacggtgcgaaaaatgggttttgaaaagttaatttgggaaaaaaaaaacttaccaaaataataccccctgggagaaaggagtgggaaaaatgatttcaaaattttccaatttttttagtcaaatctacccaaaccggttcaaaattaaaaaaaaaaaaaattcccggggggaaaaaagggggtttgaaaaatttttttgttaaaaaaaaaatttaaaaaaaaaaacccccgggaaaaaggggggggaaaaaaggatttcaaaatttttatttttttttgtaaattttcatccaaaagggtcaaaaattcaaaaaaaaaaaatttcccgggggaaaaaaggggttttaaaaattttttggggaaaaaaaaaattttaaaaaaaaaacccccggggagaagggggggggaaaaaggattttaaaaatttttttttttttttttttttttttttcttcaaaaggggtttaaaaattaaaaaaaaaaaaaaattccagggggggaaaaaaaggggggggggaaaagttttttttggggaaaaaaaaaattttataaaaaaataaaacccgccgggggaggagggggggggggaaaagagagtttttttaaaaatttttttttttttttttttt

SEQ ID NO: 34468 - DNA, 918 bp, Heterodera glycines
caatcggcggggcccaatcgacccccaccgacaaaacgtctcattttggcttaagcgccagcttccagtttatttatcggttcatttcctccaatggaacaaaagttgttttttatttcctttttgtttaaataatcctatcctaaatcgtataatttaattttgataatttttccaattactgtatatttgtgcagtgatttgtgtgcaaataaatatacacccacaaatgatcgtatgctatggaatatttgaatctttgaaccgatcagaaaaaactttggatgaaggtttttgttgttcgtctcataaattttttgtattcaataaatcatatataccgtatatgttctatagcccatggggattatttttcaacctcctcagaaaagggggaataattagagactgggggattatgatagagggattatttttcaaaacacctcgtagactgggggataattggagactgcgggattaatagagactgggctataattagagcatatacggtatgggggggggcacggctaattacatccatgcccatgtctgccccagggcaacaacatcaatatcgcttaagtttttaagcatcatgatggcggagtttcgaacagattcagctcaaaaatagtcattttgaatcttcacttagtttcatgtctaactttcttgaatgcctgccatttactgtttacattttgcgtttctatgatttcaaacaggggttgagcgcgaccgcggcaatttgaattcgccttgctgcgcgacccgcgggatttttctgtccgccggatttaaaaccgctaatttctcgactcttattacaagaaaacaaattggcgttgtaaaacgtgccaaaagcaacagcgatgtcctatgcaatgaaaagacattttttatcttcatctg

SEQ ID NO: 34469 - DNA, 899 bp, Heterodera glycines
ttgaactgggagtccaaattgactcggtgtgtacagtttcactcataaaagtgaattatttagcactaggaaattgttggacgggacgcagccacgctttggcttttattcctacggacatcactcgctagtccatcactaagcattaggaaattgttggatgggacgcagccacgccttggcttttattcctacggacaccactcgctagtccaccactaagcactaggaaattgttggacgggacgcagccacgccttggcttttattcctacggacacctctcgctagtccatcactaagcattaggaaattgttggacgggacgcagccacgctttggcttttattcctacggacaccactcgctagtccatcactaagcattaggaaattgttggacgggacgcagccacgctttggcttttattcctacggacatcactcgctagtccatcactaagcattaggaaattgttggacgggacgcagccacgctttggcttttattcctacggacaccactcgctagtccatcactaagcattagggaatagttggacgggacgcagccacgctttggcttttattcctaaggacaccactcgctagtccatcactaagcattaggaaattgttggatgggacgcagccacgccttggcttttattcctacggacaccactcgctagtccaccactaagcactaggaaattgttggacgggacgcagccacgccttggcttttattcctacggacacctctcgctagtccatcactaagcattaggaaattgttggacgggacgcagccacgctttggcttttattcctacggacaccactcgctagtccatcactaagcattaggaaattgttggatgggacgcagccacgcct

SEQ ID NO: 34470 - DNA, 591 bp, Heterodera glycines
tcctccccgcccttcttccttttcccatccttcagtccaccaccgatcatcttccatcgatcggcccatcattgacggctgaagagagacacaacaaagatgatgatttccgaggaaaagcatattccaatccacacaaaaattcaagtggactttccccgcctctccccgctcgttgcccccagcgcgagggccgatgcgggcggctgtaaaattttctattttgtttcgctttatttgaatattaacgctgaaaaagacaaaacaatttcatcaagtaaaatatctcgaaaaattgatatccctttaaatcagactaaagtttccatttcaaattcatctgctggcgcttcggtatgcgtgccgttggtgttcttttttttgtatatcagaaaaataataattccaatgagaatggaaatggtaaccataactccaacggtgaaaaaaatttttcttaaattgcaaaatataaatacaaaattctctaatcgcttttgggcaatgatttgattccaaaagacacccaaaaagcgttaaaaattatcaattatgaaaaacctattacagcttcccccccccccccccccc

SEQ ID NO: 34471 - DNA, 918 bp, Heterodera glycines
aaataattccgactgtggactaccacttcaaatgaccgctaaggagaaatattcgaaaatatttattgaactctcaaatttattgaatcttcagttttctattggaatattttaggcgacgtcccgtaaataattccgactgtggactaccaaataaaatgaccgctaaggagaaatattcgaaaatatttcttgaactctcaaatttattgaatcttcagttttctattggaatattttagacgacctattggaaataattccgactgtggactaccaaataaaatgaccgctaaggagaaatattcgaaaatacttcttgaactctcaaatttattaaatcttcagttttctattggaatattttaggcgacgtaccgtaaataattccgactgtggactaccaaataaaatgaccgctaaggagaaatattcgaaaatatttattgaactctccaatttattgaatcttcagttttctattggaatattttagccgacgtaccgtaaataattccgactgtggactaccaaataaaatgaccgctaaggagaaatatttgaaaatattttttgaactctcaaatttatttaatcttcagttttctattggaatattttaggcgacgtcccgtaaataattccgactgtggactaccaaataaaatgaccgctaaggagaaaattcgaaaatatttcttgaactctcaaatttattgaatcttcagttttctattggaatattttagacgacctattggaaataattccgactgtggactaccaaataaaatgaccgctaaggagaaatattcgaaaatacttcttgaactctcaatttattaaatcttcagttttctattgggatattttaggcgacgtaccgtaaataattccgactgtggactaccaaataaa

SEQ ID NO: 34472 - DNA, 803 bp, Heterodera glycines
gggtattaccctccgaaaatgatggggcagtgtggcccaccacggtggagcatactgaacatgacgtggtcggacgacctttgcaattctgctcctgctgctgctcaacttgtcttgccccccccccccctccgattgtcttttttctccgccgacccatcgttttctaaaatctttttcaatgtaattttcgggcaacggttgttgtgcatgcttttacaccttttgacttaaaaaaagatatagtgagaataaaaaaagaaagaaaacgaaattggggaacgacggacggagaaaaatgtgcaaaaaaaagcagcgaaatcagcaggagaaaaagcggaaaagggaaaaggcagaaatgtcaaagggatgataatgacttgactcatctcactaattggcattacaaattgacgattattaatgggaaaagaacaactgataaatttcccttcaccatcgatgagcaaaaattttattacaaaagttctcattaaaattaatggcactcaaaaaataagcacttaaaaatatataattaatattaaaaaaactcttaaaaaataaaattattaattcattttattaaatcaatatacaaaattgattattcaaacgtatattacatatttacatatgccttttatgtataaaattacaacaaaaatttcttcgtctcattcttctatataatattattttatcgaatttttcattccttaggcgttgaataaaaaacagtattaaaattgcgcaatgttttggccaaaattgtcgccactttttgcttttctgctgatcat

SEQ ID NO: 34473 - DNA, 139 bp, Heterodera glycines
cgaaatggtccgcgccgaagtgaccccgacccctttttgaggggaccagagcgtttgggcccccgtttttgggccccggggtcgtttgggcccccgcttttgggccccgggtcgtttgggccccaacccaaaaatagaa

SEQ ID NO: 34474 - DNA, 1119 bp, Heterodera glycines
  unsure (1)..(1119): unsure at all n locations
atgtccaagtggagtggcgaggctggcggctgcgtttctcccccgcagctccatcgaccagctccatgtggtgttgacacgttgctggggttgctgcgacgcagccggtgtttctggctgctgctgagccgatgttgttggctgcagctggagcagggcccttgcgtctgccatcatccgctgccgttcctgtggtgcaggtcggtcgacgaggcgctgcatgagcaaaggacacttaccgcagcctgctgtcctccggagccgcgttccggatcgctgctgctcttcgcagaccatggttcttgtggaagctgatggaatgcatagacacatttataaagttgggatttcaaaaaaagtggatttattttttgaggattaattattataattaaacagattaccattgtaaaagacgctgatggaaatgaaggatcggtgcagtacaccgaagcgcccagctacacacgcagacaactcaaagccaaatcctcatgtgcatcggtggcaagacggtggaattggttttcttttcgaaatgcgtggccgatggcacgggcaaggatgactggaagcgattggccgcgaaggtttatcactgaattagaattttttgctgaaattttccttaaaaatgcatgcattttttcgaaattgaaaaaatcatcattttttggtgaatctgttaaattttgctacttccccccccccccctcttcaccggtgactctcccctcttttaaaccggccccctacgacgaacgaggagagagggggcggggtgggcaggagcacctcgtctctcgtgctacagccggatccctccctttaaacaaaaaaaatttgaacgcaaaaaaaatttttttattcagctgaccgaaacgagccccagatgggcacgaatgcgccgcacgccggaaaattacgcgctgctccaacaaggctacatcaacacggcactgaaaaagccaaaaaacactgaaaaaacaccgcaaacagttgcttagggtatgatttttttttgaaaattttccggtgggggggggggggaaaggagccccgacatttgcggaagccctgatagcttaaacagcactanaattaagaaaaactgtcttc

SEQ ID NO: 34475 - DNA, 718 bp, Heterodera glycines
tgttgaatggagggccagggagggggggctccacgggggggcggggcggcgtgagattttgggctatcgacgtcattaaattttttgggagaattttttcaacgaaaattgcgagaaaaatttggcaaagaaaaaaaaaattgtttttttttgcccttcaatttgtttcccgccgggacaaactattgatacaaactttttttttttgtacccattaataaacattaaaaattgaaaacttactgtaatcgccgtcgtcgcccagagtgcgcacaattcgaagcccaaaatggctgttcaattcaccgccaaagttcatgctgcaggttcctcgtgcacaaccgaacgcacattcaaccggcttgctcaggtcaacgatcattactccgccggtcatgttgttgatgtacgtaagtgcaatgctggacacgcatctcaatgcaggaactgaaaaattgaaaaataaatatacaaaaaaaaaaaaaacatctcgaccgtatgtgtacaaatttccaataactatagcgctaccgtatgtccaatacaaactcaaaatacggtagcgaaatacggtaatttaaaaatgaattatttttgtagtaattataaaaataaaataataatttaaaacaataatttccttacctgacgggaaaagcgccgcgaagagcaaaaaggccaatttgagcccagctttgaacatgatgctttttgattt

SEQ ID NO: 34476 - DNA, 669 bp, Heterodera glycines
attctgacattctgattccgatcaatagaaaaaattgagttaatggacggaattctggatttccgaacccctgggggagagaaggagagagttgaagcgccaaaaattccggtaaaatgcaaaaaatgctaagtatttcttcaactctaggctgaaagaaaagtccattgggttcatttctaccattgctggaaggtgctgcttaagagtttctgacccaccccccgcgattttggtcccgaattattttttagggtctcgattttctcgaaaatgctttcttgtcctacgcccaatgtttagcagcggctcattcttgaatttaggcataaaaaattttctgatctgactaaatatatttgggcctaaatctcgaaagtttctcaagacatcgctattgacgactatatagggaaggaatgtttcagtcttgagcagcacttattaacagggatatgtatgtgccgtcgccctcaaaagattttggaaattgacattccaagcccaaaaattgccggaaatcggcaatcggatagtccgagcccaaaaattgccggaaatcggcaatcggatagtccgagcccaaaaattgcgccggaattcggcaatcagaaatcggcattacgacatatccctcttatgatagcacattttttttcatttacatat

SEQ ID NO: 34477 - DNA, 961 bp, Heterodera glycines
ttatgctgagagagcggttggaattcccttgactgttccttacaggaagagatagccattgtccaaatttcacgatcaaatggcgctgagaaaaaaattccagaacaattagtatcggcgtcattatgctgagagtgcggttggaattcccttgactgtagccagaaaaagagatagccatttttccaaaattttcacgatcaaatgcgctgagaaaataattccagaacaattagtatcggcgtcattatgctgagagtgcggttggaattcccttgactgtagaccagaaaaagagaaagccatttttccaaaattttcacgatcaaatgcgctgagaaaaaaattccagaacaattagtatcggcgtcattatgctgagaatgcggttggaattcccttgactgtagaccagaaaaagagatagccagttttccaaaattttcacgatcaaatgcgctgagaaaaaaattccagaacaattagtatcggcgcattatgctgagaatgcggttggaattcccttgactgtagccagaaaaagagatagccatttttccaaaattttcacgatcaaatgcgctgagaaaaaaattccagaacaattagtatcggcgtcattatgctgagaatgcggttggaattcccttgactgtagccagaaaaagagatagccatttttccaaaattttcacgatcaaatgcgctgagaaaaaaattccagaacaattagtatcggcgtcattatgctgagaatgcggttggaattcccttgactgtagaccagaaaaagagatagccatttttccaaaattttcacgatcaaatgcgctgagaaaaaaattccagaacaattagtatcggcgtcattatgctgagaatgcgggtggattcccttgactggagaccagaaaaagagataggcattttttccaaatttttcacgatccaatgcgctgag

SEQ ID NO: 34478 - DNA, 420 bp, Heterodera glycines
  unsure (1)..(420): unsure at all n locations
aaaaaatcantnaaaantnaaaaattcaatcntcataaaanncnaaantcancttccattccaanntttaccctctattatattancaaacaatatttattttattaatttattaaataaaaaataattaattnntttnnntaattaaaatataaatttattttaaattttatatnattttnttnngggtcaaagccaactcgtacaattttaaattgacgtggccataactttttttagtcagccaatttcttaaaacttttttatcattcgaatgcttttcatgtttagaagcgatgattaagcagaagctaagcgattaagtcatctcacaaaaaaggatataatttataaattgcgaaaaagtctgcttttgtgagaatttttaatgttctttaaaatgtatctttttgtgagatg

SEQ ID NO: 34479 - DNA, 853 bp, Heterodera glycines
  unsure (1)..(853): unsure at all n locations
gtcagatgaaanattctgtttatnntttttgaataggaaaatttccccccccccgaaggatgtcaaaacaaatttgcatttgttttcttgtttcctaattattttttggaattctgcatctgctcatcacttattggacatttctctaagaactgaaagtgaatgtccacttgattgtggaagacgtgccattcagcaggaggaacgagtaatgctgcaacttgactcaatagggaacctaaaatatagcaatcaaaatcaaatgtttatttgaatatttttattggttcgaaattttttatattatgtaatttcattaaattttgcttaattgaatgattgaattttctaccaaatttttttttaagattttcggtggcaccatcgtcgaacaagatttgtggccctggacttttctgctttcagcaacagaatgtgatggaaaaaacacctattgcactgcacaatatatcggtgagcccattatttaattttattttttcaatttattcatttgtcaatgaagaaaacctgaaatgagcattatttcgcacaaaaaaggcaattaggaaattctgaatttgttaaaatttaaatatttcttgcctgccgttggcaaaaggatcgtcggctgggatgggttacatgcaattccgatttcggaatccgtttaaaattagatataaacattctttaattactactccggccttattttttccgcgagtcttttttaatgctacttttgctaaccgctttttttgcggcgcgccgttctcaaaaaaaaatgtttaaagcatccggaaatttcttaagaaaaatacactttttcaaaattttccattttcattaa

SEQ ID NO: 34480 - DNA, 658 bp, Heterodera glycines
tatttgaatttaataaaaatttatttacctatttatttccaaaaacaacaagcggtaaaattatatatacggtaaattaaatcaaaaattttttccattggtcacaaatttgccagtcaatcgtttccttttcccaccgcacccattcattcagaacgcggtttatcgggcaacggaccaacaacattttccgagccgaaccatgcttcatgcgccatttgtcgacccgtgaaagggacattttttccccggtacgtttgttaaacaatttaaaaggggccacagtgacgccaagggccaaagtaaatacaatcacataattgacagcagaagtggcattttcgaaatgctaaaacaaaataccaaaaatattacaaaaaactgactatattgcataaaattattaacaccgttttaagcatttctattttttgtctcacatttccagataaatcagcacagacgacaattttggcgaattgtccggccgaggcgacaaaagccagtgcgccagtgattgtccatcatttgcggaggaactgttatcgggcggaaagtcggggaagaagtggtgcccaaaggggacttggacaacgcgaagcgatggacaattggcgaaggatgggcgttcgtcaataggcaaatcaacgaaaatgtg

SEQ ID NO: 34481 - DNA, 1139 bp, Heterodera glycines
tttgttaaatttataaaaggagtcaaaaatataaagttaataaatgttttgttcgaattaattataaaaaatgatttatttaagcaatttgaaaaattttctgatttttgactcaaaaataagatttttttatttcaaatttctcctttataaatttttctatatatttttaatttaataaattgattgtcctttaaatttgtgcattaaaaatatttttgtgagtttttaattaaattttcgaattactcccgctcccgcccgggactcccgttaaaaatggatgggattttaacgggagcgggatttttacgggaatcccgttcgggactcccgtcccggaaaattttgaactcctgatcccgctcccgctcccggaaatttttttttaccgtactctagtatttagggagttagagttaagtaagtaaaaatggtcattttagaggtaggtatttttgatggctgatttaaagaaaaataaaagagatacagatccagagaaatagtgattaaatagagcaaagttaggactataagaacacaaaaatataaaattttaattacaaaaattgaattattggagagccgagactgaaaggggtctccaaaaacggcatttttcaagaccaccaagtaacataatgttttaaaagtggttttggaaattctgaatttaattaaacaaggtaaatcgggtatgttgagttcgaatatggtcttagatttggtctctgggatcgcaacaaacctgtagctcgaacttcatgcatggagttgagcagtaaaagctcaggtttaaaagataggtcccgtttaaggccatattcgaattctactggtctaaattgtatagaaaaactaagattttgttatatcagctttggtttttgaccataaaaaattcgagaaaaattagtgggccaattttcaattttggcatggtcgggaaaaaatgcagaaaaatgtatcaatcaaataaaaagtgaaacgatagtaagatataaaagagggcaccatgaagaacaaaataaaaaaagaatcatttaaataggcgcagaaataacggagttttgaatttttaaaaattggaaaaaatttggatatcaaaaattatgttccaccctaagtatatactt

SEQ ID NO: 34482 - DNA, 602 bp, Heterodera glycines
cattttaattcaaattttttataataaaatactcgttttattcattaaaaacaattttgaaaattaataagtgcatatttatttaatttgaaatggaattaattttttacaaattcaaaaataaataattctttaataaaaataaataaatttaaaaaaatttataagaaaatcttcaaatgaattaaaaacattgaaaacagcctaaaaatgcatataaaattaatgtacgccgtccggattcgaactccccaaaaaggatgcctcagaatccccaatcacacagggattctgaggtcttgacgatgtcataactgaaatcagatttcagattcgtgatcagtggcccaaataacccctaaaatcatatttttggaagatttttggcgaaaaaattttttcactcaaaaatcctgtcacccccctttggtaccgaatcacaaaatcacttttatttttgtaacatttttcaaaaaagcgataaaaatgtaaaacaaaatattagaagaggtacaacagtgattagaagaggtacaacagtgattaaaagaggtacaaaagtctaacttgttatgagatgtacaaaaataatttcataattt

SEQ ID NO: 34483 - DNA, 818 bp, Heterodera glycines
tttaaaatttggatttgacacagtttaatttctgtaatctttttttggtgttaatgatgtcgtcaaatgaagaagaagaatccggcggttcaaatgatgaccaattttcgtaagtataaatttattgaatttttataaagaaatgcctaaattacatgtccaaaagtgtggtggcctatgtcggaaagggccaaatgggcgatggcccagttttttggttaagtgtcctttctcatttgttcgaatccaaccaaatttttattatttatattcttaacaagtaacttgtgctctctattagcctgtaaaatttcaaaaaattacgttgagtttcaaaaaaaaacaataaatttgtgccaaaaatgttcggaaaagcagttttttttaaattttatcttaacttttatttttatgacacaatccgggactatgtaaaatgtataaaggcttacattttgttacaaaaattgaaaacaaattttttattttttttgaaaatattagctctccgatcagtccggttagccccattcaaccgatgagcaccgattggagcaacgcaattgacgcgcaggaaatgggcgccggaggtgttggaggagggatcagcagcggaagcctgcatgagagcctgcacgaactttcgcgttggaaaatttttggaaaaaaaattgatgcttccttgcataccttatgaaaaatcgcgtttttagggcaagcgctcaataaaaaattctcaaattttctctcttcaatgcttcctaatttggctccgtgtaatcatctattgaacattcatagacatttggataactcta

SEQ ID NO: 34484 - DNA, 754 bp, Heterodera glycines
caattactaattaaattaaatggaatttgggttgcttcacccggatgaaatcccctttatgggcgacctatactgactttcactactgatgctgatcatgccaaaatttataccccccccccccgccactgtgcgcatttcatccgacccaacgcagtttatggacaaattttagttcaagaaatcactaaatttatccttataactagggctgcaaaaaatatggatataaaatcgcgaaatatggccataaaatatggaccaaaaatcgcaaaatatggacataaaattgcgaaaatctcaaaatatggacataaatggcaaaaacgtcaaaatatggacataaatttttcaaaattgagtgtaaaatttcttcaaatttattggttgaaattgcatatgagatatatttccaaattttttgactcggtaaggcgctttgacaaagacggctttcgttttgcaattagtcggtcaacattcggaaattggtctcgaattttttcggcaattacgtgcaatcattttaaaagaaaaaaaacataaaagctaaaatttattaatttttttagcgcaaaatcaacaacaaaagcgaaattttcgcttttttgcttattttgacataatttattaatttttaagaaaatttaaatttattcaatattctcgagaaattttggcgaaaaaatgattttttgaaaaattttcggtttttgggctcaaaaaggctaatttagctgatgggggccgttct

SEQ ID NO: 34485 - DNA, 1053 bp, Heterodera glycines
  unsure (1)..(1053): unsure at all n locations
tttggctcggctgaacaccgaggcggaaaacaatgttttttacaaattgaaggcacacaaaaacaatctgatagtgaaagtgaattttgatcaaaaatgttcggaaatgtttaaatttcttttttcacgtcctgaattgctcaaaaaaattgctggaggtgagaaatatttcgtagatgctcattttattgaataaaatgcaaaaaaacaacgttttaaaaaatgtacttaattttgaccctaaaaacttatttttactactgatttacttatttcggaacattttcgatgcttcccgagtgaatataatccattttttacactgttgataaagagaaattcccttatattcctgctgctggtaaaaaagttgcttgatatgaaaacataagaacagtagcagcaaattgtccgatcatttatttttgtgtgttcgtaaagagaaagtttggcccaaagtttgcctcaatttgatcagcaggcgaaagcaaagaaacgaatgggaacaactgctgctgctgctgctggaggtgatcaatcggaaatggaacggtaatggcggcggtaactgaaaataaaaaatgtttttttctttattttttattcgccatcaaaaataaaaataaattacgaaaaataaaagtcgattgttctaaaaattaaaaacttgtccattaatttaacaaaaacatatttgagcgtctttttggcttggtgaccttttttccttttgatgattgaaaaaatcgaattaaaattaaaataacgatagaacatatagatatttccgatcgaaaaatcttagtttaaatgttttatactttggttaatagttctgtgtttctaaaatttttaaaaccaatatcaaatcgaaaatcatttgactttaatttaagaaatattaattttgtttgtttanattcaaataacccaaacggtgtcccattttttgtgagaanaatttcacgagttgtcaaataaatgccaagaccgaacacatcngcatgcngtanatgagtgtgccacatttcaaattttgctggtaaccattat

SEQ ID NO: 34486 - DNA, 342 bp, Heterodera glycines
  unsure (1)..(342): unsure at all n locations
tctanngagtcatttccgcccaaaatgacattgtaaaatttctttcgtttgtttctttccttctgtcattcatttgggcattaattttttgagcaccgtttggtaaagttcggaacggcggaaacgcggcaattgatcattctcgagtaacatgtaaatttcctggaattgtgcgggaatggccttccaaatggcactataaattgtttttttgagtgccttatttgccatttccacacttttgaagtcgggcatttgcgctttggtcgcctcgcgcaatttctcaaaaaaaaaattaaatgaaaataattaaatttccaaatttattttttatttgttatt

SEQ ID NO: 34487 - DNA, 1222 bp, Heterodera glycines
agtttaaatgtgaattatttccatttttatcattaatttgaaatttgattgatcctccagtcatatttcattagcatatcctgctcaaccaaatgatctaccgtaacactagggttacggcatttgtgccgaaattgggaaaatgggccttaaaagccaaatttaaggcgggggaggggtaaattcaggaagactaggaacaaacatattccctactaattatcattcagtccagcttttatctcaccacagagtcggacgcgtgtccagtcgttggaccccgaaacaatcgctgcaaatgcgcgcttctttgacggtgatcggagtcgggtgccgagaagggcgatcactgtgggcgttggcaccataatggaggcaaaagaggtgttcatcccggattggatcacaaatgttgcttattattgcggtcatgatcaaacaattcgctgacttcgacccttactttaatcaaattcccaaatttgatcagtctgctgatctcaacagattattcattaccctgagattgatcagttaagcgttggttgataaggtgccacagatcgctgataaaatggcaatttaaaggaaatgattttccatttaatttcggctggacatttcaaaacattggtctgtcccccatttttaaggtgcttttgctcgtgaacggagcgcacaaagcccgcgcattgcgcgccgcgttggaaaaaggcatttcgcacatgtgcaccgccagcggtgggcgaagggggcgaccggtgccaaacgcttacctctgaaaatatctaaaatcgaatgcccagattactgttgttgtgcgcaatatgttcccataatgtgcgcaaatagggtcatgttgaacaaccgttcgtacacacacaacaaaccgccaaaatcttaaggtgagccaaaatttattgaagaaaaggcgcgggaatttgacgagtcgggccaagtcttcgacgccaaaaatgcaaacggagtgccgccatttgtgcgaggggcaaaacgcgtgcggagcccataaagcctccctgtgtcaaaagaggaggaaaatgtaaaatatttgtagaacccgctcagcagactatggcactaatacacatttatatgagggagaatgccatattttttctgtctgtgccattttgggagtcggtccaacatttatttaagtatttgccatacttttaaaggttaggtcaatagaatataggtc

SEQ ID NO: 34488 - DNA, 943 bp, Heterodera glycines
agagagagaaaagggaatgcagagagagaagagaacgcgatacagaatgagagagggggagagaaacaaagagagagagagacaaaggaagggagagagaggggggatgagatagagagggaaggaaagatagatatgtagagagaaagagagggaggggtggaaagggagataaagagaaatgatattactattctaaaaacaaagaaggattgatacaaacaattgggatgaatgaataaatgttttaaaaaaatcattttaaatattgatattactatttaacaattaaaataaaaaattttattttgaaaaataaattaataaaatttaatagtattttacttaaatgtataaagtttcatttaaatatttctactaacaataatgataataaaatttttttataacaaattaaatatattttaattgctattggcaccaaactaattgtaagtcaagcagataaaaaaacatataaaagcaatttgttaagaatgttaccaataatataacaacaacaaatataaaatattttttaaataaatttatttaagtttctaagaacaatgaagaattttacatttagcaaaaaacaaacatttttattcatgatggacactgtctaaattaaatgactgaataacttacacctgcacatgaaatgagattaaaatagaaaatgaaatgataagagaaaaaagagaaacttccgctaattttaacaaagaacggggatatgcaaacttgagattaaagaataaaaaaaatgatatataataatcattttatatttttttattctctatgttccgttttaccttcattgttctttaaacttaccaatcttttttaaccaaataatttgtgttcttataaaatgacgtatagcaattaaaaatttatagaaatggagaaaaaaaatcttattaagttaatatta

SEQ ID NO: 34489 - DNA, 560 bp, Heterodera glycines
ctctttctctctctcttccttttacgccccgcccctcccccccggtgcgacgggccaatcgtcgcctcccatcctcagcctttcaccattatctccccttcccacccgacgtgtgggtgccttccttccttcattcattccctccttatcatccctccctccccctccttcctccccaaaggtgtcactgatctcaccccttcctcttctcccccccccctctttttccccctttcgccccttgaaatatttcccgctttttttagcacttttcttcaacgacacatggctaatggctaacggcgccaacaatttcctagagggctcttcattttccgcttggccccatcttccactgggcaaagatgaggaaaagctgagcaatggtacggcgccgtcccccgtgtaaccccccaccgctttacgtcccgatactccttgcgtcccatctttacactccgtagccagctacggcctcctcgtccacttcctcctgcatctcgacaccggccaacgactcatctttggacctaccgtcctcctaccctcctcttcccccg

SEQ ID NO: 34490 - DNA, 885 bp, Heterodera glycines
  unsure (1)..(885): unsure at all n locations
ggggacctctagagtcagcagaaagtgctcctntttcgagtccaaatctggagttcccccctcgtcaaaaaccaagggcttccttctgctctgtccccgtgtcaaagctcaaaacaaaagaataatcaatgaacaaaagaatcgctgcgccgccattctctgcccaaaaagatgaaacatttgttagcattaatctccccccccctctcatcagtcgcattgcgattctcaagtccgctcagagtgagctcttccgcagaagtatttgttttccctgcctgagacaaagtaataaaaccgagcagaagtgtgaggacaaatatgaaaaaccgaggaggaggaggagggagagtaatgtgttaaatggaccactctttcaaatggtcggcacaccccaaaagagtgggaaattggaaaagaaaaagcccggctgatagcctcaacaaataatgaataaaaatttagaaagtgaaggaaaaatgtatccttccgaatccgtagaaaataaaaataaaaaaacaagaataaatggaggaaaatacaaaaccgaatgagtggataatgggaaataaatatgtgaaataaggaagaaacggtactcgtgtagtttacaggctactttaacatacanttttcaaatcccttatataatggtgttttagaaattaatgaaaatgagttttaaggggttttcaaggtcgctgatcacgaatccgggctcagatcagcgctaccattcattacatgagctgtacaggggacaagaattgataggcttcctgtaccaataatactatcattggcaagatgcccatgaggatatcatccatacactttttaaattttatacttcctataccaaggttaccctcatgggaaagatgc

SEQ ID NO: 34491 - DNA, 1170 bp, Heterodera glycines
caaattttctgactaaaaaaactgaaatcaattattttcgaattacgtttgcaatgctatttcacaaaatttctatggatgttgtgggcggtccggtccataagcgaaaatctaaattttcttaaaaaaattttaaattaatgttcttacaattatggattttcttttattaaatatttaaatgctaatatatctgcgctcaaattttgtatagatatttcattatgtcaataactggccaatttatgaatatttatccgtttttctatttctcgaaaataataatttttatttgttttttatttattatatgtgtttttgtaatttacgtttttcaactagaattggaataaacattaaaataataaataaatttacttattttaaagttttaagagattaaaatataaccaaggtttgcaaaagaaattcatataatatgttttatgcttttaattataaaaaaaatattgccacaatgagaatgattaaaattttattaatttatttttttaacattttctgaaactatacaatttatattttatttaaaatgataaatattttcagattttgtaatgaaatttttttaatatatgaatttaagttaaattattgatataccattctttttattcgcattaatatttcattttaatgatattaattaagtataaaaatactttattctgaaatttatctttaatcaaaccaaaatatcctcgcagtgtttaattttttgttgttttagattattaattattttttaatattttcagagaacgaaaaaatgccaaaataggaaaaaactgataaaatgctaattttgagcttttcatgcaatgttcgcaatttaaaaaaattgtttttaataaaatatttatttttatagtttgccaatactttatttatttatgaataaaaaaagagaagggcaaaaccacttactctgacgaatgttcagataatatgccgtagagtaagtgataaatatatggatgaccaaaaataaaatcaaaatattgggttggtaaataagtcctgtccgttttttacattttcatttaaattactgttcttacaaatcgaagaattttgctaatattttgatatatagcctcaaatgtgctctacaaaattgcattaaaagattttggccgactttcaaaa

SEQ ID NO: 34492 - DNA, 909 bp, Heterodera glycines
  unsure (1)..(909): unsure at all n locations
gtaagagcaaaacaactctgttttcctttctttagttgttacaagtaacatgaaaaaattaataagtaacatgtaacatttaacatgttatgtgttacatgttacgctaatcaaacctacaaacagcaaaaactagaaactttaacaaacgcacagctaaagtattcgtgcatatttaataaagcatagcataacttacttcgtgatcaaatcgtaaaactcttccggtgggttccatggcagtgagccatcacgatgtgacggaataagttggtaaagcttccggctatggtaaattgcttgcacatcggcacgatgggaaggcaaaataattttgcgtgtgtgccaaggagttcgggacgattcgaccggacaggcgcctatcggcaccgccggaccctaaaaatcctttattttcttaaaatttttgattaaaattgcaaattggccatttttgtgggcaaattctgttagcttatcacattaaaaattacaaaaattttcccggcggtntcttttaacggaataattgcagtggtgaagccaaaccttaaaagcacacaacctcatgtaaattgaaatgcttttttctcaaagccgaacaaccctgcaaacagtttcgggaaaagagggggcgaatttaagaaacttaaaccttgccaaattgacgggcaaaatgatacggagctgaatcatcttacaaaacaatccccaaaaacgattccgcgagcaacagaatatgccaacaaactccgaagacattttgacgaagagatgaaaaatgcacgaaactgctaccgaaaatgccaagaaagaaagggccaaactcggaaaaacccaattgaaaacgcgaagaatcgaacaacccacagacgatccgagagatgaacatccccacaaattcgccac

SEQ ID NO: 34493 - DNA, 1394 bp, Heterodera glycines
  unsure (1)..(1394): unsure at all n locations
aaagaggtacaatagtgattaaaagaggaagaacagtgcttagaagaggtacaaaagtgatgagaagaggtacaacagtgatgagaagaggtacaacagtgtgagaagaggtacaactgtgattaaaagaggtacaatagtgattaaaagaggaagaacagtgattgaagaggtacaaaagtgatgagaagaggcacaacagtgattaaaagaggaagaacagtgattagaagaggtacaaatgtgatttaaagaggtacaaaagtgataaaagatacaaaagtgattagaagaggtacaaaagtgattagaagaggtacaacatggtttaaaattaaataaataatgaaaagtttttataaaaatcgattgcattttaatttaaaatttttttataataaaatactctttttatcattaaatataattttgaaaattaataattgaatatttattttgaaatgaaattcattttttataaattcaaaaaataaataatgaaattaaataaattaattaaatatttataaaaatcttgaaattatttaaaacattaaaaataacccaaaaatacaaagaaaaataatgtacaccgcccggattcgaacttccccccccctcaaaatgatgcctccgaatccccaatcacacagggattctgaggtctgaacgatgtcaaaagtaaaatctgatcacgtattcgtgatcagcgtcataaaatacccctaaagacatgtttttggaatattttcggtgaaaaaatttttccacccaaaaatcctggtcacctccctatggtcccgaaaccaaaaatcacttttatttttataacaattcgcaaaaaagagataaaaatgtaaaataaaatttatattatagagaaaaaaattgcgaatttttgtagtattttacttttacagaatgacttttcagaagggagttctgaatttttttctgaaaaatctaaaatttccagaatttctggaataactttttttctttagaagatagaaatcccaaataaatcccataaaattctcccgatttttttgctatttttaaagctttaaatcacttaaattgaccgttcctccattgagttatgaattttcaaattttagcccaaaatcctgagggtcaaaaaattgccaaatatttttgaatttttaaaaaattctaaaatttcctaaactgaaaattaacatcagattcgtgctcagcacatcaaaataccccagaaaaatatttttgacccccattttcaacccaaaaaaaattttcgaaaatttctaggggggctagctcgaaaatttttgaaaattcccgcaatatggcacaccattcgatagagcttaaaaactctacaatttgccctaangagtttttcgataaaa

SEQ ID NO: 34494 - DNA, 751 bp, Heterodera glycines
ggggacctctagagtctttattccaatcgaccacgttaattcattctctatacccctcctggcttatttcatgaaattatatataatttaattttacataaagaggcaaatttttacagaaaataaatagacgctgactaattagctaacatttataaagaaagtagaaatttgattaaatgcatatacaaaatattacttttttaaaatttgtataaagttcctagtcgtatgtgctttgcgttggttggttggcgtgggtgactgtggtggttgggccgtttttgcgatattatggctggaaaaaagatgcgatttcgctatggggagcgcggccgtctgggttcaagtgcttgcttgcgcttgtgctcggcattgaacggtgatggctgctgctggggtgccacctttgtcgtggcctcagtttctccagcgattggcagctgtcgaaatgaataaacatgcagctcgtctgtgtgttaaagaaatttggcgagttaattgacttgtgtaaatgtggcctaaggcacaaatgctgtggggaactcagcactggggatgctgaacctaaagttggtggtggtgttggtatacgagtgagtggcgtattgccatggttgacaagccctatgagttcgtggatcggaactccttgcctggggaccagtgtgcttgcattcgaaaaacacgagacataagcgcccgaaggcttggcctgaggaagtgcctaaaccggaatccggagtgctcg

SEQ ID NO: 34495 - DNA, 967 bp, Heterodera glycines
tctatggaagtcgttggccccaaaagcggcgttgcatttcggacactttcgccgccgattgtcatagcgaaggcggatgcattcaaaacagaacacgtgatggcacttgtccagaatggcatttttccgattcactttgcaacttggacaggtcagagactccttcaaaaattaaattttgaaattatttgctttcctaaaattctttcgtttctttgtgttctccgttatttactaaccttcaaaatgcgattttcctcctgcagcaattcgtccacattttcgtacttttccattctttttgctcggtccaacttccgtttcaacgaacttttctcttcctcaagccgtttaattttgttggcattcgcttcgtatgaggatgccttttttattacgctctaaaaagggagagaaaatgaaaaggtattaaatattttcgttttccgtggaaagagacttcgattcatccatcaccactgataaattttggccgaaatttttacgaaattgcccccccccctgtccacctatgtttattagccaacctcgcgaagttcagtgaattggatgtccaatcggtccaatctcaagcggaggtccgttgccaattgtgaaaattcaatgccctttttgcgcaatgtttcattgttttggtctctgatcctgaattgccttaattagcctttctcctgcatagctttcccaaatgcttgcctcaattcgtgctcaagtgtcactcggttttcggtgagtactctctctttctcctccaaccgttggcaatgtaacagtttggtggccaattggttctccaacgactgaatgttttggtccagcagttccttctcgtccctcatctttttctgtgcttgtgtgcttcgaatgcgttcgctcatcaacttcagatttacgtcgtccttttctcgcaattgtccactaattttttggtgctgaaaagtttaaa

SEQ ID NO: 34496 - DNA, 1727 bp, Heterodera glycines
  unsure (1)..(1727): unsure at all n locations
gtcatttcgctntaattaataaaaatgtacaaaacaattctctaaatgggcttaattttgccgggacttaagtcccgctctgcttcaatttaaattaagtattcatagactatatataatttaaaataatgaaactccctttttttgngcagtttaattaaagtatgtttaaatgaggtgtgtgtacttattctaatgttatacagtatacgtatctcccgtcgaacattttctttgttggccttgaaaaagttcgctcaaccgttaaacaaaccttggatgaacagagtacaaaaaatgcagaagtggcggaagcatttgcgctgctcaaaaaacaccgcactcaaatggacagctgcgaaagtgtcggcacaaccgacgcggaaggggcagaacaaaagcagaacgtaagcaagctaatgattaatttgtaagatgaaaaaatactctcagaagtattgctaatacaatataaacgagctggggaagttaataactttagcactaaaaacaatttttattttggaacttaaaaaaatattggttttaacaaaatttaaaaattcaattattgtaaaatggagtaggtcggtaggtcacggtctaatcgaaaccgaaaaccgggctatttgttcattacctgggatgtatttaaagtatgttgaaattccgaaatagttatgtatgtacataagttttatttttaatattcttctaaaatatttccaaaaattatttagttatttattctctaaaattgcaatttttataaaaatctgttaacaaatagagccaacctttcttaaaacagttctcaaaatcgaaaaatttgttcagttttttggaacaaatctgttaacaatattntgatacatttgtattaaatatattaaaatttggttttaaataaatccataaaataattattgctggtgcttctttgttcggccaattcatttcaatttcatttggcccattaatcactgcgtattcgctcgacataggcaatattcacctacacacgtgcggcccgtccattgttagctgaagcaaatgcacagctacacaacattactatgacaaattccaagaacgaagacatcaagaacattgtacaataatttatttattttttgtttttataaatattttattaagtacattaaaatttctatttttttctcagattgttgaattgaaagatagtattgttgggtcgctaatcgagttgcgcgatatcgataaatgcgttgaaaaaatcatgacctcaaaggagtcaatgaacgaggaggacgaagtcaatcaggtcctttttctgaaaaatatacattatcgttaagattagtaaaatctacaaaattcaaaaattgtttttccagattaattggagttgctgggatgacgcaatttcgtgctttcacataacctgggaatattcgattttgtattctttaaaaagagtaagtaaattctgacaataacaaaaactttggttggctaataatgttaagtgattttttaaaattattgtctagcagaatccgaggcagtgatattattacccgttgaacattcttgttctcgcaatttgcatgaaattcggcaatttttacactgttaaaaacaggggttagggtgacaaaattgaagtagggatttagaaaagctaaaaaaatcctgcatactaaaggttattcgttcaattcccttgtggaacatttttatct

SEQ ID NO: 34497 - DNA, 605 bp, Heterodera glycines
ctttacaaattttaaccagcctttcctcccatggattttcccagggggataaagccggaataaattcccaaagaattttatttttagttaaataattatctaatttcgtttcattttttatatttgtgttttttggttcgtacatttctccagcctttgcggctaatttaaatgtttgagcattatctgacattatactttttggtttccctcgtctgcttgcgaatcttcttaacacatgtaaaaatgtttctgctgttaaatcaaacactggttctaaatatacggctcttgttgtaagacaagttattaaaacaatccaatattttccacttggttcacctttattttttgatttgattactgacggacccaaatgggtcggggtcgttttcgcgtgggccgttttcgcgtggggcgagtttttaaactataacttttttcattgtcaaccaaatccaataatcttggtatcattcgatagccctaagtgttctctattagcctacaaaatttggaaaaatttcggtaaggttcataaaagatatggtcagaagagttcaataaacgaaattttccaaatttttttggctcgaacttttttt

SEQ ID NO: 34498 - DNA, 858 bp, Heterodera glycines
tttacgtgtcagagggtgcgcatataagcgactcgctgtgctcgcacactgcatttcatatagctggtaatttatatctctccggcataatacagaaaaaatctctatctttttttttggaatattttacgtgtcaaagggtgtgcattaagcgactcgctgtgcttgcacactgcatttcaaatagctggtaatttttatttgtccggcctaatccagaaaaaatcactatctctttttttggaatattttacgtgtcaaagggtgtgcatttaagcgactcgctgtgcttgcccactgcatttcaaatagctggtaatttttatttctccggcctaatccagaaaaaatcactatctctttttttggaatattttacgtgtcaaagggtgtgcatttaagcgactcgctgtgcttgcccactgcatttcaaatagctggtaatttttatttgtccggcctaatccagaaaaaatcactatctctttttttttggaatattttacgtgtcaaagggtgtgcatttaagcgactcgctgtgcttgcccactgcatttcaaatagctggtaatttatatttctccggcctaatccagaaaaaatcactatctctttttttggaatattttacgtgtcaaagggtgtgcatttaagcgactcgctgtgcttgcccactgcatttcaaatagctggtaatttttatttctccggcctaatccagaaaaaatcactatctctttttttttgatattttacgtgtcaaagggtgtgcatttaagcgactcgctgtgcttgcccactgcatttcaaattgctggtaatttttatttctccggcctaatcccagaaaaaatcact

SEQ ID NO: 34499 - DNA, 1309 bp, Heterodera glycines
ctcgtcataaatgctttcactccgttcgttaccatcccctttaaagcgttcgtctccgccatttgttgcggatggtcctcgctgactgtgattcgacggtctttcgccaaattcgggtcgtcctcctccgcctctgccgcgcccgaaacgttctccgccgtctccttcgcttccgcgaccaccgcccctacggtcaccgtaactctctcttccgcgtccgttgttttcggcatttggccgggcattgcccaaaccaccattttgacctagaaattaggataaataatacaaaagaacgggggaaaaaccttcggagttcatgccacgaccacggccccgcccaccaccacgcaaaatagtgccaatgctcggcggatcattcgaagaattgagttctattagaataaaaatgaccacaattactctcaaatttacgggaatgacagaccaactgcattggcaccatgtccaaaaccgcgacggtctcctggaccgagttctgtgggatgaaattgaaaataatccaaataaccacacttaaataaccgaccaactgcattggcccctcttccaaaaccacgactcgtcgttcctccgcctcctctcgccctgctaccattgaaaacggtcgtcgagtcgaaggtgaccgatttgggtggcgaaatctccgcattcactggtggacgactgatgttgttgttttgtgctggtgctaaccaccaaattatgagtgtttagcactgaaaacgaacctcctcttcccaatccgccgcgcactcctcgcgtcccacgcccagtgacggaagcgacacgcggcacagaagcgcctccaaatggcacaggctgatcggcgatgggaagctgatgttcgccttcattggtggcagttccatttgctttctgcacatccgatgctgcgtcaatgccgttgcaattacgcaaaattcccctcgtcggcacgttgacaatgggcggctgctgcgatggctgagagtcggaaaaatcgatgatagttccttctaaagaaaacagaattaaaacatgaaataaacggtttataccgtttagattagcctctgaaattactccaagtccatcattctgaagatgagtcgtcccattctcagtttggcttggggcaattcctctgccccctctgcctcgtcctacaaaacttattgttaataacttaatgtggcaaattgtacacaccaaaacctcgagacccagatgacatcactacgaattttcttgacgattttccttgcaagagttttacgaaaaaattggctaaaaaattccaaatttt

SEQ ID NO: 34500 - DNA, 394 bp, Heterodera glycines
  unsure (1)..(394): unsure at all n locations
caacaaatggccgtcgatcacctcggccgggggacagccgtaaaggaaacggncggnaccgccaatcaacccgagttttcctgcgattttgctgggctttaacgggattagcttattttttgtccctaatattcttttatgtctgtctttcttttctcgcctccctcatctctctctctttttgtgtctggcttaattttgattgttcctccggacccaacaaatgctttaacccccactttgtccatgcttttgctgatccgatcagtttagcccattcggtgttttccgggggcgtatgactaagctgaacaacaatcgattgatcgacccgctcatcgaaatttcttcattaacaatatttttaattaattaatttgtttatcatataatt

SEQ ID NO: 34501 - DNA, 860 bp, Heterodera glycines
atttcttaatttcaggtaattaattttttttatttccacaaaatctccccaccccaaaaaataatggcgccgaacaacaaaaagccgccaacgccgacgaaaaaaacgtctcgcgcttcttccagccaattcgctgcttcttgcggcaccgatggctttgatgactgtccgccctccttggcttcttcctcgttacgtgccattggcttgtcctttgtccgtgccaaactccgatggcgacggttggacgaatttcggctggagtgccgtcgggctgtgatcggatgggcattcatcaacgaatcgttaaaggttcatgtgctcgacacggtggaagatctgtgcgcggaactgagccgatggagtgaataattaaaattataatttattacaaataattaatatttaaaattaatttaagaaaataactgttagtaaaatttatttcccattattattaagatttttaatttataattttttttattttaatttaaaatattaattaaacagtaaacaatacgcatattttttattattttaaaacatattttaattaattaatttaaatttataaagtgtttaatttaattatgtttaaataagtttattaaaatgtattttattttaatgtaatttattttttattaaaatatacttaattttttctttttaattgttttaaaaatatataaataattaattaatttaatttaatttcagttttcttattttagcggaaaagcatgctcaaatatttccggaggaagaaaatcaggccattcgacaagccgccttcaaggcaaaagcacaaagtttggactcggcccattcgctgtacagtcaacgcacatttaaac

SEQ ID NO: 34502 - DNA, 1046 bp, Heterodera glycines
ggggacctctagagtctgccttcacactttttcagtggtatgatatgtgccgtctttgtcggttggattctgttgtggcacatttgctgaaagacaatttggagtggacttttccggaagcgattgaacacgaaatggacagcaataaccaaatcacattggcatcattagctgctgcagaaaatcaaaatttttcagcacaaaattcgaaaatatttcttggcggaaccattggaggtgatacacttagcctatcaatgaattaatttaaattaaaaacttaaattgtttaaggaatttttaaatattgcaaaaaattgtaagaacgtattaaaataatttatagaaaatatttggtatatttttttaaattcactttttaatggattcttgcacttacaataatttttttatacattaaaaaaatgctctaaaattaatttctaataaaataatttccaaaaattttttttcaaagatgtccaattggattcatccaatgggaagcagctcagacgagcgcgttcattgctgatgcggattaagctaaagtcacagctgaagcagccaattctgaccgcgtttgagcgtcgattacgccgaattgtaaaattattaaaaacaaatattaaaattattaattaaaatacaaattttttttatgtctcaaattggacacgttcggaagttgatgatgaattggaggtgcattacttttccgctcagcgctggaccgaggagatggaaaatgcattccgaaatgtgcatttaaaaatgttcgtctccgccgtgctgatcactttcattttgatgatggttggcacaaaacgagatccatatgaggtactacggtagggatgcagtgaattttaactacttttaaaccaatggcattttgccattttgagattggcattctgtgactttgatgcgattttttaaattactttgaaaccatggcatttgccattcagattggcattatgtgtttttgaggcaatttttcacattttatccattaatgaaagggtaggtctatttttttt

SEQ ID NO: 34503 - DNA, 1041 bp, Heterodera glycines
ttttacagtttactttcttaaagccaaaagattcgaaacagaagtattatttaaaatcaaaaataattttagtaaattttttacattttagtttcaaaaaaacaaacaaaaaaatgtgcccaattttgaaaatgaaatagtgcacaaaaagggagggatggttagacgaaaagaggaatttttaggaagggacgcaccccatctgatattcacccttttctgttccataagaggccaaaggcgactgtgttcgttgacaagtaattgtccaattaaggtacttggacattccacagtaaaatgtggttcaaattttggaactgtctcgcctcacggttgggaccagaaggctagtgttggtggtcgaccgacgtatgaagccgcacttgccgacgacgacctgtacaatccaaaacaatagtcagaaaccacaacaacaaaagggcgccgacgatgatgacctgtacaatccaaaacaatacagtcagaaaccacaacaacaaaagggcgccgacgatgatgacctgtacaagccgccgcaacaatacaatcaacagcagcagcggaagatgggccgaccgaaatcgtatgaagatgagcttgacgaagatgatttgtacaagccaaagcaatacaattagaccgagcctatattatatgtctatatgcttatgtaataataatatgtatgttttatgtgtgtgcgataacgagtgtaaatatccatttaataatgtgcaattctggaaaacatcatttgaccgcgatttgacaattgaaaaggattttcattaattgaaaggttttataaagctgtaacggaaatattgaacatttttactgaaaagtagtcaaatattttagggtttatctcaaattttaacctaaaaaaacattttcaaaactattttgttaaataaacaaaaagtcacaaaaaatgcagaaaagttatgaaaaaataaacaaagtcacataaaaatgccaaaaaagcaccaattaaatccaaaaaagtcctgaaaattaaccaaaatgtaattaaac

SEQ ID NO: 34504 - DNA, 956 bp, Heterodera glycines
attgacccttttgtggcccaattcgaaaatggctgctgctgaccaaatggggaaaaacatagcaaaaggagcattgggaaaatgaggaaggctttatatgaaggcgatgtcgtgctcaattttggcggatagtaagaaaattctcgtgcttttgaacttccaacttgtccaatgtacattaagcgaatcgcaaacatttaattggttgacggtgaattcgtaccaacttcaccccaccacgcccgtactgaagtgccggctcagtcaggcactcgaacaaattcagccggccatggccgtgggtgtccagccagctaatctgcacaagttcaactcaatttttaaacggactatcgccaattgggttggttgcggaaccctttccttataaagaaagatattgccgagatatggcttttcctttttacgtttggttcggaagcccactgtcatttgttatctcgcctttgcttgtttattattccgttttttcagtttgtccagtcgagtgcggttgactttctccaccttttactcgtctgcatgcgatggttgtgccgagaatatgaaatcccagcccgttacgtcatttcaattcacgacgaagtcaataagaaatctcataattgttttaccacatttttcaggttcgttatttggtcccggaaaaggacaaatatcgctgtgcgttggctctttcactgagcaatatgtatgtgaggtaataattgtttgtcttctttcatttgttccactgccaaattcagggcagcaatttctgaggcgttgggcatacgggaattgcccagggtattgagtttaattatactctttcggtttgtgctgtaaaatccttaattgtttttcagtcggtcgcctttttcagtcaggtggacattgactcagtgctccgcaaggaagtggacttggaatgccggacgcccgatggaaaaaca

SEQ ID NO: 34505 - DNA, 1284 bp, Heterodera glycines
tgtcgcgaaagtcgcgacgagggagcgatgagaaacgattttattctgattttttgtgtctcacctttcctcctaattttgaatgttttttctttttcctaacgtttccccccattcttctctgtccttcacccaaccgtttccccctcttctagtttgccaattctttcccccctttgtgctaattcacccgccatcctccgtccattcaaaatctgcaccgatttctcttcgccttctctctccgatttcgtccctttgtccccttttttcttttctctttgtattcattggccaactttcgttggcatctgctgctcgcaccctttttttcttcttttttgcataatcacggcccatctcataatactttgctccctccccgttctgttggtctttttttaagtgttttcgtctcccccgggcggctcacttccacactttatataatcactgctcttcttctccccaatttttttccatcttcaatgccgattgcattaaccccctcggccctttcctctcgtgtcaaataaattgttgttggtcgaagtgttggtgggatcagggacggtagagacgggaggaacacacccccctctcgtcactcacaccgcgagaacggcattccgtctgcccccccccctctcctctcgcctcgccactctctcgccttcagcgtcgccgcccagtgtggcgagtcttgtcgtcctcttcaattgaccaaatccctcccccagtttgtccccccttcctcgacaaactttttggtgccacgacccgggagcacaaacccttcgcccttcaattcactttcgaccatccgtcactcttctctctgccgccagccgaccctttaggctcccggcaactcaacccttcgctgtccgccgaccatttcaggctcccggctttcatcactcaactctttgtcgccagcccccctttaggctttcgacaagccctcaattgagtcgtcagccgtccttttaagccgaccctttaggctcccggctttcaccactcaactcttatcgtcagccgtccctctcgggctctcggctaatctccactcaacccaccaaccgacagccgccttctctaggctctcgaccaaccaagcccgactcttgcgtccagccgccaatcctagactttcggaaatgtcggaaatcattcgtcaacgtctcaccgccgaagtccgaaccctttcggacctcgtcaagcgcctccgacaaagggtcgggaggctcactgaattcacccaggatggcgcccagagga

SEQ ID NO: 34506 - DNA, 796 bp, Heterodera glycines
ctattccggaagtgattcggtctccccataaatctggctccttcggatcggggggaatgccccgaaaacaaaaaatcgcctttttcaagtgtccgtttggggtactcaaacaattatggggagcaaaaatccaacgcagaattaaagtacaggctatagggaagctattcccgaaggattcggcctccccataaatctgggcgcatcggttcggggggactgccccgaaaacaaaaaaatcgattttttcaagtgtccgtttggggtactcaaacaattatggggagcaaaaatccaacgcagaattaaagtacaggctatagggaagctattcccgaaggattcggtctccccataaatctgggcgcatcggttcggggggactgccccgaaaacaaaaaaatcgattttttcaagtgtccgtttggggtactcaaacaattattagaaatttttagatttttattcatctccctttttgatagtgaaagcatctgagtgcctaaaataacttgcaaataaaatttggtgcgtttcagagcagtttgtgaaaaaatatttatgaattaattttgctaaaaaaataaaatagtgaagctttaaaaattaataaaaaattttaaattcagaattactggagttagcatcatagcagtgcttttccttgtctttttgatgccctcgcaaaatctggttcgcttctgatcagtttataaaagaaaagttaagcctaaaatttttcgcaaatttaaaaagcattaaaaatttttagattttttatcatctcccttttgat

SEQ ID NO: 34507 - DNA, 979 bp, Heterodera glycines
ccagcatttccatcactgggactcaattctcttacatttcaatcactgggactcaacacaccagcatttaatcacgaggactcaacacacctgcattccaatcaccgggactcagctctccgacattccagtcactggaactcaattctccggcattccaatcaccgggactcaactcaccatcattccaatcgctgggacctaacctcacctgattcttcggtatcgcaaccaccgagactcaattctcctgcattccaatcactgggactcaaatctccggcattccaatcaccgggactcaactcaccagcatttcaatcactgggactcaacccaccaacattccaatcaacgggactcaatccaccagcatttcaatcactgggactcaatccaccaacattccaatcaacgtgactcaatccaccaacattcctatcaacatgactcaatccaccagcatttcaatcactgggactcaacccaccaacattccaatcactgggactcaaccctccagcatttcaatcactgggactcaatccaccagcattccagtcactgggactctgttctcctgcattccaatcaccggaactcaaatctccggcattccaatcactgggacctaacctcacctggtccttcggcatcgcaatcaccgggactcaattctgtgacattccaatcactgggacctaacctcacctgattcttcggtatcgcaaccaccgagactcaattctcctgcatttcaatcactgggactcaaccctccagcatttcaatcactgggactcaacccaccagatttcaatcactggtactcaaatctcctgcattccaatcactgggactcaattctcctgcatttcaatcactgggattcaaatctccggcatttcaatcactgggactctattctcttgcatttgaatcactgggactcaaccctccagcatttcaatcactggga

SEQ ID NO: 34508 - DNA, 656 bp, Heterodera glycines
tgaaaatgaaaattccatgcttggtcatgcaatattttattcaaatcttaaaatggaaatatgtagaaataatttttttttattcttagtttcgttataacaccaaaatttagcaaaaaaaaaatcaaaaaatgtgagactttttttgacaataataatttacatattttttatggacttaagatgatgttgtggcacagtttgagttcattgtaaccagagtgaagcaaacaatgaactgcaaacacaagttgcgcaaggtaaattcaaatgtgtttctttttatttttgtcatggggatggtaaagaatttcggtaaaaaagcgctggaaccccggaatataaataaaacccggaaatccgacccaaaaactcccgaattcaaaaacctagatttcgaaaaaatgcgtctatttcaaaaaaaaaaaaaaaaaaaaatttttttttaagtttgtcaaaaaacagtatattatttggcaccgaaagatgtgtaaaaaaagatatatcaattaaattccgaaagtccgtgccaacaaaaaaagctcccgatttctgaaatcggaattcgtaaaaaaatgcgtcaaaaaattcctcgtatttaatttgttttacaaaaattttgttaggaaggaaacgtcgcagaacttaacgatggt

SEQ ID NO: 34509 - DNA, 1040 bp, Heterodera glycines
caattttcataaatttcaacccctatatttgaatcttttaaccctattttcgcccttattttgtgaatttttttgcccctatttaggtctcaatgttgatttatcgcccctaaaaatcctcgtccttattaatatccggtcgtgcactaacatacttgatatagactgttacaatttctaaaatgaattttacctcaattattatgccaatgcctcgtacaatatcatatgtacaattataatgctataacaggcactcgcgcaaaaacgtcctagagataaatgaccgcagtattgtaaacatgttttttctactaaaaaatataaaaatatatagttctcgtcctgtttaaatttgggaataattaaaaatagtggcatgttatcctgacgctgggtcagttaaaaaatttttccaaaaaaggggggggccatcggtagagtattaccatttcttcattaagaaagcaataatggaatcggaaaaagaatggagcaacaatcaaaagcttatagaccttgccaaaacttcaaaagctaatgtcagaggcacaattccaaagggcttcccttatttcacggtcaattttggtctacagcccgggtttgctcatgtggtcgaagatgaaagaaaatttccgttcaatttcgcgcaggttttccctagtcagtttaaacttttaaaacagttgatttaggaaatcattggaggaatgctcgacttgcctcacagccattggagaaaaccaaaaaagcagagttttgatcaaattatggagagaagaaacaaattgaaaaaaaattggacaaaatacgattggacagaaattgtgagaagagaattaaatgagggaggggaaacatactaaactttgtattttcacatgaccaatttaacaatgcaaattagaataattgttgacagcccataattagagctcgacctggacctggatccaggcctggatttttgtcaggtccaggttaaatgtggaaaaaaatccaggtccaggcaaaacacgaaaaacctggattttcct

SEQ ID NO: 34510 - DNA, 1225 bp, Heterodera glycines
  unsure (1)..(1225): unsure at all n locations
agtttaaaagggaaaaataaaggattttgtctgtcacaaaatgtggcagcaacancnggaattccaaccaaactctgaatntggttccgcgaaagaattttcttcgtgcctcgtaaaatgcattacaacgtaatgatgttgccaacaaaagcaaagagaagacagagcttttaaaaatactcattggtattatggataaaggggttttgttaatgatttaaaaaattaaataatctaaaataataaaaatcatgatcgcctacaaaaaacaaccaatttttattttttgatatcgatagttctaaatgatttatataattagcctacaaatttttaaaatttattataaaaagttatgataaaaaaatgctcgaaaacgagatttttaactccttcagcaggccataacctttttgaaaccttttttgaatgttaatcaaatttttttgaaatttgcagattaataaagaacattttgaactacaatatctaatgattataaacaaattttgagcatatgccttttttctgcgccttagtttcgatatattaagcataaatagctcattttccacttggtttaaagcttctaacttgcattttttgtgacttttttatacttttttgttgactttcatttttaaggcaaaatttgacttttagcgaagaaaaattccgaaaaataggtttaacttcgaggcggtacaaaaatttccttaccactaggactcaaatgacgagactgaaaataataataaaatctggcgtggtgatcttttgaaaatatttttttgttaaactagcaggttagcggcttcggcgcatctcccgctaggcagtacgattgtgttgtagaattatgaatgataaaaccgactattatggctcggccgcttcgcggcctcgcacccttctcttggcattttcttatggcacaactgggactcagttcttcgacattccaaacactgggactcaaccctccggcatttcaacactgggactcaacccttcggcattccaaacactgggactcagcccaccggcattccaaacgctgggactcaacccaccggcattccaaacactgggactcaacactccggcattccaaacactgagactcaacccaccaccattctaatcactgggactcaatccaccatcattccaattacttggaacagacccaccaccattctaatcactgggactcaattcatca

SEQ ID NO: 34511 - DNA, 473 bp, Heterodera glycines
  unsure (1)..(473): unsure at all n locations
caggggtgtgacttgtctcagaaaagacgagagcgagagtttggcgagaagcgagagtccccaaaaatacgagtgttggcgagaggacgagaggcgagagtttttcaatttttctgtagccttattttttacttcaaaaaacttcaaaatcgtatattaaattagggttacgggcccgggtatttgggcaaataccgggaccgggacgagaaaagtcaggaccgggaccaaccgggaattttccaagagaaaattttttttcaaaaacttccaaaaattttcatcaaaatgcatagattaatgataatttagacactaaaatatttctctatgtaaaatgattgagtatttttttatttaatggacaaaaaataaaaatcttatgatgttttttcgcgtaaatttgaaatattatctgactgctcaaaaattcaatctttaggggtgtattttcacccctcgtcccanaaaac

SEQ ID NO: 34512 - DNA, 565 bp, Heterodera glycines
tctcttgcgcttacgggagggacagaaaggtcgccctaatgggaaggaattgggcggattgacttgcattggggggaggggaggaggaggggtgtcattcacccaaagtgtcgtagttttcgtgcgttccccccccttgtgcagcttgcccatcattatcgctgacctgtgctctcaatccatgtttttgtgatgcttctgtactctgcacgtgcggtgtatcctttttggttgttctgcttacaccctgtgtagggctgctgccggcgattttgtcttgcgttcgacgtcgtcgccggtttggcgacgcctccagtggtcggatgcctggggcgaggaggcaccaccaccgctgccgcccatccgtccgcccaatgacttccgcccgctcgtccaccgggtcgccccgcaacgccatgtcgtgcaaaccggcgcgaccaaatagtcgccgagcgtgtcacgccttctccaactggcgacgctggattgcctggagacggaaattgcatgtttaacggtcaattaggggtccattactgccgattaaaacatcaggtgccgattt

SEQ ID NO: 34513 - DNA, 1801 bp, Heterodera glycines
  unsure (1)..(1801): unsure at all n locations
atgaagaaaaggagttgagtttgtgttggtttttttattaaggcacgattttacggcacacacctatataaaaaaaatgaagaatcacgttttggaacatcctcgaaaaaccggtgacacaaacacacactgacacagagaagttcacaaaatttgatggtgttgtgcctgtttatgaatggaggaggacgacaacatttttcgaaattttctggtaccctgagaagtctaaatttgatgtttgttggagaggagatgaggcttactaccatggtgccaaaagaggaagatgagagtggcgggcggtcccatggcggcacaataatttagtgccgacgaacacaaaaaaaatgtgttgtgtgccaccacatcccccacttgttgtgtttgctttaagcttgacgattactaccggttgcgcgacgcgctcaacgcgtttgacaagcgcaacccgcacttggcataccggggcagcggtgccgttatggttgcgcaacagcaaaagccaagacggaagcggtcacggagtgaggacatgcacaaggaggagccggaggatgatgatgaagaggatgaggaggaagaagcgacggcacggaagcggaagagaagtgaggaagcggtggatgaggcgccgcagcggtcgtcggatggtggggacgaggaaaagcagcagcgcagcagcaacaaccacaacatccatcgtcacaaacgcgagcaacaccaccaccgggaggcgacggcacggagcaacagcggtggcaaaacggcgacgacgaagacaccaccggcggcacaggagaagcggaagatgaagccgccgagaaagcatgccgataatggtggtggtgatgacgcagtgaaggaagaaaacgccgccactgacgatgtcatgaggagtggggcagcagctgctgctgatgaggctgaagcggcgcatgggctggaggaggtggacagcgttggtccgtacattaactcattcagtattcgaggcgggaaaggtttccgataaagccccaacatttcaaccccctccccccccccttctgaaagggtgcttaaattgctcaggatggctactttaagcagattttcaccaaaaatttctacctaatttatgtatttagcaaaattttttttggaaaatttgggtgaaggaggtgaaaaaaacggtttatgccagaaaatttgattttctctcctcttagaaaaatgcttttttttatttaacaggtaaacaatttgactgggaaggaggagaagaggaggaggaggatgttgaattgggctttgaccttgtagagaatgaccatttggaccatggaaatgacgatggcgatgacgaaacggttgtggtggctgtggtgatgcaaaacgatgacgaagctgacaatggtggtggtgaccaatcggttgctgaacatgaacaacaacaaaatggccatgatcaacaattgcaggtttttttaggaacgtgtaaaaaatgggtttttgatatttttggttgagaaattttaaaaagtcataaaaaaaccaatgtgttaaccaatttggatgggtctgtagccagggggggggaaaattcctcctcccagaaaatcaaaagtttttccaggaaaaattggcaatttttttttaatttaatcaatttttcttattgttaaacaaattcctattcactncaatttncaaaaaaaaaaaattccaccgccggacccccttatacctcattttttgaaatttgaccccanatggcanagcaaacattttgagatttcctttatcaaaaaatgattac

SEQ ID NO: 34514 - DNA, 629 bp, Heterodera glycines
tcagcttttcacttcatgatttttttttacatatattttctattcttacttattatttagtataattgggttttgtcaaaacaaaaacataagtgcccttatgctctatccttatttattcttaatattttaactttacagatgtgatatacaaaacgtcatatcgtgccaagagagacgaggaagacaacaacggtgacggcgattgattggttttggaagcgatcgattttttcttttgttaaaatattgatgattttatgattatgaatttaccgttttccattaaaataataagccccaggcttttattttgaactcgctaattaacattttataacaaatgaaaaaaagtattgcaatgcaaaaaacaaatgtgaagtttttatactaatgattattagggtagcattttattttcaaaaagtcgcaaagatatttaatgaaaatattgttcaaaataggaaatttcgagcaaaaaaaaattcattcatctttttctactaaaataaaaagataaaacgacgttgtcaaataataacaaaaaagagaaatccttcttttcagctaaaaatgattctgcctagggaggttctctgtaagaatacaggtcacgaaaaaaaaattaa

SEQ ID NO: 34515 - DNA, 884 bp, Heterodera glycines
tttatatggcttactgtaataactaccaaatgccatcccttatccatcaaatggtggtaaaagttcaaattaataagacctaaaacttttcagaaaccctaatgaccgttttctctccgtcaaaaaaaacccttttaaattggacataattttcaaatgcttcattaatgttctattaaatttcgaatacatttattaactaccgaacaaatgtgtggatttgtattgaccgaccggctcaaaaaattgccttatttttttaaggaatagcagcaaaactgacaaatgagacgatgatgagtaaaaggacggcgatgaggacgagcacgcaattacggatcacggaaattacggggttttgggccccgtaaatttaaacaaaaaaatcaacaataaaagcacgcaaattcacacaacctcgcacaataatatttatagggaaagaaaattcaacaattgcagataaaattgcgtcaaaataaagtaattgtgtgaatttgcgcgctttgttgttgatttttctaaaattttggtgtgttagcccaaaacgggaaaattccttaaattctgtttcttcctaccgtattaatttctgtttgtctctactggattaatttctgtttctccctaccgtattaatttctgtttgtctctactggattaatttctgtttatctctaccgtattaatttgtttctccttaccgtattaatttctgtttcttcctaccgtattaatttctgtttgtctctaccgtattaatttctgtttctccctaccgtattaatttctgtttgtctctaccgtattaatttctgtatgtggatctttaccgtattaatttcctgttttccctatcgtattaatttctgtatgtggatctt

SEQ ID NO: 34516 - DNA, 873 bp, Heterodera glycines
tccttcgtccctgcccatctccaacttccccatcactaccgacgaacgcgtccaaatcctttgtttccgtcccgacagacccaaaggggccgtgttttgatgggcgacggagtgttggagggcggttcggtgttcaaccacctgctcatccaaatccatcccttcaggcaatttgggctaatgaccgtttctcataactttcattatgataatcaatgattagggcaaatgatttttcactaaaattgacttttcaaaattcagaaagcacatttggtcgttgtgtgcgctgtgtcttctgctgtctctgctgatcattctcaacagtgtgttgatcatctccatccagggctcctccccttatcgccttgggttcgtcccccctttttccctccaattccctccctttagtgaccccacttttgtgatcttttccgaggtgcttgcttggctgctcattatggtctcagtcatcggcgtcaaattggtctgttccttttaggatttagcatatcccccttcccaaatctccctgtttagacttgcatgtccaccaaaatcatcgaagccaattcagaggcgtgtcggaggcgtgctggcgacgaagacggggctgggcttgcgacggcacttccctccgtttccattgaggtggatggagccgaattgatggaccatcggcgtcctttttccgcgccacattgggtgaacgcgtattggggccttgcggcggatggaggcgaaggcgccgtcggacttcctggcgtggtggagccgcagccgccgttcgacccgtctctcttcccaccgccgcccccgcgctattcgtccctcgggggtctttccgagcctccccccgaggcccatcgacct

SEQ ID NO: 34517 - DNA, 840 bp, Heterodera glycines
aagtatttctgaatccttttattgtttaaaaacgcaatttcaactaatttttgacaaaaaaagtcgaggggtaaatgataaaattgaaaacaggaaaataaagatttgagccacttgattattccaaaaatattttagttattttaaaacacgattttcggcaatcagaaaaattttaaaaagtggggtttaatgccgaggcaaaagacattaaaccggaaaaagcagtcggtggtttctcaagggcagcattcctctggattcggttccgaagtgataatgccaaaatgtgtcatcattttgaggggcgtattcgatggcgtcgtttccattcattcgtcccacgacatatacacaatctgaaaaagacccttatttgttagctcaacattttctctcaatgactgaccaattcttcattgcattctatttgggcacccaatcggtgtgcgtcgagaaagttttcgccaatccttgaaagaaatgcgagttcgtctcgtgtcgttggagaaacgtggcgagagagtgactcaatcgcaaaagggccaagactgacgagcacagaaggcacagccgccgtaataccatcgccaccttgaaaaattacggaaaaattagaccgacttattgaggttggaaaaagtttgacagactcccaagcggaaatgagaaaattgccacctccatcatttgacagtaatcctcgtcggcgctcattaacggcgtcgtgtcttttgaccgcctcagaataaagtcgggaacgctggacaagatcaaagtcgagagagccattctcgaggttggtgacatcaattatacacttgaaatgtaagatgcaag

SEQ ID NO: 34518 - DNA, 525 bp, Heterodera glycines
cgaagacgacatttgcctatgcagcagaagacgaagtcctatgattatgacaacaaaaaaaataggagaaattttgaaaacttgaaatttttacttaaaggaatttttttgcgtttttttttgcaaaataaaattgccggagacaatttatagcatatttaatgtttaaacagaaaacagtgttgacacaatttttagttatttggaaaatattataaaataaaagagaaaataaagcaaaaaggaagaaaatattcaacaaaagaatggactaaaattgaagaaaaaataacgaaaaaattggagacaagtcgaatgaaaatttatgaatggattaaagaattgggattaaatcaacgaatacataaaagctataaatcaaaaagaatggcaaaaaatttatgccaaaatttgcaagaaaattggagttagcctttcagtaattaagaaatggaagaaacaatttggagaagaattgttctaagaacagtagaagaattttttttccccgcatttttgccattt

SEQ ID NO: 34519 - DNA, 921 bp, Heterodera glycines
aattttatacctcacaaaagcgcttgcgtatgagacggaggggctgtgcacaatcgccattttatttcacagaggatttttatatttagaggttatcccagaaaaatggctatctctttttttgataaattttatacacatacaaatgctctcgagcatgatagagagggcggtgcgcaatagaccttttatttttgagggaatttttaaatttatactctatcccagaaaaatggctatctctttttttgataaattttatacacatacaaatgctctcgagcatgatagggagggcggtgcgcaatagaccttttatttttgagggaatttttaaatttatactctatcccagaaaaatgtctatctctttttttgagaaattttatacctcacaaaagcgcttgcgtttgagacggagggctgtgcacaatcgccattttatttcacagaggatttttatatttagaggttatcccagaaaaatggctatctctttttttgataaattttatacacatacaaatgctctcgagcatgatagggagggcggtgcgcaatagaccttttatttttgagggaatttttaaatttatactctatcccagaaaaatgtctatctctttttttgagaaattttatacctcacaaaagcgcttgcgtatgagacggagggctgtgcacaatcgccattttatttcacagaggatttttatatttagaggttatcccagaaaaatggctatctctttttttgataaattttatacacatacaaatgctctcgagcatgatagggagggcggtgcgcaatagaccttttatttttgagggaatttttaaatttatactctatcccagaaaaatggctatctctttttttgataaattttatacacatacaaatgctctcgagcatga

SEQ ID NO: 34520 - DNA, 874 bp, Heterodera glycines
cgggcgaatttgagcaaatgctttacgctgtgagaaaattatgtggcaattatggggggggggggaatagataattaatgaaattattaagaattttttacttagcaagtttatttataatgaaatcgttcattaattgtctctctgacattactaatgaagtaattaattaattaaactgagccaatctcacaggccgttgagcaggtcgacttggccaacggtcaccaggacgattttatgaagtccgaggcgctgctcaatttggccagggccaacgaacggttggccgagtttgagaaggccattgggtacgcggacagcagcttggaattgccgggcattgatcgacggagtcccggatatgcccatcttggtcagtgcttttgggagaaataaaacgaactgaaaccaaatggacacattggaatgaccatttgatgagctaatttaattatccagggcctatttcaattcggatgatatctcagatatgacgtgtcataaatcatatccacgtttcaattatgaactgacgtgccataagaacatatcgtatgcggaacttacatatgacggcacatatgatatggtatcacatgcgagtgtcatatcagttttgggctgtttcaattcaaatgactacatatgatatgattcctgtatatgatgcctacatatgataccaaatactgggataaatataagctaattaatgaaatttaggccgtttaaatacaaataaattaacaaaaattaataaaatgaaagatttttaattttatttctgtaaaaatattttaaattggggtcctttttttaggtgtagaaattaatggcaaatatcaaatatatttttctattataaaaataa

SEQ ID NO: 34521 - DNA, 1027 bp, Heterodera glycines
taattggtcatttcgtctctatttgcctcctgcttaatttgtcatcggtaaatttgggcaaaattcgtcgaaattgttcgtcttatcactgcactgttgatgatgctggttctgttgctgttgctgatgattttgtgcgtgcatcggaatgccataaacttgcacatatgtctgtcaaaatcaaaaatcaaatctccaaatcgatcggacaatttagccgaattccttaatctatttttgaattggtaatattttcagtcaaatcagtgcctaatcaataatttaaaatgagagaaactaataacagtttgctcgtctttaaatcctcctattttctgattagaaaacgaagatttgattactagagcagctacatggacttgatcatgtaccagaacgggcaaaacgtaattaaaattcccgtctttatggaaatcccgaggttgtggtgatttactgggaatctcggcggatggcgccgatcagatcagtgactaattttaaaatgaggactatttccaggattgaatgctctttgttcgagtttggtcaatgatcacggatggattcattaaaaaaaattataagtctcgctattttcgacttcatttttctgatatccatccatgaaaatttgatcagagcttatcagcggattttaaatttgtctccgatcactgaccatcagttgcgcacggcgcatatcgagccccgcttggctaagccgtacatgtgccgaatatggtgatggccctctgatggcatgtcgcgcatccgacggcggattgatcagctcttgccacagtgctggccaattgtggggcccatttgtggccaaaaagagcgcaattgctgtcacaatcactggcacaatggacgggacgagcacaatttggggctgtacatccaacattttggctaaataagactcaaaaaatacttagtacggattagaatttcgaaattggatgaatggcacatgtcaggaacgggattgtgtgggggacaactgggcgacatttcgatt

SEQ ID NO: 34522 - DNA, 1257 bp, Heterodera glycines
  unsure (1)..(1257): unsure at all n locations
ataacnnttccttgggtccaccactataaatatacntggaaactttcattttttgttcattcaattcttcaattgttacatgttacatgtcacatgtaaattaaaatccatataatattttttcctttgttcattcaagtctaatttgctacataatacatgtcaacagaaattgcctatgaatagattttaatttcatttttgttcattaaagtcaaaattaattatttgttacatgttacatgtaaacataacttccttgggtccaccactataaatatactggaaactttcattttttgttcattcaattcttcaattgttacatgttacatgtcacatgtaaattaaaatccatataatattttttcctttgttcattcaagtctaatttgctacataatacatgtcaacagaaattgcctatgaatagattttaatttcatttttgttcattaaagtcaaaattaattatttgttacatgttacatgtaaacataacttccttgggtccaccactataaatatactggaaactttcattttttgttcattcaattcttcaattgttacatgttacctaaatgtaacatataaacacaaattccctatgaatagactttaatttaattttcacgttttcaatttttaaagattgcttttattatatggaatccgtttcatcttctttaaagtcaaccgagggccagacccagcagcagcggaaggaaattgcaaattcttcagtaagaccaaccgagggccagcaatcggtccgttactttcgtcgaattcgcatttgttcaacttcctcggattcatcggatgagatttttaattcttttgaacgtcaggacaactcagtgattaatgttaagaacactaagcaattgaacatgatcaaatctcccgaggtaagcagaaataaaaacttgaaattctttggtatattttaataaaattgtttaatatttcaacctctatcaatgaaattaagaagaacaaaaaaggaaaatcgcgtgaaattattgttaggcagcgttctctctctccgagaagtgacattacaatattaaatacatcaaacaaaacatcggtttcgaaagcacctgcaggaaagcacaaagaaagtgacgatgctagaaacgcgcgcaagatcttcgttggcgggtttaattaattggaaaaagaagattagttaactttttagattatagcatacgacgacgaagaattcattaaatgcttacttctcta

SEQ ID NO: 34523 - DNA, 943 bp, Heterodera glycines
aaattgagcttgctaatgaatggttatggatcgttattacaggtggacgatgcggctcgcagcagggggaccagctgatcagcagcgaatcagaggccatcggacggatgagcacgtgccgaggcaccaccaaatcagcgacggcactcgaaaatgctgtcaaaagaaaagagaatttggcataaacaaaatgtgccgatgaagaaataaaccggagaatacgcaccattctgccgttgaagctgtaaccatttcggcatttgtgttgtgttttgaatgagtttggggttattttgtgccgacggagacggcgtcaccttccgccgtgccattgtcgaggcatttatggcggagcaaattgcaagtgtcagccaacgactgaactgtttcggcacattgtcaccagtccaatccgggaaatgaatgaccctttaagggagggggaggcattcttccgattaaaatgagaaaattaattaaaaattccgattcctaattaaggttcattaaacgttgagtgccattttaacaattcaattttaatttggtaaattcgaaataattgaacttttccaattattttcacctgttcgcgctgttccccgccattttcttcagcaaatttgacaacggatagtccaccgaaatggccaccacttgctgctgctgctgttgcgtatcgtcgagctcagaaatacttaaagttttgaattttatttccgatcagtgacagacgacgcaaatacggtagagaatacggtaccaggactcatgatgataccgtgtcttttggggaacacggttaaacaattcttcaatcggtgaaatacggtacttatggtccaatccccgatcgccaatgttgtccctttgttttttcacctggttgtgccttctcgactgatcagaatgagcacactctcttggccatcgatcgcattct

SEQ ID NO: 34524 - DNA, 1142 bp, Heterodera glycines
tcaggacgggcgcttcgcgcccgtttgtttaattttgtggggaacattcggccgcttcgcggcctcaggacgggcgcttcgcgcccgttttttaattttaatcgcacagggattccgaggtcttaaccatctctaaagtaaaatctgattgcatattcgtgatcagcggcccaaataacccctaaaatcatatttttggaagatttttggtgaaaaaaattttccactcaaaaatcatggtcacacccctgtggtcccggatgccaaaatcacttttatttctataactttttttaaaaaagtgataaaaagctaaattaaaatttgtaaaatagagcaaaaaattgcggattttttgagtatattatttttataaaatactttttcagaatggagttaggaatttttttttgaaaaatttaattttttaagaaattatggaataacttttttattttggaagatagaaattccaaacaaatctcataaaattctccttattttttgctatttttcaaactttattccactaaatttgaccaaaaacgaagagagttatgaattttcgaaatttcactggattttccggggctcaaattttgacgatttttcaaaaaattttaaacaccttccaaaaaatctgaaacgcaaaataaagcgtatatacgtattcagcacctcaaattatgccataaaaatgcattttagctaatttaggagtaaaaaaatttttcgtgaaatgcaaaaccatggggtcccccctttggttttgagtttcaaaatcacaattaattttataactttttttaagctcatggtaaaaacatgagataaagcacattagattgggcttaaaattctctacaaaaaagctcttagacgattttttgataaaatcaactccccacgagttattgcgccagaactgaaattgaggcctagcaaccaaaaattttctatttccaaaaaatttttgaaaaatttttctgaaaatgacaccaatcgatagagcatgaaaaacggttgcttgaaagtggtctccgttttccccggaaaaatctataaaaaatcataaaattcaaaaacggaaaattttcgatatgaggctagctcgaaaatttctgaaaatttcagaaatccaa

SEQ ID NO: 34525 - DNA, 885 bp, Heterodera glycines
  unsure (1)..(885): unsure at all n locations
aaaattaaaatgaaaataaaacaaattttaatagtgtcatccaattttaaangaaggataaaannggaggggagggccctttgatataattatttaattgatttatttaaatgatttaattttagttggtttttgaaatttgaatataaattaattaattaaagtttngataaaatagaaattattttaaaaatttattgtggggtttataaagatgtattgtgtgnatgggaattntgaggatagtatatggaagtaataagaatatnggaagggaattaaataaattggaatagtgagaaaaggggtgggggatggtattgtgaanatngattngttgagagtgtgttaataatggaaggagtagggtaaattggtgggtggaaagagttggatgntgaattagnaaagataataaaaaaaattaattagtggattatgggaagaaagagagagaaaaagagagagatgaaaaaagagttaataaattataaacgaaaaacaaattaattagactaatttaaggtgaatcaagtggtcgaaattgcaaatgtttcgcacgaaggaattttgcacacccggcaattttacgatgtgatcgactcaattcttattgcctgagtaaatgaccttatttgttagtgattgtcggacgacgattagtaattattttattttctgtaaatttggtaaagataatttggcggtaaaggcgcctgagggaataagcgaattggacagacacctcagacagagcccgaccatttcttacaatttttccaacgaattcaaagaatccaaatatgccttttcgatttgttcgatgaaattgtcgccgaggtgtctaagaaagcgaattttttgaaataggatgaggttccacta

SEQ ID NO: 34526 - DNA, 926 bp, Heterodera glycines
aaaaccaaattatttttcattttaattaatataaattttttttaataaattttttattaaaaaaaaattttttttacattatagtctattaaaaaatctctctcatttaatattatatttttattatttagaaagaaattgttttaacattttaatttattaaaaagcgctaattaatgttcaaattcattaaaaaaatttttttctctaaaagcatttaaaattatgctattaacaggaatcttttcggcttctcaacaatcaaaatcaatggaaataaataaatgcattttctcatgcgatttattgcgcctcttaaaaaaaatgtttttcccgtttttcattcattgcttttctatcgctgctgctgcttctgctgctggtaatgtaagccaatgtcagcgccagcagcagaattggatttatttgattgaaagagatttattagcatcgcgcggaaaaagcataaacacatacatattttaagttgaactgatttaatcctctcacagacatttttttccatttttttcctatattagagaccaactaaattatttaaaaaattcatttgtgaaatttaatttttaatagtttaaaatggaatttggccgggaacgggaattttggaaaagccggggaccgggctccctggttttgaaacggaaaaaaacaaaaacgggaaaatcggtaaatcacggcagggaaaatattgattatatggcccagaataaaatggtcaaaatatataccaatcaatagctctcggtctgtaatgaaaggatccgaatgaatttttttgcggaaaccaatccctgaagagttacagacccgggactgaaatggacaaatggctttgggattgaaccgtccaaacccttaaacgcatggaattgcgacaaaatgcatataaatcgattcgtcac

SEQ ID NO: 34527 - DNA, 945 bp, Heterodera glycines
ccttcaacaattttggtcgatttgttcccgagaaaaataaaataatccgaagagtgccatcgttgtagcgaaaaagccaagtgccaatggccaatgattccgaaaaaagcgccgctgttggcatttcatttgatgtttagggccctttgaagacaatctttgatcagtctaatgcgagagtttacataaattaatgatgataataaaaagaattagccaaatatcaatttaagttgtccattgattggccgagtttattcattagccaaccgatgcaattccccccacaaatgccgccgccctcatgcggcttaagcgtgcattgggcccattaagccgaggagaaaaaaaaacgtcgatgaaaatgcttttgggcaaaagtttaaaatcgtcgggaaaaaatccaatgaatgcgcaaatgaaagaacagaaagagacgaattaagttgagaaattggaacgggagagaatgttaaagatttaaatgcaaataattgcagccgaaaaatattattaacaaaaaacaaaagaacgaacatttagcaattagtggagatagatgaaatccgggaaagagaaagggacagaaaaagccgaacggaaaaagggaacgggattcccgacttttcaccctttccctgtaaaacccgtcaattttgaacgggaattctgccgggaaacggaggaaatttatcttttttttcaagtgaaaaaattataataaaaacatttccttttgtttttgaaagccaaaattaaaataacaaattaatcaaaaatattataatttatttttattaattaaaggtccgggctcggtacatttgaagaagagttcccggcatcgcagaatgacacgtcgtgaaatgaaaattttaggcccggtctaaaattacggtggaattttatttttaaaattccaaaatatttaaataaaaatacgaa

SEQ ID NO: 34528 - DNA, 738 bp, Heterodera glycines
tccgttcgattgtccctttgtgtcttttgtcccattcctttttgtcttgtccatcacctgtgagtccctctgctgtttgctgagtccgcccccgtacaaaatgcccgtttcggttagccgtctgttgctgctgttcatcgtgccatattgactgttagcagttgcattattatggccagcgcatggcggcgaatagggacaaatttggccaaacggttgcgaagagcacatttggccaccaccggcagcagccaacgaactcaaatctggacaaaaacacgaacaatttgatgtaaaagaataaggaatttagaagtttgcaatataatggcccgcaattcaacatttgctcgtggggcataaattaaccaattaaattttgtttttcatgtttcgacgaattgtgccgttttggtcgactttttcattccttgccaaaactttatcatttcaaagcgctacttagtctaacaattcaaaaaaaaggatcaataaaatattcttgtgaatcgtcgggtgggggggggggtgccctcccggctttatgcaagtctattaacgaacgaatgtcaagacaattcgggaaaaacaagacgtaaatgtgatgtaagaggggctttgtgtccttcaataatcaaaaatttattgttgcaataaaataggaagtgaagcgaatgagcgaagagcggagcctaaggcactgccgaaacaaatccccggtattgatcgcggagaaaa

SEQ ID NO: 34529 - DNA, 939 bp, Heterodera glycines
ataaaaataacatttcacggtgcgaaaaatggggtttgaaaagtttattttgaaaaaaagactttacaaaataatacccctgggagaagggagtgggaaacatgatttcaaaattttcaattttttctagtctaatctactcaaaacggttcagaattcgataaaaataacattcacggtgcgaaaaatggggtttgaaaagtttattggggaaaaaaagactttacaaaataatacccctgggagaagggagtgggaaacatgatttcaaaattttcaattttttctagtctaatctactcaaaccggttcagaattcaataaaaataacattcacggtgcgaaaaatggggtatgaaaagtttattggggaaaaaaagactttacaaaataatacccctgggagaagggagtgggaaacatgatttcaaaattttcaattttttctagtctaatctactcaaaacggctcagaattcaataaaaataacattcactgtgcgaaaaatggggtttgacaagtttattggggaaaaaagactttacaaaataatacccctgggagaagggagtgggaaacatgatttcaaaattttcaattttttctagtctaatctactcaaaccggttcagaattcaataaaaataacattcacggtgcgaaaaatggggtttgacaagtttattggggaaaaaagactttacaaaataatacccctgggagaagggagtgggaaacatgatttcaaaattttcaattttttatagtctaatctactcaaaacggttcagaattcaataaaaataacattcacggtgcgaaaaatggggtttgacaagtttattggggaaaaaaagactttacaaataatacccctgggagaagggagtggaaacatgattcaaaattttcattttttctagtctatctactcaaac

SEQ ID NO: 34530 - DNA, 1247 bp, Heterodera glycines
  unsure (1)..(1247): unsure at all n locations
ttagtatttttaatagaatctctaatttagcatttttttcaataataatttcataaaataataattctccaatattataatgggccattcaaatgtgttttgaattattataaaattttacgataatcatatcgcgggtgccgcagttcaattttgtatttctataataattagagaccgcattttgaggcatatgcctttttttacgcactagtttcgaaatattaagagcataaataatacattttccacttggtttgaagcttctatgttgagttttattgtcttttttgccttttttgggattttcatgccctaaaggccgtttttttggatttaaaaatttttcttttttgaaaaaattataaaatttttatttaataatctttaaataaaataaaattgaaaatgagtctctgtttaaaattatttttatctataaatgaatactcataaacccaaatgactgtttccctatttatagactaaattttacatatataataatatttaatgtcacaggaagtaattagcaaacaaatatagaaaataagttattatagaaaaaaaattctctagtgatcatcattataaataataataactagggacgtgaattttagtgaagaaaaatcccgaaatagttaactaaaatagtgagtaaaaatgccaaaatagtgacaaaatagtgaaaaaaattcagaaatagtgacaaatagtgagataatttgcataccaaaaattgagcaaaactaatttttattcactgattgcaattgcaaatgaggtacatttccaaattttgaggcaaaatacgcatccgattatctgataaaattgtttttaaatagagaaagtccgttcaacatcgcatgaagtgagaggggcgaatttatagaatggaattacggtggggggaacatcacaatcaacattttttccggaaagaatttggcaatttgatcaaacgagggattttttgagacaatgaaagagattttttggcggattatttctgatttctcgccggccacgttgtccaattggttgtgaacattcgcaaaaatttccatcgattccattatggacaatccttgtgactccaattttgcaatggcagggcataaattgccaaagttggtgtgaatgtacgcgaggtcttgccatgttgacaaagtgaagcacgactgactttctcttatgcatgatgcnatcagttgggtcgaacgagttgactacctaaatgc

SEQ ID NO: 34531 - DNA, 1119 bp, Heterodera glycines
catccattctttgaatttaatttaaaaagccaaataatttcccatccatttttccatttaattttcttcattttcttctaagttttcattgtcgttctctccctccaatttttcattgtacacattattttgtctcccatttccccccaaaaaaagtgtctccaaaaatgtgacaataatttatttatgttagcccctgggggcacgggggacgggcgacatttttaaattgctgctggcgactaacgaccaaaaacacaacaacagcacaacgccaacccaacacagatgtgaattgtgtatataactatttgctatttggggggattggctaatggccccccatttgccctccctcagctggaagtcaaagccaaagtcaaacggtttcacatccccccccccagggtcgaggttatatccaaaaatccaccgccgccacgttggcgccgtcggcaagattaattgctgggaaagcgggcggcggcccgcttcgagggcggaaacagtaaaaagaaaaagccgcttttgccccacggggacgcggacgactttagtcggtgtcaaaagggattcattcattttcaaagttggatgaggtataaaaagtggcggttgaatgactttttgccaaaatgggctttttgacaaaaaaaatgtcattagtttcttttaaatttgaaaatttttttattgtaagccttaaaaaaattaagccatcgtagaggttaattaattactaattaccctagttgggaattcgcaattatgcaatcctcgtcattaatgccatcagcagatggggaaaccaaaatttccatcaaaactccttagttcaatgatcaaaaatcggaaatttgaatttgatcggacttgcgcatattctccgttcgggtccacgtcgaacggcgtttcctggcgcaagcggttgaagcggaagtcaaagtgcggcacgcgatgggtccatttgagaagccaatcggcaaagttggtcctaggctgttgttcacccattggagaaggccagcagcaacagcagaatgagtgatggaattggccaaattatggcgaaatgattaaatcctacgaaaataaaaaatttaattggaaaaattttaa

SEQ ID NO: 34532 - DNA, 1225 bp, Heterodera glycines
aagaaaaccgaaagtgatcgaaaggggaaagagaaaccattgggaaagtgatcaaaagagggagtgatcaattggggacaaaagaaaaccgaaagtgatcgaaaggggaaagagaaaaaatgggaaagtgatcaaaagagggagtgatcaattggggagaaaagaaaaccgaaagtgatcgaaaggggaaagagaaaaaatgggaaagtgatcaaaagagggagtgatcaattggggagaaaagaaaaccgaaagtgatcgaaaggggaaagagataaaatgggaaagtgatcaaaagggggagtgatcaattggggagaaaagaaaaccgaaagtgatcgaaaggggaaagagaaaaaatgggaaagtgatcaaaagagggagcgatcaattgggagaaaagaaaaccgaaagtgatcgaaaggggaaagagataaaatgggaaagtgatcaaaagagggagcgatcaattgggggatgagaaaaccgaaagtgatcgaaaggggaaagagataaaatggtaaaattgcaaatggaaagtgaaaaaaggaaggtccaaggctaaaataataaatgatcaaccagttttagagattaaaccaaaacaaacggacaacaaagctttgccgaattcgacgaggcgacagtcgcggtccatgacaatgtgataagctgataattgatatttccattttaatcagaaactctgataaattacgcagaagtgccgccatgtcggctttgttaatgcgcaaatcccatccctcgtacaaattctgatcgatcagcgaaagagacgaatccgatgatttattgttcaaattttgcaccggttgaggagataaaggaggctaaaggaaagaagggagaggaaaagaggggatgatacggtgtgtcatttggggtacggtagtaaattttgagaataaactgtagttgatttggcgtttgtctatacaaattgtatattaaatttctacgtcgaattcgcattcaactccgttgtcggtgaccatcaaaagaggggcagcggaaggcggatggttctgcacaatttggcactgatttcctgtgccgtactcagttggctttggaccaactaggcgttcagttggccctttttccgaaagtgtcacaccgatcgtttggcccaccttccggggaattcctttccaacagcaattttcgcaaatgattactctaattacgaagatgacgtgctctt

SEQ ID NO: 34533 - DNA, 1065 bp, Heterodera glycines
  unsure (1)..(1065): unsure at all n locations
ttttaaaaaattttaattctttttaaacagcccaaaaagttaggcntcatatttaaaaaagtttcatcgaccctagcgcgctaaaatcgatatatctctccnaantttgcagncnttctccatngtaagggactaagttaacctgaaaaatgccaacgctgttgtttttaaaatttttcgaaattctgactttttcattattattattattttgcanaattaattcataaatattttttagaacgtgctctgaaacgcaccaaatgttaattaaaagttaaataaggctctctgatgctttttctatcaaaagggagatgaataaaatttttaaaaatttttaattcctttttaaacaggccaaaaagtttaggctcatattttaaaaagtttcatcgaacctagcgcgctaaaatcgatataatctctccaaattttgcaggccttctccattgtaaaggactaacttaacctgaaaaaatgccaacgcttgttgtttttaaaatttttcgaaattctgactttttcattaattatttattattttgcaaaattaattcataaatattttttagaacgtgctgtgaaacgcaccaaatgttaattaaaagttaaataaggctctctgatgctttttctatcaaaagggagatgaataaaatttttaaaaatttttaattcctttttaaacaggccaaaaagtttaggcttatattttaaaaagtttcatcgaacctagcgcactaaaatcgatataatctctccaaattttgcaggccttctccattgtaaaggactaacttaacctgaaaaaatgccaacgcttgttgtttttaaaatttttcgaaattctgactttttcattaattatttattattttgcaaaattaattcataaatattttttcagaacgtgctctgaaacgcaccaaatgttaattaaaagttaaataaggctctctgatgctttttctatcaaaagggagatgaataaatattttaaaaatttttaattcctttttaaacaggccaaaaagtttaggcttatattttaaaaagtttcat

SEQ ID NO: 34534 - DNA, 1095 bp, Heterodera glycines
agagaaggcggaggagaagcttagggaggaggaaaaagcaattgggaggagaagtaagctaaaaataaatcgaaaaggaaggaaaagccaaaaaatagggaaatcagaaaacaacggcacgaaagacggaggacagaagagaggcacaaacccagactgaagagccaaacaaagagcaggacaaaaagccaatgccaaacgaagcagggggaacagaacgcagaagtgaggggagaattcggtcggcaccgccttcagcgggaaaagcggcaccgacggcggaatgggagggcaaatggagagaggccgaaatgagagagatggccgaacaatgggaggaagaacgtgccgaaaagcaaaggctgacgaaaaaactgagaagggcgagtgaatgggcgaagggagaagcgaacaaacgcaattataggacaaatgggaattttaaagtaattaaggcggaactactccaaagagaaacggaagaacaattggaagtgcaacgaaaggcgaaagagcgactggaaacggagcacaacgcgttgttacgcttggagaaacggcgaacactgcgcgaagagaccgaatcggtgggcatggcactgatcagagacaaattggcggcgaaagagcgcgaagtgtccgcacaggtcatttgaggggaaaaggaagagagagacaaatggaaaaggaaaagcggactttagcggcaccgaatcatcgaattggagcgaaagctgtggcacatggaaatggcaatggaaagcgaacaatgaaaagaaggaataacggcgccagcggacggcacggacaaattgagaaaaatgacgggaaaattggaagaaaaaggacaaaagtggcagaaatagggagaaaaaagggaggttgcctgctgatcgaccgtaaactgacttggaatttgttctcttgagtttcttttcaaattttctttgaataattaaatttctccgcctttgtttcgttttgcgattcgtccgatcggtgcctttctccaccccccccccccctccatcctaaccaaactggttatctttttaagtttggttgggttggattcaaacatttcgtccgcctgat

SEQ ID NO: 34535 - DNA, 1175 bp, Heterodera glycines
tgacataaatcggattggaaaaaagtcatttccgttccctgaaaatataaatttatatttaaaatttcttgctaagaaaagttttatcgaaacacacaaaattttttaattttaaagtttagttgggaaataattgccttaacaatataaaaaaatgcaattatgatctttattctcgcctcgagaacagtctcgggtttctggttctcgtcttgttgagtcatggtctcgagtgtgttttgaggccaagtctcggtcttggtaccgtctctcgagcagttttaaagcattatcaaatcattttttctacagaaaccaaggtgatgcagtactgactgaatatgatcagaaattcgtcaactctttgcgtctcaatgtgcaggaaggccgagactttgggcacattcttgtcgttttggccaaccaacacaaagatgttttgtcaggccttcagcaaaaatctgattaatttttcgctgtgattctttctttctccatttccccccgtatttctgtgacatcgtaaaatttaggaatatttgaacaaataaactatctgaaatctaatgtaaagctttttctttcataaaattttttaagtataacaaatatcgcgccttaaaattgtgggaaattgcaattctcatccggagaaaaggaaagtaaaaagttgtgtgacattaatgcaaaacctttttatttcaaatttttatttcatcaatttttttacaatgaataaaaacatgaattttttattttaattggcatctcattgattagctctctctactgctaaatactaggaagaatttgttgatttattgcttaaaaggtcagccatttggccgggaattattttgccaggaatattggcactggtctccgttttgttcaatttttcgttaattttggatacttttaccaaaatgtgagtctttaaaattttaaatttaattcatttttgatttttaagaaaggatcacaaagtgtgtaattggctgttagccttcgattcgttttgccaattggttttcgcgctcctttccttgtcaattttttggcccagattttacagtacaccacagttgattaccgtatctgtgctggcactcttatgatgtaactttggcatcgtatgcctcatttttggcattttttttgatctctgccgaacg

SEQ ID NO: 34536 - DNA, 972 bp, Heterodera glycines
aaaattctaattgtaatcatttttttgataaaggaacatctcaaaatgtttggcttttgccattttggggtcaaaatttcaaaaaatgaggtataacgggggtccggcggtgggaatttttttttttttgaaatttgagtgaatacgaattttgttaacaataagaaaaattgattaaattaaaaaaaaattgccaatttttcctggaaaaacttttgattttctgggaggaggaatttccccccccctggctacagacccatccaaattggttaacacattggttttttatgactttttaaaatttctcaaccaaaaatatcaaaaacccattttttacatgttcctaaaaaaacctgcaattgttgatcatggccattttgttgttgttcatgttcagcaaccgattggtcaccaccaccattgtcagcttcgtcatcgttttgcatcaccacagccaccagaaccgtttcgtcatcgtcatcgtcatttccatggtccaaatggtcattctctacaaggtcaaagcccaattcaacatcctcctcctcctcttctcctccttcccagtcaaattgtttacctgttaaataaaaaaaagcatttttctaagaggagagaaaatcaaattttctggcataaaccgttttttttcacctccttcacccaaattttccaaaaaaaattttgctaaatacataaattaggtagaaatttttggtgaaaatctgcttaaagtagccatcctgagcaatttaagcaccctttcaggaggggggggggggaaggggggtggaaatggttggggctttatcgggaaacctttcccgcctcgaatactgaatgagttaatgtacggaccaacgctgtccacctcctccagcccatgcgcccgctcagcctcatcagcagcagctgcttgcccactcctcatgacatcgtcgggtggcggcgttttcttccttcactgcg

SEQ ID NO: 34537 - DNA, 1020 bp, Heterodera glycines
acagttcacgcccttcccttttgaaataattaatttaaccatattaattaatttattaataattgttaattaagtgcacgtgtctcattgacgattcggttaaaaatgccatcaattttctggaaaaagcgcgcaacaaaggcgaatcctttaacattcacaggtgggcttaaattgagtgcaaggagatgatacgcaccgttttgttggaggtgctaatgggcgtttctcaaaacaatcaaatggaaaattttacaaaattattttgttcaagagtaactaaatttttaattcatcgaaacctttcgattgcacaacaaatacctaagtgttctttctctattagctgtaattttttgaaatatcaggaatttttttttgaaaacttgcactataatagtaaggctgtcaaatgctatcaaattgactcaattcgtacaactatgaaaggagttatatcggaaaaacatgggctgacgcccagttggccagcgcccatttgtcccccactgctcgggggtccaactcttttcggcttcctgaagaaaatgatgatggaaatgctagatagaataattgctgttttcactttttctaaagtcgaaaccctaacataccatataccagggatggcattccgaggtccaaaaaaatttcagaaatcggtattccgtagctcataaatttttcggaaatcggaattccgaccccaaaaattcggaattccgtgtcatccatgccatatactatacatttttgaaacacgtcactacgttacggtagagataaaatatgtttgagtgtgtgccaagtttttttctttgttccaagttatatgggtatcatatcatgaactcttttaaaattttgagtcaaaatttatttacccccccccccccgtttttgtaggcatttcgtagaaaatgagttcgatgtgatcgcccgcgtggcgttggggcagcgcgagtcgcgacagtttgagactgaaatggcacacctggcgattgagtcgatgcaaaa

SEQ ID NO: 34538 - DNA, 868 bp, Heterodera glycines
tcaaaaaccggtttatacttgtcggtttttagattttaccgttcgacttcatttcctgatttttagattaagctcgttaagagctttcgaatggtactaaatttatggggattcgatcgtttaaaaaaagttagagtgcgaagtctctcaatttttcgagttttgaaccggttcaaaagccggtttttttggcatttccgcaacccgaaacatatttttccatgcttagatccttgagacgaatcgattggtatatcatttgaccccctttttcacggggcgttctctacagtttatccaaaaagtgatttcaatattttattcaaaactgaaatgagcttgttttattcgattgtttttatttgggtgcttttgacaagtcaaagtaatcaagatcaacaccacgataattatttatttaaattttttaatttatttttaatctatttttaaataagttttttccaacaaaaatgtcgacaattgtttgtttttgaattgattaattatataactaattcattaattaattgttcagccgtagaaatgttcaaatcagcaaatatgctgctagacaatgcataaaaattaccattggagacacaaaatgccaagaaaatgtttgaactagtcagaccgaacctttttggcattttgtgtaatgtaaaaattgaaaaaagcgcaaaaattggagaaaatttacaaaaattacacgaaaatttctgcgggcaattgaatgaaggcaaaagcattgaagaaattgcgcaaaatatgatgaataaaactgtcgaaaacacaaaaattgctgaaataaaagagatttttgaaaaaatgccacaaaaaattcaaaaattgccatttctcaatg

SEQ ID NO: 34539 - DNA, 1329 bp, Heterodera glycines
  unsure (1)..(1329): unsure at all n locations
tcgatgtggactaaaaacccctaataattttttaaaaatntaaaaaaacctctccaaccaaattcgataaatttgaatcgctttacagcctaggtagcgaagctccgaaagcgcgaagcgcttttttccagctaaatagccgacggttcatttatgcttaatatatcgaaactagtgcgcagaaaaaaaggcagctctagttaattactattaattactatatatgttatattgacaaggagtttcgttgctaaaaccattttctcccggccgaaggccgggagcgccctgaaagtagtggaagggtcttacaactttttgaggcgcatccgggaaaactatagagaaaaattctgcgcggacgactgagtcccagggacggatttctcaatttttcgtgcgtttgacggcccataactttttttctgaaactcggatcaaaaaattcccgctgtgagggcactccgcagaagtgtcctctataatccagtattttttattttttgatcagaccaaatcccggacctgtacagacacggagactcagttaatttttttttcccacttcagtaccaggtgaataccacgtcagggtttggtctgagcgagggggtgccagcagacttattgtagagtttttaaagctgcatttttccagattttaaaatttcgaaaattttcaaaatttttcgagctaggcctaaaaatcggttttcgggtttttgaattttatgattttttaacgatttttcccagagaaacgaagaccacttccaaaacatagtttttcgagctctatcgattggtaatttttttgaaaaaaattcggtttttttccggaaatagaaaaaatttttggcctgagcgggacatttgagtcccgggtctataactcgtcagggatcggttttagccaaaaattgccttagaacatttttgtagagcattttaaatgctatcgaatggtgtactacatgatgtaaaattttcaaaaattttcgagctaggccccctagaaattttacggaatttttttggggtcgaaaaaggatgtgaaaaatatttttctgggctattttgaggtgctgagcacgaatataatgtttattttaagttttggaaattttagaattttttaaaaattcgaaaatatttttcaattttttgacccttgggattttgggttaatatttgaaaattcataacaaatcgaagggttgatcaattttactcgaataaagccttaaaaatagagaaaaatcaggagaattttattgactttatttggaatttctatctaaaaaaggaaaaaagttattccagaatttc

SEQ ID NO: 34540 - DNA, 768 bp, Heterodera glycines
attatgaacgctaaaattatcagagtgccgaaaatcgcatgtgatctaagcctagcaaaaaatggtgtaagtaaaaatcgtaattacgctcaaaaagcttctcaaacaattttagcgcttccaattccttctacaatcgcctttatacatcccattatgagcgctaaaattatcagagtgccgaaaatcgcatgcgatctaagcctagaaaaaaatggtgtaagtaaaaatcgtaattacgctcaaaaagcttctcaaacaattttagcgcttccaattccttctacaatcgcctttatacatcccattatgaacgctaaaattatcagagtgccgaaaatcgcatgtgatctacgcctaacaaaaaatggtgtaagtaaaaatcgtaattacgctcaaaaagcttctcaaacaattttagcgcatccaattccttctacaatcgcctttatacatcccattatgagcgctaaaattatcagagtgccgaaaatcccatgtgatctaagcctagaaaaaaatggtctaagtaaaaatcgcaattacgctcaaaaagcttctcaaacaattttagcgcttccaattccttctacaatcgcctttatacatccccattatgagcgctaaaattatcagagtgccgaaaatcgcatgtgatctaagcctagcaaaaaatggtgtaagaaaaaaaccttaattacgctcaaaaaccttctcaaacaattttagcgctcccaatcccttctacaatcgccgttatacatccca

SEQ ID NO: 34541 - DNA, 909 bp, Heterodera glycines
  unsure (1)..(909): unsure at all n locations
tgggttcatccattttgagactgaggaagcagcgaacagtgcaaatgcaaaagtgaacgngatgcttttggatgggaagaaagtgtaagatgatttcatcaatttgtttttgtggtatcatttaactactatccgtttttttaggtttgttggaaaatttttgccacgttccgctcgtgacaagcaaattggtgatccgtccagtcgtttcaccaatgtttatgtgaagaattttggtgatgcaatgaattcggagaagctgagcgaagtgttttcacagtttggcgaaatcatcagtgcaaaggtgatggaggatgacagcggcaagtccaaggggttcggcttcgtcgcctacaaggaccatgaaagtgctgcgagggcggtggagaagatgaacgaggtttcggtgcccggcagtgagaaggtcgagcaaaagtttacggtgtgccgtgcgcagaagaagagcgagcgccaggctgagctgaagcgtcgttacgagcagtacaaagctgagcgcatccagcgttatcagggagtcaatctgtacggattttgtttggttggggggaatttttctcaaattttaggattttgttggtttgggggggagtttttctcaaattttccatggataacttttgtttattatattaatgtgccattttttgtgtaaaactgttcggaaagctctccactaattaaaaaaataatgcaatccataaaggcatactacgaaattgtttactgaactggagattttaaggtacgtcaagaacctgcacgataccatcaatgatgagacacttcgaagcaattttgaatcctacggaaacatcacaagtgcaaaggtttgtcttcaacggattattgctatttgctataaagcggtgctgaaccagataccaaaac

SEQ ID NO: 34542 - DNA, 966 bp, Heterodera glycines
  unsure (1)..(966): unsure at all n locations
agaaaacaagtaagctgaaatttaaagaaattgaaaacattgatggaatgaaaaaagaaagggtagaaatcaatgcaagaaaaagtatgattttatatatatttttctggacaaggacagggcataaatgccccgtaactcttacgcttattcgtacaattcttgatagggttacgggatttttccgattacattttataaaatgaaaaggatttatgttcaatttgatttacattatgccaaaaattcttattaattaatttttaaattgataccgttgttatttgttcttaacagctgatttactgttagacttaaaattttgattgactcataaaatttaattggacccttaaattgcaataccaacccaaattacacatggtagcaacagcagaaaatgcgggaattttttccgcactttttaatccttaaacctggcaactgcaaaacttttctgccatgagtcaagacttcgcggcactttttttttgcacatttttggacaattcaaaaccaatcgtatcatctttctctttaccaaatgtgtgagtaatcattctcctggtactttgtgtacatatttgctcattgttcttcattttgttttctcccaatttgccaatgcttttcctcctccttttttctttcttttttttctctctctctctctccaattaattaattaattaacttttcgtccgtcgattgtcctttctttctctgccgacctttgcgtggtgtctttttcttctgtttgtgctttcttcccgaactttacaccaaaaggaacgacaaaatgaaattgtgtccatccacagtttaatttcccatcaaaagtttcgttcgttctctgtcccttttttccttttctttgttccttttcccttcgcatttcatggtcaaaatacatattttngtgtgtctttgttttgtttttttgtgtgtgcaactgatgcttttgct

SEQ ID NO: 34543 - DNA, 796 bp, Heterodera glycines
atatgcactcagtaatttttttactttttcatcttttataaaagcatcaaagctagagattcgagcttccaccaattatttccggtgagtttggttttcggttttttattaaaaagaaaataaaaataatagcaactatataaatccctccttttggaatctccatcctattagaataaattaatttgaataaaaattttttgtaaaaaatatataataaaaaactaaagccaataaatattatggaatcatttttacattaatcaatgaatcgattttacattaataaatattttattatacgaagtgtttgtttactaatattaaaatttattgctagataattttatacaaaataatcagtaaaagacatgagaaaaaataaagggtctcatttggcggtttttgactaacgcccattgtggcggtttttgactaacgtcccagcaccatctgttgtttactttttccacccttccaacgaattggacgggttcttggttgagtttgtcgtctgattaactttctgatgagcgcaattgtccctttcagttgaagttgaacccaattgatccattttaagactattttcgggactaataatttacacaaattaaaaacaatttaagccaaaacagaaaaatgaaattgcttatcagaaagagttattatttggtaaaaaactcttattttcggttatttgctgcgatgaacccgaataatatgtgctaattgttatttcttcaatttcattcaaataaaaaagtaaacaacagatgtgcagatttaagataat

SEQ ID NO: 34544 - DNA, 1614 bp, Heterodera glycines
caacaacagaaacgaaaattgcacaaccgaaaggcatgaatcttcggttgactgttggcatttgtcacacattcaataattatggaaattgacaataaaatatacaaacagagtctgtttctctgatcagtcctccttgatcactcgttccgacactttttttttgtcatttttctgtcgtgcgctttctctcttccatggtgccaaaagtgcgccgaaaagcctccggcacagccaaaggatggcaaaagcgatgatcaagcaaatcagcgcaatgtccaagcagaaatattcgaccattcccaactcggcactttccgggatcagttccttcagtggtccgttctccagcacaaagtcggtccatctgatcagctgctcctccggtgggtttggcttttgtcggtggagtttggacaggcgaagagcgtttgctttgtatctgacgatgcgaaaacaaaaactgtaaattcgaatttggcactcactttttgtcgttcaacattatgccaatctcctcctttatccggtcgacgctcagcaaatctgatttggtcaaaatgcgagcaaagccgcggtattccgccattttggccactcggagttggtcaaagaacagcggaatggccaggaaagggacgccacggatggccgactcaatcatggagttgtagccggagtgggagatgaacagacgcagcgaaggatgggcttttcgggggaggcgagacgaacaataagcacaaaaaaggaatgggcccgtccaaaaattgaaaactttcgtaatttcttgtattttcaatttcaaaaaaaaactaatttctttctttttattttttattttgaaatttgcccaaaagttccgatttttggcggcacctgccagcataaatttatttttttttaaatttgacccaaaacataaatatcccatttttggcaatttctgttccgagtttttttttggccgatactgtaaggaatttcattcgttttttggtcagtaccgtatcccgtctaattctctgttttatactgtaaggaatttcatccgttttttggtcagtaccgtatcccgtcaaattctctgttttatactgtaaggaatttcatccgtttttggtcagtaccgtatcccgtcaaattctctgttttgtactttaaggaatttcatcagtttttcgtcaataccgtatcccgtctaattctctgttttatactgtaaggaatttcatccgtttttggtcagtaccgtatcccgtcaaattctctgttttatactgtaaggaatttcatccgtttttggtcagtaccgtatcccgtcaaattctctgttttatactgtaaggaatttcatccgtttttggtcagtaccgtatcccgtttcgtgtttgaaatccatttttaacaacaaaatcattgaaaatcacttaagacttaccaagtaaatcagtctgttccacccattcgaactgaaaaaaaaaacatttaaatgtttctattcatgttcattgtcttaccaagtgaatgtttgacacttttttggccaaatttcggctgaaagtgtccgctttgctcactttgacaataaatgcgaaatcggagaaatgggaa

SEQ ID NO: 34545 - DNA, 892 bp, Heterodera glycines
ttctattattagctgctcgaatctgcgcctctcacccttcccctttatagtgggcacaaatttttggtacaatagcaaaaaaggcatggaataaagttgataatttaaaattttcaaaaaaaaaaaaagtgaaaccgtacagtaaattcaggcacttccaaatccaagcccgttttggcacggcgcgggtcatgccgtcgtggatcctgcactttgtcgacattgtactaaaaagagggcaaattaaagaaaaaaaatgggccaaggaaaaataaagaaacgaaaaaaaaattcttttttttttggcaccgccttatttaagcacgaaaatcgcgtgtttacaattaaatggagcttattgtaaacatttacccctttccttttcagtgcatttttgtgttttttcaagaacggaatttgatgttactcaacatttgcgtcaaagtccaaaatcgagttcaatcctaagtttgtgcccgtttttgagggaaggtgacactataatttttcgcatttactgacatgaaagttggacgataagcaactcctcgtttcattaactcaactcgtttaataaacgcaaaacacaattatgatttagaaaatccgactttcctgatttcttaaattttatttttgggcatttattttttctaacaataagtactgaaaatatatttcctgtgtgctttctgtgtcaatgacgacgaactatgacatcctcttttatcgacacgatgaaccctcgaaattccggccctcaatttccgcgttttaatcccaaaaaacgagttgggataatcaaaaacgaattggattttatattacgcccctccccccatagttacaaataaaataaaaaattaatttgtttgtcacttttatgccaaaa

SEQ ID NO: 34546 - DNA, 1180 bp, Heterodera glycines
caaaagtcgtgtccacaaacgttgggatcctcaaatctcggctcctcaaatgtcgagtcctcaaatgtcaaatccccaaatgtcggatagccgtaataattaaagctgcgattttggacataaaaccacgaaataagcatatttttcattaaaatttttttgtttgtttgatttgctgttttatatattcttagatgaaatttattctgcttaatatttaaaaagtgtatttatttattaatcaaataatacctgtatttgcaggagttattaattctgtttcaatatattaaaatttggtaatcaatttttgggaaaatgtttacattcttaggggctattttctgaaatttttagcgtcatttattaggggttatttttattttatttgcctttttaaaggatttttcaaaaaatccagaaaataggcacatttagtagggatgtgcagagtctcggttcccgactcgggaaatttcccgggtttttcgcttcccggtctcgggtttttagtctcggaaaccgagaaatttttacactgttaaggatgaccttttcggggagtgggtcgccggtaaagggagaaaagaggacaaattattgaaatttttaatacattttcttaacaaaactctttaaaaaacccaaaaaaaaaatttccggcagcgcctatcggcgtcgcggcccacaaattcccctaagatttcaaaattggaatctaaaattacccattttttagtgaaatccgaagaaagatacatattcaaaaattccatttttttctaacgtggcgcctattgcggtaaggggtgaactcgcctagccaattccgtctcagcaaagttcaaaaatctatctttaaccttacgcaaattttctaaaaatttagctaaatttttcaaaaaaatccattattacttgaagaaatctgctaaaaatgattcaaaatcgcaaaattggtcattttttggacagaattcgttaacaaatcgcattaaaaaaatgcaaaaattttcccggcggcgcctatcggcaccgccggacgttaaaagcagaaaaaaaaggtcgtcgcgtcacccagggggatgtaccaccccaagccgaaatcctgggtgaggcggctaaggctcacggtaaattggacaccagaaaattagacaccgaaaattggacactagaa

SEQ ID NO: 34547 - DNA, 1044 bp, Heterodera glycines
tttgagtagatagactagaaaaatgaaaattttgaaatcatgttcccactcccttctcccaggggtattattttgtaaagtcttttttccacaataaacttgtcataccgcatttgtcgcaccgtgaatgttatttttattgaattctgaaccggtttgagtagattagactagaaaaaattgaaaattttgaaatcatgtttcccactcccttctcccaggggtattattttgtaaagtctttttttccccaataaacttttcaaaccccatttttcgcaccgtgaatgttatttttattgaattctgaaccgttttgagtagattagactataaaaaattgaaaattttgaaatcatgtttcccactcccttctcccaggggtattattttgtaaagtcttttttccccaataaacttttcaaaccccatttttcgcaccgtgaatgttatttttattgaattctgaaccggtttgagtagattagactagaaaaaattgaaaattttgaaatcatgtttcccactcccttctcccaggggtattattttgtaaagtctttttttccccaataaacttgtcaaaccccatttttcgcaccgtgaatgttatttttattgaattctgaaccgttttgagtagattagactataaaaaattgaaaattttgaaatcatgtttcccactcccttctcccaggggtattattttgtaaagtcttttttccccaataaacttgtcaaaccccatttttcgcaccgtgaatgttatttttattgaattctgaaccggtttgagtagattagactagaaaaaattgaaaattttgaaatcatgtttcccactcccttctcccaggggtattattttgtaaagtcttttttccccaataaacttgtcaaaccccatttttcgcaccgtgaatgttatttttattgaattctgagccgttttgagtagattagactataaaaaattgaaaattttgaaatcatgtttcccactcccttctcccacgggtattattttgtaaagtctttttt

SEQ ID NO: 34548 - DNA, 1264 bp, Heterodera glycines
  unsure (1)..(1264): unsure at all n locations
tctagagtcatgtcaaatttntgggacttttcttcgacgtggccatcagctgggttgtttccgtgacaaaaacaaaccagtttgatgttattcgaatgagctagacgcgctctacattntnncaatgtatcacaannggtctaccgccactccctgncgagatgtgctcgaanacaaagagaaggtcagtcgtgnnntctcnnnttcttccccgtccacatcanntcnttcaaatttcgggtgtgatgnntcttcccccatgcggcgnnctgcttcccaatattttgaatgtttccccaccgattggtgaaaattttttttttcccattcctttttccccaaatgggcccttaaaagggtgtgccaatcccctccttgaaaaaaattgccaaaaaaaaaaaaccttttttgaaaatttaaacacaaaaattttttaaaacctcttttaaaaaaaaaaaaaaaaaaattttttcttccccaaaaattttttttcccgggaaaccggggaaaaaaccccctccccccccaaaaaacccctttttttggaaaattttttttcttcctcctccccccattgggaggaaatttttttcccccctttttttttaaaaaaaaattattttcttccccccccggggggggaaaaaatttaaaaaaaaaaatatttttttttttttaaaaaaaaaaaaaccccccccccaaagagaaaagaaatttttctttttttttttttttttgtgtggggggggggggggggggggggcgggtttttttttttccccccccgcccccccgcggaggggaaaaaaaaaaatttttttttttttctttctttctttttcttctccacaaaaaaaaaaaaaaaaaaaaaaaaaaatttttttttcccccccccccgcccgccacaaaaaaaaaaaactttttttttttattcttactttattaacacccccccccccccccccccggcggaaggaaagaaagaaaaaattttttatttttcctccccctcccccccccccccccgccacacacaggtttttttttttttttttttttcccgcaaaaaaaaaaaaaaaaaaaaaaaaaaaaaaaaaaaaaaaaaatttatttttttttttcttttttttttttggaagaaaaaaaaaaaagaaaaaaaaaaaaataatatttattttctcccctcccccccccccgcgcccccggctttttttttttttttttatctttttggggggggggggtgtgtttttttttttttttc

SEQ ID NO: 34549 - DNA, 892 bp, Heterodera glycines
  unsure (1)..(892): unsure at all n locations
aattttgaaaaatttcgttaaggttcccattaatatggtcagaagagttcaaaaaaccaaattnttccaccttttttaggctcaaactttttttaaacttgacgaaattttttgcaaatttgcaggctaatagagcatctgaagggctttcgaatgataccaacaatgttatatttggatgccaaagtaaaaagttataagcgaaaccccgctggggccgaactgacgggttccgaaaattatgtgtcggattttgggaaatttaaagtacaatttttggtcgaaaattcaagaaaaatacatgaaaattctgtggcccaaaatgaagccctccctttctgcgcaaaaggcgcttggaccagaagcgccaagaaaatttagcgtgaaaattcgaaaaattttatacttaggtatgaatggagcaacaaaaaatggaaaaactatgagccgaattataatttttattagggtaataaaatttttaaaacaagttaatgtctgaaaaagaaattaaataagggcgcctaaaaagacaaaagaattccaataataaataaataaaatagaatttttaaaataaaattagtattcaattaattttttgagattagaactaaacgaaaacatttcttttcacccaaatagtttcatttaaaattaattaattaattagttattttattttttttcgaaattaattacccccaccccctatcattttcgttgaccaccacccatacatcggtttgaaattttcgttcaacaaaacattctttggccttttgtccaccaccatttgcttctgctgggattccggcggaaggaactcgtaaatgagggcacatgtgcacggcacggcacacactcattgcccccggggaaaagctaataa

SEQ ID NO: 34550 - DNA, 1345 bp, Heterodera glycines
atgttcgtccactccgctcggcgccgaagtcgtttcgtagcatactgaaattgacactttgttttttccgtcctgtcccgcgaatttgaaccaatttctttcgctgtctctgtctttcccaagcacgtcgcagctcatcggtgttgaagcgcatcgatcctccgatattctgaaaaatgaaattacaaataattaattagtaaacatctaaagcattaccccgtagacaataccaaaattgcggccaaaggctccgcgaagatgcacattcataaaatcaaaattttgtgctataaaaaaagggaaagttataaatcgccgacggatgcaaattgctgcattaaatgtcatcacaaaaaagttgcaaaccgcgttttcaaattgctcgggtcgcaaaagacgcggtaattattggaaggtgttttagaacagtttgagttgcatttaggggttatcgaggacactgatcccgaatctgccaatcgaaccctggacccatcgaacaaaaagtaaaaaacccaatttccggacgtttcagtgtccctgagcacgaatatgaaatccatttcagcagattctttattctaaacctcacgatccacggctttttaggcgctatatgcaaagtggtcaatttgaattttatcaacaagtaaaaacaaaaggggggactgtattgttttgcaaaattttttaatatataatcatgaaaatttattccctggggttttttgggtccatatttttgtttacttttttactttggggattttaatgattttttcacttttaaggctaaacacagaaagggaatgcatttggggaaaccgattccggtatttttgacctattcaaaccccgaaccaacaaatggagggggtgtaaaatgaacaaataaataaaaagctaacaaaaaattgaagcaggggcaccgcacatcgaaatgggcaaatggtagtagcgaaggtgaaaaggatgaaaatgcatccgtttatatgccaaatgaatttggcaaaagatggatgaaatgtcgcggatgactgtgtataaaagggacggacattcgcattttcatttttggggagtttggcgtattgatgattccaattcaaatttcattccaatttttttgcctctgttttcggctttgaatttcttcttaaggaaaaggtgaaatctagagatccgcctggacctggatccaggcttggatttttcctggatccaggttcaggtccaagccatttttcggcaacctggatttatgtccaggaaatccatgtccagcaggtccaggttttttccaaaatgccgatctctagtgaaatctaataaattaatgcct

SEQ ID NO: 34551 - DNA, 985 bp, Heterodera glycines
tccctatagtctgtactataattgtgcgttggatttgtgctccacataattgtgtgagtaccacacacggactctagaaaaaatagatttttttgttttcggggcagtccccccgaaccgatgcgcccagatttatggggagaccgaatccttcgggaatagcttccctatagcctgtactttaattctgcgttggatttttgctccccataattgtttgagtaccccaaacggacacttgaaaaaatagatttttttgttttcggggcagtccccccgaaccgatgcgcccagatttatggggagaccgaatccttcgggaatagcttccctatagtctgtactttaattctgcgttggatttttgctccccataattgtttgagtaccccaaacggacacttgaaaaaatagattttttttgttttcggggcagtccccccgaaccgatgcgcccagatttatggggagaccgaatccttcgggaatagcttccctatagcctgtactttaattctgcgttggatttttgctccccataattgtttgagtaccccaaacggacacttgaaaaaatcgatttttttgttttcggggcagtccccccgaaccgatgcgcccagatttatggggagaccgaatccttcgggaatagcttccctatagtctgtactttaattctgcgttggatttttgctccccataaatgtttgagtaccccaaacggacacttgaaaaaatagatttttttgttttcggggcagtccccccgaaccgatgcgcccagatttatggggagaccgaatccttcgggaatagcttccctatagcctgtactttaattctgcgttggatttttgctccccataattgtttgagtaccccaaacggacacttgaaaaaatagatttatttttgttttcggggcagtccccccgaacttaacggccagatttatggggagaccgaatactttcgggaatag

SEQ ID NO: 34552 - DNA, 1046 bp, Heterodera glycines
taactgtaattaattatttattttttcagatttagccaattcattgcgtcaacaacgcaccgaggacaatcacatttcgataaatggacaaatttactcagttgacggacctaatgttaatgttggtgttgaagggcatgatttgagtgtgaatgggagagtttatcaaaacagggccacagagcagtatctggaaattatacaagacaaaaacataagaaatgtaattgtcagtgtgccattatcgttattttctcgcgaaaacataaccgttgggcaaacgcgacatattcacgctgaatgcgatggaaatttatatatcgaccaatcggcagatgactgtattcgcatattatgcgttgatgtaaaaaaggatgccgctgcaaagaactttgggtcaacaagtggaggctttaattttggatcgacgagtgttttttacaatttttcggtccgaggaactttacatatccataattcgtcacttgagtgtgctaacattgaatgtgatgcatctttaaatgtaactcactcaccaatagaacgtaatgcgcaaatgaaatgtggtgggagtttaagtattgatgagtcaccaatgggaaatattcggcttaactgtgatggatctttgcggatcgaaaaatcgaaaatggaaagcagtcagattgatgttggtggaagcattgggattgttaagtcaccaatgggaagtattgggattgactgtggtggatctttacggatcgaaaagtcgaaaatggaaattggcaacctagactgtggaggaagtttaaccattgtagaatcgccagcgcaaaatcttcagttagactgtggaggaagtttaaatatgaaggagtcgccaatgaaaaatgttggcattaattgtggtggaagtgcaaccattaagaagtcgaaaatggaaagtggtcgcattaattgtggtggcagtttttcaattgatagaacgccaacgggaagtgttcgaattaattacggtggaagtagaattaatttatgaaatcaaacgaatgatcttgttcgga

SEQ ID NO: 34553 - DNA, 916 bp, Heterodera glycines
gttgtcccattgggcacgacaagaagtagccgaagtgcttctgctgccatcgtatagacacagttgttgaatctgtgtacttggcggctgaacacgatggttatgcttgtgttgatcgtgtaggtgttgtgctgcttgaacttctcggcctctcccggcatttcctgctgtttgttgttgttgctgctgtagttgatactgtactgcttgaacttctcggcttctctcggcatttactgctgtttgttgttgttgctgctgtagttggtactgtactgcatgaacttctcggctcctattagtatttcctgtttgttgttggtcctgtattgctgcttgaacttctcggcttttcctatcagttccggtctggctactgcttgaacatgttgctgctgccgttgttgtaattccgtcattttctgctgacgtcaccattatttcatcgtcattatcctttgcatcttcttcattgatgcgatcatcaaacatttcggtcagcgtatatgagcatggcgctttgaacagtcgaaaatcgtccgtcccttcttcggctaatgagccggaagggccaaggcgacgctttcgagcgcgacccttaattggatagataattagcacgcgttttgtcaaaatatggcctagcctaggcttttccacagccggtgctgctcaagaccgaaaatttctcaagacttagacatggcccgggacgagattattgtcccccggtgccagggacggtcccgtcgaaattttaagggaattgataccccccaccctccaagacctccctcattcaaattttccacaaattttgcttaatgtttccaaaaatccacaaaaatcgcaattattggtgaaaacctgttaaatggtaaaaatttccaaaaattttcccgcctaacccctcctg

SEQ ID NO: 34554 - DNA, 920 bp, Heterodera glycines
ttttaaaaattcccaaattctgaaacttaaaatagacctttattcgtactcagcaccttattttaccccagaaaaatatttttcacaccctttttcgaccccaaaaaaatttttgaaaatttctagggggcctagctcgaaaatttttgaaaattttacatcatgtagtacaccattcgatagcatttaaaatgctctacaaaaatgttctaagacaatttttcgctaaaatcaacccctgacgagttatggacccgggactcaaatgtcccgctcaggccaaaaattttttctatttccgggaaaaaatcgaaatttttccgaaaaaaataccagtcgatagagctcgaaaaactatgttttggaagtggtctccgtttctctgggaaaaatcgttaaaaaatcctaaaattcaaaaacccgaaaaccgttttttagccctagctcgaaaaattttcaaaattttcgaaattttaaaacttggttggatagcctttcaaatactacacatttttgctcagaaacaatttttcggtcaaagcaacccctggcgagttattcgcctggtactgaagtgtacattttgagcacacttcaattagccaagcgtgcaggccagggggtggctctaataaaaaaataaaaaataccatcatgtagaggacagttgtggggagtgccctcacagcgggcactttttgattcgggttttagaaaaaaagttaggggccctaaatgcacgaaaaaatgagaaatcagccgctgggactcagttggccgcgctgaatttttctctatagttttcccggatgctcctcaaaaagttgtaagacccttccaccactttcagggcgctcccggacttcggccgggagattttgatttttgaaacgaaactccttgcgaatataacgtatata

SEQ ID NO: 34555 - DNA, 966 bp, Heterodera glycines
ctttaaatctgcaagaaattagattggcaatatgtggttgtaaaaaacttttgggtatggaattattttttgaagtgagtcaaacaccctattagtgctttgctgtgccgagaaccggcaggcaatggatagctttaaatctgcaagaaattagattggcaataagtggttgtaaaaaacttttgggtaatgaattattttttgaagtgagtcaaacaccctattagtgctttgctgtgccgagaaccggcaggcaatgtatggctttcaatctgcaagaaattagattggcaataagtggttgtaaaaaacttttgggtaatgaattattttttgaagtgagtcaaacaccctattagtgctttgctgtgccgagaaccggcaggcaatggatagctttaaatctgcaagaaattagattggcaataagtggttgtaaaaaaacttttgggtaatgaattattttttgaagtgagtcaaacaccctattagtgctttgctgtgccgagaaccggcaggcaatggatggctttaaatctgcaagaaattaaattggcaataagtggttgtaaacaacttttgggtaatgattattttttgaaatgtgtcaaacaccctattagtgctttgctgtgccgagaaccggcaggcaatggatggctttaaatctgcaagaaattaaattggcaataagtggttgtaaaaaacttgtgtaaggaattattttttgaagtgaatcaaacaccctattagtgctttgctgtgctgagaaccggcaggcaatggatggctttcaatctgcaagaaattagattggcaatatgtggttgtaaacaacttttgtgtatggaattattttttgtagtgagtcaaacaccctattagtgctttgctgtgccgagaaccggcaggcaatggatagctataatctgcaagaattagattggcactaagtggttgtaaaaa

SEQ ID NO: 34556 - DNA, 1304 bp, Heterodera glycines
  unsure (1)..(1304): unsure at all n locations
ttaatcatctatttcgtcatttatattattttattttgtatatgtgttattacaaaatttttgttgtgttttggcattatttcatcatttttggcaacttatcatcattgattttagtgaatttttttttgtaatttagtgcattattttccctaaaattttgatcaattaagtttttaatcattttgcacgtcactacattgattttttatttttagttggttaatttattaagtggggaatgcattgttttattagttttaagcattaaattttgcataattctgcttatattattcccattgattttttgattttagttggctaattttttgcagtgggattgaattgtttttgccaaatcttggtgtgttaattttggcatcattttttgcatgaatgtccccattgtgtttaaatagtttatttcgtatgtacaaaacgggaaatgaaaagctagcaaaaagcatccaattttttaagaatctacattaaatttagaattattattttttaaatatacgtattgtatttgaatgcatagggaaactttgaggacaaatattccttgatgatttttaatttctaaaacttagaaaaatacaaccctatgatatgaaaaattttctcataaattcatccctaaaatttaaaaagccacgcccacccacggggctcgaaccctactataaattgcagaactttcgaataaacgatgcttatacatactgtaaattcacgtagatattcagatttttataaaaaatttcaaattttgtttctgactttgttttgaactcactcaacttgtctctctctctctctctttccttaaattcattataattttttagagatcaaaattgccatttttgctccatttttctgctccattttccacaatttgtgcatgctgctacaaagaaagtgtgcttcggatatgatgaaccgttcacagtttacaaaaatccatcaatctattcgattaccttcaaattaacactgcgtggattacttttagccgtaatgggcaaaaaaagtaagcaaattaattatgaccagngaacggatttatatgtgctaaaaaacgtcatatatgtgcatgtatatgcgacaaaaaacaccaaaatctcnaaaaggncaaaaatantgcaaaaaattcaacaaaaaaaaactgcgtcaaaaatagttaattttttcaaaaatctcattttttagcaatttcactagtacaattctaatcaaaagcatttcaatgctttttgaccgtaatcttttttcttaaaaaatgaaaattttcaaaa

SEQ ID NO: 34557 - DNA, 911 bp, Heterodera glycines
aatttttgcaataaaagccaagcgacgactttttttgcctttaaaaaacgcttttttacggcgggttttttcggaaaaactttggaagatggacaggggcgtccggcggtgccgataggcgccgccgggaaattttttaaatttttaatacgatttgttaacagaattttgtacaaaaatgaccaaattttgccacaaatcttatattttcttcgtaaaatactgatattctgacataaaatttcaaaattatcttgctttttactagagtgccacgggaccgggaatttttgccaaaaccgggaccgggacttgccgggacctgagaagccgggaccgggacctcgattttttttcgggaccgggaccgggaccgcaagaaaaaccgggaaccgggaccaaccgggaaattttaaaaattcaaaaaaattttaaaaatttaaaaaaaaattcaaattttaatttatatcaagtgaaaataatacaaaattatttggttttttataataaattaaattaatgaaaattttcaaacaaattttcttcaattatttcaaacaattaatcatttttggactaaatcatcgaatattaatagaaattcagatttgattttcacatcactttttttcggagcgctttttcaaaaaacttttgggaaagaaggggtcccggcggtgccgataggcgccgccgggggaaattttgaaatttggttgtaatttgttaacagattttcaacaaaaaaaggttggtttttgcgattattaagctcaattggtaggattttcatttaaaaaatgataaaatatgtatcaatttaaaaaaaatttggcagtgttacttttaaagatatattaattattattttttatttttccctttgactccaatttttcttcactaatttt

SEQ ID NO: 34558 - DNA, 882 bp, Heterodera glycines
ctttctctccatgatcaatgtgtgtgttgtgctttctctcctctgtcaatgctcggcttctctaatcatttcttttgctgtttctaattccaaaaaatggttgtgcttcttctgttgctgctgctgcagctgatctttctttttgtgctcattcctttgattttcatgcgcaatgattcactcatttctctctcttttttccctaaaaggctctgatcactttctttttaaaaaatttaattttatgccaaattttttgctttgtcccccccccatccatttttacattgtaaacattcatcgcctcctcctcctcctctcctctcactctgttgctgctgcttttgttgttgttgctgatggtggtgcaccaaattctcaataatttttgtcgccaccaaaaaacacaacaatttgtgattgattttgattgataaatgcatccgaatgtgttctcccccccccattctccgttatatatttatttcctcttttgctgttacgcaattttggtgctcctcccctcatcttcttccatttgatcattttgtgttaccatttattttacttaaaccacaattaaatgtgttcattttatgatgttccattgcaagaatttgcgcaaattttgtcgctaaatattaaaaaaaaattcatttttaatatatttattttatttttgcatttaaaagtgtgtgtatgtgcacatacgtcgtgtgctgtggacacaagagtggtaacaactaaaaacaactgacaaataccggcggcgacattttcattccatcgtatgattgtcaacaatacgcaacgactgctcggcattggactgctcgatctcgtcaatgtcgaaagcttttttcactgagacatttaaatgga

SEQ ID NO: 34559 - DNA, 1384 bp, Heterodera glycines
cataggtactactgctaaatcaacgcagagacgcctttctttgacctttttaggctcctgcaaaacctggtgcacttctgatcactactcgaaaaatgagtaaattaattttcactaaaaagttaagcctaaactttttggcctgtttaaagaggaattaaaaattttttaaaatttattcatctccctttttgatagaaaaagcatcagagtgcctaaaatagcttgtaaataaaatttggtgcgtttcagagcactttctgaaaaaataattatgaattaattttgcaaaaaataataaataattaaataaaaacgaaagactctgattttcgaaaaaatttttaaacccagctagctcggcgctcatttcagtgtaagttagtcctttaccggggagtttccctgcaaagtttggtgcgcttctgatcagtttctgaaaaaaaaagttaagcctaaactttttggcctgtttaaaaaggaattaaaaatttttaaaaatttattcatctccctttttgatagaaaaagcatcagagtgcctaaaatagcttgtaaataaaatttggtgcgtttcagagcactttctgaaaaaataattatgaattaattttgcaaaaaataataaataattaaataaaaacgaaagactttgatttttgaaaaaattttaagtaaaaatcgcaattacgctcaaaaagcttctcaaacaattttagcgcttccaatgccttctacaatcgcctttatacatcccattatgagcgctaaaattatcagagtgccgaaaatcgcatgtgatctaagcctagaaaaaaatggtctaagtaaaaatcgtaattacgctcaaaaagcttctcaaacaatattagcgcttccaattccttctacaatcgcctttatacatcccattatgagcgctaaaattatcagagtgccgaaaatcgcatgtgatctaagcctagcaaaaaatggtgtaagtaaaaatcgtaattacgctcaaaaagcttctcaaacaattttagcgcttccaattccttctacaatcgcctttatacatcccattatgagcgctaaaattatcagagtgccgaaaatcgcatgtgatctaagcctagaaaaaaatggtctaagtaaaaatcgtaattacgctcaaaaagcttctcaaacaattttagcgcttccaattccttctacaatcgcctttatacatcccattatagcgctaaaattatcagagtgccgaaaatcgcatgtgatctaagcctagaaaaaaatggtctaagtaaaaatcgtaattacgctcaaaaagcttctcaaacaattttagcgcttccaattccttctacaatcgcctttatacatccccattatgagcgctaaa

SEQ ID NO: 34560 - DNA, 606 bp, Heterodera glycines
aatgacatttcgccaactaagccaaattcggacgtttcgccaactaagccagaataggacatttcggcaactaatataaaataattttttaatttatataatgtttaatgataataaaatttataaaaagtgtatatgctctcttaataattctgaacagtatttgatcagagaatcagaatcctgacattgcacgtcagaagagaagcgaaagtcttttttttgttttccgcttctcattctcgcaaacagggacgatgagacgtagggattcttgcaccagcaggggtgggacgctaccgcgatctgcggcgttttttcacgcgattctcgaccgcggcaatttgaatccgcgaccgcggaatttttctgccgcgcaccatccctgtcttgcactaccatgattctgatattctcgccaagaaatagtcattgctctgaattgttaagagagaaacagacacattgttgaatcgctgatgagagcctggtttcttatagataaacaaatttgcatgaaattttattattgtttcataattaaaatctgttttaatctagttggccaaattagttgccgaaacgtctgatttttgatgagttggc

SEQ ID NO: 34561 - DNA, 937 bp, Heterodera glycines
  unsure (1)..(937): unsure at all n locations
cggaaatttgggggcctcggattccaatgatcaatttatcgttaatttttggcatcggatttcgatttacggaaattttggggacttcggattccaattaacaatttatggaaaatttttggcatcggatttcgatttacggaaatttcggggcctcggattccaatgatcaatttatggaaaatttttggcatcggatttcgatttacggaaattttggggacttcggattccaattaacaatttatggaaactttttggcaccggatttcgatttacggaaatttctgggcctcggattccaatgatcaatttatggaaactttttggcaccggatttcgatttacggcaatttcggggcctcggattccaatgatcaatttatggaaaatttttggcatcggatttcgatttacggaaattttggggacttcggattccaatgatcaatttatggaaatttttggcaccagatttcgattaacggaaattttggggccgcggattccaatgatcaatttatggaaaatttttggaacgggatttcgatttacggaaatttgggggcctgggattccaatgatcaatttatggaaaatttttggaacaggatttagatttacggcaatttcggggcctcggattccaatgatcaatttatggaaaatttttggcatcggatttcgatttacggaaattttggggacttcggattccaatgatcaatttatggaaatttttggcacaggatacggaaatttgggggcctcggattccaatgatcaatttatggaaaatttttggcatcggatttcgatttacggaaattttggggacttcggattccaattaacaatttatggaanatttttggcatcggatttcgattttacgaaatttcggagcctcggatccnatgatcatttatggaaaatt

SEQ ID NO: 34562 - DNA, 1271 bp, Heterodera glycines
tggtccataacaaattatttgaaactcagacgcgtgtgggctctatctgggaaaagaacacccgctgtactttgatgtgatgaagaactaagaattctgaataaaaaatttcgaaattcgtcacagaaatgtacacctgatacgctttgccaattcgaaggtcgctaatagtaaaaactaaaagccctcacaaactcaaaatcacttttataaattttcttaggcactgaaaacgataataaaaaataaaattgtgaaaagcatttacataacccggtttttgaatcaattaccccgaaaatcagccaaaaaaccttttataaaattttgaacaaatttaagtgcttttatggtttttggctctgggccatataatacatattcccaaaaatacaccccttaaggattatctaaaaatttaaaaatacacctgaaatgtaaaaagggcggccgctttaatagaggatcttttgaaaaaatgcccaaatatcaaatacacataaaatatgaacataaatcgcgaaatatactcaaatatgcaaaatatgacattcaagcggaaccgctcagttgggccggcacggttgggccccagcatgcttttccactataactttctatagcttttttctttgtaatccaaatccaacattgttggtgtcattcgaaagtttttcacatgctctattagccttataaaatgttttttgcctattttcgtgccaattttgctattttgtgactaaaaaacgaagccccaaaaattatgtttcgtggctccaatattttaaattcgtatctaataatttttttttaataattttaatttcctcgaaatgatttcatttgttatcatcgtcttctgcgcgttccatcctcaaaaaacactccgccatccatggcacaatattttgggcaaatgcctttctcgccggacttcccgggggggccatttggccccggcgggcctgagaatccgttgggtccagggatgccttcgggtccgttacggcctgagaatgtcattttacgttccggaattcttatttgttctttgccaccttttggtccgatggccccgtctttgcccggctgtccgactttccctggtggcccgggcggtccgaccgggccgggctcgcctaaactttcgacgtgccaaactcagaaaggcatttgctcacccggtggtccattctctccggggatcacttgctgaacggatttaacaattatttgaatcttttaactcagcaaaaacttcatttgtt

SEQ ID NO: 34563 - DNA, 637 bp, Heterodera glycines
gcccattcatttacattggacatctgcagcacaatcggtccgtgtccacagctttgtccattcgattgtcctccgatcaaattgccatccttttcttgctttgtccacaatttttggccgttgtccacctcaccccccccccgtccccaattcccccttccaaccctttcacatataagttgctgttttctgttttgcatttttccagtgaataagagacagtgcagaaaacggagattagtaagaccaacacattattcgagacacagcgcgagaagagaaagagagaaggagagagattgcttgcatttactccactccttcatctcttcccactcccccacccatcaagtacacagcaaagaaagggggatgggtttagcgcaagggaaaggcaaaatgaaatgaagtgaagagataagtcctaacaaaaaatagcaaaaaattttttaccgcacaaaccccgaccccgaacaaacaccggtaatgcacgaaaacacatgttttcacgccccggacaaacaccggcaaggtgtgaaaacacatgttttcacgccccggacaaacaccggcaaggtgtgaaaacacatgttttcacaccggacaaacaccggacaccgaccggtctttaactact

SEQ ID NO: 34564 - DNA, 1692 bp, Heterodera glycines
ttttaaaatttttcgaaattctgactttttcattaattatttattttttgcaaaattaattcataagtattttttcagaaagtgctctgaaacacacaaaactttatttacaggttaattaaggctctctgatgctttttctatcaaaagggagatgaataaatattttaaatatttttaattcctttttaaacaggccaaaaagtttaagcttatattttaaaaagtatcatcgaacctagcgcactaaaatctataaaatctctccaaatgttgcaggccttctccattgtaaaggactaatttaacttgaaaaaatgccaacgcttgttgtttttaaaatttttcgaaattctgactttttcattaattatttattttttgcaaaattaattcataagtattttttcagaaagtgctctgaaacacacaaaactttatttacaggttaattaaggctctctgatgctttttctatcaaaagggagatgaataaatatcttataaatttttaattcctttttaaacaggccaaaaagtttaggcttaactttttagtgaaaattcaataactcatttttcgagtagtgatcagaagcgcaccaggttttgcaggggcctaaaaaggtcaaggaaaggcgtctctgcgttgatttagcagtagtacctatgaatttaaattttctatgaatttttaaagttttttgaaatttttttaagtgcaaaagtggtgggtgtctggaaaaaaatgcaccgggtttaaaaaatctaggaaaattagtaagcttttgtagtgttccgatacgtatctctgcaaaatttggtgagcccctgatcaattacaaattatttatggacgatctgctctgaaacgcacaaaattttatttacatgttagtttaggcactctgatgctttttctatcaaaaagggagatgaataaaatttttaaaaatttttaattcctttttaaacaggccaaaaggtttaggcttaacttttttttcagaaactgatcagaagcgcaccaaactttgcagggacactgaaaggacgagaaataacctatttcaaatagtaactagtcatttccttttaataattttttttcaaaataatttttttttgggttttcggggcagtctccctgaaccgatgttaggcttaactttttttcagaaactgatcagaagcgcagcaaactttgcaggtatactgaaaggaagagaaataacctattttaaatattatctagtcagttcatttaaataatttttatccaaaaaaattttttttttgggttttcggggcagtacccttaaccgatgcgcccagatttatagggagtccgaatccttcgggaatagcttcgatataccactactttatttttaccttggatttttgctccccataattgtttgagtaccccaaacggacacttgaaaaaatcgatttttttgttttcggggcagtccccccgaaccgatgcgcccagatttatggggagaccaaatccttcgggaatagcttccctatagcctgtattttaattctgcgttggatttttgctccccataattgtttgagtaccccaaacggacacttgaataaatcgattttttaatttcataaatattttttcagaaagatgctctaaagcgcaccaaattttatttacaagttaattta

SEQ ID NO: 34565 - DNA, 938 bp, Heterodera glycines
ggattcggtctccccataaatctgggcgcatcgtttcggggggactgccccgaaaacaaaaaaatcgattttttcaactgtccgtttggggtactcaaacaattatggggagcaaaaatccaacgcagaattaaagtacagactatagggaagctattcccgaaggattcggtctccccataaatctgggcgcatcggttcggggggactgccccgaaaacaaaaaaatcgattttttcaagtgtccgtttggggtactcaaacaattatggggagcaaaaatccaacgcagaattaaagtacagactatagggaagctattccggaaggattcggtctccccataaatctgggcgcatcggttcggggggactgccccgaaaacaaaaaaatcgattttttcaagtgtacgtttggggtactcaaacaattatggggagcaaaaatccaacgcagaattatagtacaggctatagggaagctattcccgaaggattcggtctccccataaatctgggcgcatcggttcgggggtactgccccgaaaacaaaaaaatcgattttttcaagtgtccgtttggggtactcaaacaattatggggagcaaaaatccaacgcagaattaaagtacagactatagggaagctattcccgaaggattcggtctccccataaatctgggcgcatcggttcggggggactgccccgaaaacaaaaaaatcgattttttcaagtgtccgtttggggtactcaaacaattatggggagcaaaaatccaacgcagaattaaagtacaggctatagggaagctattcccgaaggattcggtctccccataaatctgggcgcatcggttcggggggactgccccgaaaacaaaaaaatcgattttttcaagtgtccgtttggggtactcaaacaattatggggagcaaaaa

SEQ ID NO: 34566 - DNA, 1085 bp, Heterodera glycines
  unsure (1)..(1085): unsure at all n locations
tttgagtcagaagtttcgcttttcaaaaaaaatcattggggatcgtacgtnttcggcaaatgagcgcaccatagcaanaatggcgtagttgnaacgacacttctctagggtntgaggtgttttgagtcagaagtttcgcttttcaaaaaaatcattgggatcgtacgttttcggcaaaagagcgcaccatagcaaaaagggcggagtttgaacgacacttctctagggtttgaggtgttttgagtcagaagtttcgcttttcaaaaaaatcgttgggatcgtcctttttcggcaaaagagtgcaccacagcaaaaagggcggaggttgaacgacacttctctagggtttgaggtgttttgagtcaaaagtttcgcttttcaaaaaactcgttgggatcgtcctttttcggcaaaagagcgcaccacagcaaaaagggcggaggttgaacgacacttctctagggtttgaggtgttttgagtcagaagtttcgcttttcaaaaagatcattgggatcgtcctttttcggcaaaagagcgcaccacagcaaaaagggtggaggttgaacgacacttctctagggtttgaggtgttttgagtcaaaagtttcgcttttcaaaaaaatcattgggatcgtacgttttcggcaaaagagcgcaccacagcaaaaatgacggagtttgaacgacacttctctagggtttgaggtgttttgagtcagaagtttcgcttttcaaaaaaatcattgggatcgtacgttttcggcaaaagagcgcaccatagcaaaaatggcggagtttgaacgacacttctctagggtttgaggtgttttgagtcagaagtttcgcttttctaaaaaatcattgggatcgtacgttttcggcaaatgagcgcaccatagcaaaaatggcgtagtttgaacgacacttctctagggtttgaggtgttttgagttagaagtttcgcttttcaaaaaaatcattgggatcgtactttttcggcaaatagtgcccacagcaaaatggcggagtttgacgacacttctctagggttgaggtgtttgagtcagaagttcgcttttcaaaa

SEQ ID NO: 34567 - DNA, 935 bp, Heterodera glycines
ttgttttgatacagaatttgttttttttacagatggtacgtctgacaaaaaaaccaacaaaaaaatgtgaaagattttgaattttatcaaaaaacaaaaggggggacccttttgtttaaaaattgaaagattttgaattttatcagaaaccataggggggacttttgttttgcaaattttttgaaataaaaaatcgtgaatatacttttattcgccaaattatgctcaatgcttaatttgttcatcattctatatcaaaacaaacaaacaaacaaaatttgaccaaaaaaagtgaaaaattttcaaaaaaggccactttttaactacgccgattttctttcatcactttcactctccgttttgaggttctgttcatcggttctctcttcgccacctgttatttcatgttcgtcaaattccgtgccacttacaataaagacgaggacactttccgcgtcgaacttctcgtcctcccgtgcattgtgctggcgctgtttgtcaacgccgatttcactgcgttggaagttttgtggaccttcagtatttacctcgagggtttgccaatttattggcgtcattttgccactattctttagctgtcgcgattttgccccaacttttcatgcttcaaaaacgcggcgaagcggagacaatcactgcccattatctgtttctgcttggcatttaccgcgctttatacattttcaattggtttatttgccggttcatttttctgccattttccaaatttaagggtctatcgctattacactgaggcgttctacgacccaattgtgatcgtttcgggcattgtaagttaagaaaaaacagcgccttacgcctcgcattcctttcacaggttcaaactgttctgtacgccgatttcttctatctttacgtcactcgagtggtcaaagatggggccaaattggaat

SEQ ID NO: 34568 - DNA, 1051 bp, Heterodera glycines
ttgttaacagatcagtcaaggcctggaatgcccttgataatacgttaatgtctagctcattaaacacctttaaaaaattattagaattgactcttgattctgaaagcgccaatgtataaagaaattattaacttttgaggcattttattgactttgacctcgattttattttcatataaatttttcgttattgtttatttttaacctgtgatctcacttgatatttattcacttactctgtaaatatttatcttaccggaaaaggtcttctatagaagttattaacatcgaaaaatattatggaaataaaaaagtattagataagataaatttaaaagttaaaaaaggtgtgtaacgtgaacataatcggaatcaaaggtttttcacgtaagcatatgcgaacacagagtgtgtttttacgtgagctgtattttatatataggaagttttcccggagttctctagaatatcataaaatttatatacgcaaaatttttgtacaaatacctatgtctgttttcaaaacttgtttcacgtaaaaagttgacctgaaatgaattttttgtgtgtgattcacgcagcctaatttaaaacacaagactttcactttttttcatgtgaatataaatgaattcagttcacgtaagcttaggtgaaaacagttgtgtttacgtaacatgaaacacttttcacgtaagtataaataaatacagttcacataggcataaatgattactagggctgccaattttatgtaaatacatacatatttttttcctggcttctccttgctctaaatagcaggaaaaacactttcctttttgtgtttacgaacaaaaaccgggacttttatttacatatttttacatatttcggggtttttatacatatttacatatttcgggattttcttacatatttgtgcatattttggatttttcatatatattttcattttttttacatatattgagtatttttacggaaatttttggaatcctcaaaaaaaatcaaaattccgcaaatatttttgtactattttcattttttt

SEQ ID NO: 34569 - DNA, 1459 bp, Heterodera glycines
  unsure (1)..(1459): unsure at all n locations
attaaatacacgtaaaatattcaaaataaaactcttgactcttgaaaaaataaaatcctacctttgaactcagtatgataggaaactctcaaaactgtcatatccgtctcaacaataacaggtgtttttcgtgcttaacggtcatccccaccgggtctaccgggcactgatcaatccaacccggaggggacaacttgaccaactgcttgaggaggtcagccatggcctacaggcggccattttccgtctgtactcatttgacggcgaccgaattctgagcattgatcagtgagttcgatcacaattgggttaaatttatttaacattcttcttcccctccaatttcaggctgcttcaactgaaggatatgcgtgccattgccgtgccccgccacgagcagttgacgctcaacggcatttctcctgtatgttaatttatggcacttagaagccagttgaagaagataagcgcaaaagcttggctctgtctgtccagctgaccaaattacttagcaaacggaaaataaattctaatcaatttccgatccgtcaagatcaaaatcctcagcgttaatgtgttctgttccttttgatttttaccgcatttggcgctgtttatttaatgtttcgtgatcaatcagcctaattttgatcagaaagctccgttagaccatttttagctatttcacttcttatattttacccctgcatatcttcttaatcccatttttgggtctgattttgggcttgtgagaacttagtgtcctaaaacgtaaattcaaaatttttgggaaaacaaaaagcttctacagtatccctatagatcagggctggccgtgattgaatttccaatcacggaaatccgtgagccgtgatcacggggctttaaaaaaaaatccgtgacccgtgaaccgtgatcacggcaccccaaaatcncccgtgatttccgtgagccgtgatccgtgattataaaaaaaattttctaatgattttttatttaaatttatttaaaaaacggaatttaatcgcgggaaaaattcccaaaaaatgttttaaagaaaccaaaacatataaaccgctttttttgcggcgaccttttccaaaaaatgactaagtttacgatttttggcaattttttgaggaaaattagagctttttgtagaaatctccaaggaaaattttttatttttaactaatttattaagaaaatttttctttcttaaatttaaccaaaaatctatttatgtagagaaaaaaatttcctctaatttgtaagctaacttttgatgctaaaaaaatcttttggaccaacatgctcagtccttcatgacgatctgaacaccccaaaagatactgaaagtcgggaaaattttagaaaaaattcttagagggttgggaaaattttctgaaaattttgaataggcctgtcgttttaaatttaagcggagagaaaaaatagg

SEQ ID NO: 34570 - DNA, 801 bp, Heterodera glycines
aattctatcgactgatataataacgatgcagtcgcggcgttgacagtgagatggaaccaaaagttccataatatctttccataaggctggaaaggcagaatttgaatggccagtcgatatttacactgagcacccgttgaagcgggtgatgcgaagccatagcaaactgtatttttaaattctggccgcaattctaccaaaaacgtgtttagaccgcagtaactcggctcagagtgaagattaagggacgcaaaagagacgatttaaaagcgattcgaaaattctatcgactgatataataacgatgcagtcgcggcgttgacaactgagatggaaccaaaagttccataatatctttccataaggctggaaaggcagaatttgaatggccagtcgatatttacactgagcacccgttgaagcgggtgatgcgaagccatagcaaactgtatttttaaattctggccgcaattctaccaaaaacgtgtttagaccgcagtaactcggctcagagtgaagattaagggacgcaaaagagacgatttaaaagcgattcgaaaattctatcgactgatataataacgatgcagtcgcggcgttgacaactgagatggaaccaaaagatccataatatctttccataacgctggaaaggcagaatttgaatggccagccgatatttacactgagcacccgttgaagcgggtgatgcgaagccatagcaaactgtatttttaaattctggccgcaattctaccaaacacgtgattagaccgcagtaactctgctcagagtgaagat

SEQ ID NO: 34571 - DNA, 881 bp, Heterodera glycines
  unsure (1)..(881): unsure at all n locations
ttttaggaataagatataaataantttttttaaaataattcctccccgggatcgtttttcatgattaattcaattttttcgcctttttcgactcaattatttccgaaacgtattcacacggaaacggcaaaatgcgatggcattggaaagagccatctgatcagaatgaagtcaaatgccattgaccaaaccgccgattctacccccgaaatatcgttttagaagaatgaatgcccccgtctcgggatgttgtccaaatattagtgtgattatttttaggaatttatttaaatttttatattgtgtattaaatgataatttgtttttatcaaccatcttcactttttggtctcctttcctcgcctgctgatgagcagcagttattgtccctcccatcagtgcccatttcccctttccctgctgctgatcatattagaaatttcaaagaatttcgttatgtttcaaaaaagttatggtgcattaacattgccaaattgttttatcgtcgtgtaaattgcaatagaacagcaaaaaaacaactcaccactttggtgtactcagcgaactctgtcgcttccctttcttcttccggccgaaacagattataataataattgcagaacaacaacacattgttgaatgattacagagagaatgaaaatgagagttcattccgtctctatttataaaggcgtaaagacaaaaaattggtaattaaaaaaacggcattaattgaaaattgcccatttaatgcgttgggttgatcatttaagccttaaacgggggttaattaagggtcggtcgatttgacgtttaacttaatgctacatgcttttttgttaattttacggctaatactaattgacacgaatcgctttttt

SEQ ID NO: 34572 - DNA, 113 bp, Heterodera glycines
cctgcaccgaaggtactcactcggcctcttcgcggtctcgtggtgggccttcgccagccttgtcatatatgatcttacgataaatcggaggaagttttattttattatgaact

SEQ ID NO: 34573 - DNA, 856 bp, Heterodera glycines
tttcagaacgaacagagggccaaaattgtggatgaattgggtgcacagaatgcggcggaattggaccgagagcagacggaggcaacgaatgcacaaatgcggttgacagaaatgctgaaaaaggcggcggaaactcatcggaaattggtgggccgaatttacgaatgcaaatttccgggcaattattttcaagtttttatccctctttcattcgatgcctttcaaaaaaaaaaatccgttaaactcatttccattattaaaggaggatgagcgtaatcaactgtttggaaagcacaaatttttggaggacaatttggaggcgtaccagcgatgcgttttggaccaattccatcaagagatggacacgcgctgttcacagatgggcaaagggatgcgcaacgcatttgcggacattgtcggacaaatggcggaatggggtaaaacagaaacatgagaggaggtgccccatttacaaaacaaaaaataaaggaaaatttaacaataataaatcaacaaaaaaatcactcttcatcgtctgctttttcttctactttttctagcaaaaacttcacccaaacagatcgtccatttttaaaaaaagaaatcgctttgttttcgaagtcaaaatggcacttataataaagaaattcgttaatgcccaatctaaaattattgtttgcagtttctcaattactttgacgtaaacatacgttaaagagtccttgtccttttcaaggacatcgcatttaaatcccgtatcttcgaattcccctattttgatgtttaaaccatgcagccctaattttttagttaaaaaaaggattgttcacgaataaaaaaacccactgtcccaggg

SEQ ID NO: 34574 - DNA, 186 bp, Heterodera glycines
atttttgcattaatatgttaaattccttatatatttatttctacagcaaaaatatcgactactgttaaagaattttcttagtaatgaggaatcatattttgtcgaaaaggaaaaccatgagtatacaaaaatacaattcaatattttgatttttgtagagggattgaacaaggcgaaagaagaagg

SEQ ID NO: 34575 - DNA, 1597 bp, Heterodera glycines
  unsure (1)..(1597): unsure at all n locations
agcggaccggaccgggcccggtaccggtttttaccgcgctcggcaaaccggtccggcgttttttggaaaaatccggtttgaccggtttttgagaggccgggcccggaaaccggtcattttgaaaatgccaaaccggtccggaaaccggcattttggaccggtttttaccggtttatgatatagccaaaaattcttcatttttatacaatttctgttaataaattgcatcgaaattttcaaaaaatttctcggcggcgcctatcggcaccgccggaccctaaaaatccttaattgtctttatttattagctcaaaatcgaaattttttttgattttgctgcaccatgattctgaatcttatcaaatgttccacaaatatcgaacacagagatttgttcttttgtgctacattactgactaggatcttctgtactactgcactttagcaaacaattatttctttgaatgctttaagagttgtcaattttatcagcagacatatgactgcagagagaatgtagtgaccacctgaagagctctctgttgttaatctcctatttgtaagtgcaattgtattttattttctagttttattagtgacaaaaatcaaacatttgctgtcttatgctcgtcagtgtgaaagtgacattgtcagattgaacatggatgaacatgtcaaagccgaaaattggagcagtgaatggcaacggcaaaatgaacgaaagggccaagaaaaaaagaagcgaacgattccaaaactaaaataagaatagtttttcgataaaaaactggatttagaataatactagaatagaccgggacttcgaattttaggaaaaaaggggaaaatgaggatcgggatttgtcgggacgagaaaagccgggaacgtttcctaattaattctttttaaaataatactggagtaggtagggactgaaaattttgggaaaaacggagggggcggggggataagtccaatagccggatgcagtgtggtattagattaatgttgttgaccccttcttttgaattttgtatttgattggcttttgtattttggtgattattcggttttatggatattaattgtcgaccatggaaagtcttccaccttttcataattcatcggcatcagaacggaggtgaagcggttgagcagtaaaaatgcggtcaaaaaattctccacatggaaggagtaatagccaacaaaaagcaaaagtgccaacacaagacgaggcaagcgcagataaagcggcaagaaaaggccaattctgccaaagcgaggagcaaaaaaggtgaacacataattgacgaggctctgaaaatgttttaaaaatataattcaaaatagaaattgtctttttcaaaatatttgttttacgcaaattccgcggacaatgacaagcacaaaaaacgatgagcgaaaatggccgaaatttgcgatgatcactcccaactcaacacagtacagcagcgcggacggcacaccgattggccatgcgacgaccatggnggcaaatcggcattggcaaacacggcatggcggaaaaatatgccgagtccattcagggcattaagctaaatangcagggatgat

SEQ ID NO: 34576 - DNA, 1058 bp, Heterodera glycines
tggaggaagcggaagcacgcggatgttttgagagaatgtctttggatgagaaggaagggccggtgattggaattgaagggaaaaaagaggaatctgaggcccctggtagtgaggtgaagagtggggagggccagggagccaatgaacgtgaccccacgcagggaggccaaaaagctgagcagcaaccaaatgcctctgattgccatgcccgcggacgaaaattttatcgcggaggtcaccgaggagtgccacagaaaaattggagccgaggcgggggttttcaccagcatggcagctgggtcggtggatgcccggagacgaaggcccaagcacgccacttttacaacttccgccgaaattcaaattgtgttggaccatccacttcctcggccgcttgtcggtgtgtgcaatgcgcgggccactcagggcatcatcgcttccgtccgtatcgccgttgacgtgaaaatttgcaggggggaaggaagtgtgggatccgtctgtccatcctttttcctatcattttcatttacttgtttttgtcctatttatccaaaacaattcctcaaaataattcattccctttgatctgaatttgttcaccgtcaaaaataatcccttgcctcatcccctctggcgcttgccccaagcattatcctttgtcccttttaatgtgccgaatattcttgctattcccctttgtctgttttgtgcacgccgcctttaaaccaattcgctgtccgctccgacccgtatttaagcgatggattggacctcaatcggacttcttcttctcttctcaaaaatccttattgttgctctgttctctaaactttgcttaaaatccaattttgactaaaacaccatttttactcatttattttgattgaaacttttctttaaataaactttgtgtttctcaaaagcccgggttttgaattggtaaaattccctaacaagtgttgccggacacaacactttttggtgccacgacccgggaccattaagtgagcaggttctggaactgggtgaaaaatcaaaacgctaaatccatttgggac

SEQ ID NO: 34577 - DNA, 956 bp, Heterodera glycines
tctttcgccccccccacctcccacgcccttcagagcacgacaaatatttcaacaaaaattttgaaaaattgactagagcaatcgaacgctaacggacgacctaatggaaaaaaatccccgaaggagagaatttaattaaatccattccttcgggtgtccgtgccgggtactcaaacattcgcggggtaagcagtgatggttcgtagaatcaaagtaccgaacctatagggaagctattcagcaaggattcggtctccccagatcggacgggtgcgcatcggttcggaaaaaactgcctataaaacaaaaaaatcgattttttcaagtgtccgtttggggtactcaaacaattatggggagcaaaaatccaacgcagaattaaagtacaggctatagggaagctattcccgaaggattcggtctccccataaatctgggcgcatcggttcggggggactgccccgaaaacaaaaaaatcgattttttcaagtgtccgtttggggtactcaaacaattatggggagcaaaaatccaacgcagaattaaagtacaggctatagggaagctattccggaaggattcggtctccccataaatctgggcgcatcggttcggggggactgccccgaaaacaaaaaaatcgattttttcaagtgtccgtttggggtactcaaacaattatggggagcaaaaatccaacgcagaattaaagtacaggctatagggaagctattcccgaaggattcggtctccccataaatctgggcgcatcggttcggggggactgccccgaaaacaaaaaaatcgattttttcaagtgtccgtttggggtactcaaacaattatggggagcaaaaatccaacgcagaattaaagtacaggctatagggaagctattcccgaaggattcggtctccccataaatctggacggatcggttcggggggactgccccg

SEQ ID NO: 34578 - DNA, 513 bp, Heterodera glycines
agcctaaacttaggcctagtctaacaataagccattgttcgagttgcctgtggataagttgtcatgataaccttaggtttaacaacgaaatttatagttaaaaactttattgaatacctaacaaaaaaagtttttctcttagttattaggacaactataataccatgagaccagggatggcacggaatttcgatttccgaaaatttttggggcctcggaatgccatccctgccatggacacaaaatgccatgggacgcgtaaaatgtcatgggatgcgtaaagtgttgttgggactcgtaaaatgtgatgggacgcgtaaaatattatgggacgcgtaaaatgtcatgggacgcgtaaaatgtcatgggacgcgtaaaatgtcatgggacgcgtaaagtgttgttgggactcgtaaaatgtgatgggacgcgtaaaatgttatgggacgcgtaaaatgtcatgggacgcgtaaaatgtcatgggacgcgtaaaatgtcatgggacgcgtaaaa

SEQ ID NO: 34579 - DNA, 787 bp, Heterodera glycines
gatagagagagagagagagagagagagagagagagagagagagggagagagagagagagggggagagagagagagggagagagagagagagggggggcgtcgaatttgaaagcagaaacaatgcggggctttgggctcttctcttctcctccgaattcgcttccctctcgatttcgtcgtcaaccaaattaacaaaatacggcacacaaacaattaaaaccgaacgctgtataagtcaacaccaattaaagtccacagcacaaaactcaacaaatttaattcaataaaaaatcaaaaatcggagagagcgatgagaatataatattaccattatttgacgcaaaattataatatgagaagaactgcgaaacaaaaccaaaatttagaaaatgacaaaattaaagagacaaaatgccacaaattaattatttaaattaaatacgaggtcaaatatcacaggggagagagagggagcagaaagggagaggttgggaaaagttagagagaggggtagggtgagaggaggcggataaaaggggagagactgtaaggaagagaaaggatgggaagcagggataaagggagtgagggagggtaaagagaaagggggagaaacgggcataaacctcaagagtttttggatgacaatgattctttgtgaaggtaagaaagaaatgaataaagaggtagttttttttggcaggaaatattccctgtaaatgaaaataaacaaaaaatcgcgatagtgagatgaatttgggaaatatacatcacgacttcttcggga

SEQ ID NO: 34580 - DNA, 1766 bp, Heterodera glycines
cctttttaaacaggccaaaaagtttaggcttatattttaataagtttcatcgaacctagcgcactaaaatcgatataatctctccaaattttgcaggccttctccattgtaaaggactaacttaacctgaaaaaatgccaacgcttgttgtttttaaaatttttcgaaattctgactttttcattaattatttattattttgcaaaattaattcataaatattttttagaacgtgctctgaaacgcaccaaatgttaattaaaagttaaataaggctctctgatgctttcactatcaaaaagggagatgaataaaaaatctaaaaatttttaattgctttttaaatttgcgaaaaattttaggcttaactttttttttataaactgatcagaagcgaaccagattttgcgagggcatcaaaaagacaaggaaaagcactgctatgatgctaactccagtaattctgaatttaaaattttttattaatttttaaagcttcactattttatttttttagcaaaattaattcataaatattttttcacaaactgctctgaaacgcaccaaattttatttacaagttattttaggcactcagatgctttcactatcaaaaagggagatgaataaaaatctaaaaatttttaataattgtttgagtaccccaaacggacacttgaaaaaatcgatttttttgttttcggggcagtccccccgaaccgatgcgcccagatttatggggagaccgaatcctttcggaatagcttccctatagcctgtactttaattctgcgttggatttttgctccccataatgttgagtaccccaaacggacacttgaaaaatcgatttttttggtttcggggcagtccccccgaacgatgcgcccagatttatggggagaccgaatccttcgggaatagcttccctatagcctgtactttaattctgcgttggatttttgctccccataaatgtttgagtaccccaaacggacacttgaaaaaatcgatttttttgtttcataaatatttttttcagaaagtcatgcgcacccgtccgatctggcaagttaagcaacgattgctgactagccaaaaggttcggtgccgtgatgaaacgaaccagcactgcttaccccgcggcacccggcacggtcccccgaaggaatggatttaattaaattctctccttcggggatttttttccattaggtcgtccgttagcgttcgattgctctagtcaatttttcaaaatttttgttgaaatatttgtcgtgctctgaagggcgtgggagggggggggggggggcgaaggcccaccacgaggccgcgaagaggccgagtgagtaccttcggtgcaggaaaattattaaattttaaaattttttaattgctttttaaatatgccaaaaaatgtaggcttaacttttttagtgaaaattcgatcactcatattttttgctaattgagcagaagcgtaccaaactttgcagggatactccccggtaaaggactaacttacactgaaatgagcgccgagctagctggctcaaaaaaatttttcgaaaatctgagtctttcgtttttatttatttgcaaaattaattcataaatattttttcagaaagggttctgaaacgcaccaaattttatttacatgttagtttaggcactctgatgctttttctatcaataatggaggtgaataaaattttaattgctttttaactttgggaaaaagtttaggcttaactttttagtga

SEQ ID NO: 34581 - DNA, 1224 bp, Heterodera glycines
gtggtcaaaccttcaccagttcattccccagtccgatccccaccaagccccaagcaaaacacaccattagtcggtcaccgaacgcaaccacaagaacggactgatcaactgcaagaaacagaacaacagacgccggccagcgacatgagatcagggatcgtgattaagattttttaagagggagaagtgttgtattattgtcattctattttcttggcattatgttattgacacgtcaccatcatcccacacaccaagatcgcccataaatactgctctcttccctccttcctcgcttcgggcgtcattcattctcatttatcatttgcatttcaccccacacactttgtctctctcttcacctcactttatttatttgtttattgattatatttcttcttgttgataaacgacacaacaaattggcgcagtcagcataggcttttattttaaaaatacaattcaaaggaaaagactattggctttacaagctgctaagtaggcctctgtgaacacacattaaaggaaaaacgaatttgggaacacgtaagtcaaagcgaccgctgcgtgcagttaaaattcgcaattcctctggccaaaggacacttaaaattactcaacaaatcaccgaattttactgccaattaaaatccaaatcaaaattatcactgacggccaaattctattcactttctcaattcactgtcattcaaatcaatcattctatcaccccggagcaactcaaagccattttggctgatcaacaggaacagttcatgaaattgttgcaaaacattcaactcggcaaagcaccaccgcaacaaaatccgtcacaatccaatgagatggacttttttgcaaattaagtgcacaaatttcggaatttatttacagcccggatgacaacatcacatttgacgaatggcatgaacggttcggctctttcgttgaacaggagggtaagcgatgtcagagcataacaaagtgcaactcattgtaagtaaactgggacggacgaataaaagcgttacactgagagtattcaaccacaaacaccagataaagttggtttgttagacacactatcaaaattacgcacaatttttcccgaaactaagtcaattttattaaaaggtattagtgtttttcactcaagtgcgaagtcaatcaagacgtcctcgcgtttggctcaaccgtcaacgcagtggcagaaaaaagcgaaat

SEQ ID NO: 34582 - DNA, 807 bp, Heterodera glycines
atattgtctttaactacatttacaataaattattggacgcaaaatttattggaagcattagtatgtgaaaatttatacaaaacattggtcaattattaatttgaactaattcccaaccgccaagagaatgccacgcgacagctgggatgggatacatcgcgtagacaagttgtgcggaagtcgatggccaacttacttgaaaaaaataacatttttacaacttcaaacctgaccatcgatttgggccatacatattctaatgtttgattttttaccggcagatatgaacatctctcacttagaatgctaagttgatcaagttgcctgagctgcttcctgctccactagacttgacactcagctcaatgtgctctgatttcgtcgtcctaccgccagctcaacaccgtacatctatgatgaatactggggattcattgatgagttgagatgatcaatctatcattcattatcaatctttgaattataactattcaacaaaattacagcagtcctagataggctagagcccagcagactgtgaataaagagcttgaatcgggatcagacaggatttgtaaagcagaaaatttgttctttttgattttaaaattttttttttaaatttttttattttctttaaatcttttttggaaaaatttctgaaagatcaacagctttttattaaaatttgttaattgatctaatcatcacttagccgagctatgatttcagtgctaaaaagtattcgatcagtataatcataaaagttgcctgcgctgatcagaaaaaatatgattcagatcagcg

SEQ ID NO: 34583 - DNA, 1067 bp, Heterodera glycines
agggggaaaggattgtttgaatgaatttgcatctcgttcataaagcatcgccaaattgtcgtcgcaatgtttgacaattgctcatgctgttgctggttggttgctcaaaatataggcattttcaacacatctttgcttttttagcaatcctctccaacggcaccggcattgtattgatgctccgctgtcactcaaagtcacattgtatcccttgcaactttgtcgtcgcgaataactgttgcaggagctcttgcaaacattttttaaagatacaattggacctgaaacagcaataagattaggatgggttaaaaaaggttttaaatttattgttttaatcccaatcgcaaaaaaacatcgtacattaaaacttcactaaaaaatagaaaactatattaactattgggcaaaacatcgactaagacacggcatccctgtgccaggtgtgttcgacagattattgattccgacataaaatatttatgataattagagaaaactcgagtattgagaatgaaactcgactgatgggtgacaaaaaaccaaaccgaccgagacacagaagccaaattttcattaaaaggtttgctaggttatttggacaattttttgtgatttaagattttcatgaatttacggcgatcgacggagagtccagcgccgagaaaatacgaatttaaatgtaactatagtcgcatttttgatttttaaattcaggacaaattgggttaaattatatgttgactcaaaactcattttcttgacagtaaagtttcgtttctttttttactttgcttttcgaaatatttgttgccgttaaatctggcatcccaaccagtacctgcaattatattattacaatttatttattgtgttaccagtctcagcaggaatgccagtaacaacaggacggtcatctacagcattagaaaaatgtgtcggatcagtagtgacaacgccaaaaggaataggctggcttaggataaccataaacagcgaagctgtccacttgattgaccataattgttcccatcatatccataagttgactgatgattgccgcttaa

SEQ ID NO: 34584 - DNA, 1007 bp, Heterodera glycines
  unsure (1)..(1007): unsure at all n locations
gttgtccatgcggcacaatttcatcgattgtgtcgttgtccattgcggttgactgatcgcttctctttgtattggcgattcgatggtccaattttgtcgctctgagcaatcattgagaaatggaaactaagaaaagaattttcaacggaaattgaattgctgaattttaaataatttatttttctacagtatcaaatttaccgtaccattgccgtgtgacagtccgcgtcatcactcgcacattcgcagaacacctaatgtacaaaagacttactgtactgcatgtacagtatatttttggtaatttttcctttttgaattttaaaactctttttaataaatatattctttttaaaatgccatgccatcgcttgcgaaagcggagcgtgcacaaaatgcacgaaacggtgcaacgcttgcgcacaatgcgcgggccgtctgcgaccgcaggcgccgcggtggtgaccgcatttgatgcgcaattcgctcaaatgccaacggcacggctcgtccatgtcgcacagggaaagcaccgccgggcacgacgacgcccaaccgatgccattggttgtcattgcatcggaaactgaaagtaataacaaagcaatttgtcatcatttttttatttttaactcgtttttaaacaataattaattgctatgtttaaaataaaaataatttatttaaattaattttcaaattttatggctgttttttccccaaaaatgactcaatttctgctaatagtaaagagaacaacagccgccagcgcagttttgtccacattttcctttatttgtcggctttttcggttgtccgattctttcgccattcttttttcgtaatttccggtggctttatcccccggtccaacttcatttnagcagtgagaagcattggggagggggaggggagggacacaaaaagcattggtttgaagctgtggntgtcagaagtggccatcttcaccgctttgcctatgttttgtctctgaatggccaaggtgt

SEQ ID NO: 34585 - DNA, 614 bp, Heterodera glycines
cgtgcggttccccccccccccccccatttttcacaaactatccgaatgccaatgccaatgattgacttacccccccccccccgtcgatgttttggtttctgttctcttcgaggtcagttgaatgccgagggattaagggaatgaagagccattggtgagaaataatgagggggtgagttttttggcatattaaaacgaatgtcatttttgagtaaactgatgaaaattaggagaaacaacttaaaaattaattaagatttgtcttattttgggaaaagggctgaaactgaagacaattatttgttgcatttgtcattttaatgataaattgatacggtattgcatttacagtaagaaaaggcattgacaacgaaaagaaccaaaaaaggccaaagaaaaatatttgaaattttttcttccctcataaaaaaataacttaatgagctgaacaattgggaagaagaacccacatacagcatctgtcccttctcaacaccgtattcccattcctaacacaaaaaatgtcacgaccatctgataagcgcaaacgatggatgctcaaggacagtttggcgaagtgacgtgtccacggcacttccgtccccgtcccatca

SEQ ID NO: 34586 - DNA, 1276 bp, Heterodera glycines
  unsure (1)..(1276): unsure at all n locations
gttagttcggatgttacgatgtccaattctctccatcattcattatgctgtgactacgttacaccatcttttattgtacgtggaaatggcaaaagaagaagcaatcgtttgtggcgcactcgaggcgcttgttcctctccttgctcctcaaactgcaattccccaatcgggaccaaacccaaaacttcaagcaatggttaagtcaagtactcattcatcctataaatgtgttgtttgaggttgctgattcactttattttctgctgctggacaatcttcaatgcaaactcacattcctatccctccaaggtccacgatatctcgtcgaaatcctcaaatcgaatcccggatatgtaaagttgttttacgccgttgtccgttgtattcgttcaataagcacttgcgccgaaaacaaagcttcactaattgccataggtataattttgattttttttttgttgctgagtcgtaatttgtttaggtggccttgaacttttgcatcgggctttcaattttatagatgatgacaaacgaaaattgacgacattaagtgcgattagaaatttgtctgacgtggccactaatcttgaaacgcttgcgccacttgtggctgagttggtttctttgattgccgaccacaatgacgaggaattggtcagttgcgcctgcggaatcttgtcaaatttgacttgcaacaacattctcaacaaaactacagtttagtttcaaaaatcatattttagtttggttttgctaatgttaggtttgcactaatggcggagtctccatcctcgcacgggctctctcaaaattctccaacattgaggatgtcacagaacccgctctgtgtacgcttagacattgcactgttcgtcatccgcttgcgtaccaagcacaaaacgaacttcgttttgcctatgcaactattttggttattttgcatttattaagatcgaccaaatgtttttttagtcccttttatccacgcaacgaccgcccattgtaaaagctgcgttgggccttgtgaggaattgttcgctttctaacgagaatttgaagctaattctctcggttagtggctaaatctttaaatattggaaatccactcattgtttcaaggaaaaaaatgccgacggcgaaactgtactatcactgtcagtcgcattgcttgaacagtcgggcaaacagttggcccacgaattggagcggtctctggtgacggagtttctcttctcgaaatggntgaaggngcaatctctgcgctacaccactcact

SEQ ID NO: 34587 - DNA, 1310 bp, Heterodera glycines
gtgaggggaggaaaaaagaacggaaaggaaaagcggcaattcaaaaatacgtttcaatggatttagatgaacaaattgttaattaatccttcgcttttactttgttccggcattgcatgtttgtacgggtctttccataatggcacttcctcccccttttcgtcccttttgcttgcggcgtccaaattctgttcaagaacacgagaaaaatgaaaagacgacacttcaattgtctgaggatttgcgaggcttttgcgaatcgcgcggcgataacaaaacgaaaacatgctaatgaatgccgcaaattacgaaaaattaatgcttttggaaataaatgttttgatttaaacgattcgtaataagaaattgaaagcaagtctgtctttcaaaacaattaaaaaattaatgagtttccgtcttttatcaccacccttcgcccgtcgatgttcggctgttcacaaattcctgaatcagctgcatgagttctctcttcacttcatccggcacaattcgacgcgaggcatccttcagctcgtcaaccatcgcttgcagttcaacgcgttcatagccctaataagaaaccatttattcgtaggtgtaatttccaaaataggaaagtttatttaaaacaataactcatgcggccttattcaccttcgctaccttcttcgcgatgtactcctcgcacatgctctccactcgtttcgcccaccccgactcgtgaagtcgtcgttccacaacctcttggacccggtctttctcaccactctccacaaattccttctccaagtcttcttttcgttgcaattttttcaaaggatttaaaaatgaacgtgccgatgatccttgcattatgacaaaaaaaaatggaaaaccgctttaatttctcacataagcatttgtccaagtataatggtttaaattaccaaatttaattaaatggaaggaataaaaaagccatcaaaaccaattagatattaaaagcagagaacatataaaactacataaaaatgaggaagacatgaaagtccaccaaaggaaaagaaaacataagaacgaatatcatggtttttctcattatcaaaagggtccagatcagatcaaccattgttttgcaatcactgatcaatatggtctcggtcgttcagcaaatccccctcctccaccgccttcgtacccacgcataggtccccctccgccagggaagccgccagggggcggcccaccaaatgcacctggcggcggaccacattttgcggcctttcggcgcatggcacggagtgcactccttacgaaacgcgaaaattgat

SEQ ID NO: 34588 - DNA, 1496 bp, Heterodera glycines
  unsure (1)..(1496): unsure at all n locations
gatgccgttcatagcattaaaaaaaataaataaataaaaatggcacttctatagcatttggggagcggcattttttccaatatcgtaaatgtccccgaaaatagaatgtcaattcacctcgcttttcgtgctttcccgtccctatgtgttgcggaagtgccgcacaattcgaaactgttttcaattgtcgtaaatttgaatttacatttataaaacatttaaaatacattatatgtaccataaaatttctctggcgttttttttttgtaaaatgtaaaatttgttggttttggtttagatttttgacactgacaccaccacattttcttcctcctttcttcttccttccttctctccaccccatactttttttttaatacaaaaaacgttatttgaattggtgcaacgaaagcgacgacgaaacgacgcagtggcctctctctctctccgtatgatgcaaaacccacggaattataatcaataaaacacaacctgtgctgtttcaacgatggaaaaagtatgttgggcgtctccgcccgaacattcggtgattgaaaaaaaatctggattctatcgatgataaaattgtgaatttcggataaattgttggattttgggaatgaatgaatgctggtattccttgtggaaacggggacaaatcgtgagaaatttagcatggtcgtgtgtatgatggataatatcagtagtgatcaatgaacaaaaaaaaaagtcgggaattccaacggggaaaatgcccgattttatagatgctacataatgttgaggatcccgggaaaaatggcggatgtttcctttataatactgtcggggattccagggactttattgtcaggcaaaatgtccaaaaataaattcggaactcgtggaggaactctaagaaaaaacatttacaatgccaacaaaaaaaccatttttcaaaatttaaatttcccaaattcctaggttctttcccctttggtgctgaacccggcggcggcgagcagtagtagcagcaacaataacaacaacatcaacagtggaattgagcacggattacctctgagcagcggcagcagttgtcaaagcagcggcgaattgttggacgacagcaggggacgcggagggggcggagcagtgtcagcaacacaaccgcagcaacagcaacattttgcgcaccgaaaacatcaccgccttcaactacaacaacaaaggcagcaaagtcaacgaaatttgttgctcggcaacaacactggtgctgatcccacgcttggcaatccgtttgttgccgattttgcggacgaagacgaggacgacgatgccattgcacggcacatggacattggggatgaggtgagtgaaataaattttggttggaatttagtacgaaaacctgagggttcgtttccgaaatttccaattgatcagcgcttttcggcgtttttttctaaattcgaaatgcctctaatttacaaanaagtaattcctcgtagactttt

SEQ ID NO: 34589 - DNA, 1370 bp, Heterodera glycines
  unsure (1)..(1370): unsure at all n locations
atataattatatttcttagggcttaattttttaggtagtaactataaaacacaaggtttaaaatgctgttttaggtaagggaaattatattaaaatcccgaaatattaaataaatttttacgaaaaaatgccgaaatattggaaaaaatttaagaaattgaaaaattttgtgatgtaaaaaaataattaactgctcataacactaaaaaaaatttcttcattgattacaattgctaataattatatttttgaggtttttaatgcatttttccaaaataattaaaattaaaaaaacaaaaattttggtcaagaaagaaaaaaaaattacaaaaatcaaaattttgtcaagaaaaaaaaacaaactaccaaaaatggaaaaaaatttttaaaaaacgcctatgtatttacaaaagttcaagcaaaaaatttatttttaaaactgtaactaataattacatttctttttgaattttagcaaatctggaaaaagcaaatgagcaaaattgaaactgtcaaattgaaatcggatatcgaagaaatcaaatattttcttccattttgtcccaatgtcaatctgcacaaaaggacatgcactgttgtcacattcggtagagcaaaaatatgagaaattttaaatgaaacccaaatttttgctaggtgttgggcatactgttaaggctgaaaaagaactgctcaaaatttacccggaatgccatttgatcgctgctgatccgtcggatgaaatcaatgccaatttgactcaatcaatcggtggcacttttgttcatggcccaattggtgctgagacggccaatcaacaaccagtgatctcatggggaggtaggctaaactttatggaaatgcttttctttaatatatttgcacttcactaccagtgattgtaggtggcattccgaggccgaacattttaggaaatcggaatttctaggccaaaagtttttaggaaaacggaattccgacattgcggaaatttctaaatttttgaaaatggataaatttttcaattttatttttttttagtagcatatatgtaaaatgttaataaatatgattaaaaagtgtatttaattaaaaagaagaagtttaaaaacaatatacaacaatttgaaaattagactgcataaaatattttaaatcggtgctggtgcatttcctaaatccgccaccaaaatagaatattaaattaatagatgaatattatgtattttcgagcaaatattaagttatttttgatatatattcgatcttttactaattatattataataccatgctttttgtatacataaataaacaaacttaatttatatttatttanatttaccgtgatggcggatttagacactttt

SEQ ID NO: 34590 - DNA, 1181 bp, Heterodera glycines
  unsure (1)..(1181): unsure at all n locations
taaagtataaatgtatattttattatagtatgattaccctatctttatttactgannnantctaggtgttattggtctaataaatcgatgtatattaatatatagtttaataaattataaaattttgcaaattaaagccgaaagattatttatatgcaatataaagcttcataactccaaaaatttgatgcatacatatatatagngaacnctctaccttaataattttcctgcgccgaaggcccaccacgaggccgcgaagcggccgagtgagtaccttcggtgcaggaaaattattaaggaagagagttcattatttatttgttttttgcataattaatttataaatatttttttcagaaagggttctgaaacgcaccaaattttatttacatgttagtttaggcactctgatgctttttctatcaaattgggagatgaataaaatttttaaaaatttttaattcctttttaaacaggccaaaaagtttaggcttaactttttagtgaaaattcaatcactcatttttcgagtagtgatcagaagcgcaccagattttgcaggggcctaaaaaggtcaaggaaaggcgtctctgcgttgatttagcagtagtacctatgaatttaaattttctatgaatttttaaagttttttgaaatttttttaagtgcaaaatggtggtgtctgcaaaaaattttcaccggggtttaaaaaatctaggaaaattagtaagcatttgtagtgttccgatacgtatccctgcaaaatttggtgagcccctgatcaattacaaattatttatggacgatcaaatttttagaaatttttatttatttttgcataattaattcataaatatttttttcagaaaatgctctgaaacgcaccaaattttatttacatgctagtttaggcactctgatgctttttctatcaaaaagggagatgaataaatttttaaaaatttttaattcctttttaaacaggccaaaaagtttaggcttaacttttttttcagaaacttatcagaagcgccccaaactttgcagggatactgaaaggaaaagaattaacctgttttatcacattagcttgtcatcagtttttataaaaattnntcaaattctgagtctcctattattttatttttttttcanaattctgaaggggcggggggggg

SEQ ID NO: 34591 - DNA, 950 bp, Heterodera glycines
  unsure (1)..(950): unsure at all n locations
aatattgtgaacttgattataatccctagtgtaagtaaccgatattcatacaaataaaaacatctctttgccttaagcaaaataaataataattaagttattaattaccgagtctgcaataatataaaatatttgcgtactgtgctttgtacaacctctgaggttcctattaggaaaagccttcagattaagcctatatcctatacgagtatggcttttaaatgacaagataaatatatgttaaattaaaatgctgacacaaaagacctatgttttgtagaaaatccctaatagtttcagctttggctagattttcagcgaatatttttgaacgaaacttttctgtttgttgaatttatccagaaattacagacacatttccatgaaatattgtgaacttgattataatccctagtgtaagtaaccgatattcatacaaataaaaacatctctttgccttaagcaaaataaataataattaagttattaattaccgagtctgcaataatataaaatatttgcgtactgtgctttgtacaacctctgaggttcctattaggaaaagccttcagattaagcctatatcctatacgagtatgggttttgaatgacaagataaatatatgttaaattaaaatgctgacacaaaagacctatgttttgtagaaaatccctaatagtttcagctttggctagattttcagcgaatatttttgaacgaaacttttctgtatgttgaatttatccagaaattacagacacatttccatgaaatattgtgaacttgattataatccctagtgtaaataaccgatattcatacaaataaaaacacctctttgacttaagcaaaataaataataattaagttattaattaccgagtctgcaataatataaaatatttgcgtactgtgctttgtacaacctctganngtcctattaggaaaa

SEQ ID NO: 34592 - DNA, 1326 bp, Heterodera glycines
acctcatattttttctattcttctgttctctctcgtcaatttctctgtctcgctttgctctctttcttttctctgttttctttctctaatttctctgtcttaatttccggtacttttcggttttgaggccaagatttaaattttaaaaaaacaaaggaagcacataattgcaaaaactccgtgccagaattatattgggggcatatatgtcacaatttgagctaaaatttcttcaaatggcactgcgccacttttttttggcatctttgcgccagaggaactcgcacaaataggagtccaccatttgggagtgcgtgccgtgttgcttttttgttgaatgtttttgccgagcgccaagtgcgctcaatcgtttgtgttgggccccgaaaaatgtcctttcgttagtttatgcaatgtgaatgaatatttttgcatttctgcgcgtctttttttaaattcaaatctaggccccaaaaccgaaaagtaccaattttcctttaaatttattgtttcttttcctcccttctctctatttctctgcattgcttgcctctttttttctctcttctctttctctatatttcttgagggcacctcgttcggtcggggtcgttttcgcgtggccgttttcgcgtggccattttcgcgtggccgttttcgcgtggggacgttttcgcgtggctggggtacgttttcgcgtggccgttttcgcgtggggtacgttttcgcgtgagtacctgtttaggactgaaattggtcggatttgtgcaaaacatccatgtttcgaatcccgaacccgaattcggacaaatttcttaacttttttatttcttgcggctagtatcttctacaataatttgtcagtttggtcggatgtgcgtcaaacggaaaaaattattaaaattggttctagtcggttttacgcgtcccatgacattttacgcgtcccatgacattttacgcgtcccatgacattttacgcgtcccatgacattttacgcgtcccattacattttacgcgtcccataacattttacgcgtcccatcacattttacgaatcccatcacattttacgcgtcccatgacattttacgcgtcccatcacattttacgagtcccaacaacactttacgcgtcccatgacattttacgcgtcccaacaacactttacgcgtcccatggcattttgtgtccatggcagggatggcattccgaggccccaaaaattttcggaaatcgaaattccgtgccatccctggtctcatggtattatagttgtcctaatgtcagagagaaaaacttttttttgttaggtattcaataaa

SEQ ID NO: 34593 - DNA, 1784 bp, Heterodera glycines
aagcagtgcattttatggtaacgaccctgaaccaggcgtgccaatggatgtaactccaatggcgcaatgtgcattcgaatgttttgtgttcaaggtttctgcagttcgcactaattatcgcagttggctgcgttcttcatcgatccacgagccgagtgatccaccgataagactagaattcattcttcaacagaagtgtaaaaaaaaataatgaaaaaaaaagaaaaagctggcggtgcccgagctgacactcattgagtcttaagccacgtgctaggccaagcacgggcactaccgcgtcgtctcatcacggccacggacgtagcagcaagcacaaacacaccgctagttacggcacgtaagaccgggaacgaaaccaccatccccagtcagtgtgttatgtgcctgccacaacaaccgctcaacgacgcacagacgccagcacagccgttaggtcgccccacgagcgtgcatcccacattggcgcagcgaaccagccaagcgaggcggcccgccaccgacacattgccacgcagcagccatacacaggctttcacacgtgcagcactgagcggtataccacagctccaacgtatggaagcaccccaaaagcatggctcgtgaggcagctgccccgtaatgttgggcagcgtccacaagtcatctcgaacgacctgtgcccatcagcggacgggggcatttggtggtgccaacgctagcccaacaggacagcaggtaggtggtgaataggaatcacttgggtaatgatccagcagcaggttcacctacagctaccttgttacgacttttgcccggttcaagccactgcgattaaatcggttccagtctgcataccgaccgaagccggaacactaaccgtccccgaatttctcgaaatggctcagtcccggggcagcgacgggcggtgtgtacaaagggcagggacgtattcagagcgagttgatgactcgccccctacaaaggaattcctcgttcacggacaataattgcaatgtccgatcccaatccacggcaaattttcaccggtttaccaaccccttttcggggaaggacaagcacgctgattttgccagtgtagcgcgcgtgcagccccggacatctaagggcatcacagacctgttattgctcaatttcgtgcggctgaacaccgaaaatccctctaagaagttgtgcccacagaagcaatgagccaactatttagtaggctagagtctcgctcgttatcggaataaaccagacaaatcgctccacgaactaagaacggccatgcaccaccatccaccgaatcatgaaaaagctatcaatctgtcaatccttacggtgtccgggccgggtgagtttccccgtgttgagtcaaattaagccgcaggctccactcctggtggtgcccttccgtcaattcctttaagtttcagctttgcaaccatacttcccccggaaccggaagactttcgtttccgggaagctccccaccagggcgaataaatccgccggcggatcgctagttggcatcgtttacggtcagaactagggcggtatctgatcgccttcgaacctctgactttcgttcttgattaatgaagacattcttgccaaatgctttcgctgtagtccgtcttgctacggtccaagaatttcacctctcacgtagcaatacgaatggccccgtttgtctctgttaaccattatctcggtcagcaaaaccaataaaatcggaccgaaaatcctcttctattattccatgcacgaacattcaagcgaaa

SEQ ID NO: 34594 - DNA, 1109 bp, Heterodera glycines
ataattaggaaaaaagaaagcatatgccaattcattgcccaaattaaggaagattaaattgcggaaataattgcaagcgacgcacacaacaaacgaacgaatcaaatgatcacggacggagataataacagataagacacccccggcgggggggggggggggggggacacgcacgtcattaactttaaactcacattttgttacaatgaaactgctgaaaatgttgtaaacacccgacaaatttggataattaaacgaaaaaagtgaggtgaaaatggaaaaaattagacaaaaaaagaagaaaaatttaaggcttcttcaattcactaaattcaatttcaatagaaatgggtggaaagataagttcaaataaaacgggaaaaaaaggattttggaaattaaatttaaaaagttttctccccgacaatctgttcaattgtaattttgccttttcttccacttaacttttttacaaaatgattatcccctcttccccccccccttcgcttttcccactttcgccgtccgtcccttctcaattttcaacgaattctttcccccaccctaaaaaaaactgggcgtgagaagcggctgatattatttcattagcaaacaaaaaaaagacttcctcgttgcgaaaaatgggccccctcatttttcgtgtcacttttccctcggaaaatttcgaatgaatgaattaacaattaattgcttataaaaacagctcttttcacgcgcttccccccccccccccaaccgttcaaataattttttttttttttttttacaatttgagtaatttgaccaaacaaccgactgaaaaacaaaagaaaaagtattcctttgtgttgtgtttggtaaggggtacggtagtaaaaccttttcgatacggtgcgatttgttaaaattcgatctcaaaaaaggataaatagcgaacataatacgccgtgggttccagcagtccccctttttcacagtggaattttccgtttttacatcttatgattttcctcccatttcctttctcccgcggaactaccgatcactgatcactaaaagattactaatcggtcacttccttcaatttttttatctgttatggttttttt

SEQ ID NO: 34595 - DNA, 495 bp, Heterodera glycines
catgactaaattataaagaaaaaacctaaaaaaattaaggatcaaatttttgttttccagatatgggtctgagtttttaaattcggtaagcatatatcgaaatgaatttgaataaaacgaaatgaatttgagccaaaatatgtaacatttatagtacagaaatggaaaagtgcgactttatccaccccatccacagtggtgttcacctcagcttgtgcccatttttcatccacttgtggtgaatttgctggcaaagtctgctggtactgttgttgatcgtcatggcatcgattggacgcagcttttgccgggacaccaatttgagttcggtcccgtgcttcagtgaggaagatttggtgctgaattttcaggtttaataactgaatatttcttacacttacaacaggaattgttctctaattgactgacaacatcgggattctacccataaaaatgcaaagataccttgtgagatgtgctcggctgtccaatttc

SEQ ID NO: 34596 - DNA, 833 bp, Heterodera glycines
tcttttttctttttttctctttttccttccttcgtttcttcttgactatctctctatctctctttcttttttcactttttttctaactttggttgtctctgcttgctctctccacgtcccttttttgctgtctctgctcttccttttctttatgcttttccctccggtgcccataggccacgcccactgccccgggggcgatcactttcgttggtgggggagaggccaacaaaaaggccgtcccgccgctcgacaccgctcactttcgacttgacgaccacggccaaaccgattcaagaattgctagggaacttattgaacaatttcagcctttcatttcatttcgtattcattaattagccgataaaaatgtgcgacgaagaagttgctgctctcgtggtggacaatgggtccggaatgtgcaaggcgagtttttggatttgggaggattaaattaaaaaaacgtatagccgattcttctggaacgttttaaagaccatcgaatttcaaaattcgaaattaaaataattcttttttaatttacaattgataagagagaaaagggaggacagagaaaaagtaaaaggccaattcatattatcatatcagcagaattcctttgcttaacttttttttgcacattaaatttaccattttagcattttaattgtttaattttacgtttttttttgtctataaaaatgcttttttcacatttgaaaatggtttttgcatgggatttacgccagcttacaattagtcctttttttctgttcttctttttcctttccccctccattcccccgttgtctccccttttttccaattctctc

SEQ ID NO: 34597 - DNA, 1339 bp, Heterodera glycines
  unsure (1)..(1339): unsure at all n locations
acgtgtttgccatgacgaaagtgtaccacctgctccattactctgtttggatgctgacctcaaaggtgaaatgaaactaataaatttcataattctatattaatgcttttggtgttagctcgctcttcgacttcgcaatgaactggaattatgaaaaatgtgtacgctgatgcactttcagtttggccccaccgttgttcagccaaatttgtgttcttcttgcaaagtaaaagcctaattttttcatatattttttgtatttttaagcgaagtgttggattttccgattacgtactgcattctcacttcaaagtgtgaagtgatatacacaaggatgcttcaactgattgtccaaagatggccgaatgttgcacctgaaaccatgtcgttggacttcgagctggcgatgccgccgatgcaaggattcttcgacttttacagggttaaaatgccatcaacaataacccggctcaccaaatgatcacaattaccatgccaatgtagatgtaatctcgataccatcaacaattttcttgttggtttttctcgaaattatgaaatacgcccttaatcatttttcaatattttgttactttttcgttggaattcattgataaatatgttttggtattaaatttccatttttcgaaaaaaatcacaatagaatccgtgtgggacaaaaacagcttgtcagactaaaacgaccccctgactaaaacggccagactaaaccatttttgaaaattaacgaaattcggatcctagaggaaccgattgatattaaatttatttttgtagtgcttacaattgtatatgtgtacccaaaaaagccattcataatgggcaccaaaatggattacgccaaagtggcggacccgaagtgggcggttcctgcaaactaactaaaagtctaagtttatagatattctgtaatttttttcctcgttttatttacatcacttttatttccttacaattttaatcaaattccaatcattatttttattttttatgcttaatttttaagtacgctttttcattattagagctcggaattatatggaaatccatatttttttcctggactgtgggaggcctgaaacgcacaaaaaacatgtttttagcttggtttgaagcttccaggatggagttctatatccatatattccatatttcgcgatttatgtccatgtttctatatttttgcatttaagtccatattttatttccatattttggcattttccaaaaaacctattagaacggccccatcagctaaattggncgttttggntctagagaccngnaaatttttcaaaaaaaatcattttttcgcaaa

SEQ ID NO: 34598 - DNA, 1262 bp, Heterodera glycines
  unsure (1)..(1262): unsure at all n locations
aaaaacaagtcacatgaaagtctgatcttcagggggattaaaagtgattaaatgaaaacaaattacgttaattgttaaatgnaaacaattaatcatttgctttttattttttcgggtgtntaatataaagaataaattaattattttatttaagtaataaaattttcattatttattaaaaatagaccaaaaaatcgcgaataaattcattaaaaaaaaaagttttatcggtataataattttcctatgacattagttacaataaaaataaatcaaataaaattatatcaatgtgttgtgttatttagggtaaaaaaaacaattaccaaccaaaaaaaaaaacaaaatttcaaatatcaaaaatataaaggtattccataaattttatttgtttcataaacaacacaacagaaatcatcatcattttatcatctaaattatttgtcccaccaaagatactgtaaaaaaacccaagaaggatacagtagtaggaaaagttacgataggaaaatgttatgcaacaatttttttgtctcccatatttaatacaagtaaactgagtcaaatgcgccggttccaactgaaacgccgccctcattgctggatgccaacttggtacggaccaagtgaccaggctggtcaaagtatggcaccgtgccgtcaactctgttgccaagcataaagccatacacgcccaactccatgacaacatcatcgaaaacggcctcatcacggctgggccagactaagtagttctaaaatgaatttaaaaatgcttttgtatttcaaataattaaaaaatataattaattatatataattaataaatattttaataacataaataatactaaatccataattaaattcactaatttattttgaattgaaaaaataaaatatgaaaattaaacaattttccaaataaataggtgattttttttttactaatttgctatacaaaatccaaaaacaatttccgtttttcttttgctaaaaaaaaattttattataggtactcaaaaattcgaatcatttttgttattttacaaaataatttttgtgcgactaacaaacaaatttcgcttacaattagttgaattgaaatttgttataagcattttaggcaataataaatgaaaaattagccaatttaaaaattaaattaaaattatcatattttgaattacataaaatactctaataanagatgaattttttgaaaaaaaaacttataatcataaaataattactgatatttt

SEQ ID NO: 34599 - DNA, 216 bp, Heterodera glycines
agttcagcgctaccgttcactacatgagctgtacaggacaacaaattgacaggcttcctgtaccaataatatcctcattggcaagatgcccatgaggatattatccatacaaattttctaattttatttttgttcgagttcggatcaggggttcgaaattagcaaaaatgggtgctgtattcgtgatcagcgacctcaaaaaccccttaaaactta

SEQ ID NO: 34600 - DNA, 748 bp, Heterodera glycines
cccccgttgaatatcctatgaagccacaagattttctccttttgtatattttgtaggattatgttttataattttatttttagcatcacggtcataattttttaaaagtctccaattatctgcaacatgtccggatgtggaaaaggaggaaagggactgggaaagggcggcgcaaaacgccatcgtaaagtgagtacaaatagaataatttacaaaaaatagaaaataaaagcgggaaaatacatccctaagaaatgacccgaaaaatttcagaaatacaacgctgagacttgaaaaatttttctcaaaaattgatcgccaaaatttgatctttttgcttcataaaaattttcttattcgaaaaaatctataaattattttattaatcatttaaatgcccaaaagtgaattttttgattactttttacgtcttttcataaaacttaaatgcctttttttatgtcttcttagggatttttgtgccttttaatgccgttcttcaatttttggtgtctattatagtgttttttgcgatttttttggtgctttttcgagacccctaatacttatgataaataaattatgtaattaaatgtgaaatgatgttttcggttttgtttttctcagaataactgctacctattcctattttcaggggactcgttacaacatccaaggcatcaccaaaccggtcatccgccgattggcacgttgcggaggggtaaagcgcatccccggaatgaactac

SEQ ID NO: 34601 - DNA, 777 bp, Heterodera glycines
taacttatcaatgataagatgttaagtacctaatcagtgataataaactaataaattaattttttacagttaaattgttttttacatatttatttacttttaaaagcacttttgtttttcatttgtcaacacctttctgagtcccattagtcatgctcaacacggggttggtcattcccttgctgttatgaaacagaaataatttcatgtttagaaaatttctcggcaaaacttttgtcataacgggggcatcgcgtggcattggcaaggaaattgcacttaaattggccaaagacggcgcgaacatagtcatttgcgcgaagacaactcaggacaacccaaagttgccagggacaatttacagtgcagcggaggaaattgaaaaagtgccatttttttggggggggggattagcggaatgtttagtaattaaaccgtataatgggatgacactcaaaggtcgtgtatcgttttggcgccgacgttttggcgccagcccaagtttttgggttataactttttttgttgttaaccaaatccagcaagcttggtatcaatcgaaagcttaacatgtttagaagatatttctaagctattgcttcgcgattagacaattaccaaaaaagttataacatgaaattccaaaaaagtcgaaatttttgagtttttttcttaataacttttttagaagctaaaatttttgtgtttttttgtaagggtaatagagcttgagaagggctttcgaatgataccaagattgatagatttgggcaacaa

SEQ ID NO: 34602 - DNA, 1072 bp, Heterodera glycines
  unsure (1)..(1072): unsure at all n locations
ttcgaatagcaatcgattgggctgactagactccatatttgcaggaatagcaatggcaggtctatcttaaaggcctgacgagttatgtttcgacaaacatcctgtacaccataaatcgattttcaaatttagtcgaactatataaatttttcaaaaaattattcatcttttttatggttagcgcatatgtctctagctttatagaaacggtccccgaatctgcgaggaactacttttttgagaatttctatagattattattctgcatgaatccttcgcttaaattcccatttatctcataaagtcagattaaattaattactccgatttgttttagaattggtccaaacacgcttgctaatagcttttcttttcgaaaagagaggcgaggaaaaataaaggttgcatccaaatgtaatttttttttacattgaagcatttggatggcttgctgtttacagttggctaagtcttctttgcaagaagcagcacaacttttgtttgggccaacgaccccaaaccattcgaatagcaatcgattgggctgactagactcaatatttgcaggaatagcaatggcaggtctatcttaaaggcctgaagagttatgtttcgacaaacatcctgtacaccataaatcgattttcaaatttagtcgaactatataaatttttcaaaaaatgattcatcttttttatggttagcgcatatgtctctagctttatagaaacggtccccgaatctgcgaggaactacttttttgagaatttctatagattattattctgcatgaatccttcgcttaaattcccatttatcttataaagtcagattaaattaattactccgatttgttttagaattggtccaaatacgcttgctaatagcttttcttttcgaaaagagaggcgaggaaaaataaaggttgcatccaaatgtaattttttttttacattgaagcatttggatggcttgctngttacagttggctaagtcttctttgcaagaagtagcacaacttttgttggggccaacgacccccaaccattcgaatagccatcgattgggctga

SEQ ID NO: 34603 - DNA, 932 bp, Heterodera glycines
  unsure (1)..(932): unsure at all n locations
atcaaatggacggactttgctcggaatgacaatggtatcgtcggttagaaggcgctcttttgcatcgagaatctggaaacaaaattttgctagtgtggggtatttgaattttttagaatatttgagttttcccttctcaccgtttctgcaatttgctcgccaaaaatggcacaatcgaccgtctcagtgaccaaaatatcacagcgttccttcagttccagtctcttcgagtgacattcgtgcagttcgatgcgctcctttgcataccttccgttgattgaaaagcattttcttgccacggaacacatcgcttcgtccatttcacaggcaacgcagtgggggtcgaccatgctaattgagaaacgggtttcaatcatacttttcttgaagatgaattaaatcctccaaaatcattttttttaaattttaagtataaaagaaggttggccaggtaaggacgagggaattgataatgacgtttagatgataaggttcagtgggagggttgtgggttaggtgtcatattttgttgccacctgtacgccgccacaatgctaaaaattccggtgccgcagccaatgtccaatagacgtggtttccttccgctgtttttccgagtgtccaaagcgcgcaacatggcctgggatttgttggtgaaaactattattgttgtccctctaatccgttgtgttgttgcgattgtcaacccttctttcgtcccccgcctttaaatacctcggcaattcgcgtgttccgttgtctgtcgtttagcatccgccaatgccacgcgtcgaacagattggagcgcgcgttntctctgctgctgctcgcgtgaagccattccgtgtcatcacgagcgaattcatagcacggctgaataatcgacagagcgcaaaagtttacctnncagcaccattaattagttgataaaa

SEQ ID NO: 34604 - DNA, 1176 bp, Heterodera glycines
  unsure (1)..(1176): unsure at all n locations
gaagttggacgtgcacatcagcnccatggcaaattgcgctgcatggacatcgcaacgtgcggacgcgagtgttattactgcgactggtgcaaagagagcaggtggaaaagtgggagcaaaaagataaatagaaattgccaagtgttaggcctcggcgggtgggaattgaaccaacgcctaaaccattccctcgtgaacatttttaccactgggctatttttgggggtttctacgggttttggctgcccattcttttgttcctctcaaaatggcactcattcatttgatggcattgaacagaaaattgaaattgctggagaacactgatggcaatttgtgccgcgcaacggacgaacggacgtacaaattgacgacgaaactttgcccaccgccggaggaccccaacttcacactgtgctcgacattcaccaaaagtgtgtggcaaaaggactattggcagaagcaaggcgcaattgacgtgtggatgaaggtgaagcggaagaagcaaaaagacggggaaaagcgggggaaatgcttcgaattgcttcaacattttgccaaaaaaaatttcagttttttgaacgggcgcccaaccgagcggagatggaaaaagagttcttctcgcagttggacaatcctttgctgggcaaagccttcaaattggccatcatcggcgaatggttggccgccaacagtttggacgtgcgtaaaatgggaaagttgcgtaaaatgccgcagttgtgctgcattttcagcagggaagttacacgccgaccaactcggaattgttggagttttgggtgtcgaagagagcgcctgaccgattgttggcctgcgagcacggcgtggtcgactacgaaattgagggctccaaagtgaaaacgaatgttttgttcgaagcggcaacgaccgcgggaaatgtaaaaggacaaaacgacggaagcaactgaacatttgacggtccctttcagttgccgaacattttcaaggacaaaaagtgtgccgcgttcgaaaagttgcaggaggaacggttcaagcaggaggtgcacgagttcaagcagcgcgggggcggcggaggcattttcggcggcattggcaacttattcagaagcggngggagatgaagccgagttgggggagtgatctgccgaaggggggggggactgatcgaatgat

SEQ ID NO: 34605 - DNA, 916 bp, Heterodera glycines
tgtcgggcagtattggacacgtgcagaaggccatggaactgctcaaggcactgaattttttcggtagcatttggaaattggagaaaaaaatatttaaaaatgcaattaaattgcaaacattttgaattctcagagattgaaaatgacctgactgatgctaacaatcgaattgtggacgctttttcaaaaatggagcagtcttttgatgacgcacaacgccaggaaatgcaaaaggacggatggacatttctgagacaattccaatacgaccaactttgtacagatcaatgtgatcacttttatttaaaccatccaatttttatatgtaatcttttcgaattttatttttcaccacttaaagatgctcaattgcccgaaggatttcgccattctatcgacgaattttcacaaatgccaaaagaaacgcgtgaagcaatgctatggaagcgaattgagcgcatttcgaggaatatccctgacgtaaataggccaattatggcaattattaaggaattaattggtggttatgctcaaaaaattgtgcaaatttatgaaggaaatcgctgataaattggaccgacggaagatggaaaagaacgaacgtttgtcgggccagcggcgacgaaaacgacggcaattggaacccatcggcggcatcagtgtgctcagcccaattatgttgcaaccgtttatgttttcgccgacattgacgtaacaaattaacacatttcattaatgaactattaattgataattaaaatattatttaatgaagaaattaaaaattattgagaaataatgccctatttgtcaatcccaaatgaattttcattattataaagcgtaacttttaatattttttgctaaactatgattgtgataactaactgtgcatcgaagaaaatattttttctgt

SEQ ID NO: 34606 - DNA, 739 bp, Heterodera glycines
ttaccccctccatcccacgttttgtgccttcgcacttattattttcagtttctgttttcccttttttcaaaatttacccccccccccgccccccccccccatcctcactcttctttcattgttgtctctctttttcatcattgtgcctggttgcactccatatttcatacacacttttgtcacgctcttgcccctcttcccgtcttccctcattcccatactcactcacctccctttgtcagccaccaccacccccagcagcagtacacacacaatatcgaatttttttttttactcagttttcgtcgccttcctttttccaatcttttgttcaaaggttttttttaaacacaaaagttccgccactatggcgttttatacacaaatttaaatttcaacagcagaccacccgcggctcttgatggggcgtcgttttggcgtcagcccgagtttttggactgtaacttgggtatctttagaaagctaaatatatttaagagttgttcaaatataatgcatggcttttagacaattacaacaacaaaaaaaaagttataatatgaaaatagtaaaaaaaaataaaaatttttgaaaaaaattttcttattaactttttatatgttagaaaatctttatatgcttttttcggcgaataaaggttgagaagaattaacgaatgatacatacaaaacctgtgggagttggttgacaataaaaaaaaagaattacaacccaaaaa

SEQ ID NO: 34607 - DNA, 1196 bp, Heterodera glycines
tgcaccatatcgtagtatgagttacggtagggagggcttgagttgtggtagcaatatgcccaatttggcgtgtgacttccaccgtagccattaactttcggaactacggtactcaacgaattaatttgaggacagcgttgaatctaaaaaataaaatgaataaaatttagttaattgtaaattttttttattaattttaattattatttcaccattgccaatgttcgtggtcgtgtttctatggaattgaagcgaattatacacggtgaacagaaacgacgtggtctatggccaacagcaaatgaatcgggaacattcatactttttgtaataattcttaattctttttaaattatcatttaattaaatgattcaaaatatttttattttaatattttggtgaaaaatttataaaaataaatataatattatttacatttttaaactcatatataattcttgctatttttggcactttttagttttataattataatattagtttaatattatttatttaaaaaaatgaattttagtgaaaattgcagctaatctttggttaatcgatgatttaaaagtgtgaatttgaccccggaacaaaagaacaaatcaacgaacaaaaaatgacaaacagctgacgagagaaaacttttaatgggttacttactcacatagcaaacacatgggaatttgaattttgatttttaaaattaggaaattaattcattcaatttttcattttttaagtttaattagtcattattgttcgaaagtgatcatgcatttaaaaaatattatttttaacataaaataggtaaaaagaaaaatcttttaaaaatagaaaaattatttttcgagtattgttggatttgagccgtatagggcagagcacaaaaaaattaaaatgtcctgatttttcaggatatgtaaagatgcaaaaataattaaaaaataattacttaagtgcaaaaaaaaataattgattattatataaaaaaaaaattacatttattcaaaaatatttcatgtaaaaaaaaaattcaaaaaaaaaaaatttaaaaaaatttactaataaaattattatttaaaaaaaatttataaatcgtaaaaatgcattttttatgtttaatttttcttatttttttcttttaatcgaatccggcaaaattcgacaaaattttgatgaaatatttggc

SEQ ID NO: 34608 - DNA, 724 bp, Heterodera glycines
  unsure (1)..(724): unsure at all n locations
ttgttgttctcccggcacaccaagcggcggcaacgttaagggagggcaatgagagtgccgngccatgccatgtcgtgcgcggggggatgatctcgctaacactcgaaaatccccggcaattaaattcggcaaaaaacgggcacgggccccccgaaatccgacaaatgcctggtttctaggcaaaatctcgtaaatccacggaacccgagtggtaatccgggaaaaaaccaggcatttgccccaaaccccaaatttaatagtgattcatgcaaaaatctcttgagttgtcgagcgcgaaatggaaattctcaattttttaggcttagttgcttggttgtaaaattttccatttttctctccttctcgtctctctctctctcttttttgtcattccatagttcccgaggtcattctcgatttagggagctcgtctgattattaattttctttcttccctggagactattaacaatgtctagaaccaccaaagagaataatttaattcaatcgagaatgcaatactttcacattgattcatcgaatatttctggaatctaatgcgtgaagccatcgggggaggggagaggaacgcgcgaacactctgatgaagattaagaaaataaaaaattttccttaaatttctcataaaaaataaattagggaaaaatcttttaaaaatcttaaatccaggtcctatgctaaaaaaatgatgtcttttcagctg

SEQ ID NO: 34609 - DNA, 881 bp, Heterodera glycines
acttaattgaaatattattaatttgtatatttcattatatttatgtaaatacaattagaaatcaattaatttgagagttcatttttataaggtaatagtatttttccttctttatggcattcttgtggaaaataataaatcataactttcttgaaatttaaaaaaacatgaatttttctaaaacaaaaatagaaattttatttactaaatatatttttattaagaacaataaatagggcttccttttttaggcaaatgcttaaaattttgcgcactttaaacgttcagataagcgcgaaaaatgcatttttcgcttggtttgggaggctacgatgatttttataatgcttatttttgcctcctccgggatttttatgcctaatgtgcctatttgcaggattttcaaaaaatccttaacaaatgtattgaaaacgaaaaacagaccgctaagaaatgacccaaaaaaatttcagaaatttcccctaaagaaacgaataaatttaatgtaaagggggggggggtgaatacatttcgacgtatttttggcaattaatttttaatttaataatttcagaaataaaattccgaaaaatctcgagttcataagtgggattaaataatgcttttgctcacttcagtggagcggtctgcgcgaagtttcaatttcactgcgccaacggaagtcggcgatggtcaacgcgtggcgacgcgtcgcttggctttgccgcgtactggtcataattgccgatttggtggagcgggcggaagaagcattcgcggcgattgatcgtctgttggaagctctgaaactgatcgcggttggcacaaatttgaagcaggagttctagcggttggacggaggcggagacacccaactgaac

SEQ ID NO: 34610 - DNA, 392 bp, Heterodera glycines
cccccccccccccccccgcacacccaaaaaaaaaaaaaaaaaaaaaaaagaaaagaaggtggtttttttttttttttttttttttttttttttttataaaaaaacaaaaagaaaaaaaatacatttcttttttcttcttcttttaataaaaaaaaaaaaaaaaaaaaaaaaaagaaaaaaaacaaaaactctcccccccctccccccccccctccccccgccccccggccggcgggggaggaggaaaaaaaaaaaaataaaatataaatatcccccccccccccccccccccccccctccccctccctccccccccccccacggaggcgaggaaaaaaaaaaaaaaaaaaaaaaaggagggggggggggggggggggggggggggggggggg

SEQ ID NO: 34611 - DNA, 984 bp, Heterodera glycines
gtttaggttcaaaaaagttatggccagaagaattcaaaaaacaaaattttccaacttttttggccataaatttgttcaaaattaacaaaattttttggaattttgcaggcaattagagcatctgaagagctctcgaatgatactaagattgttggatttggatgacaaagaaaaaagttatagtggaaaaacatgtgctggcgcccaaacgtgccggcgcccaactgaggtagaccggggaggaggaagaaacaagcagctgctgctgcttcacacattattcactttatctgtccgccgtccaccgccttcagcagttggtccgtgctgaattggcacccgtactgtgcatttgggcaccgcccaaagaacgcgtggccaaacgcgaagccgtcgtcctcaaatgtcaaatggtcacagcagtgagcagcaaactgatctgtgttggagaagcaacaagcattttcaaatttgacaattttttttttttggctggggtcagtcttggcggggtgtactaatttgtaagttagcctagcctcctctccgaaatcttttttatatttttaaaacttagaaattccaagaaaaatcttaaaaatttttctaagagaaatttcatgaaatttttttgaaacgtgattttttaaaaattttataagaaaattttttattataaattttattgggaagagttttctaaaaattttttctggaaaacaaatcattttggaaattttaaaaaatatgatccgccaatgggggcgggaggaaggaaacgggcttctcccactttggcacgaggattttttgtgtcaatttttttatgacgccacgccactttggcacggccgttttgcgctcacattataaaatggtttattggcgccattattcaaaaagggtcaaaagtcattgaatacacgtgccggtttcgattttcgggtatccgacccagataatggttttaattcattattttaa

SEQ ID NO: 34612 - DNA, 1069 bp, Heterodera glycines
taaatgagattttgattaagcttttttttgaatctcattgttaagattgaccttgatttgacaaagttacgaaatattatgggctgtcgtaaacatatgagcatgactgtatgaaaattatgttataattttttttataaattgttgcagtttattaaaattttgatttttaattatcggggtgaggcgggaacacttacccccaccccttgatacgggcctgatctatcgcatatttttgatgaatttgccattattttgtgtctcttcccatattatgctttaaatataaatttttcatgtcatttaattcgtgctgagacgaagtaagaaaaagtgcaagcgatcaaagtaaatcacaataattttaaattaaataaaataataataatatgtattttaaaaaaatatttgctaaaaactggaactttataaaataattatacaaacagaaaaagtaattaattcgttgtacctattaaaaatgtaacacagattgcaataatttttgatcgttcactgggctagaaggattaagctgtgcttcatttccgcttttcccttcactcatttgacgcgttcatttaaatgtttgcacacatccgcaaagatgttgtcaacagagccttcagcagcgatctgattggaaatcacttagggtacataatgtaaatatatattttctacattattttggattttagcactttttcctacatttttttgttttttgttttgaggattttttaatagaattttttattaaattcccccaaaaattcacgattattcgttaatattttcattttacatattttgagaatttttgaactttaatagaacttattaccccctaaaaaatcgatcttttcaaaaatgatcaaaaattaatttttaagatctaaaacgtattctaactatgcctatttaggtattcaatgccatatttcacgctttcctaagtccgggggagccgttaggcgcgttgggaaaatttttgagaattttaatgcaatttattaagaaattgcttaaaatttcaaaaaatctgccaaaaaattttactttt

SEQ ID NO: 34613 - DNA, 953 bp, Heterodera glycines
  unsure (1)..(953): unsure at all n locations
ggtcgtaaagaatggccgccgcttcggctgctgctctctccctaacccaaatttgtttagtgcccgaaataacactcgcgagccttacaatcaaatatcttaaataaatatcttttaaagaacatttatatctttacgacttcgttttttttgccattttgttgctcagagacacaaagaaaaaatatttaaaggcaaatttctgaaaatttgaaatatttttttatttagccagtaaataagcgtaaagaaggcgctggtcgtcatttgttactcaaaaattcataattggacaacggactcaaaaaaaatgagatatgtgagaaaaatacactttctcattttggcgtattgtattgtatcttttaacagagaaaaacaacatttactccgttctatgtatagccttttttccgccttactaattatcttttttttttccttttagaaatataaatggcggtgttcggctttcatttagtcttgacaatgattgcagcggtaatttttaacaaaacagcgcaatgccactttctctgtgatttgctgttctttaaagggttggctgtcaaattcgttcgtaaatattattattattttttgtttaagtcttggttatttcgtgctagaatcgtctgttttgtcagaattaaatgcctgtgaaagtgaaaacaaacgcagaaggaaaaaagagtaacggatattttttgaaattttcactcgtatttttagtgatttttcaggaaggatttccttcggattggtggcaatgatcgtttggttaaattgccgttgagttgcgatgctcttcagagagtccctttcttcgattctctcattttgatcgtcaattattcctttttcgcctnttttgtctttcttataagcgacgcgttttgccttctttttccggagagcaaaggttttgacattctttgtttgagaagcagttt

SEQ ID NO: 34614 - DNA, 930 bp, Heterodera glycines
ttcttcttcagttttttcttacagttctaaattctggtcattcataaaatttttcccactttaagggttcttgcgcttctctcagcgggaggatgaccgatcgttttacatttaattttttcttggtggatttttcgtaattttccttttttctccagcgattgtaaaattaccttattttttctttttcttgaccaccgttggtcatatatatgtttaatacctctttttaggaaaagtaaatcagcaattttaaaagtcttttctctcgcttttcgactaatcattttcctttttaaatttatcttgtcccttttctatttctttacgcactattttccaagctttcaatgcttttttctgaatgtaattttgtgtaaatggatatatatgactcataattttctgagttaggtaactttagcaatcggtctactggtaattttgggtgtcttaaatatattgtttaaaaatggtgaatgtttcaataaccgtatgtatggcgatgttataatcaaataatgcatgaatcagtaactgatcccaattgtttcccttttcatttagttgttgcccggctaagattttcatccgttgtagccttattgattttgatgttttcaagcggttataatccaaatgcaaaatattttcattttgtgtcatacttgagttttccttttaattaatttttacaatataaaaaataagtaaaatttaaaaagtaaatgaagtctagaattaatttaagaataattgattaaacaaaataatatttaatgaacatttcacttaaatgaaagaaacaatatataatcaagacgatgctaaaatgataataaaaaaattcgacgcattaatgaaaaaatatataaatagtggaaagaaacaattcacaaacagaatgaaaagatagaagaaatatataat

SEQ ID NO: 34615 - DNA, 480 bp, Heterodera glycines
agcgcccgtcctgtgccgagaagcggccgaatatcccccctaaaaattaaaaaacgggcgcgaagcgcctgtcatgaggccgcgaagcggccgaatatcccccaaaaaaattaaaaaacgggcgcgaagcgcccgtcatgaggccgcgaagcggccgaatgtccccaaaaaaattacaaaacgggtgcgaagcgcccgtccaagcccaacaaaatttagaaacgggcgcgaagcgcccgtctggccccacaaagtctaaaaacgggcgcgaagcgcccgtcctgaggcagcgaagcggtcgaatgtccattaaaaaaattaaaaaacgggcgcgaagccccgtcctgaggccgcgaagcgtccaaatttccctacaaagtttcaaaacgggcgcgaagcgcccgtcctgatgccgtgaagcggccgattgttctcaacaaaattaaaaaacgggcgcgaagcgcccgtactgaggccgcg

SEQ ID NO: 34616 - DNA, 840 bp, Heterodera glycines
  unsure (1)..(840): unsure at all n locations
tatagaggaagctattcccgaagggattcggtctccccataaatctcgggcgcatcggttcggggggactgccccgaaaacaaaaaaatcgattttttcaagtgtccgtttggggtactcaaacaattatggggagcaaaaatccaacgcagaattaaagtacaggctatagggaagctattcccgaaggattcggtctccccataaatctgggcgcatcggttcggggggactgccccgaaaacaaaaataaatcgattttttcaagtgtccgtttggggtactcaaacaattatggggagcaaaaatccaacgcagaattaaagtacaggctatagtgaagctattccggaaggattcggtctccccataaatctgggcgcatcggttcagggggactgccccgaaaacccaaaaaaaaattttttggataaaaattatttaaatgaactgactagataatatttaaaataggttatttctcttcctttcagtatccctgcaaagtttggtgcgcttctgatcagtttctgaaaaaaaagttaagcctaaactttttggcctgtttaaaaaggaattaaaaatttttaaaaattttattcatctccctttttgatagaaaaagcatcagagtgcctaaactaacatgtaaataaaatttggtgcgtttcagaaccctttctgaaaaaatatttaagaattaattttgcaaaaaataaataaaaacganagactcagattttcgaaaatttttttgagccagctagctcggcgctcatttcagtgtaagttagtcctttaccggggagtatccctgcaaagtttggtacgcttctgctc

SEQ ID NO: 34617 - DNA, 991 bp, Heterodera glycines
  unsure (1)..(991): unsure at all n locations
tttaaattttntgatgagcaaaaaaatatataaattattagacaataaattgagtacatttggcgtataaggaacaaaattattacttgattagaagaagcaaattaactgaaaaattcaaaatcttttatcacaatgtcaatttcaccactttctggtgctaatgacactaatttgcttattaatgccgtgccagaaaatatgccacaatcaatgccacgaaattcatcgtcatcttttccagctgatgatattattgcgggcacagcgcttttatttgccgcctttttaggttaaaaattgctaaaactttttttgaaataaaataattaataggtcaattaacattgaattattgttaattaactaagaataaaaattattttagacaaatttattaaaatttataaaatatttctttattaaaaatatttaataaaataaattttaggcatttttcttcatgttactgaaatgttgaccatgtgcaaattggtgaaggatgtgatcggatttcgcttttttctctgcctttcatttgctgacctcaatatgttgttgttgttcggcatcattcctggttcggctactttgaaaaaaaaacaattaaaattctcctattttgataatgctctaaaattagagaaatactgggccaagaaattatttaatcaaaaaaaaaacaataatggaaaaataggaatttcatattacgtctcgactactattcacgaattaaatggcttaaaattaatttgatgtagattaatacacaaaatagagaccaaaaaagaatcaagaatatatgctgaattgtaaccacagagattggatttcacggtttacagaaagtataaaatccgacaattttcaattttttttctcattctttnttaacaataggtgccgccatttttgtgtcatttgtgctggtccccgttgacgcatgnaaatacagtatgcacatttgggcggatactgtgtggtttgc

SEQ ID NO: 34618 - DNA, 1101 bp, Heterodera glycines
  unsure (1)..(1101): unsure at all n locations
tttttttcttgacaaaatttttgatntaaanaatgtcaatattgctaaagagaattttataaagaaaatgtagctcatttgcaactgcaaccagtgaataaaaattatttttgctcaatttttggcaaaaaattatgtcactattcgtcactatttcggactttttgtcactatttcttcactattttgggatttttactcactattttagttaactatttcggtatttttcgtcactaaaagttgcggccctagtgatctgcatggtttttttgatgaacttgagaaagcggccggttgagtcacaccagcctgttgctaccttggtagaattgaataatccaatttttataattttttctaagaccaagacggacaagtcatgatgttgctcagaacgagtagtatggaagtgatcagaagccgagctacgactataaataggcagacttattttaattgtgatgttgcatgcttgctatttaaatatagttgtataatatttgcttttttgcacatgaattataaaacgatattggattcggctaaactttgtatagtcaacccccagaaaaaatcgattggcacttgcaaatttaatgtttttcattttgttgcgaagtggataggttttttaaatcattaaaatgaacacggcgagtcaattttgggctccaagtacaattaagttggttttttcgtcttagtggtctgtgagttagtcaccaaaaggggggtcccaggttcaagtcctccctatgttgtgtgttaatttcaatttcttcttttaaagaagaaggcagaattattttttcattaataaaagttttcgtggcaataaaaaatcatattcaaaaagcgctggttacgtacaacatcgacaattttatgaaatttttttagcttataacttggtgaatactagagcaaataaaaccattttatgctcattttgaagggaaaattctggagaatattgtaaattttatttggtttggccttaaattgtggacttggctaaaaaagaattaaaattattgaaatgttcgtccctttcaaaaaaattttctagcttttaaaatttcttctaaattttgtata

SEQ ID NO: 34619 - DNA, 1159 bp, Heterodera glycines
aaattttgaatcatgtttcccactcccttctcccaggggtattattttgtaaagtcttttttccccaataaacttgtcaaaccccatttttcgcaccgtgaatgttatttttattgaattctgaaccggtttgagtagattagactagaaaaaattgaaaattttgaaatcatgtttcccactcccttctcccaggggtattattttgtaaagtcttttttccccaataaacttttcaaaccccatttttcgcaccgtgaatgttatttttattgaattctgaaccgttttgagtagattagactagaaaaaattgaaaattttgaaatcatgtttcccactcccttctcccaggggtattattttgtaaagtcttttttcccaaataaacttttcaaaccccatttttcgcaccgtgaatgttatttttattgaattctgaaccggtttgagtagattagactagaaaaaattgaaaattttgaaatcatgtttcccactcccttctcccaggggtattattttgtaaagtctttttttccccaataaacttttcaaaccccatttttcgcaccgtgaatgttatttttattgaattctgaaccgttttgagtagattagactataaaaaattgaaaattttgaaatcatgtttcccactcccttctcccaggggtattattttgtaaagtctttttttccccaataaacttttcaaaccccatttttcgcaccgtgaatgttatttttattgaattctgaaccggtttgagtagattagactagaaaaaattgaaaattttgaaatcatgtttcccactcccttctcccaggggtattattttgtaaagtctttttttcccaataaactttttcaaaccccatttttcccaccgagaatggtattttttttggaatttggaaccgttttgagtaaaattaaaactaaaaaaaaattgaaaattttgaaatcatgtttccccctcccccctccccgggggattattttgaaaagcttttttttcccaataaactttttcaaaccccatttttcccaccggggaaggtattttttattgaattctggaaccgtttgggggaaaattaaaataaaaaaaaaattgaaaatttttgaaaatcatgtttccccctccccctc

SEQ ID NO: 34620 - DNA, 662 bp, Heterodera glycines
taaaagcctaataaattttaatgaatatggaattttaagaactcaatttggatattctttgttcaaattaaattaaaaaaaacttgtgaatgttttaaaaagacgaattgaataatttgtctaaaattattaaaattcaattatggttaactatccaacaataaattggttaattaataatcaaaaatgaacatttggcgttccgttcgccgcacgcaaaggtccgattccagcaggccacaattatccgaccgcaaatatcatttaaccattcatcatattttccttttttaattcataaatttttaggattcttaggttttcaacaatgaaaatgaaataattggcaaaaaaaacaaattatttatatgttgcttttgtcatttttcgtccctatttaggcccctttttatgaattctttgtcggtaaaaatttgcaccctaataattattaatttgcctttcgttaaatcatgcagttttcattgttgttcaagattataaaaactgacataagtcttgaatttattaggtcctgtgaataactgttttttgaaatatttttttttgtttatttttgaatttcataattgattaaacacggattaactacctctcttactctcctaaaaacggggagttcgagcacatgctgtcagggg

SEQ ID NO: 34621 - DNA, 938 bp, Heterodera glycines
attattaggcgctagaaaaattccagattatactaatattccaaatagtgtaaccccacccgtgattcgtattcagcaagttcacccattaaggatgtcggcgccggaattggtcgttactatgccgtcaattttccattgagagacggaattgacgatgaaacttacgagcgcatttttgcgcctgtcatggagaaaatcattggcgcctatcagccttcggtcattgtgcttcaatgcggtgcggactcactgacaggcgatcgtttgggctgttttaacctcacattgaaaggtattcgacagtaaaatccctgaattgctttttgctttaggacatggaaaatgtgtggagtacatgaagaaatttgacctgcctgtgttaatgctcggcggtggcggttacaccattagaaatgtcgcgcggtgttggacctacgaaactgcggttgcattggatactgaaatttcaaatggtaaattttccgtttggtaatttgagcattttctcatttatagaattgccttacaacgattactttgagtattatggacccgactttaaattgcatatcaatccgtccaatatgcccaatcacaacaatttggaatacttggataaagtgaagtgagttactatctgtaaacttacgttttaaagcatttattgtcccaagggaaagaatattcgaatcattgcgccaaattccgcatgcccccggtgttcagatgcattgtctgtttttgaacacttcgtttgaatctgattttgatttcagcacctgagcccgatgcaatggttatggatgaagaggcgcaattggacgaggctaatcccgacgaacgtatcccgggtaaaaaagaaaaatgatttattttaattattttttaagaggcgctaagtgacaaattggtggagcatgttagtgaacagtacg

SEQ ID NO: 34622 - DNA, 925 bp, Heterodera glycines
gggggggtctttttggtttgcagacttttctttgtgattttccgggggttttcggggtccctgatcacgaatctcgttctttacccgtcggcattccctccgaatggttcattttgctcaaatggcccatcaaatacagctgaaacggagacatcggctgactttgggtggagattgtgaccgcaatttgcagaaagtggaaaagtgccaacgaatactccgtgaaacagaatgcctctgccattcccacgtcgaatttctcggcacgtaattcgtccatcagttcaaagtcatcggcaatttctaattagggagttcaaaaaagtatatttgaattatttttgtcacaataaaattattgataggaaaagcaccaaaaagccccatggattgaacgggcgtaagaaaggcggctaacactttccatgctttgtttatctaaactttcccgccaggaaagagaaaatttttagatagttttttctaatttttaaaaaaaagttgagaagaagctactgctcatttaaatccttagagcgctgtcttttttttgcattaatttaccatggtaaattctgtcattcattttgcttaagtctccctccatgataagctcgtgcaacggtttcgtctttttctgcacaaaataccgcacattcagttggacttcatcatttttgttggttaatttataagttgcatctgttattgggaccacatatgctaaaagtgcgttttaatttttttattcgtaaaatttggaattttggcgaaattaacctaaaatgtaaattaaaaccctaattaattacatttggtggccttcttctgccaaaatttggccaagttaaacccaaatcaaaatgacttcgaaggaaatggaattttgttggacgattaaattttcaaagggtttcccatttcc

SEQ ID NO: 34623 - DNA, 596 bp, Heterodera glycines
atatttttgaatcattaattgcttttccatataaaaatctattagggttttgcttacttcctttatgtagaatttttaacgtgatcgttttattaaatcacattagggttaagccacgaccccgagctccccgatacccgacattaattcggagaattggggactccgagcgttataaaattaaaaagttaattcaacaacgaaggggggaaaggttgaaatttttgaatttttgaacaattttcgcccagtcaagaataaaagaaatttttgttcgttgattttatctaaaaaaatgattatcaataaagaatgtaaaaatgacaattttattaaaaattgactgaaaaacgatttaaaaatttaccaaaattgcttgctacgttatcgcacataaaagtctatcttactgaaaaaagtaaaaattacgataattttatgaaaatttcataaaacaattaatgattaaagactagttctatggataaatattataattgactaaataggatcaaaagacatagttttcaaaaattaaaataacatactaataatactggtttactaacaaaggaaggtccccaggtgtccgtggg

SEQ ID NO: 34624 - DNA, 925 bp, Heterodera glycines
gccatgatttggctgtcaactatgacaacacggtgcgcacctccaccaacgaggtggtccagttcacgtttggcgacgacggcctcgacccggcgtacatggaggcgaaggatggccgcccgttggacttccaacccatgttggctcaagtgcggaacatcaccagcaacagcacctggtgggcggagatgggatgatgtactgcgcgggggcctcgtccccctcccggaaaaaaatatttaaaaaattactaaattagaaatttttcaatagaaaaattagaaagtttttcttataacaaatctatgaaaaaaatgttcataaaatttatggtgaattactaagatttttcaaaaactacaaaaatcgctgaaaattttacaaaatttttttttcatggaattttcttttaaaaaacttcgttttgtttttttttgtaaatttctaagttagtaaatttaaaaaattttttaaaacagttcataaaaacacaatcaaacatatttgtttagtgagaaaaagcaaacttggtgtcatatcggcaccgctggttcctctcatacgtgtacaaggggtggtcacttccaagggtcatacggtgtacgatcgggccaggggggtggtcatatgcaggggcgtatctagaaacatttttcggggggggggggtcccgacctgaagacctttttttttttgctgtttaaccaataactttttttccactgctgggtaacaactgcacttttttcctaaaaatgacccatttttggccgttttaaggcaaaaaacttgtaaaaatagtggaaaatggaggtccggcgggcgcccaagggccccgccgggaaaaaattttggaaatttgagggccaatttgttacgaaaattgccccattaaattttttttaattttcgtttgggggggggg

SEQ ID NO: 34625 - DNA, 1026 bp, Heterodera glycines
tgtggtgcaaattttggaactgtcccgcctcacggcgcgggcttaaaagcatttgtagcgcaataaaaaagtttattgttttgaatttttcacaatttatttaaaaaagccaaaaaatccggatccaattttaaaaacgaaaatagtgcacaaaaaggagccgcctcaccgtggggcttaaaagcattgtacatcataattaaaagcgaaaataattttcgtatattttttcacaatttatttcaaaagacaacaaaaaattgataaaatgttgaaacgaaatagtgcacaaaaagggagggatggttagacgaaaagattttaggatgggacgcaccccatctgatattcccatttttctgtttcacaactggccaacggtgactgtgctcattggcacgtagttgtccaattaaggtacttggactttccacagtaaaatgtggtgcaaattttggaactgtcccgcctcacggcggggcttaaaagcatttgtagcgcaataaaaaagtttattgttttgaatttttcacaatttatttaaaaaagccaaaaaatccggatccaattttaaaaacgaaaatagtgcacaaaaaggagccgcctcaccgtggggcttaaaagcattgtacatcataattaaaagcgaaaataattttcgtatattttttcacaatttatttcaaaagacaacaaaaaattgataaaatgttgaaacgaaatagtgcacaaaaagggagggatggttagacgaaaagattttaggatgggacgcaccccatctgatattcccatttttctgtttcacaactggccaacggtgactgtgctcattggcacgtagttgtccaattaaggtacttggactttccacagtaaaatgtggtgcaaattttggaactgtcccgcctcacggcggggcttaaaagcatttgtagcgcaataaaagttttttgttttgaatttttcacaatttatttaaaaaagccaaaaatccggatccattttaaaaacgaaatagtgcac

SEQ ID NO: 34626 - DNA, 1126 bp, Heterodera glycines
ttattgtccgatttgccctttcacgactccggcgtgcagatcaggactatacattacatttttgatgatgaatttttcctcaaaatattttttcatttttcctgcttggaattcaagcccactgtcactatatattttcatcgggataattttagacttttcgaacacccgatcaaaagcctcgatcatgtcctcactcttctttgacttggccggtgcactgaagatcattcgactcagcacgtcgatgcagaccaataaatatttataaccgtcgttatgctttttcagctgatcaaaaatgcataaatcacactgccaatcggtgtggaagccactcggtattgtcttcagtctcgggaatcttttccttatgggcttgtgaatcgtgtatgttctctgtttttctaggaatttatttacgtcatcggtcgtaattttcgggtcaatctttttcgcctcaattaaaattttttgaatcccagcgaaacttgccggagattttaaattataataaattttcgataaaattttctctacagtcttgcccatattagtggtttgaagggtttcttctctcgcactatgccgggtgtttttatagattttattgcctttttccttccacgtccccacatgacctttgatttatcaaccatgtcttttactgttggatccttcagtaaccgatctttgagaaattttgcaccgcgcggcgtttcatctttcttccctgcgagatacaacaaaacatctctataattactgttttcaatcggcaaattcatgttcgactgtacctttccggccgccgtaattttaaataaatctttgttttccttcacgtacctaaaaagaccgtttaaaagggtcgggtgtataatagttttgatcggaatgggtgttttgagtgtggatgttgtttggggctccggagttaactcatttattgtatcattatccgattccggatcaggagttttctcttcaagtcttttcccaggaataattattttccggggttcatcggtctcctgtagtttggattggttattgaggcccagatatggtgcaacatttggacctggtacatgattctcaatcaccaccttctgtggtctatttt

SEQ ID NO: 34627 - DNA, 858 bp, Heterodera glycines
gccgttccttttcagtgccatcatttccctcgttagtctttcgttgttcgcccgcaattcagcgatttctttggtcaatccgaggatgctttcagaaggaattatcaccacctttatcccccttcttcaccacatttttgcgagaaaaatcgtttcaattttgctcatttttttcgcccccaatcgctcgccattcgccgcgaacggaagcacattccgaagttcgtccaatgagtcgttcatatcttggagatcaagtgatcagacaaacgcttttatcaagcctgatcagttatcacctttcccccccccctttctctctctctctctctttctctctctctcttcactctctctccctttctctctctcctttttttctgttttctcttaccatgcattctcttccgctctctgctgttgatgtgcaatctcagaatgttctgttccttaatttccattttccttcattctctcttccctctcccacttcttcgttcaaatgttccgttctttttcgacttcgttctgacgatgatcctgaacagcgtctcttgcgcacatacggctcaatcttttcggctgccaattgggcaatgtttctctaaatttcacagtttttttgttgataaaatgcaaaataagtcgagatcaatcattctcgactctccctctgtccgtcctttatccctttttaccttcccagccgatcctccgctattattcgccgcttcgtctctttctctgttcgccgtttccccttgtgcgcaaatagtcgtcaggcgttgctttacgtctgccatgaaatgttagggaattttgtgtaaatattttttgccaaatcggctaatatgaaac

SEQ ID NO: 34628 - DNA, 883 bp, Heterodera glycines
  unsure (1)..(883): unsure at all n locations
cctanttgggtataaacgtatcatatactttcagaactttatttaaaaattctttatacttttgttcaacggtgtacactgagtttattgataaatcatttcgattttcaagtaccgctacatttaattttgcaaaattaatatttttaaaatctcttctataaattttaggatttttatgactgaatttttcttttattttaaatccgaccattttgtgatcggaagttgaaaaattttctagtactgttaattcattaattaattctaagtcactagtaattactagatctaaaatcgccttttctttaatgtttaaacaaaattgaattaaaattaattaattccaagaattttcaaaaatttatttattttataaagctaaacatatagaccagaaccaatccaaaatcattaatctattaaattcatctctgccgatttcattatgaagttgcatacaataagcgcagagttgtagtttatcgtttctgcgttgtaataatcttttttgatgcatcattttagtttttttttaagagtttttttttataattcattttgtcctattataccatatttttattcttgcgcttgtccgtgtattctttttgcaatgtatttccaaatcgagctacatatttttgtcaactttatttaattatcatctgaaacgtcaattaattattttattgtttatattgagttaattaaagttgcattattttccctaattattcgagtctctgatggttgaaaatgattgtataatctattttgtaaatatttttattatatttttttatacgaaaaccatttattgttatttacatcgtaaaattaatttatttaaattttgtctatacaatatattgtattttag

SEQ ID NO: 34629 - DNA, 933 bp, Heterodera glycines
  unsure (1)..(933): unsure at all n locations
aaaaacaaaaaatgacaatcctaaaaaaatcatagatttctttcagggtgaccaagattcttgattagcgcctaaaacttccccagaaaagtgctttccttcgttgggattatgatattttaaggatgcaaaactaaaagtgccttctatggctttgttctgcccttgttgttttgccttcttcagcttgtccgtgatgatgccctgctctgtccgaatctgatcagtctcgactccctcgagtatttggtcggttatttggtcatccgttcctcgtttcacttctctccccctttttttttggtgctaacactttcggtcgcttttccggtgccggagggctttctctccgatcccgactcaattgttgcggaggatttggagctgttcaccggcttttcgcaagtgctttcattcattttttgtactgggccatcatttggttgcccaaattgtcctcttttacgactgatcgttccgtctgagactttcttttaggccagcgttctctttctccgcaaggtctcatttctgtcaaacgtttattttatttggcactaattgccacaactcgcttaaatgctccccccccccctaattaaagggctgttcctctgaccatcgttcgtacattttccaatttgccattctccgccactccgttaatccgccgtttaatgacactgatttgcgcctaatttatccacgaatgttcaaaagcaaaaggttctttatgcgccaagaggggctcataatagcgcgtgttaaacaggtgaacgaacgaagtgaggagaaaacgggggaaaaaaccgccaattacgaagaatccgataccgtgagaaaagttaaaaaatgaaaaatgagacaccgnaaaataggacactaatatgcttttataatagggttgggaattaatcactaaaatcttcaaaa

SEQ ID NO: 34630 - DNA, 251 bp, Heterodera glycines
ttcaatccctctacagaaattagattattttcaattttttttgtatactggtgggtttcctatagagaaaatatgattactcatagtttttttaaaattgatacatattttatcatttttaaatgaaaatcctaccaattgagcttaataatcgcaaaaaccaacctttttttgttgaaaatctgctaacaaattgcacccaaatttttaaaatttcccccggcggcgcctatcggtaccgccggacccct

SEQ ID NO: 34631 - DNA, 562 bp, Heterodera glycines
  unsure (1)..(562): unsure at all n locations
aacgagagagggtgggagctgggagagagagagagacttctgagagataaagagaggaagagagagaggaggagagccttagaaaanaagagaggangggagnngggagagagaggggggggggagagagagagaaaccgagagagggtgggagctgggagagagagagagagagaaagaaaaataaagagaggagagagagaggaaaataagagaggatgggagctgggagagagaggggggggggagagagagagagacaggaaagaaagaaagagagagagaaaagaagagaggaagggagatgggagagagaggggagggagagggaaagagaggggaaagaaaaaaaacaatgtggcagaatttgtagggaggggggttgaagaattgagatgaaggaggttgcgtgatgggagaaaagagaatattgtttttgactaatttttaaattgatttcattaatataggaaattttctgaggagacgccttggctatcctatgtacagtactatacgattaataatgtgcctggatggattccgtgtccgaatttggtcg

SEQ ID NO: 34632 - DNA, 737 bp, Heterodera glycines
caacaataaattagataaattttcggaaaatcccacttaaaattattatgtcagattcataaaggcaatgaaagatgaagaggaatatcaaaacaatcgtgttcggcctttcgaaattgatcagacaaggggcattgccgatcgaccacgtcttaaaaaatacatcgaaaatgactcagctattaggcaattggtaattgcttatgacgcgaaagaagaaaaaaatgacgatgatttgatccgacatattcatgcattgcaataccgtgtggggatgaagggattcgaaggatgggattagaatattgttgaaaatattaattttgttgcgttgttaaaaattagtatatgtttgtttcgcttatgtcaaaataggggggggggcggcgcaagtgtctgcggcgcaactgtcgcggcgcaagtctcggcggcgcaaatgtcacatcaccagaaaaactgactaattttgtccccttattccgtttacaatgggcatgttcattgccagaaacgcgatcagagggaatcaagcaaagggtgcggcacgtggggatggggaaagagtggaagagaagggatggatggtgaagtgacaaaaaactaatattgcaacattgcggccagggctgccatgtcaaaaactgcatttaccacatgtgcctgcctgttctggcctcctcccctgcccacctcacactcacaatcaattggacaccgcagtttgccccgttcgtcgg

SEQ ID NO: 34633 - DNA, 971 bp, Heterodera glycines
ataatctgtttttgaattaaatttgaggaatgttgtgagtgacttcagttttctttaacaaaataaaaagtgtgcatatttaaagtacaataatattaaacatatcataacaaaataattaaattaaaattattttatgtaaaatttgtaaaaacttaaaaaaattcgccaaaaagataagcatatgcaattatattgcaaatagatactataatgaattaaattaaaaagctaaaaagaaaagacaaaataaatcataaaaaatattttgaaaaccatctatttgttgataccaaaaatgataatatatgtccagtttattgaaggatataacaataaatcgaacctaatacatataaaaatggtcgtatctattattgtataatcatattattttaataaattatgtacaacttttaaattaatattttaaagatttattaatcaatattgaaaaaaagtaaattccttataaaaaatttgcttcaatttgaaattacgaagcagaattgaatgaattgttgcacgaaggacatgtggacaagtgtaacttaacaaaatcctgcttcgaacattgaaaatgaatatgaatctacttgaaaatcatgtatgaaataaatgtaatttttaaatatagtttttttaataaataaaatttataaaaccttttaaattttataattaacgacatgataattatatatattatgctgataacaaagtatttataaaacatgttcagttgtttgaatatattcataaaaatgtaaataaattagtatgtacaagatcaataaatacaagacaaatagcatttactgtgcatgatgactagggctaatatttttaggcaaaagcctattttttctgagctcccagtgggcaaaaacgctcaaaaaacatgtttttgtaattttatacccttaaaatgaaagatttttagtgcctattttacattttttgtgtccttt

SEQ ID NO: 34634 - DNA, 1224 bp, Heterodera glycines
  unsure (1)..(1224): unsure at all n locations
agctttatagaaacggtccccgaatctgcgaggaactacttttttgagatttctatagattatatttgccatgaatccttcgctaaatttcccatttatcttataaagtcagattaattaattaccccgatttgtttagaatggtccaaacacgcttgctaatagatttcttntcgaaaagagaggcgaggaaaaataaggttngcatccaaatgtaatttttttacactgaagcattgngatggcttgctgttaccagttggctaagtcttattgncaagaagcagcagaactnttgtttgggccaatgaccccaaaccattcgaatagcaatcgattgggctgactagactgcatatttgcaggaatagcaatggcaggtctatcttaaaggcctgacgagttatgtttcgacaaacatcctgtacaccataaatcgatttgcaaatttagtcgaactatataaatttttcaaaaaatgattcatcttttttatggttagcgcatatgtctctagctttatagaaacggtccccgaatctgcgaggaactactttttagagaatttctatagattattattttgcatgaatccttcgcttaaattcccatttatcttataaagtcagattaaattaattaccccgatttgttttagaattggtccaaacacgcttgctaatagcttttcttttcgaaaagagaggcgaggaaaaataaaggttgcatccaaatgtaaatttttttacattgaagcatttggatggcttgctgtttacagttggctcagtcttatttgcaagaagcagcacaacttttgtttgggccaatgaccccaaaccattcgaatagcaatcgattgggctgactagactccatatttgcaggaatagcaatggcaggtctatcttaaaggcctgacgagttatgtttcgacaaacatcctgtacaccataaatcgatttgcaaatttagtcgaactatataaatttttcaaaaaatgattcatcttttttatggttagcgcatatgtctctagctttatagaaacggtcaccgaatctgcgaggaactactttttagagaatttctatcgattattattttgcatgaatccttccccttaaattcccatttatcttataaagccagattaaattaattaccccgatttgttttaaaattggcccaacacccttgctattagcttttcttttcgaaaag

SEQ ID NO: 34635 - DNA, 1775 bp, Heterodera glycines
  unsure (1)..(1775): unsure at all n locations
tcttatttaacattatgtatttgttttattttcttaccgatgtcattgttccccctcctctccccttttgaaatccgaattattatttgggtacaaagagcacttttttactttccttttccccttctccttttgctcttttgctctgtgaggtgttttcttccctcctccctctctcctccactccttcatttattatttgattttgttcttctattttgtcatcccttgtgaacataatcatttggttttagaggatctcaaaacttttttattccaataagttattttacaataaatattttcgccgccattatcaattttaataattttgaagagggaattagcaaaattgtacattatagtgcaatcgggctcaaaaacttggttgctacccctaattcagaacatttcttaaaaaaggacagatcgcgaccctggtattaatagaaatcgaattcaacagttctttattatgtgaaccataacactaagggaccacaattattattattatctcaatccgaaataacaaacatcattcgcttcctcactttttgtcatcttctttcataatttcggttgttttgtttttgtctccataatcaactgatcacttctttttatcagtttattcttcacacaaaacaatgggagaatgtgtgtgtaagtcttcttcttctcgaaacgcatcaaaaatcaattgatttcatttccttttcgtatttttctttcgctttttcccctcccaaattttctcttaaatatattcaatcactttttgctaatttttattgactctttttgcaattacaaactcataaaaatttaaacgatcataaataaaaagttgaagggacaatttcaatgtttcataatgtttttatcctagcactattaaacaaagggctaaaacaaatcacncactttttatgggtcgtggtcattttattagatatgtatcacctataaattctatgtacttttagaaacatactaatttatttgttttttctttttatttcattaatcctatggaccggaacagcacaaaatacaaagacgccgttgtggccaccggggcactcggaattggagttgcaattgcgactacccaatttggacttttggtcggttctgcagcgaccaatttgctgttggactgtctgatttcgacaaaaaacgccggcaaagatgcgatcaatcgtggcctttccgtggaacagtccatcgagaaacgcatttatgccgccatcgaggcaactcaagaaatagccaaggtttgcattggctcttcccacatttgtcaaacggttttcaaatatttccttcaatttttcccacttccaattagaacccttctgagaagttgactgcccatgcgaattccttccttgacattgcgaattcgctcagcgaaagcattttgggactgccgcgtgctgtggaggaccccgagtgggggctgaaggagcgcgtcacgtttctcgcgtcgcgtatcggtcaccgaatcagctcaaagaccaacgaacgcatcgtggaaccgctgctgcagcagatgtgtgtcctcacagagcagttgtcgaagtgcattgtcctcgtaagttgttggatttgttttattggacaatttttttctaattgggttaaaaattggctaaactttcctgccttttcaggtggactacgccaagcagcgccaggaatggacgttcaacaaagtgagccaattgtcgacatcggtcgttgagttgcgcaacaaaatcgaaacggag

SEQ ID NO: 34636 - DNA, 436 bp, Heterodera glycines
gtttgtcccctaaaacatcaaacctgtcgatatcagtgccatttttaggccgagatgggcccgatcaaaaaatgggaacatgtccatccaaacaccagtgcaaatccaactgaaatacggggaaaaattccaatgccatttcgatttgggattaggccaaagacaaatggaaagccaaggatgcccagcgaattttcaatgtttttgctcgtgaaaattggccaatttttgcgacaaacattcactgtctgttctttttgtttggttttcatctgaaaaatttgcgtcgccgcacttcgcccacaattctcactaaatacggtttcaagactctcgaatgtatgaatttttgggtgaacgaaggtattggtagaataattaaacaaaagttttaaattattccgctggggccatgccgtggaagaaatatgaaaaa

SEQ ID NO: 34637 - DNA, 1427 bp, Heterodera glycines
atcatttcgtgattagcgcctcaaaactgccctaagaaatgtttttgattattgtgaccattgcctttttatttggaaaagatccgtgtactgtttcattttttgtctaatttaagtttgtcgtggagctgctcaacttctgttcgacgtcaccaccgctgtgattccgttgctcatttcttgctacggaaaagtgaaagggtccgccgaattcgacgttttcggagaggtcactcgcattctgacaatgagaatcgcatcattcattcatcccttttcaaatatttgtgcagaagtgcgtttttgtgctgagcactcttcgcattttgtcactttctccgcccacggccattttactcaaagacgagctgaagcatatccccgaacatcagctgaacgagaaattggagcagttcaacgtgtccgggatgaccaaggcacgggtgagcgaactgttggaacggcgatgcgatttggtgccacttgaaaaactcatttcatgaaaaccattgagtaaaataaacgggtgttgggcatggcatggacggcatctttctttctctgtttgttcatttttcatatgccaatccccgcttttcttgggtatttgaactttagcgaatgttcttttttgtatttgttattatttactcatcacagtcaaatgatttgaacataaaatttttaattttttctgttttccgatcattttccgattttcaacgtatttttgccattaaatttcgttggcaatgcattcatctgcgctttgctgaatggcatttcatatttttgattcattataatgaaaagctgaccgtcgccttttgaaatttgccgtttttgctcggaatgccttcgccacttttataccaataatttaattcgttgcttttcacctccaataccaaatattggcaattcctcaaaatgtacaagtaagaaagaaagtgaccgagaccgacaatgaacatcggtcctccctactcttaattatgccaaattagcccacttagcactcaaacaagtggccattgtcgtatttaaatagggcggcaaatgttcgttgggtttgttcagccgacgttcagccaatgttttggccgttccctcggcgccgcaggaaagcaacagatcgattttgtaacggttcagaatctcgaagaagcggtcgttgtccttcagagacagcacttccgtccgtctctcattgaccagcgacggatgggtcaaataaacgacgacccacggccgctgcgggcgccgatgcaattccttgggggtgggaggatgttaatgagtcaatcattggagcagtgggggggggggggggattaacaaattcatttgggctgacaatcatccatcttttttgggagtttcgttgccattccgttcatctttcttctgagggggggggggggggg

SEQ ID NO: 34638 - DNA, 947 bp, Heterodera glycines
ggtggctctaaatttggttggtttcaaacatttcacattagaggaacacggaaaaaaggtgcatctcagaaatgcatcaaaaatttcaaaaaaaaaaaatcgcagaaaatttttctttttttttgcttgaaatttccctattaaaaaatttcgggcggcgagattttgtccaatccccgcggaaataaatgcgaaatttcgatattggcaggaaattaggggattatttgtaattggttttcacttgccggtgaataaaagggatttggccggtgcaaaagcatcgccgccttgcccagcttcatcattgccaccttcaccgtcatcaaattcggtgaccgctgtgtttgtcagcgtcagctccgtttggaacgcggcggcaattggaagacggcgtgacgaaaagcactcagcaccagacattggatcctaaaaatgctttaaacttttaacactaatggcttcaaaaaacagaaaagggcgtcttattgttagttggacgacactcaacttgtttatgactcaattcattttttaattccaacaattttttatttatttttggttgaaattgaaccgtgaaaatctaggccaactcgacagaattttagagactttttaatctattccaatttagaaatgcttttcaagtggtttatctatcacattcgcgatcagcgcccctaaaaagagccggataaatgatatgtcttaaacatttaacccaaatgactttgcaatcaaatcacaaagccggacgacattcaactcgtttttcgctaactcttttttgctggcaagggaacctcgcgaactgtaactcggaaaatgagtataaatttggtaccattcgatagagcagggtcgacttctatttgtgatttttaattttacgtgcctatagcgaaaataaaaaagttatgaggcctcaaaaacctaattttccc

SEQ ID NO: 34639 - DNA, 1043 bp, Heterodera glycines
  unsure (1)..(1043): unsure at all n locations
aataaatantaggaataaatcaaaatcttttttgattttactgagtaaaatgaaaatcaatttattaattaaaagttctaactaacaaaagtataataaagtcccaatttattttttaaacgtaatattatttaattgttcttccccctcacttttcgatcctcgctctctctctgtctcttctctctctctctctccctccctcccacctcctcgctcgtctctctctctctcccgcacctccttctctctcctctctctcccactgctaccttgtttttaatcaatataaaggacgcggcgtcattgttccattgccactgttctccatccaattgctcaaggttcttctcccaatgaccactatcattcattcattattttttgcacatagcaaaggtgcattttccatttttagttcctaaataaaaaaagaatattatattgtttctgtcggattaaaataattcaaaatcaaattttttaccaaatgaaaaatgaataaaaagttatttacgggcgtgctaggcgccgccggcaaaacttgaaaatttgagtaatttgttaaccgattttcaccaaaaaagacaaatttactattttgagccttttttatcaaaaaatagtttaggggccccagtggtaaaccgataattgctgccggggaattacattataaaaaataatctattataacgtacctacaaaaaatggatttcgaaaaacaagaaacgacgacggccgagaaatcgccttgacgtggaaatctattttatcatacccacactcatacttaggaagatgaagacatgaccgaacgagtggagcttggttggattaaaaaaaagttgtttatgaaaaattattacagcttaaataaataaacattataattgatcaaattatatatgatcacaaaataaaatattttaaaactttcgattagaaattatcaaaaaagaaataaaaagcanaaacctannnnaaaanataaaaagagcaacctcttagtttaaaactgaatttattttatttttaaataa

SEQ ID NO: 34640 - DNA, 975 bp, Heterodera glycines
  unsure (1)..(975): unsure at all n locations
aaaaatcaacttgtagtgactatataatgtttactattgaaaggcccgcataaaccaaaggaatcaaaaaaaatccttataaaggcaaaanaaaacaacgaaagaaaaacgaaaggagaaaaannaaaaaaaacaanncaatgncaacnacaacaaaagaaacaatacaagaaacacatagaaacncataaatcttaaaaaggaaaaaaataataaattaattgtttttgtttctgcacttcaagttttaagtgaaattgtaaacaattttaaaaaatgacattaaaatgtattaacagcagaattcgatataaaatcttcaaaaaacaaattattattattatttgaaaaaattgaatgaatatttatgtctttaaaaaatatcatgtagcagataaaattgatccagcgtcactctccagaaccaaaagactactcgagttatcatcaattttacacaaaaagagattttgttaataaaaaaccctatgataagttcatcaaacaaaaaataaaacaaaaaaaatatatatcagtattatgaaaaattattacgagataaacaaagcaaaaatgaaaaccattagaaaagaaatagacagcttgttatttcaatgaaaaaataatttaaaagaacgagaaataaaaattcattagcataatataattagaatcggtgtattaaaataaataaaagcatctatttaaaacagagttcccaagtgtgcttatttctaaaaatttgtgcttatttcagcattacgtgattatttagtgcttatttttgggttttgaaaataaaaatgaaaatttgaatgacttttgacttacattttttattttttttaaacgaatatttgacataattcgattttgaaaattgcttttttgttttattttcttgagtataaatgacaaaaaatttcagccgggctcacaaaacttattttcataaaaagatgcctcaaaaatttg

SEQ ID NO: 34641 - DNA, 509 bp, Heterodera glycines
ttttaattagagtgccacgggaccgggaccgggccggaattcccggtcatccgaggtcccggttcccggtcccgggttttgaaaagctcaggtcccttgtcccgttcccggtagggcaaccgggaaccgggaaaaacaagcactggtaagaatggggtctgagtgaaaaattagtgaagaaaattggagtcaaagggaaaaataaaaaataaaaattaatatattctttaaaagtaacactgcccaagtgtgcaaattgtctaatggctagtttccttgactttcccttcttccttcccctggttcaatccctctacagaaattagattattttgaattttctttatgtatactcgtgggtttcctataaagaaaatatgattcctcatagtttttttttaattgacacatattttatcattttttaaatgaaaatcctaccaattgagcttaataattagggatgcgattattaggttttaactaaagggttgcttaattgattgaag

SEQ ID NO: 34642 - DNA, 1332 bp, Heterodera glycines
  unsure (1)..(1332): unsure at all n locations
cagtatcagtgttggtttttgtcgtgccacttatgcacacattggggaaaatatattaaaaaatgataattgtnntagtncaatttttgctcagctgattaaaaataatcaaaaatatttacacaacatttnagagaaataaaatanttgtagaatcttctataattaatatgaatttttacaatttttttgaaaatttntaatagaattaaaatttctgataaaaaatagataataaaaagctattaatataggaattagaaaaatattttttaaatttatgaatgagtgttggttttgctcggaattgttgctgtcaattttactcatttgtcagctgaatgaatatcctgaaacattttttaaaaatccgcatataaaataattcccttctttaacagaaattatacaagaccttaatagtaaccattttaggtaatattataatttatttttttacaaaatcttacaaaaattaaaatttaagaataaattaaatgatttttttggctctattccagttttgatccaatgattttttttaaatttatccaacaaaataggttaataataaattgaaaataaaatatttaacggaaggcaacctaaatttataaatattaaattgaatttagtaaatagttttcaaggaacaaatacatatgtgaaggttcaacttttggataaatgttataatcaaaaattaattttgttggattggagcataaaagaataattagtaattagacgtgtaaactgaaataaagccgattttattactgaaagaagcacaaaacaaaaatttcgaaataaaattaattaatacacacattatttttagttagcaaattacttggaaatcagaattgttggcatttcacgatgaaacatttattttggaacttttaactttttaaaataactttgatcagttctttctcttttttggggcgaacgtgtcagcagcagtcggccgggggcaacaacagctggatgatgaaaatgatcagtcagttgatgctgatcggtcggtccactgactcttctgctgatcaatcgcttgtccctgcttcttctcctcccccgtcggtcgtcctttgcttttttgagttcgcccgtggccattcattgcctttgactctttccgcgtatttgtcataaaatcactctgactaaaaatgttaagtgttattttggtcccagaagggctctaaaaagcattttcttccgtgaggtcgacgaagacacactttaagctgcgatgtgccaatcccttcgttaatttctcataagtctgatatttttattcagttttttaactctctnaataaa

SEQ ID NO: 34643 - DNA, 803 bp, Heterodera glycines
  unsure (1)..(803): unsure at all n locations
tcgccgccggtgaagtccntccnngcctcgtccacatacgccttctatagaccaagcagagctgcgccgcctcggagaaaccgtcgtctggagcaatggcggaaaaggcgatacgatatacaacaatacatgctggagaatggattcgcgctgccagcgccttcacaatactatggtgacttgcctgtgctaccagacaatgcggatgaaattgaggaaatggacactgttcaacaaagattggctagcaggaggaaactaaaaaaggacgacgacgacgacgatgatgattggcaagacaaaaaatacaaaatttactatccacctccccctgctcgccggctcccgtctcgtccagcaaaaattgaaccaatgcccctccaccacgtcctaacccgaagagagagccacagccaaaggtcgaccctcggccatccacatcaaagcaggccgatataaaacctaaaagggagccaaagtttgagccggatccgcgaccatccacatcacggcaagccgggtacaaccccgccccaccagctcccaaaaaagaaccaaaacatgagtggaaacagacaaagcggcgccattctcctcatcgcaccgcaccccatcggattccgaaaagccgcgcttacgtaagagagtgaggcaagcgagaagagcaagagtatattattcgccagagccaggtccatcgacctctgcacaaagtgatgaacaacaacagcaacgcgaactattttccattccgaacaatcagctgacgatggcaccaagagttgagctgatatgcatcaaat

SEQ ID NO: 34644 - DNA, 1122 bp, Heterodera glycines
tttttccgtgtccagaaattggccccccgaacatttgcgcttatgtccaaaatcggattaaaacttactttgccaaaatggcgtcgctgaaacggtcccccgactctgttcaaaaacaaataatacggcacggaacggtccccgtgcgaatacgcacgaattccggggattttactataaaaaataaaacatttattctgcattttattttttttgtctttgtgccttttcgtggctcagttggtaacgctttgcttttgaatccttcgcgaaggcaatgatgaaaatacgatcatttttaggagctaaacaatgacaataattttgccctgctgagccttcgaataacatttttcttgccgttgaattgtcaaattaagttatttaatttgatttgtcagtgaataatttattatttgaaaactacatattttaatttaaaaatacatttattatatatatatttgcttttttcaatatcaaaacactgctaagctaaagcattcattgtgtgctaaattttgtgccgtctacaaatgtttggtagcctaaaatatgaaaaaagagaccaaaatgtgatgcgataattgcgtctatttccttttatggaatgaatgtgattgctaccagattagagcgtaatcatctcgaaaacagcgaattgagaatttatcaactttttattttctaaatttgcgtattttttaaccttttttctgttaaaatgtttcttgtcgccaaaatggcgtcgctttaatgatcccgaaaagccaacataaatattttcatattattttagcacagaaaaaaaaagattaaaaaacccaacagcataaaaaaaacatttattttcatttttttctttttgtctttgtctttgtgccttttgtggctcagttggtaaaatgctttaatgacaaaaaaaagcatcgcgctgagccttcaaagaacattttcttgccgttgaattgtcaaattaattatttaatttgtctgtctgttttttatgttattattagggtgaggatttttaggtgcgaaaaagtccaaaatagggaactaaataggggcaaaaaattcgcgaaataggggcgaaaaagttccaaatttgggatataattt

SEQ ID NO: 34645 - DNA, 856 bp, Heterodera glycines
  unsure (1)..(856): unsure at all n locations
tctagagtctcggtttnattgagggaacatttataantcggcttaattggtctgaattcagaagtgaattcgtcctcctctgtccattcgcgtgcaatggccaccaaaatgccaacaattaatcccattccctccgcagttggctttgttttccttttcatgtcattttttgttttagactgaccaaaatggcactcaaatcgtcgcttcttcgtctgccctcccccctccgccggcacaacacgccgactccaccgattcaggtcgattaaattcaaattagtctcttttaaggcataacccccccccccatttaaggctcgcactgttcgtcggcactgatggccgagacgctgcagcaaattgaccaattgggcttagaattgaacagttattgcgacggattggacgaattaaacaatggaaacgccggggaaagggtaagcgaagcgatggcaaaggaaactgacaaaaatggcacacgcattcaatttgtctgtatttatgcatatttttatttgctacgccgaccattagtggggtgtcgtggcattttatccgaatttccttccccctcatttggaatttcctttcccaaattaccccccccccccataatccattgttccgttttcccttgcttaagcaccggtttgcgcttcctcctccccattctctccctccgtttgtcactgactccgtttcttccgccgtcgtccgttttcgcccttgcgccaccgccgtctcccaatttcaaaacgcggtcactccgcctccccctccgccccctcctcctcctccgccaccattgcctccccaacggcgcaattcgccatttcatccgccactccatcag

SEQ ID NO: 34646 - DNA, 1374 bp, Heterodera glycines
tgatcgtttgttacccttttttgctatttattgattattttcatttatttactttacgtcacccaaaataattatcagttttggtataaaaaaaaagaccataaattgaaaaaatgattaaaaggtaatggcagtaattagaaaaaaagaaaaataattatttgcatttaatttattcctattatttttggagataattgtatattttgtattttttattattttttttattagacttaacgatcagagtgatatttattattaaattttgtactctaatttatttttcgaaatgaattttttaagaaaataaaattcattaaagcattatttatgccgctacgacgttagtcaaaaaagcatcaaatgaaaaattttttgatataacattgcttaaaagtagagatcggatacggacgggatccgtatacggatttttacggatccgtagtccgggattttacggatttttaatccgtaaatccgtaatccgtatgggtgcctagtccgtaatcccgatcctgatccgtacaattcttcatacggattagggattttttttggcttttttaaagtgaaatggattatatttttaaattttgtgcagtcaattcgccaatactttggaattggcgggtctatttcgtaaaatttttggcaaaaatcgaaaaaattggaaaaaagcaaaatctttgtgcaaaaaactcaaaatccttacgttattgaattgcattagttgaacttttacaaaattctatttctttttttttccaatttgtaattttttttaagaaatgaatttcgtttttctatttcttaaattttttacgaacttggttttgtaaatttttcaaaattatagatattttttatgaaaatttgtcaacgaaattcatgaaatggttaaaaatcgcaagtttgctcttttttggtgaaagtctgttatcaaattaaaattaaatttttaaaaattttcccggcggcgcctataggcaccgccggttcctaaaaagttttttgaaaaagcgcgccgcaaaaaagtggtgtgaaaagcaataaattgtcgtgtaagaaaaaatttttgagtattctttgaattttttgcctagaatttataataaatttattataaatcttttagctttaaatattcaaaatttgtatttttataaatcagtttttatcgaatatgaaaaaatttttaaaaaattccgtatccgtatacggatccgtatttttcctggatacggatttatacggactacgaattttccggatttttagtccgtaagtccgtaatccgtatgtgtgcctagtccgtaatcccgatcctgatccgtattttctcaaaattccgatctctacttaaaagca

SEQ ID NO: 34647 - DNA, 1040 bp, Heterodera glycines
  unsure (1)..(1040): unsure at all n locations
tccaaaaaaaaanattaatgaaaaatcntgttgcaaaaaatttgatctagatcagtgatcatttacccaaaataaaaaataaaaaaaaaccatttcttcaacaatttgtaggtcaccaatttcagcggttggaggcgggaattcgattacaaactcttgttgtatttggttgaaaagtgtagtgtccttaattagaaaaaaaaactgttatttataaaaaaattcaatctgacccgcgcatattatatatttttattcttttttttctgggtgttatttcggggtaataaggtaaataagtattttttagcattgaagcctctaggacacattttaatttcttttttttttgttcaatccacatttcgtccatatttcttgtaatattttccattttacaaaaaaattgaaaaattaaacaaaatttcaatttctgaaccaataacttaaaaaatcgaaaatttccccggcgtcggaaagcccaccctaccactagtttttaattcttgagaacgcacgcaaaaaaaatcagaattttttcgtccatatttatataaaccatatttttttttcttaattttggtttagtgctaccatttcaagctgctgcagatcctcgtcacgccattcaaaaaataatgattcttaattattattaattaaaatttattttatactattgtaaacagggacctggttcaggtgaaagactcatttgagtaagtgccagtaaaacttgaatagctaaatttatgataagtagggagccaagcattttacgaatttgatgcctaagatggcactcaaatgctcaaatgaccaaagtgagcatttgcgcatccaatgaggatgaatctctcttaaaaggcttttgccgcattcgctattgtccgtgggtggcccgcccaataatttatgacactaccataaaaatgccggaaagagaagtgttgattttgcctttttcgggaataacaaaaataaattaattttattacattttggaaataaaatcactaatatacatataatttcatttt

SEQ ID NO: 34648 - DNA, 996 bp, Heterodera glycines
ttaattttaaatgctttttcaatcatttaaattgttaaattctatttttcattttctctcttgttatctccgacacatatctctcgcaaattgacggcggtctcgtctgccatatttaagccatttattttttcccatctctctctcacattattcacttaaaaaaattgtttttaatcgacaattccgcttttttgcaattctcatcacatttttgaaattaaatttcttcattggaatttcattgaaatttgtgttttgcaactacagcaaaccggaggttttctgagcaagttttccgccacacaaaactaaactgctcgatttcaaattttggcggaaaaccggttccagcctaaattatttcttttcttcaattaattttgtctcatcaaaatttcataattgttttccccttttacaagtgaaaagtatctgacattggacaaattggaaattggacgagccgaacaaattgtaaattggacgagccgaacaaattggaaattggacgagccgaacaaattggaaattggacgagccgaacaaattggaaattggacgagcggaacaaatcgcgaattggacgcattggacaaattgacgcatcgaggaccaattgagtgcactgtcttggtgcacgtctcagcgcgccggccaaccccatctaccaagacgtgccccggacaactggcgaccttttgtgcacaggcgggttcaatttttttttcccaaggggaggtctgattaatctggtctcatccagaattaatcagtgctttaatttccgttcccacctccctcccaaaaaaggcaatcaagttcagtttggactgaaattttcgaagtctcatcttcgaacagtcaaacatttaaattgcccaatttgaatttgtccgaaaaatctcggcatatcatttccatttcacattttttttgtttttgtccaattcaagttattcaaaaatctcgatatctcattttcgagttcaaagt

SEQ ID NO: 34649 - DNA, 645 bp, Heterodera glycines
atgtttggattttttttggcttaccaaaacttcatcgaacctggttctttctattctctttcaaatcgccccaaattttttttacagcttaactaggccctattaagcttatttccagaaaatctcgcatgaattctcatttttaaattttttatagatttttaaatgtttgcattttttttggcttaccaaaacttcatcgaacctggttctttctattctctttcaaatcgccccaaattttttttacagcttaactaggccatattaagcttatttccagaaaatctcgcatgaattctcatttttaaattttttatagatttttaaatgtttggattttttttggcttaccaaaacttcatcgaacctggttctttctattctctttcaaatcgccccaaattttttttacagcttaactaggccctattaagcttattccagaaaatctcgcatgaattctcatttttaaattttttatagatttttaaatgtttggattttttttggcttaccaaaacttcatcgaacctggttctttctattctctttcaaatcgcccccaaattttttttacagcttaacaaggccctattaagcttatttccagaaaatctcgcatgaattctcatttttaaattt

SEQ ID NO: 34650 - DNA, 707 bp, Heterodera glycines
ataataatacgaatttagtgaatcgtttaaattaaattctttattttatcagtcactgagtttttttgaattgacctagcaccgtttttcttacggtgtctgttggataaattagtatattaccgcctcattttccatttaattttccccataaatcaagaacttaaccgatttccaactgattccataaatgaccccaacgattgtggctgattttcactaattaggcggcggttgtcggaagaaaaagttttgggttttttgacgggcggtgccatcaaaaaaaaataataataaacatgcttaatggaaatttttgtatagtacaggaaggaaattcttcaaaacagctgtgctaatttcctgggattttatgtgcccaggaatggccaccataaggccggccgggggggataattttttcaaggagagagagcgagaggcatagagaggaaagcaaatgaatgaagaatggattaacccgaagatctgcgcttggcttggtaataatgggcagagaacggcacggcgccgtaagtgtggagcatagtcagagagaggggaagagatagagagagagagagagagagagctgagagatataacaagagagacggggaaagaacaacgaaatggattaatgccgcaattttcaaaaattgtgcggttgcggtctaagatcccgcgcgcaatcccttctcatccat

SEQ ID NO: 34651 - DNA, 813 bp, Heterodera glycines
attacaggtttaatttaataatattctttcatcgagaattttaacaataataaaaacaaaaagtgttatcgcatatcgttttttaattagtagtcagttgttgaaatttcaatgtaattcaaatatatctacaacatattgttgttataataatctatttaacagtggttatcactgttatgtaatcaagtgcttttaatgttcggttcctctagcaaatcaacctgttgttgtcgttgttgttgttgttgtggtagttgttgttgatgctgttgttgatgttgttgtggtagcaaccgctctgtctctctttttctttctctcactctctctttctttctctctccaaattagtatagttaataatttttgttttgtcccttttatacatattcacattttatttatcgcattgttaaacataaatctattgatttcagaagataataaagttttattgtcattagagaatggtggcggtgcaacagcttctggaacagaagggcgtcgtcaatggtatcaggtgaatgcacttttctggctatttaaatgaccaattctttccctctctcgcttaattatgcaaagttcgttcagggatgctttggtcttcgcggctggtgccagcaaatcatcagaagttcaccatggacgttgtgcgagtgaggataaaatgcgtgttgcggtttgttaaagtaattgagattaagcttttaaacaaatttatttcagatgagggacagcggttcagtcatcacatgctctatatgcctttacccatttacaacgacaaatccgctttttcctgtcatg

SEQ ID NO: 34652 - DNA, 219 bp, Heterodera glycines
aaatgcgcggtttttgccaaatttgaccgattttaacttatatttcttgaaaaaaaaatttcaacttttttgttagaattcgggtccgggtttcggaattgggcaaatccgagttcagattcgtaatcagcatcctagaaaacccccggaaactaattttgagccaaaaataaaaacgttaaattagggacacccattcttcaggattgccggattttg

SEQ ID NO: 34653 - DNA, 1213 bp, Heterodera glycines
ttcatataaaataattgtttgaaaaatttttcaattttccattggcctattgaaattttttttaaaaaatcggaacttggaatactgagactaagaaaatttcagaacagaatattgacatgccaataatattatttttttaatttcccagttcgctgtcccgtaccagcagtccgtcacggttttatgaaaaattgacacgcggcgcgtcaattggaggcggcggaggcggcgatttgcgcacactgaagccgttgccgagcacaatgtcctacgacttaaagtgaaaatttaatatgcattttaaaattattattttaatttactttttattttttatattaaaatcgctaatttaatatttaatttgaaatttatttttaaaactttttatgatttattagtttaattaaaaaattatttatttttcttcaccgataaaattgtaaaatattattctttttaaatatatttttattttataaattttaatataactttctctacgatttaaaatcgtataaaataataattaattaaattcatttgcatattaaattttgcagaaatatcatgagaatgaccgagattaaaactgacattggatttgctcgcgcatttgtacggttggcattggagcgaaagctgctttacctatacctaaaaaaggtgttgttttctgttcgatgcctttttggcattttgcttcataattagtgaaaaaataaagattaatcaaccataattagggttataaattgtatgcactaaaaaatgccaaatatgcgcataaaatatgcactaaaaatcccccaaatatgccctaaaaacccgaaaaatgcccaaatatgcactaaaatatgccttaaaaaactgccaaaaatggtttttaactctcaaaaaataccaaaaattgtgtataaattaagaattgactttaaaaacaccaaaacaatgactaaggagcgtttttagacaattgcaaaacattttaactttcgtagtgcgacatttgcggaccgacttttgcggaccactatttcccgattgatactgtcaaaataaagaaaaaaaaattttttttttaattttcgataagttaaatactcccaaaattgaaattagtgaaggtaggctgatgcaaggcgatctgtttcaattggagaattttattttatcttgaagtcccaaaacccaagtggaaatttttcct

SEQ ID NO: 34654 - DNA, 1217 bp, Heterodera glycines
  unsure (1)..(1217): unsure at all n locations
cgcgttcaagcagtacaacaacggaaacaattaattcaagtagtacaagaagcggaaaactgccaggaacaccgcaacgaaattggaaaatgggagcaacatcgtcatcggcagaagtagcacaggcaacaactagttcgagcagtatgctgaggaacaaaaaaaagcaaaatcatagggaaaagcaacaaagcggaaaaagatgaaaaaaaaaacgaactttcaagtgacgacctaaaagcaaagcgggcgcataagcagcagaagaagcaatgggagaggaggaagagcacaggaaaaataagctcactaaaattaaaaccataaaccaaagcataatcatttgctaatgagaaggcctttggggcaatcagtcggaacaatcaaaagaatattaatggctcaatttgtcgcctaattatgaatattcgctttgttttttattatttattttctttcaaatcctttacatcatcttattttttttactttttgttattttttgttttgaagaattgctttaaacattgattaattcgcttttgtgttgtattaataccaacaatttatttaacttactgtaatatttatgtaccgtaacccgcccattttactaccgttttcctttgtctgtttgtgttgtgcgcctaattggtattaaccttttgttcagttgctattgtgaagtcgtgccccgcttctgtttaacataaatgggttcgttcgttttctttaattaattaccaaaattaacattttattatttttaattttaattatattaattattgacaattaactccactaactaattaattaaactatttttaacataaagtaaattgcaattttttctgcttattcattagcatttgcttctgtccgtccgctcgctttacccttttgccaaatattttttttgttttattttccattttttaggtttttccgtttcctccggcggtgcctttggtgcgtgccgtcgaattgccagcgctttcgctgcctcggccgccgccttcgccgagtccaccgccgcccgagccgacgccggtgcccgaattgccggtgccgaaaatggctgaacagctcgaacttgtggtggaagaccgcaccacacgcagccgacactgccaccaattncgaggnncgcagtgatggtaaagtgggaaaattaaactcataaaggaatgctaatgagaccacttgctgcccca

SEQ ID NO: 34655 - DNA, 779 bp, Heterodera glycines
tttccaaaattttttggacaaaaaattctggcttatgattttttgaaattttatgaattttaaaatttatattctgatagtgaataattaaggctattgtatgatagcatgaaatatttggtagaattggagctaagttatgaatttatatgtgttaccaattttttgttttcaaacccattttggcggatttacgaaacgcgcacgggtggcggtttttaggaaatgcaccagcaaccaaatatgtatgtaaataaaaattttttaattgttattttttgaaaaaaaattcttcatagagggtaagataggcacaaaatgtaacctaattagaattataatcatcttttagtattttaaaaattaattttagcattttttatgggtacattttcaaaaattctcaaaatatttaataaaaatgaaaatatgtacgaaaaaagtttaaatatattaatattaggtaagaaacgaaaaaagtttaaatatattaatattaggtaagaagcaatatttattgtttaatatataataaatacttttaggtatttttatgttaatttgttaataaaaaagttttttttatttaaaaaatacaagtacaggcctgggtccaggcctcgaggagcctgtattttttctgtacctgtattttcctgtacttttgtacagaaaatacagaaaaaaacatatactagtaaattgaatgttaaaaaaatttgaacaaatttggtatcattacgggtatttacaaaataattttattatttaaaaaaata

SEQ ID NO: 34656 - DNA, 888 bp, Heterodera glycines
ttttttggaattaaaattagaaaaaaaaaaatcaaactcgaattaaagaccgaccaaaattgaaagattttcgaaacttattaatcccataaattaagaaatccctgaaaaaaggaaacagaaaatacccgcgccagtgattggatgagtgaatggacaagttgagagtggaagcccaaggtgatggaggaggacagattggcacaaaaaacgggcaaaagcgtggcggtggtggtactctgttggcccaacatcagcgaaaacagtcgctcgaagagcggcgcgtcggcacgctccaacacctttggagggaagaaaatggtaaaaaatcaattttaaatgatcagaaatggaaaagtggtgatccaaaaaagcaaaacggatcaagaaatgcacccgaaaaattagaccgaattccgaatttaaaacttactgacgaaatttgtcggttttttaatccccagaaatcttatgaaaggtttggtttgaaagtgttgctataatgcaacaatctaaccaaatgtccaaatgtttaaaacccaaaaaagaatttaaaaaggcaaaacaataaaaccgcgtaccagcaatgagagagcgttcagacacaggacgagagaatgggtgtcaatttgaaattggcgctgttcaagcagttgcagcagaatctgttgaattaaacggttataaaatgtttggtttctctctgtctgcaccttttccgcgtccggatggttcaacgacagcagcgaggcgacacgaattgcacgggaggagaactcgtggttgcgcaccaacttttgcagggtcacaattgtgtccgtggaaatgaccgccatgtctgtgcaggggaagggacaaaatgggaaacagaaaaacggaaatgcaaag

SEQ ID NO: 34657 - DNA, 972 bp, Heterodera glycines
ttttctcacccgaaactctttcaccaagtgatgaggccgtttgatgccctcaatcacttctggatgcgtcaatttcagcaaatgttcggcatatttcaaaagtgggaaaagcccattggtcaccagcggtgggagggaacgaagataatctgtaaattttttgaataaattgtgagtttgcaacttaattagactgttaaatgaattagcaactaataatattgataataaaataatatgtttttaatcatatcagaaaatctttgaacttaccaatttcgtaatttttggtaggagtaaatttggccatgtcttcgttgtcgtaaattgattgaattggattataagtgtacgatcccttaaaaatcactttgttttatagataatgaataaaaattgaaaaacatttttgtgtatgcaaatattgaacaaattgacctggattttatatatttatatcagcatttgtggcctattaaacagaatcaaagttacaaatattgaatttttaatgcaaaattttcactttatgtgccttttttgccgattggcgtatgggtcttgtcataaaaattacaataatatttaaatgttctcacatcaattgcgttgcccagcaattcgtcgtagcaaatttcatggccatccgcattaagttgtgatttctgattttaaattcggttttaaagcaattaataaatttaaaaccgatttttccgtcatttcatcgctatttttatttgaggcggatgccaaattacaatggtttttgattccagataaagttgttgaaccattaacattatgtgcttctgacgacaattttctttggtatattcggtgtgtggccttttgtacaatttgcgcaatgaaacaccaaaacatttgattgaaatgcggaaaacgatactttttttcgggctaaatacaaaaaaaatttaatgatgtcaaaaattctaaagaatattatga

SEQ ID NO: 34658 - DNA, 1163 bp, Heterodera glycines
  unsure (1)..(1163): unsure at all n locations
agcagacgatgagtgagagaaaaatagtggtaaaaatggtcanctgctgcattggcagagtcagagaggggtcacaaagagttcgcacagcatcgaatattcctttcattntaggcgtcattcttcnccactgcacttctttcttcggtttaattacccaagtttgaggtacttggcgtgtcctgcccataatatctgtggcatggaataaattttggaactgcgctgcctaacggcggtgcttaaagtgcgctaaaaatgatcaaatgattatcaatttttatttttcttaattccaaaatgaattgaaacgcaaaaatttaatcataattcatgtggtaaaaaatgcatttaaaaataaaaaaattcttgaatttgcttctgaattttttaattttaaatagaaaattactttttcgaaaattttgcacaaataagaggcggagaaattcaacgaaatttttattaggattttgatttaaaatgttgagaggtttaacaaatttgtacactgaatgttggatcgtcaacaccaatgagaaatgactaacagaaaagagggagaaaagggcgttggcttaggaaaatagcttataataaaggagagacgagcagacgatgagtgagagaaaaatagtggtaaaaatggtcaactgctgcattggcagagtcagagaggggtcacaaagagttcgcacagcatcgaatatttccttcattttgggcgtcattcttccccactgcacttctttcttcggtttaattacccaagtttgaggtacttggcgtgtcctgcccataatatctgtggcatggaataaattttggaactgcgctgcctaacggcggtgcttaaagtgcgctaaaaatgatcaaatgattatcaatttttatttttcttaattccaaaatgaattcgaaacgcaaaaatttaatcataattcatgtggtaaaaaatgcatttaaaaataaaaaaaattcttgaatttgcttctgaattttttaattttaaatagaaaattactttttcgaaaattttgcacaaataagaggcggagaaattcaacgaaatttttattaggattttgatttanaatggttgagaggtttaacaaattttacactgaatgttggatcgtcaacaccaatgagaaatgactaac

SEQ ID NO: 34659 - DNA, 878 bp, Heterodera glycines
ggtgctgttagttttcgacagtgttggtttcgacagtgattgatttcgacagtaaagcttatttttaaaaaattgttctatagggcataagtattgttaaattttgataattaaatgttaagaacatgactcttatacattgcagaggggttcgagattttcgaattcttgcttaagagcctgcagatttgaattttggcactcaaacccggcattagttagcagattttcccacacgattcgcgagatcttatcaaagaaatttgttgtatttttgactacattccaacaggagatatttgtataaaaaaagtgaaagcgataaatttttggcaaaaaaaatcatacaagtcttatttttcttacttacttctattataaattttgtatatgcaaattgtatattaatattaattcatttgtacaataaatcatgtagaacagcaataaaaaagtactgtcgaaaccaatcactgtcgaaaccaatcactgtcgaaaaaccacccgacgaaattgtgcgattcgttttttgttttctgtgatccgacccctccaaataagcacaaatcttagaaataagcatacttgggaactctgcttttcttcgataagcgaggctgtggtttctcagaaagtattaatatctctcttggtgtccgttatcccaccacccctccctccttcacgtgtacccgagtatataaagccgaccgaaaccccttccactcgtcgatatccttcgagcacgttcgttccgtccgcacttaattgataatttattcggttcacttatttttctaattctgtttgattacgatacgaaaaaaaatgtctgacggtccaagaggaagccggagaagagaaaatggaaaaagcga

SEQ ID NO: 34660 - DNA, 887 bp, Heterodera glycines
  unsure (1)..(887): unsure at all n locations
ccgaccgtcggtcgcatggcgactctccgcttcacctggtcctcctccccagacgcctttgtccaccgtctcgtgaaattcgggcgcttcaaatcgaatccatcgctccgtgtacattggcaaaatgtctttgcgtcgcaccacctcttttccctcgcggcgccggtcgttcagtccgatctccaagaaggaagtgcctctgagaaaggccaagcaaaacagacgaacgcgggcgcgctgatcgctcacattgtcatctatgtccaccgaagcctcgcactcgtcgtaacaattaatctgaatgcaaatgtgccaatatttaaagtactaaatgtccattgccgactaattattctctgtccctcccatttcaaagtgccaattttttccgtcgtaaactcttgaccagcatacccattctcgactattgctctttcactctcgcatcgttctcctctctctttttttcacctgcacttcgtcatatttgtaggtcggcgccgtctcgcgctttttcgggtaatggaacagcacattttctaatgcgtcggtgaaactggcgatggtccgttcgttcaatgacccaaacttagccagcactgtgcactgattgtgagccgcgtgctcaagaggaaggccatatttggtcaaatagccttcgacgaggtgcgagatttgaccggagcgaataccattgcgctcattgtacagaatgtgttgcaattttacggtgtgaattttggtgaaagcgtcgtacggttgcagcacaatgtccgacagcgaataattggcctgaatttgggcacaacggaagtgatcagtgaacaaacacaacaaatagattcattggtcgttaaccaattagcactaaattgcttctnttaatt

SEQ ID NO: 34661 - DNA, 716 bp, Heterodera glycines
tttttttccaaaatcctgtcatgttgtcgctgttagaattttcacatcttcagaatggcgaggtactgttagaatttctactcgatcggttcatgcgtcataacaaaaaatacgctgtccttatattaatgtaacacagtgtagtataaatcaagagacttattttaatccatgccgcgaatgaaagtcttggcgcaaatgtccgaaaatggcctctagaaagtgaccgcaaatatcctaggctcaaatttcgaccgcatttatcggggggagagaaattggcgaatggaggggggggggggatttgaggagaaatgaagcgaaatccaattcaaatttgacgcgatttgtgatgaatgaacaacaacagaaagacaaagcgaattcgaccaaaaagggcaaacggagagagaaaaaggcgaaccatcgccggaaaaggcgctgagagacaaattacgaggagagagaggcaaaacaatggacaattaaatgcctaatttgaagttggaattaaactaaaaacggatcttttaataagaaataaaattcaatatttaaaaatattgctaaatttcactcatcgatggaatcgcccgtgggcatttgaccatcagacggagacacggatgatagatttgctgacggaaaatgtgtggtgagccggatcccaaatgaaaaaaggaagaagcaacgaaaagaattggggggggggaaag

SEQ ID NO: 34662 - DNA, 610 bp, Heterodera glycines
  unsure (1)..(610): unsure at all n locations
atttttnagttacgaagaattggattgatttgatgatactttgttttttgctctttgggcgtacgatataaaagtgagtatttgaaaattttgattttttgttaaattccgaggttcgcaaacttaatttttaatttaatttaattactaaggttttcaataagatattaagtgtacatatgttttattcgaacgaaacaattaacaaaagcatttcgtagagaaaaagagagcatcaaatccgatttcctattggcgagatcgatcatttctcaaattataattatttttcattgctttcgtccgagtccttgaaaatgaaaatatttgagacagaaacccatcatcccaaaaaaaaaaaaagaaatgtccgcttaccgtatatgctctaattatagcccatgggtgattatttttcaacctcctcagaaaaggggggataattagagactgggggattatgatagagggattatttttcaaaacacctcgtagactgggggataattggagactgcgggattaatagagactgggctataattagagcatatacggtatgttgaaatggggaaaaacccaacttgtactaggccaactcgtactgttt

SEQ ID NO: 34663 - DNA, 926 bp, Heterodera glycines
gcaagaaattagataggcaataagttgtgttaaaaaacttttgggtatggaattattttttgaagtgagtcaaacaccctattagtgctttgctgtgccgagaaccggcaggcaatggatggctttcaatctgcaagaaattagattggcaataagtggttgtaaaaaacttttgggtaaggaattattttttgaagtgagtcaaacaccctattagtgctttgctgtgccgagaaccggcaggcaatggatggctttcaatctgcaagaaattagataggcaataaatggttgtaaaaaacttttgggtaaggaattattttttgaagtgagtcaaacaccctattagtgctttgctgtgccgagaaccggcaggcaatggatggctttcaatctgcaagaaattagataggcaataagtggttgtaaaaaacttttgggtaaggaattattttttgaagtcagtcaaacaccctattagtgctttgctgtgccgagcatcggcaggcaatggatggctttcaatctgcaagaaattagattggcaataagtggttgtaaaaaatttaaggaattattttttgaagtgagtcaaaaattagtgctgtgccgagaaccggcaggcaatggatggctttcaatctgcaagaaattagataggcaataaattgttgtaaaaaacttttgggtatggaattattttttgaagtgtcaaacaccctattagtgctttgctgtgccgagaaccggcaggcaatggatggctttaaatctgcaagaaattagattggcaataagtggttgtaaaaaacttttgtgtaaggaattattttttgaagtgagtcaaacaccctattagtgctttgctgtgccgagaaccggcaggtaatggatggcttcaatctgcaagaaattagattggcaat

SEQ ID NO: 34664 - DNA, 1110 bp, Heterodera glycines
attctcaattctcggggtcaatttaaatgtttcaaaagcctgtgctgacccttttggtaaataccgggccgggccacccggcgaaacgggcttttttaccgggcgacctgggcccgatcaattatcaaagcccaggctcgggttttaaacgggtataaacttcgccagtgaaactgtcccgcatttgaagattttttaattgttttggcgaaatttttaaatatagaattagtgaatttttagaaaagttaacacaatttcaacatagatttagttaaaaatctgaaaaacatttccaggcggtgtcggttggaaccgccggccccagatttcattaattgttttttttattatagaccaactcacaagtcctttttagtacaaaaattataaacaaaagcagctaaattttcaaatttttcccagcggcgcctttcggccttcccataaatatgcaagacacaaaaagtgtttcggaaaaaatatcaaattttgacagatttttggtcaaattataccgaatttgagttcatttggaaatctgaattatttctgtttagaacttaaaagcagcagcaattgtcgaagaaatttactgcaaattttgacggaggaagacgcaaaagaatttttaaaaataaataaaataaaatttgaaaaaagcgaatttaaaattcaaaaaaataaaattagtgaagaaaaaggaaataaaaattgggcaaaaaataaattgtcgaaaaaagaaaacaaaaagaaaatggaaaaaatttggtcaacaattgaaaaaggagaaacatcgaaaacagagaagaaaaatttgacaaaagaaacatcggaagaagtaaaaagtgacgaacgaattgacgaagaaaaaagtgatcagaaaattgaggaagaaaaaagtaaacagaaaatggaagagccaaaaagtgagggggaaaaaagtgatcagaaaattgaaaaagaaaatagtgatcagaaaattgaggaagaaaaaagcaagcagaaaatggaagagccaaaaagtgatcagaaaattgaaaaagaaaatagtgatcagaaaattgaggaagaaaaaagcaagcagaaaatggaagagccaaaaagtga

SEQ ID NO: 34665 - DNA, 792 bp, Heterodera glycines
aattccgaaggattactcttacattgattgattttgtgtgttttatgccaatgtttaggtgagtgccgtgctgtttcttctcagatgttttgttgagaatctcagggactttgccgctgccgactcatttaatttattctcataaatacattttttatgatggaatcaaaccatttttcttgactttataattgtaatttgattccaaaaataaacaaatatgtcaaatattaattttgtcggtcatttaaatagctttggattgaactggtagccccacttttcaaaaaaggcagctcaccggggacagtgccaaattctcctcctccccatcacaattggccgcccgcagcggaggcggctatggcattttgccgagcattggttttggtggcaccgcaatgctttacgagttgcgtcggtttggcggcattttcggtggcactggcgacaacccttcggcaccgaggccgaaagagttctcccttatcgccctccccttttccgcctctttcgacacctttccgtccacatcgctgccctgctctgctgctgatcctcctttatcgcagtcaattggccaggcctcagctgtcggcgctgcaatggcagactgcggggaaatgggggccactggaaggaaaactcaatttggcttaggccagaacatccctcgactgggaggaggggtaggaaaatcagcaggaggagcagatgttggagcaggacaaggaggggctggcgttggtgttccataaaaaggtgggcgatattggcattaattatgaacaa

SEQ ID NO: 34666 - DNA, 1565 bp, Heterodera glycines
aattaaggaaaagaaaaaattttattattttttaattgtcttttataggtatttttattggtgtattttaagtattttattctcttgctttccgccaagaattcattacgcagcatttccaagtccaatttttacttacgtatttaaattatattgctctatttgtcagtattaatgtttatttattaacgaccggcaggattcgaacctgcagcctcagcactgagtgctgcgctcttaccatttgagctacggtcgcccattaacctttaccacttttctttttaaattattaaaattgtcatatttatgtgaagaaggaaacatgatttaaacaaagtgaaataagtcgaaaaaaaaaacattagcttgatttaccaataaaactcaggagatttctggctacattgatcgcgtccagtgtcttcttcatcacgcaaaactaaagttttgtccgacagggttgacgagctgctgcaatgtcatccctctccttgaacaagttgcccagccattgcccgatcggttgttgtccttctttcacaatttcgagcagttccatcgggtagttacggttctccccacactcaaagcgttcaacaatgcacggaatgtaggggtgatgcagtttcacacggtgtcgggcataaaaatgtgccgccacatttatattaaacggctggcgaagacggccgtaggctggcacgaatgccgctcccttttctgttatcccatcaataaagaaagtcttgcgcatgccatttcggtctttgtaggttgtttgaacttttttgcggtccactctttcagtgcgcgttccccatcctcaggatggtttagaagatcgcgaagggttttaagaaaacaaccaaaaaactgggcgcaaaaattccctgaccaagaccaattttaaaaaaattgcaaaggattggcggaaaaagaacgggggaactcctttatctttgggtaagcccccccccaaattggcccaaaaaaaagccctttgttttccccctattaaaacaaaattttttaaaaatttttcattttaaaaaggttccccccccaattctcccccaaggaaaaaaagaaaaaaggggggggaaaaaaaaaagggggggaaaattcccccccccaaaaaaaaaaaaaaagtggaaaaacaacaagggggtggtatgagtttgtggggggaaaaaaaccccccagggcgaaaaaaaattattcacaccttttttttttttttgggcgggggaaaaaaaaaaaaaaaaaaaaattttttttttttttttttttttttttttttaaaccccccccccccgcccccgccccacaaaattggggggggcgcgcccgccccttggaggggtgggtgttattttattttttctccttcctcttaaaaaaaaaaaaagagagggggggttttttttttttttgtttttataaaaaaaaaccccccccccctcttttttttttcttttttttaaaaaaaaaaagggggggagggggggggggaaggaaaaaaaaaaaagaaaaaaaataatttttttttttttttttttttt

SEQ ID NO: 34667 - DNA, 819 bp, Heterodera glycines
ccaattgattattctagaaaatttaagaaaaacatatctttccattcgaaatatatgcaaagattagaaaaatcaaatcgaaacggaaacaagaaagacaatcaataattgaacagaagacggagttgtactcaactaaatggtcctttctgactgtgagtctgttaaatgttagcctttttcgcatgggcgaggagattgggcgaaaagacttcagacaattcttcttgcagtaggctcattctgtttgccccctttttggcggaagaagcgaactgcggagatttcttcttcccgtcgagaaagagggggtcgaactgttccaaatgaggcggacaaggtgcctttttgtcagaagaagccgaaagaaactgaaacaaatacaattagaaatagttaacaaatgtgacatatctaaatgtaatttccatacataataagtacaaatgtacctcgacggaactgtcgccttcgaatgcaaaatttttggcagcatgcacaatttggcctttgtcgtcgggctcaacgaaagaaaagccgaacgatgaacgtggccgattcggtgccgagtccttcgatgtgcctgcctttccgtcgacccttctcttttttcctctgtcttcgagaatcgcgcgcaactgttcgatctccttgcgcagttcgtcgttttccttttgttttttgaggcgttccaaccgttctttctttagatcgacgataattattttgttcttttttgacctcttcgtcgcgttgcctaaataaattcgtaaacatattaaatagttaattgaaaaacacactttctcatcaagtcga

SEQ ID NO: 34668 - DNA, 767 bp, Heterodera glycines
  unsure (1)..(767): unsure at all n locations
ctatnagggaagctattcccgaaggattcggtctccccataaatctgggcgcatcggttcggggggactgccccgaaaacaaaaaaatcgattttttcaagtgtccgtttggggtactcaaacaattatggggagcaaaaatccaacgcagaattaaagtacaggctatagggaagctattccggaaggattcggtctccccataaatctgggcgcatcggttcggggggactgccccgaaaacaaaaaaatcgtttttttcaactagctcggcgctcatttcagtgtaagttagtcctttaccggggagtatccctgcaaagtttggtacgcttctgctcaattagcaaaaaatatgagtgatcgaattttcactaaaaaagttaagcctacattttttggcatatttaaaaagcaattaaaaaatttttaaaatttaataattttcctgcaccgaaggtactcactcggcctcttcgcggctcgtggtgggcccctctgccgctttttctatcaaaaagggagatgaataaatttttaaaaatttttaattcctttttaaacaggccaaaaagtttaggcttaacttttttttcagaaacttatcagaagcgccccaaactttgcaggaatactgaaaggaaaagaattaacctgttttatcacattagcttgtcatcagtttttataaaaacttttcaaaattctgagtctcctattattttattttttttttcaaaattttgaagggcgggggggggcgggtg

SEQ ID NO: 34669 - DNA, 1230 bp, Heterodera glycines
ttctaaattttcccaatatcaaatggcaccggagaaggctttggatgatgcggcggtggacgcgtttgcctttgaaaaggatgggcgtcggttcttctgatggcgtcgggctgtcctcctcaaaatcggacgcattcagtgaatagtcaacgagtttttttgcggcattcatttttatgcacaaaaattatgattttttaaataaaaaaagattttaaatggattgtaataattagcatattggataattttttaacttaaaaaatttcgaaaatttgttaggtacataatcatttcacgaatagaaaaaaaattaaattaaatttttcccgctttttggcattcaaagtttgaaatttttttggtcttttcagtcctattcgacggatacggacaaagttcaaaggacaatagagaccccccaaaacagccttattccaatatcggatttgtatttggctgttaccggagaaggcgtgaccaaattttgcggaaatcttatatttcctcgataaaatagtgacattctgccataaaatttcaaattatgagtttatttaagaaatcagaaaaaattttggtcgactccaaatcaggacaaatcttacaaattataacatttttattttatcagatttacaaactgataaatcaggacagatccgagccctggtgttatgtcatcgtgcgctatttctagtataaaaaggttttttcttcatgagattggtgcgggtaaattaaaaaaatacaacacctttaaaattttgagatttttgaagtatttttgaaaaattatttatataaaggtaattttgttttagcttgttataaaatttaaaaaactcgaagttgctattttctatgaaacaatttgatttaaaatctttaatttaaatattttttgaagtaaaaaatgtaatattaattttttatttttcatttcacaaaagccaaaaattaaagcaaaaagttattccaattccgcactgtgatccgctaattgaattatttgaattaattttggcttttgtgaaatgaaaataaaagattaatattatttttacttcaaaaaataattaaattaaaaaattttaaaaaccaattttttcatagaaaaatatttttcccatttcctggcgtgatcccgataaaacttgacgcgattttagggacaaaggcggaaatccaaggcccggtaattttttacccgtcctattataatattat

SEQ ID NO: 34670 - DNA, 1184 bp, Heterodera glycines
aaaacaacccaaagggagggaaaacaaaacaaaggaataacggagtgttaataaattaggggagaacaaaattagtaaatcaaatcggaaacaaaataatttaaaggattacatttctttcaaatgttttctaggaccctgaaaagtgaaaatgaattgcgtagcattaagcagaaaaagtattacatttttttgtgaacttctgtcccctccgctacctgtaaaattggatgatttggtaaagagaaagagacaaatcggtgaccaaatggccaaagtgcaaaagtaagtcaggagaaagtccaaagtcggctcggttggtcagaccaatcaaagcggtaaaacaccgcaaagctcagaaaacaacgaccgttttgcacgtcaccccaactcacgtcacaaaactcctcgaaggatattttcccatccccgtccttgtcatggaaaagaatggttttatcggcgatttgctgaagttgagtggagaggtgataaaaaccgcacggttttgggtaattttcaaaaagaatttttaatttcaggatccgaaaaatcatcataaaaaaattcaggattgagaaaataaaaccggcccaaaaggtttgggatcaaaaagatttaaatttgcaaaagaaaaaattgaatttccttcacctgtcacttttggtgacaggtggatgattgatgaccttccgcggcgctgcgcggcgcggagagggggagtgaaaaaaaatcgccagtgcggatttgaggaaataaaatctacaaggcggcagacttcaaaggacttcacccctcctataggcttgggattgtgcgggaaaatgtccccgggcggcaacatcaaagggctgcgcccctcccataggcacgggtttgtgcggtaaacacccgtgcgcaaccgtgcgctttcggggtcatatactacttggctttttattttgttcgttcaaataacttaattattatgaacttattggttcaattattttactagtgttcgctatctttaaattacattataattgttatgaaaatcatttattatcattaaaataattttttatgtttttagatacattatttattggatgatataggaaattattatacctaatatttttaaatgttcattgtaaaaatggcaaatggtgtaaatttagtaaataatttaataatttcac

SEQ ID NO: 34671 - DNA, 605 bp, Heterodera glycines
aacgcggccaaagtcgtgacagtcggccattgtttggctggagaatccctggcgatgagtggggaggggagacccgtccccccaaaggataattaattccctccccgtcaacaacagcggagggtccccactctttgcgaggggatcccttcccctcccccccccccccttctcccaattttcctctcaaaatttgctccgtcggtgaacaattggcgtctgtctgaggtcggtcggagatggtaaggcttctctctccccgccgttggccccctcattaatcttcacgcgcagaaaaacagaacaatcccggtagaacagagcagcagagaatggcaggggaaggcgaaaaacgattaataaccatcggttggggagagagaagcaccatttttcaaatgaatattaaaatgttggcaattgggggccattgggtcaattcgctgaaactgcgaaagaaaaaaaatgcgtatttagggacaaatgggcagtttttgcttggccataatttacataggtgcacttttttaattataatggatttgctatttccggcaatcaccaaattattccaatgttcctaattcgaaaattgatctgctggg

SEQ ID NO: 34672 - DNA, 825 bp, Heterodera glycines
cgaagccccccgtacttggccgcgaagcggccgagccctccccaactgttcaacatcccaaggcacacaaaaagttaaaaattctaaagaaatttgctgaggttgagtccctgcgattggaatgttggtggattgagccccagtgattgaaatgcttgagggttgagtcccagtgattgaaatgcagaagaattgagtcagtgattgaatgctggtggattgagtcccgttgattgaaatgctggtgggttgagtcccagtgattgaaatgctggtggattgagtcccgttgattggaatgttggtggattgagtcccagtgattgaaatactggtggattgagtcccggtgattggaatgttggtggattgagtcccagtgattgaaatgctggtggattgagtcccgttgattggaatgttggtggattgagtcccagtgattgaaatgctggtggattgagtcccgttgatcggaatgttggtggattgagtcccagtgattgaaatgctggtgggttgagtcccagtgattaaatgatggtggattgagtcccgttgattggaatgttggtggattgagtcccagtgattgaaatgctggtggattgagtcccgttgattggaatgttggtggattgagtcccagtgattgaaatgctggtgggttgagtcccagtgattaaatgatggtggattgagtcccgttgattggaatgttggtggattgagtcccagtgattgaaatgctggtggattgagtcccagtgattggaatgttggtgggttgagtccccagtgattaaatgatggtggattgagtcc

SEQ ID NO: 34673 - DNA, 912 bp, Heterodera glycines
taccattttccgctgaacagaaaatggcgccgcattttccattgtaagtgtagcaaatgtttctttttctgctgctttattcctcatcattatcttttaccatcatcccttcttcactttgtttggcttttttgcattttattgctgacgagtaaattaattaaatttgaaaaaatattattaccattttttaattttaattaattaaaaatgaatcggacaaaattatacttttttagggagcacagctcacccaccctccccccgtattgtcttcccccaaaaatgttttcaaaaactgaatttttttaagtttctcactttcttagaaggtttttctgggaaaaactctaaacttttttttcttcaaattcaatttttcataaatttttttaggtttttcctaggaaaaaaactctggaaaggtcaattgttaaaaaagggggctattttgctccaaaattgcttaaattgagtttaaaaatatcctaaactcttgcacattaaaaaaaataggctcaatgtcattcaaattagagaccaactcaatcgatgttttaatcggatattctttcttgcgattgattttgtgtagaaaaatcgattaaaatccaatttctctacttataactcattagacaattaattttaatattttcacgtctgtttacacacctttgaccaacggcggcagaaacaatgcattgctcatgctcacaccggtctttccaaattgtgccgtgcattgccactgatcgccggtggcacggggcggcaagttgtcgatggcacggctctgatcaacagtgtccattctgattttgctcaaacgttgtgcactgtattcaacaccgtagaaaccccattcgttccacaaaagtttgcctgaaaatgggcaaaaaaagagaaaaa

SEQ ID NO: 34674 - DNA, 976 bp, Heterodera glycines
  unsure (1)..(976): unsure at all n locations
atccncattatgagcgctaaaattatcagagtgccgaaaatcgcatgtgatctaagcctagaaaaaaatggtgtaagtaaaatcgtaattacgctcaaaaagcttttcaaacaattttagcgcttccaattccttctacaatcgcctttatacatcccattatgagcgctaaaattatcagagtgccgaaaatcgcatgtgatctaagcctagaaaaaaatggtgtaagtaaaatcgtaattacgctcaaaaagcttttcaaacaattttagcgcttccaattccttctacaatcgcctttatacatcccattatgagcgctaaaattatcagagtgccgaaaatcgcatgtgatctaagcctagaaaaaaatggtgtaagtaaaatcgtaattacgctcaaaaagctcctcaaacaattttagcgcttccaattccttctacaatcgcctttatacatcccattatgagcgctaaaattatcagagtgccgaaaatcgcatgtgatctaagcctagcaaaaaatggtgtaagtaaaaatcgtaattacgctcaaaaagctcctcaaacaattttagcgcttccaattccttctacaatcgcctttatacatcccattatgagcgctaaaattatcagagtgccgaaaatcgcatgtgatctaagcctagaaaaaaatggtgtaagtaaaatcgtaattacgctcaaaaagcttttcaaacaattttagcgcttccaattccttctacaatcgcctttatacatcccattatgagcgctaaaattatcagagtgccgaaaatcgcatgtgatctaagcctagaaaaaaatggtgtaagtaaaatcgtaattacgctcaaaaagctcctcaaacaattttagcgcttccaattccttctacatcgcctttatacatcccattatgagcgctaaaatatcagagtgccgaaatcgcatgtgatctaagctagcaaaaa

SEQ ID NO: 34675 - DNA, 935 bp, Heterodera glycines
  unsure (1)..(935): unsure at all n locations
agttcgaaagttaaaaaaatatgcatataaaatcacaaccttctgaggacccaacacagaaactctntggaaaaatattaatgttaaaacccggagacatagataataattttagaagctaaaaaaatatttttaaaaaactttcttaaaacaataaaactctctaattatgttccaattaaaacaaaagtattcatttttattcccttttgaaaatagtttaatttaaatcacatttaatataatcgccaataaataaattattttcttaattaaaaattagctataattaatcaatttaaagtgtcataaatttgataatattcacacaatagttcataaaattttataccacctccaaaaaaaatcaagtgttaattgtgtcatggtttgaaaaatttggtagttagaatattaacacaataagaaaataaaaatgattaaattttataaaagcctttgaacaagaatggggaaaagcgtcttcttgacatgagtgatataaaaaagatcagaaattttgatatgtacaaaaaattaaaatatttttaaataaaatgaaaaagtattgtaatacaataaaacaaaataaataattgtgtctggaattgcaaatcgaaatgctctaaacgatagaagtgggtttaaagtgatttggacaattgcagttagttgggtatgtgccattgtcaaatatttttcttcttgaagttacggattacggtttgcggaattttgggattttttccgtaattttgatccgtacctgggcttttggatttttttcgagacgatttcttgtaagattatttttttataaagggtttttgttaagttttacgtgttttgctccctaaaaatccttaataaaaaattttanatgccttttttcatgtctttttccggattttcgtgcctttttcatgcattttttt

SEQ ID NO: 34676 - DNA, 1347 bp, Heterodera glycines
  unsure (1)..(1347): unsure at all n locations
aaagaatgatcggatgcagcgctagaggggactgaaagggacgcggaggatggggggggacggtgaagcaaaagacggaccaaaataacgggagaaagaatgggaggcgatagaatcaacgggtcgagcagacggggcgagaggatgaccggcacgaaagcccacggggaaaggatcacctgaacaacggggcgtataaaaggtggaaagggagcgggggggggcggcacagggcccaagacggcaggggcaaggatcagcggagagaaaatgattggagaaaggatgatcgggctcctgtcgaggaaggtctgaagacaaatgatcggattggaaggccaagcccaactcacgaggataaacggggaaaagctaatcggcgacagaatcaccgctctctttgatcgcgcgtggtgctgcgccttcgcgggcgctgacttccgcgtgattttaaatgattttatctgcgcgagcgaatgaatgtcgcgttcaatgtgctgctgaatcgtcgatcggttcaacgccaggaaccgtttgagcaccttaagctcaagcacttcttttggttcactaatttgtaagccacgagtttgactttctcgtcgtggaactccgagttgggcccgtacagcaaatccaactgctgcttggacaggagggcgaagcccgtcctgttcatgtctttgatctgctcactgcccatcaacttatgcaattgttcgaacacttcgactttgctcacttcttttgggccaaagccatcgctgaaaatgctaaactattacaaacgattgccactttttttggcactgtttttcattcactttggcactttttccctttttccatctccccaatggtcgaccttatgttttgtttggtaaagtacaacggagtgccctctttggtgcgtatctcgcgctcgtatcgctccctgtcgtaatgcttttcccacaccgttttcaatgggttttcccccggggccgtcacattcgtttcctgaaattgtccaccgccatgagaattcattcattcattcgctcgttcatttcttttcttaccgcctcaattttctcggcattttccaccactcccgacgcctccataataaagtccatccaaagctgttggtctttggcactaaagccaaatggtcccccgatattttgtatcatattcggaaggcttgtcaaattctaaggaaggatcaattaaaacaattcaaaagtcattccttcactcggttcacctcaattcccgtgcccgaatttatgtacgaaaaaagcgaaggcgacagaaaatcgatctgaccaaggaatangggaaatgtataattangagcgagcg

SEQ ID NO: 34677 - DNA, 248 bp, Heterodera glycines
cctcatcgcatgttgtggcgacaccccacctcctccccaatttcgcatcatgcgttgtgggcaaccgcatcgcatgttgtggcgacaccccacctcctccccaatttcgcatcatgcgttgtgggcaaccgcatcgcatgttgtggcccaccccaatttcgcatcatgcgttgtgggcaaccgcatcgcatgttgtggccccctcccccgatttcgcagcatgcgttgtgggcaaccgcatcgcatgt

SEQ ID NO: 34678 - DNA, 951 bp, Heterodera glycines
aaaatttagcctattaaaatatttagaaacttttttattatattttttattttttgaaaaatttccgatttccgacgtttttggggtcgaaattccgatttccgaaaattttttgatccccgaaattccgatttgcgaaaatttttggggcctcggaatgccatccctggtggctggggaagctccaatattttcataataattaaaaaaaaattattttgctaattttcaggtggttatacacttggccaatggttataagactgccgatttcacctggttctttgatgggctgaagaaagctggtggcagttttgacgttattggcatctcacattatccgagctcgtcaaattggaaaaccctagacgcacaggccgaaacaacactgaaaactatgatcagtcggtacggtagacgactgttttgtagtttaaaaaattctgagatttattggaggttcggttcaaatttttgtaatctaggatatttaaagtttgctctttaaaaatgggtaattcttaaaagagaaattcaaaactcccacagctttaaaaattttaacataaaattaggcaatttttcaaattttcataacaaattatcaaaaatatatgtaattttcagcggccctttttgttaggcctcaatatagccactttctaaaagccgaactttgccattttaacagatatggcaaaaaggtggtggtggccgagattggcttatcatggaacgagccaagtgccagcaaatccatgcttgacgacatgttcaagcgggtgaaagcattggggaacaacggcattggcattttctattgggagccgcaggcgtcgccaggctggaaccattaccagtggggcgcgttggacaattcgggcaaatttacggccgcaatggaatcattcaaaacaactgaagaatgattattgttggcatgggtttttt

SEQ ID NO: 34679 - DNA, 1022 bp, Heterodera glycines
tgggaattgaacccaggacctctcgcacccgaagcgacatcttacgactagaccaatcacccagttgacagagtggttttatttctcaactaaagtaaataattttttcgccgtttttcttcaaatattcagaagagaatctattggaccaacgatttataacatttattaattgattagtttagctaaatgtttatgaaaataaattgaaatagtttttttttggtagaaaaagaaaatgtaaatctgccgaattttcgttgtaaaattaatcattttcgattggatcaaaacattaaataattgcttttggcatactaactgtgtccatcaaggattgaagccattttaggttccggatttccgaaattttttggactggtacgaaatgcaattgccaattttgggcgaggacctaggaatcggatttccggaatttgtctttttgcttaaaatttcgatttttttgattcggttctcatccccaattgtcctccaatcacctcataaatgccgtcctcctccttgatgatgttggtgttctgattactggcaaatgcataaaaaatgacatttccgccgagttgggacaacacggccaaagtgacgagcaccgccgcaacacaagtgcaaagacttagggagagattggtgatatatatttctttgatatttaacattttttatggcactattaaatttcgacgctaaaatttaaaaattatgaaaatattttaattgtttttaatttttgtatgatcaaatggcgaacattttgtgtgcacattacaaaggctaaaattatttgaaaatatgactgatttagcccagtttaatcaggtcaataataatcttggtcaaaaaaaaataaataaataattggtttttgtattcagtttggttttttaaatttccatctaattattttggtatttttccgttttggggccaacgtttaatttttttaaatcaacagcgggcgcatagaattgctaaagctacgcgccaaaattatttcggag

SEQ ID NO: 34680 - DNA, 1543 bp, Heterodera glycines
ttagataaaaattgaaaatgttttgttaattgttgactttttatgcttttttatggaaaactataataaaatagaaaatataaataataaaaaatttcaaatttaaataatgccatactacatgtgctaaataattaattgatctagaataaaacaaaaaagctacacaaactcacaaatattaaagcataaatataaaccaaaaattaaaattttacatttaaaaaacaataattgtgatcttaaaaaatatatttttcgactaagatagatttatggcaagagaattgaaaataattaaaaaatttaggcttaaatgaaaggaataataataattttctaaaagaaaaaatgttgtaatatttcttatacaacaatttaaattttgtaattgaataccttttgtcctctaagtcaacaatttttaattatttcttaaacatatttaataattatccctttgctccaggaacatgcttcacacaattaccatacattaaaaagaagaggaagtcgatagagatcttattaaaatagaaggtaaaataaaaaaaatagatgcgatttcataaaaataagattgctaagccacaaaacttttcatatttacatttcctgaggtttggaaagatttttagaaaaaattaaaaatttcaccgaataaaatacttttgaaggtaaaactttaaatataaatatcgttaataaagaaaaataatactcctgacatcttttaaaagaaaaaaatcgattttattttcacttattcaataaattaaaagtcatttattatataaacaatttaaactaatacaacccaaaagtcaaacatataatcttattttttatcattgaaaaattctttaaaaatcatattccatttctactaataaaagaaataataattcaattgatattatttctaattattgttcatgcatgagtttttacatattaatattaaaaattatacaaacaaataattaaaacacggaataaacaaaatttattttggttattcaacatattttatgaattatttgatttattcaaagttaatgtccatattttaattgaaagaatttatttttattataaaacttgcaatctaaaagctatgaaacgggtaaacacatgaaattaattagacgataatgcgatacatactttatgaataattaaatataactttatagatcaattaatgcatttaatttcaccaattttttgaaaccagcacagtttcctcagcaagattaaaaaatgcccattatttttacttatataaacacattatattgtgaaataattaatacaaatatatcgactaaaatttcattgtttattatctaaaaggttaaattccataattctaaattaattttaattattaatttattattacttttaaaacgcaaaataataactcgcttatataaattatacaaaattacatttcagaaaaaaatttaataataattgcaccaaagcaaaaaatgattagacattagggaaagaagaaattaatcaagtaaatgtataa

SEQ ID NO: 34681 - DNA, 973 bp, Heterodera glycines
  unsure (1)..(973): unsure at all n locations
ctcaaagacccgaaagtgcttttgnccggcttccgcaatccccaccccttagaacacaaaattttgatccgtgtccatacaaatcctgaaacaacgccaatgtaagctttgaaccaatgccattgagcatttggtggctgagttttcatttttggaacagcgatttcgagacgcgataagtgaaaaacgggaagaatgatcaaattgtttactgtttacagaactcattcttttattcatttttcaataaataaataaaagtaaaacgaacaaaaaaaaagttttttgaaattttttgagacaattaaccgtttttatgaatgtgatgaaaatgatttggtgtgttttggaattcaaaagtttttttccatttggtcatttgaaatcgaactaagcctaagccctacttctgctttcacgagttgttgctgtggtggcacacacgctgtgtgccaataccgctatgaaagtaaaaaatgtttttttcaaaattttattttatttttttgcgaaaattcttttaaaaatgaaagttataaaaaagaaattcaagcactattttctataagtagaaaataaaattttgatgtatttatcattggcaaatttaattggcatggcattgaaagtatgctggttagacgggttcgttaccatttttactattttataaatttatttggcaaaaatatggattattcgtttttcatcttctaaatttactaaaaattctgaccaaataataataattcttacattttcccattaaaaatgaagccaaaactgtgctcccaaatgaattgatttatattttaaataaactggcaaacaaataattgatagtagaacagtgaaatagtcagcccaaattaaaatctattatttttttttatctgttggaatcagggctggacgtaattacggattacgtattacggattacggaaattacggcctttttggagttacggat

SEQ ID NO: 34682 - DNA, 1120 bp, Heterodera glycines
caaaaataaataaataaatcgatcttccaagagcacaaacgttattttaaattagaatcgactcactctcgaccgaataaatattttctttcattttatatcccttataaaatgctatttttagaaacgatttccgaagtattcgaataggtaaaatttaaaaaaatctctggcaaggctatcgaaagtgatgaactaataaatgtgattatattaaaataatcaaattgcagcatataatttgattgatcagcaaaaaaaaaacagcaaaaaattgaatggtctgtaataaattcgttatgcaaatgtataaaatacaaataatcgccccaatttggcattgagtcaatcaacattttaaattacaaatcacaatcactttggaattaataatcgatcggtccaacaacaaaaacaatagccaaaaccatcccccgatcacccatccgatcaaaacaatcagaaaaaattgaagaattaaaaaattgtgctaaaaggaaaagtttagaacaatcggataaaactttattagttatcaatcattcatcattcaatggtccccatttgcaattagagcagttcctccctccctccgtcagtcattcagtcctccgtctccgagtcggtgccctccgtgtagtcgtccgtcgacacgggctcgtcatccttgtccacctgcgcctcgtcctccgtgtcctcgtatttgacgggcggtggctcgcgtgccgggtgcacttccatctgcggacggagggaaaaggatgatgggattcaaaataagaatttaggaagcgaaaaaatcgggtaaaaaccctttaaaaaatgttttgctatttaaaggttcattagcagagttaaaaaaaactgaacagccattagagggctttgaaatatgtaaaaattagtcaaactaaccattcaacacccaaaaaattatattatttttgagagtagaaagagaattttaaatttggttttgaaaaaaagaaactgatgaacgcggaccggatttcccatttttggactctacgaatcctatcctctgcccaccttgacgtccacggagtagtccatgtccatgtaggagtcggaacggatgtgcagcggaagaagtagtgcc

SEQ ID NO: 34683 - DNA, 919 bp, Heterodera glycines
tagtgatgttcgagaccgaaaatttcccgagactcgagaccgagacccaaaaagcacgagactgggcactacacgaatatgacatctattttaagcagatttcgagtcgataacccgaacttgaataaaaatcgaaaattcaagtttctcgttcaaaatctttgttcaattttagctagaagtcggaattgattaaaacaaaatgtcatgctcgtgatctaaaaaaccctccgggaacaaatttttattttttatttggcgaccgggaaaatgcgtcagtttagtcagtttatcactgaatcagtgtatttattgaaaacgagatatgtgtatattataatagttagaaattttaagcgatatgggaacgaacttacagcaacccatttaccagaatattacattttatggtttttgaatttttttaaatttattaaagtctatgagtttcctaaaaacggaattgttaaattcagaattaggttcctaaacaattttaacccttttattatgccaacaatagattcatatcattttatagtttatttttatttttaaaaatttacacattttctaaactctgttttgttgatattttcacattgttatacatatatacgcagaagatcatttttggatttcttcgtgtttctatttgttatattttttggataaatttggtgaaaaaaaatttaacagaaacatatattttaatgcgtaattagctaattgtttaattaaagacggtttgaaaatttacattcactaaaagtttcaaaaaagaagcaaaaacactaaaaaaacatttaaaaaaatataaaaatttgtatgaattttgcaaaatgttcatcatttagggatgcgatttttaggcaaatgcctaaaatttctacgtacttaatacgcacagataagcacg

SEQ ID NO: 34684 - DNA, 737 bp, Heterodera glycines
agtgtcagcaatcgtcgtcgtgtccccgtccgtcccgctgctgtttcttctgctgatgctgtcccattacagcaaaggaggagccccacatttgtgtgtttggggcggaacacacaacaaacagcccctttggggacagcagcaggacaaaccccggaggggaaagcgggcaaagagtgtgtgttcctatgagacaagagggtgtgaaaggaatggggagagagttgtgggcatgaagtgaagagcgaagatcgcaccaagacggacagagtgcagcgtatagagtggaaagagacacggggtgggagacgggcagagcgagtgagagtttggctttacagcggaatgtaaatcacagaacagatgggcagagtgcggtggagagaatgtgcagcgggataaaaccaaccggatagagaaacaaaggactgagaaagtatcgaaaggcatgcggtaggggtgtgagggcaatcaaagagagttgagccaaggaagagggttgtcgagacggacagagtgcggaggtagggaatgttgtggaagaaaaaggtgggggcaagagattatttagtaacgtgatactgtttggcggccaggggtgtgagagccgagaaagttcagtgcgagcagagagcacccgagacggacagagtgccgcactgtggtgagccaatgggcggaagaatgtgctttgcatacataaaaagacatggcgagggccggagcggggggggggg

SEQ ID NO: 34685 - DNA, 939 bp, Heterodera glycines
  unsure (1)..(939): unsure at all n locations
tttttgctaattgagcagaagcataccaaactttgcagggatactccccggtaaaggactaacttacactgaaatgagcgccgagctagcttgctctaaaaaatttttcgaaaatctgagtctttcgtttttatttattttttgcaaaattaattcttaaatattttttcagaaagggttctgaaacgcaccaaattttatttacatgttagtttaggcactctgatgctttttctatcaaaaagggagatgaataaaatttttaaaaatttttaattcctttttaaacaggccaaaaagtttaggcttaactttttttttcagaaactgatcagaagcgcaccaaactttgcagggatactgaaaggaagagaaataacctattttaaatattatctagtcagttcatttaaataatttttatccaaaaaatttttttttgggttttcggggcagtccccctgaaccgatgcgcccagatttatggggagnccggatctttcgggaatagcttccctatagtctgtactttaattctgcgttggatttttgctccccataaatgtttgagtaccccaaacggacacttgaaaaaatcgatttttttgttttcggggcagtccccccgaaccgatgcgcccagatttatggggagaccgaatccttcgggaatagcttccctatagtctgtactttaattctgcgttggatttttgctccccataaatgtttgagtaccccaaacggacacttgaaaaaatcgatttttttgttttcggggcagtccccccgaaccgatgcgcccagatttatggggagaccgaatccttcgggaatagcttccctatagcctgtactttaattctgcgttggatttttgctccccataaatgtttgagtaccccaaactgacacttgaaaaaatcgatttttttgttt

SEQ ID NO: 34686 - DNA, 497 bp, Heterodera glycines
gttttcggggcagtccccccgagccgatgcgcccagatttatggggagaccgaatccttccggaatagcttccctatagcctgtactttaattctgcgttggatttttgctccccataattgtttgagtaccccaaacggacacttgaaaaaatcgatttttttgttttcggggcagtccccccgagccgatgcgcccagatttatggggagaccgaatccttccgaaatagcttccctatagcctgtactttaattctgcgttggatttttgctccccataattgtttgagtaccccaaacggacacttgaaaaaatcgatttttttgttttcggggcagtccccccgaaccgatgcgcccagatttatggggagaccgaatccttccggaatagcttccctatagtctgtactttaattctgcgttggatttttgctcccccataaatgttttgattaccccaaacgggacactttgaaaaaatcgatttttttt

SEQ ID NO: 34687 - DNA, 718 bp, Heterodera glycines
tgtatgcatctctctctctttctcttctctccctcccttgctatctctctctctctctctctgtctctctattcttgccgatctgggctctctctctttctagccgatctgtgctctctctctaatctctctctctctcttcccgagtttgttctagcgcctctgacggtgtgtcccatccctttttgtggttcaactgctgatttgtgagcacagcgagaacagccgactttcgtcgcggctctcatatttcaagtgttcaacccctctgctgaacagaagttgaggaagtgaaagaaagaacactcactcatccgctgatcggaggacaaaaaaaaaggacaccgatcaattgggaagtgatcggaagggatcaatttttcaaaattttcactatgagacgattcttttggggaggcataagtgcagggatggtatcgtccgaagtcggtttccaaggacgggtatgccgatttgcaaggacatagtggggaaaattcatgaaattcaaggacatttaaaatttttattatatgcaatgcaaaatggttaatatttattcaaatggatttttcaccggaattgattttttccaacacttttttgttttcacttatcattttcttcatttacgacgacttttttctgctttaaaaacgctttttttgtggcgcgctttttccaaaaattttgtgggacagagggggggggggggggg

SEQ ID NO: 34688 - DNA, 917 bp, Heterodera glycines
gcctgcaggtcgtaattttaaacaataattttggggttgttcagtggtgttggacatttggtgttgaaatgcttttggtcattgtctttgcatgtggcgcccattggcaatttaattggatgcctaattgggccaatttacacagaaaagtatgggcgaaggggtgagaatgcattaataattttagttttcctaataattataatatttttaaatgaaattttataatttgagaattaattaaaaagtcaaaaatttccattttccttcattttaaataaagaattttttattaataatctatttaaattaattgctcatttttcaaaattccatttttaatatttttcctaatttttttgaaacgaaacaaaaactattttctgattttaaattgcactttcattattttaatattttaaattttctttaataaattatctttttatttcttccacatttttcaaatgttttaaatctaaattttatttaatttattttttggctcccttctgttggccaatctgtacagcttggttggctcgctgatctccattgtgtccatcatttttgagtttcccgaactgctcattctcgcccgacttgtcgcatcggcaagtgccaccgttggactgttggcattggtcctgttcctccaggtcattaggcaaaattcacccgtgattggaaactgcgtcggaaattttggaaattttaatacttgtttataaaattgagtaaattttcaaaaaaaaaattgaaatttttttttgcattttgggggctaggaattaaaagaaattcttcttctttttttttgtatttctctccaaatttaatcacaataattatcttttcctattgtacaatatatttgtatcgtcaatgtatgggtacggtacattgatttttatgct

SEQ ID NO: 34689 - DNA, 931 bp, Heterodera glycines
  unsure (1)..(931): unsure at all n locations
ctgcgattcttcctcccccccccctcattttccgtccccctcatgggttgtcgggacgattttctttgatgtnggaccctggaagatttnntgaatgtgntgnanaatnagatnaatggnnangtngttttntggtnntngnggaatgattatgtnggngtattttttggtgggnaggnaaaagtnttngtangnnttaaaggggaggganagaggtngttttnnngaaanatntttttttttaatatgagtagaaattaggtagttattttnngaatttttaaaattggggttttttaagaaatnattataattatttgtttnaatttttttnaaaaattttggtgaaaaaaanttggaatttgggaatttttattnattgttagttgtttttnttnatnagnagataatagaatgannggtttnannaaggaaaggtantggtgnaaataanattggnattttgtttgtttttttttngtaaaatggttttgtgtttttgtngaattttggtggnantnaaaaanntttaatnggagaanntttttntagantatttntaaaatgggtggtttagtaaaaaaaatggacattcactaaaattgttctgacctcgtcgtgccaaacgaatgtccgggtccgcgtcgacaaaactgaacaaaaaatgccattttagctgattcaaacaattggttaattaatttaattacagtttcaagtcgaacatttccctcaattcctaaagtgaaattggcgcagtgagcagagaaaactgattaaaaatggtgtgaaaatacaattatgaacattggttagacaacttgcctggtcaaagaaaatcagaataccctccaccaaaatgacatcggccgcttccaaacggtgcgacgcatcgtcgagactgaaagggggaaggatttcagtacggaaa

SEQ ID NO: 34690 - DNA, 613 bp, Heterodera glycines
atcaggggtggcacggaatttcgatttccgacatttttagggtcggaattcccatttccgactcccgaaaaaattttggacgtcggaattccgatttccggtgtttttgataaaaagtcggaaattttcggtcggcaatttctttttttttgatttttctaaaatggtttattttaaattgtgaaagaattaaatttttgtaagttcttttttcttcatttttactccaaaatgaaactcagaagcattggacatttttggacgatgttcacaaaatgagcaaaatttccccggcggcgcctatcggcatcgccggatcccctctccccaagttcccaaatttttttttgaaaaaagcgccgaaaaaagcgtgtgaataatccctcattttttaatttttggtttagaaatttaaaattttgccataaaatatttagatttttcaattacatttttatattttttcataaatttccgacttccggtttcctacatttttggggtcagttccgatttctgaaaaaatttttgggcctcggaattccgtttccgatttgcgaaattttttggggcctcgtaatgacatccctgtttacatatatagaagagtctc

SEQ ID NO: 34691 - DNA, 1168 bp, Heterodera glycines
cctattttttttccttttcacaaagagattttaataaaaaaggcaaaattcgccttaaattaataaggtgaaagtttgaaaatgtttattaaaaaatgtaaggatgaaatataattaaaataaatcaacaagaaaaaaaaatttatttttctaaataaataaaaaacattgtcagaggcagtgcctgccgaaaaaaagacaaaaaatttttcgaaaaaaagctaaaaaaattgaaaatttaaataaatttacaagtgaaaaaaggaaaaaaagcttacaacaccttcgattcccaggacgtctccgttccaagtactaagaaggcccaacgttgcttaacttgccagacggacgggatggcgtgctttcaacgtggtatggtcgtaagcgaaaggaaagcaatgaaagtaatttaaataggcatatttaaaagagcctatttttttgccttttcacaagagaatttattaaaaaaggcaaaattcgccttaaattaataaggtgaaagtttgaaaatgtttattaaaaaatttaaggatgaaatataattaaaataaatcaaaaagaaaaaaaatcaatttatttttctaaataaataaaaaacattgtcagaggcagtgcctgccgaaaaaaagacaaaaaaattttcgaaaaaaagctaaaaaaattgaaaatttaaataaatttacaagtgaaaaaaggaaaaaagcttacaacaccttcgattcccaggacgtctccgttccaagtactaagaaggcccaacgttgcttaacttgccagacggacgggatggcgtgctttcaacgtggtatggtcgtaagcgaaaggaaagcaatgaaagtaatttaaataggcatatttaaaagagcctatttttttgccttttcacaagagaatttattaaaaaagcaaatttgccttaaattaataaggtgaaagtttgaaaatgtttattaaaaaatttaaggatgaaatataattaaaataaatcaacaagaaaaaaaaatttatttttctaaataaataaaaaacattgtcagaggcagtgcctgccgaaaaaaagacaaaaaaattttcgaaaaaagctaaaaaaattgaaaatttaaataaatttacaagtgaaaaaggaaaaaagcttacaacaccttcgattcccaggacgtct

SEQ ID NO: 34692 - DNA, 174 bp, Heterodera glycines
aggacattttaaacaaaaaacttgaaaaaaatagaccaaaagttcaaaaaatttaaaaaattgttctcttttaaagtagcgccgatttttttacaatcaatttgccaagaaaaaaaatatacctaattataaactcgccttacaaattataaaccctgggtctgtatcgtttcg

SEQ ID NO: 34693 - DNA, 1359 bp, Heterodera glycines
tggcatacaattttcataaaaccataaattttaagtgccctttaatttgaaagttcgactcaaaaaccaatataccgtattatctctaattatggaatctttattttttcgaaaaaatttctttttaatgttttaataaaattaattaattcaaatctaaactcattatattaaaaaaaagaagtttttaaaaattgtgaaattttgatttcaaaatttattaaaattaaaaaagtaaaatttttaggaattctaatccacctgcaatttccgcaaacgggccttgcgcaagcgcttgcccaccgtggcgggtgttttggcggcggtgttggcattcgtggacgatttggcagaaaatggctaaattttagaaaaataaatgagaaaattcatataggtaaccctttaggtaattgaaatagtcagggaaaattttccaatttatattgtataaagccggtattttacattaaaaaataataattttttttttactctaatctactcaaaatggttcagaatttaataaaaataccattcacggtgccaaaaatgagaaatggaaagatttttttgccatatcaaatttaaaagttgaaatatataaaaaataaataaattgaaaaaaattcccagttaaaaattcaatttttttttttgttaccttatggtccatgggggagggcgactttgcttcaccactttttgctttgccgaacaaatccttcacaatggcatcaatagctttctgtgaaaaaaaaataaaatttaaaaaattaataaaaattatgtttatttaagaaataatcaaaataaatttatgaaaattaaaatttttttttttcaatttccaaccgatgtaagtccattgcggcgtaatgcggcggggattggttgccgcttggagagcaaataaaagcgggtgtcctccaaaaaggtgcaaggccttgaaaagagttcagaatccttctgaaaattaaaaaaaaaaatttaaaaattattaggtgatatcggtcgaatgagaaaattctctttttctcaccctcctccatattggaatttttttcggcttctgttccacattgacaagctctgcgaataaatgaaaatattaattttttatagaaaaaaatcctataaatttctttaaattttttttttatcacacaatgaaataaacaaattttatttttggtaaaaaattaattcagtcatttttaaattgaaaaaatgtcaacattaaaacgggacccacgcgtttcagcgccagtccagtaggtggactataacttttttctttgttaaccaaatctatacgaaatggtggtatcattcgaaagccttaatttcctctattag

SEQ ID NO: 34694 - DNA, 709 bp, Heterodera glycines
aagctttcgaatgataccaaaattgtccaatttggttggcaaaaacctcttaaaacaattctcaaaaacggcattttttagttttttggacaaaaataaataaaaatattcatgttgcacaacggactcgaaccttcttcctttgtcccttcactatcttacaaaaaccactgagccacacgcaaaactttttcggtacagtagctcagttttggacgctgtgttcactaattgtctgtgattgaatccctaaccaaaaataaagcatctatctaaatccatttcaaagcacttaaatatattttttagcgtttatttgttagtatcagtggaaaatgggaagcaacggcaatccggaggaggatttaattaacttaacagacaaattaaagaaaaaactcgcaaagcatggagaagacgaagaagaagaagccaaactgaaacgaagaaaatcgaaaaaagggattttcgatagaacaattcaaaaaggtataaagcaattcttctaacttcaccaattgaaaatcataattttttgagtctgatttaatacatacataataacaataaattgtcaagctcattatctgcatcattcgtttttaagaaagcaaaagaaaaatgaagataaacgatcaggaaagtatttgcggtgaaattgtggctcaagaaagtggcgaaaacactgcaaatcaacagaatcagactc

SEQ ID NO: 34695 - DNA, 911 bp, Heterodera glycines
aatagtagaccctctattccaaaggaaattgggtagcaaattttgtgctctataaactgggcatactcaaaatttccagaaaaaattttcccaacccccttagaaaattttttttgaaatttacccctcgttcccagccaaaatgggctgatcagatcaccatgaaggagtgatctgatcaacttggtgttgctaccttttttgatcagcatccaaagttatgcttacctgaatttttttagatttttttaatgctgatccagagaagcaatattttaaaaatgaaatgggacaacacttttgaccacctatattttgatcaaattgtgaatatggtaaaataaatcaaataaatgtttatgtcacaaatgcaaatatggtatcattggaaagcccataaaaaatgctatccaatggtatgtagtagggttgagcggtaccggtaccggtactggccggtaattaccggtttttttggtaccggtaccggttttttcaaaaatgaaattaccgttaccggtttgtctagtaccggtaccccggtaaaaatttgcactggtaagaatgggggtctggtcgagaaaagagtaggaaattggtgaaaaaggagaaatttttgagaaaaaattaaattttatttaatttagtcatgggattacacacatgcacatgtggtgtgtggttaaactttctacccttcataatttttcgcctgggttcaattccccacttggatagaatattcctcacattttctttaccattattttaattaaaattttaattttaaaaaatattccaacttttttctttcattttaagcatcctaaaaacccaaaacttaatcaattggtcattttttttacaaattctgttaacaaatcgcattaaaaattacaaaatttttcccg

SEQ ID NO: 34696 - DNA, 1020 bp, Heterodera glycines
ccccccccccaccttaatggactgtccggttccggacgaacaattgatgtttgaatggcaccttcaaaaatgctacctccatcatctgaaaaaacagtgtttaagaaatataaatatatacggtagaaagtgatttagataattccattttatattaatttatgtctttaaaaactgaaaattcagattttagtttcccgctactatttctttttttaagtttctctatagccaaactttttgagattttttcttttaatcaaaaaatcacaataaaagggatgacatcacgttttcccccgtggaatgtttccccgaaaaaaattataatttagaaaaatttttagaaatcgttgaaaaaaagtggggaaatgaactgatcccaaatgaaaagtcgtctctacccaaaatgcgcaagttttccaggttcaatccgatttcttgtgagtccaccgagaacagcacgttcatttgccggtcgacaacttcaaaccgttcgcacatcacattggcacgcccgtccgcctgcaggttcaggctggcggtgttctgtccgctggcgttgtgcgcgttgatagatacgccgcgagcggagtcaatggacaatgcctgattttaccgcaaggggtaattagggcattgaaattaagaacaagtgcagagagttttttttttgttggaatatttgcatttgatttaccattaaaaatgccattgccaacatttgccaaaatttttaaattttcataagatgaaccattttcagcacaattataaaaaaattaattaattactagttttcattgttgaccaaatctaacaatcttggtatcatccgaaagcccttcacaagctctattagccttacaaaaaaacaaaaaaaaattagcttataaaaaagttattaagaaaaaactcaaaaatttcgtcttttttgcaattttcatgttataacttttttggtaattgtctaatcgctaagcaatagcttggaagcttctaaacatgtaaagctttcga

SEQ ID NO: 34697 - DNA, 384 bp, Heterodera glycines
ggattgatggagggagatgaaaatggcactcgatattcggtgaagaggtaaattctgaaagaagtgaaggatggatgaattcggaggaattggagaaacggacggacggagggacaaaggaaaaaaggggggggggggtaagaggggagagaggaggggaaaggcctttgtgactttgtttgagacaaattggaattgagaagggacctaaaaaaggctgaccgcggcacggcaccgaaccgcgacaaatggcacttttttgaaaatagttcaaaattcactcagtttttgctatatttacagcgaacaaaggtgcttgcttcttcacattgcttctcgtctccccctttccgattttagcttccgtttcctttgcttttgacc

SEQ ID NO: 34698 - DNA, 1285 bp, Heterodera glycines
ccattaggtcgtccgttagcgttcgattgctctagtcaatttttcaaaattttttgttgatatatttgtcgtgctctgaagggcgtgggaggggggggggcgaagggcccaccacgaggccgcgaagaggccgagtgagtaccttcggtgcaggaaaattattaaattttaaaatttattaattgctttttaaatatgccaaaaaatgtaggcttaacttttgtagtgaaaattcgatcactcatattttttgctaattgagcagaagcgtaccaaactttgcagggatactccccggtaaaggactaacttacactgaaatgagcgccgagctagctggctcaaaaaaatttttcgaaaatctgagtctttcgtttttatttatttgcaaaattaattcataaatattttttcagaaagggttctgaaacgcaccaaattttatttacatgttagtttaggcactatgatgctttttctatcaataatggaggtgaataaaattttaattgctttttaactttgggaaaaagtttaggcttaactttttagtgaaagtttgatcactcatatttttttagtctaatcttctcaaaacggttcagaattcaataaaaataacattcacggtgcgaaaaatggggtttgacaagtttattggggaaaaaaacactttacaaaataatacccctgggagaagggagtgggaaacatgatttcaaaattttcaattttttgtagtctaatcttctcaaaacggttgagaattcaataaaaataacattcacggtgcgaaaaatggggtatgaaaagtttattggggaaaaaaagactctttacaaaataatacccctgggagaagggagtgggaaaaatgatttcaaaattttcaattttttgtactctaatctactcaaagcggttcagaattcaatttaaataacattcacggtgcgaaaaatggggtatgaaaagttaattggggaaaaaaagactttttacaaaataatacccctgggagaagggagtgggaaacatgatttcaaaattttcaattttttgtagtctaatctactcaaaccggttcagaattcaataaaaataacattcacggtgcgaaaaatggggtatgaaaagtttattggggaaaaaaagactttttacaaaataatacccctgggagaagggagtgggaaacatgatttcaaaattttcaattttttctagtctaatcttctcaaaaccggttgagaattcaataaaaataacattcacggtgcgaaaa

SEQ ID NO: 34699 - DNA, 874 bp, Heterodera glycines
  unsure (1)..(874): unsure at all n locations
ggggacctctagagtcttcctcaccaatccttcgtggccaatttttttctcttccttaaatttgcgcaccgnccaataggctttcatcaattgttcttaaatttcgtccagctgctctttatgcttcatcttctgctgctgatatttctgctgatcatcgctgttgcgcttcatctccaaaaagaaaccaaaatttcaaacgaaacataattaaataaactggcgaattgattgatgtttgataaaataaaatttttgcactcctgacttatgctttggtttttttaaacggttgaaccctgatatgaaaaaggtagagctcggcctggtcctggatgcaggcctggatttttcctggatccagttcaggtccaggccatttttcggcaacctggatttttcctcgatttttgtccaggaaatccaggtcaaatgtgaaaaaaaatccaggtccaacatggcatccaggttcaggtccaggcttttttcaaaataccgagctctagaaaaaggcataagaaagtgaggatgaagttggttcaatgacgtctgagtttttgaaccggttcagaacactaatggactaaatttggcacttctagatttttaaaacgatcgtccctgtcaaatttaatatgagtagggcttatattatataaggcccgaaaaattgccaaaataggtagtgaatttatgtgaaatttttcacttcttagggttgtatttttgaaagttttaaagacgattcttaggattttattgtatttttgttaataaaaacataacgccaaaataggcagtttaaactttttttaggcttttaaatagggttcggaccccgtgggccgggggtggattttcccgggggcggggg

SEQ ID NO: 34700 - DNA, 1420 bp, Heterodera glycines
atgacaagctaatgtgataaaacaggttaattcttttcctttcagtatccctgcaaagtttggggcgcttctgataagtttctgaaaaaaagttaagcctaaactttttggcctgtttaaaaaggaattaaaaatttttaaaaattttattcatctccctttttgatagaaaaagcatcagagtgcctaaactaacatgtaaataaaatttggtgcgtttcagaaccctttctgaaaaaatatttaagaattaattttgcaaaaaataaataaaaacgaaagactcagattttcgaaaatttttttgagccagctagctcggcgctcatttcagtgtaagttagtcctttaccggggagtatccctgcaaagtttggtacgcttctgctcaattagcaaaaaatatgagtgatcgaattttcactaaaaaagttaagcctacattttttggcatatttaaaaagcaattaaaaaattttttaaatgagaattcatgcgagattttctggaaataagcttaatagggcctagttaagctgtaaaaaaaaatttggggcgatttgaaagagaatagaaagaaccaggttcgatgaagttttggtaagccaaaaaaaatccaaacatttaaaaatctataaaaaatttaaaaatgagaattcatgcgagattttctggaaataagcttaatagggcctagttaagctgtaaaaaaaatttggggcgatttgaaagagaatagaaagaaccaggttcgatgaagttttggtaagccaaaaaaaatccaaacatttaaaaatctataaaaaatttaaaaatgagaattcatgcgagattttctggaaataagcttaatagggcctagttaagctgtaaaaaaaatttggggcgatttgaaagagaatagaaagaaccaggttcgatgaagttttggtaagccaaaaaaaatccaaacatttaaaaatctattaaaaaaataaaatagtgaagttttaaaaattaataaaaatttttaaattaagagttactggcgttagcatcatagcggtgcttttccttgtctttttgatgcccttgcaaaatctggtgcgcttctgatcagtttaattaaaaaaagttaagcctaaactttttggcatgtttaaaaagagccaggttcgatgaagttttggtaagccaaaaaaaaatccaaacatttaaaaatctataaaaaatttaaaaatgagaattcatgcgagattttctggaaataagcttaatagggcctagttaagctgtaaaaaaaatttggggcgatttgaaagagaatagaaagaaccaggttcgatgaagttttggtaagccaaaaaaaatccaaacatttaaaaatctataaaaaatttaaaaatgagaattcatgcgagattttctgggaataagctta

SEQ ID NO: 34701 - DNA, 849 bp, Heterodera glycines
  unsure (1)..(849): unsure at all n locations
cctggattttcctggatttttgtccaggaaatctatgcccaggtctaatgtgaaaaatccaggtccaggcaaaacacaaaaaaaaacctggatttcatggacaaatttttagaattttattatttaaactgacctatgttttttcaagttttcagaaaattattaaatagattaaaaaacatatattattgtaaattaaatatttttaaaagtttgaaagcaattaattgattttttcaaacattgtttggctttttaaaacaaatttcaaaaaatccaggtccaagcctgaatccaggttcgaggagccttgatttcctggacttggatttttgtccaggaaatcagatccagatccaacacagaaccctggtacagatccaggctttttttcaaaatgtcgatctctattcattatgctcaaatataaccattatagcaagtgcaaaatagataaattaatattctaagattcacaataaatatatttaaaaaaaacaatatttgctgtaatgaaacaaatttaaagatttaaagtgtaaatcgctcatttaaaattctactaaacggctttcataattaaatgttgaaaattaataataaaaaataattatattttagatttatatttgttaatttaaatttaattgaaaaaaaaatatgaaaattataaatttcgaaatatatacagtttaatttattttttaaatttatccattgtagaaaatactttaaatttagcagaaattataaaaaatataacaattagaaccgaaaagttagaattanaatttttgtacatattttacaataaaaaatatcagaacactaggaaaaaaggattcttta

SEQ ID NO: 34702 - DNA, 1221 bp, Heterodera glycines
attttgcatatcatccttttctgttcgtaattttcccgttttaaattcgttaaattcggcatttgtcagattttgccattgtccgttttggtgcattaaaatttcttgcaaaatttcgctcaatttttcttcccaaatgattaaatcgttttgcctttccattttcattttgctgttttcctcccaaattgagattaaattttgtccaattttcgcttcatttccaattattttgcttgtttctttaagcatttgaattcgcttttcaatttcatttttgaatgcacacaaattgagaatgttcatggcatttggctgcatgttatgcaaaatttcatttttatatttttgaacaagcggctcattttcacacaaatctgatattatatatgataaattaattattaaatttcgctttacacttttttttacataaatatatcgtaaataataattatcattctatagaactctcactaaaagcagttaactgaaaattttccgatttttaagtgccaagggcacttgtacagaattttttttaaatgattacgaaaaaatcgacaaagatggcgcctgaattttcaacccaaactaaaaacatattttcaggatttttcatttagaaaaactaatttgcataaattgtgtaataattctaaatcttctaaaaaacttaagatcttaattatttttctgatttaacctgaaagtgttgcattgattacttttgcgcttattaattgcttttgtctttggctttgcctttttctttggctttctgttctttttctctcaattttgttccatttttcgtccatttcttcactttgtatgtcatattctgttttttggctaacatttgatgcttcttctccacttttattaacactttcatcaatactttctgaatttcctaactcatcaactttttctttttctattttctgatcacttttttctccctcactttttggctcttccattttctgcttgcttttttcttcctcaattttctgatcactattttctttttctattttctgatcacttttttctccctcactttttggctcttccattttctgcttgcttttttcttcctcaattttctgatcactattttctttttcaattttctgatcacttttttccccctcactttttggctcttccattttctgcttacttttttctttttcaattttctgatcatttttt

SEQ ID NO: 34703 - DNA, 1474 bp, Heterodera glycines
aaaataatgtacaccgcccggatccgaaccggcccccttccctcaaaatgatgcctcagaatccccaatcacacagggattctgaggtcttgactatgtcaaaagtaaaatctgatcacgtattcgtgatcagcgacccaaataacccctaaagacatatttttggaagatttttgtgagaaaaatttttccactcaaaaatcatggtcacacccctttgatcccgaatccaaaaatcacttttatttctataacttttttcaaaaaagtgataaaaagctaaaataaaatttatttggtagagcaaaaaattgcggatttttgttgtatattatttttacaaaatgacttttcagaaggtagttatgaatttttttctgaaaattcgaatttttccagaaattctggaataacttttttcctcttttagatagaaattccaaataaagtccataaaattctcctgatttttctctatttttaaggctttaaacctgtaaaattgatcaaccctttgatttgttatgaattttcaaatattaggccaaaatcccgtgggccaaaaaattgccaaaaaataaagaatttttaaaaaattccaaaaattatgaaacttaaaatagacatcatattcgtactcagcaccttattttaccccagaaaaatatttttcacccccattttcgtccgaaaaaaaatttccgaaaatttctagggggcctagctcgaaaatttttgaaaattttacatcatgtagtacaccattcgatagcatttaaaatgctctacaaaaatgttctaagacaatttttcgctaaaattaactcctgccgagttatgggactgggactgaaatgtcccgctcaggccaaaaattttttctatttccgggaaaaaatcgaaattttttcaaaaatatcaccaatcgatagagctcgaaaaacggttgcttcaaagtggtctccgttttccccggaaaaatcggcaaaaaatcataaaattcaaaaaccccaaaacctcttagggggcctagctcgagaaattttgaaaattttcgaaattttaaaatttgaaaaaatcgggcttacaaaactctacaataagtccgctggccaccccccgctcagttcaaacgctaatgagttattcgcccggtactgaagtggacaaagttggtactgaatttctagccaagtctacaagctttcctattataggtagaggcctggatttttttttgttttttagaaaacacttcaacttaggttcctaccagcagacattttttggttcaggttttaggaaaaaagttacgggccctgaactgtgagcaaaaacgggaaatcggcccctggtactcagttggccctcggagaaaaaaacctatagttttcccagatgcgccgtcccgagatgcctatgtgtgcaaaatttcagccccctagctattcccggtcttgagatatcctttttg

SEQ ID NO: 34704 - DNA, 739 bp, Heterodera glycines
atcaaagattctgaaaatttcaaaagacaagtcatggcatcccttgagacgaccataaaccaacaagctacttttgtatttgtgtcctttacataaaacaggatcaaaattaaatgtttgattccaatcttttcctgctaaatctgcgccataaaaataccatcaactttcttgtgaaaaaattcctgaatgaagagcttgcatttcaatacacctccatacaaagaaaagataaatgtttgttgttcagctttttcgtctttagagttgacaaagacagaaaagaatgttgatatcccattgtgtacttcttaagggatttcatgttctcaatttataattagaaaatcaataaatgataaaggatatcaaatgatctcttttcttctaaaatcccctattcgtctcctccagagatacaatcaagctcttcttaaatccccagttaagactaagatgacaaccgctggaactacatattttatcgcagataatatatgtcagcatttgattgaaaagaaatcaattcatgattattctttccaaagatcgtgtcgacaatccgctgtcggagcattctttgctgctccaagtcttcatatttggcactctttgcttcttcctcagatagttaagtctgtcgttggaagatttaaaaccgttttgctagctgtgttccttaatgaaactgttctggctagctactttattgccattctattgttttctttcgaggctc

SEQ ID NO: 34705 - DNA, 655 bp, Heterodera glycines
agaactgagtcccggtaattgtgttgctgaaggattgatgagattgagtccagtgatttgaattcgggagaattgagtcccagtgattgaaattctggtggattgagtcccagtgtcccaaggaacacaaaaagttaaaaatgctaaagaaatttgctgaggttgagtcccggcgattggaatgttggtgggttgagtatttttgattgaaacgcaggagaatagagtcccagtgattgaaatgctggagggttgagtcccagtgattgaaacgcagaagaattgagtcccagtgattgaatgctggaggattgagtcctgttgattggaatgttggtggattgagtcccagtgattgaaatgcttgagggttgagtcccagtgattgaaacgcaggagaattgagtcccagtgattgaaatgcagaagaattgagtcccagtgattgaatgctggaggattgagtcctgttgattggaatgttggtgggttgagtcccagtgattgaaatgctggtggattgagtcccgttgattggaatgttggtggattgagtcccagtgattggaatgctggtggattgagtcccgttgattggaatgttggtggattgagtcccaatgattgaaatgctggtggattgagtcccgttgat

SEQ ID NO: 34706 - DNA, 622 bp, Heterodera glycines
aaaatttcaaaaagttggttttctaaacatttttggccataaattttttgaaaccgaacgaaattttttgaaattttgcatgctaatagaggattcttagggctatcaaatgatagtaagaatgtttaatttggatgcttcttgaaaaagttatggtgcactaaagttgcaaaaaatttttatggtcgtgtgaactgtaatagcgccatttacagaccccatagaaatgcgaccgtaaccccaaccaccaccatacacactcccatacagtagtaactcctccccattcattaatttcagggcggctgctataatgggcactggtgttggtattgtctactacttcttatttctgtgctgttgttgtgccgtctgctgcattccgtgttacatctgttgctacgtgtatgtgtcaaatcaacgagaaaggcgtttcatgcgtcaaatgtcttcgcccacccgtggcggattcgatggacatatgccatgagagcattttggcatttggtgactgccggacggcacatttgtctaggaaagaaattgtggattttgaaatgcgaagtgaaaacggatagattaagattacggacgacaaaaagatttgataaatcatcatttg

SEQ ID NO: 34707 - DNA, 1088 bp, Heterodera glycines
gggcctcggaatgcctccctggtgtgtgcgtttcacatttattaaatttatgttgtttaaaaattttatttttatatcgacaaaatttttttaaagttcttccatgaacgttgatgtttattttttgaaaacttgaaaaaagcgatcattaatggtccattgtaatgtttttatgcaatgtcaaaaggtgtacgtgttttttacgcaaataaatttgcaaatttcatacaatgaataaatatgaattggttttgatcaatcagatcagtaattaagcagtatcggtgccaaatcaacgggtggtgcagcccaatcactgatttggggcacctcgaaatccaacccgagttcgcggacagtgtatttgtttcggcggttccgtcgtctttttttaaattgatttaatgtaatttatgtaattattaaaccgtacctgcggcggctgctgccccatccattgaacgacaacgaaggaacataatcataattgagtatcggcggaatgaccacctcggccgggacctccgttaaaacgagtggagtgcgattttgggtgggaaattggatggggtacaactcggagttggcacgacggtccgcgtgggcgtgggtcaggaaaacgccgaccaactcgtcactggtcaacacgccggaaggcactgaaaaaatgggaatttaaaaaaaacattttgttaaaatgatttgaaaaacgaagcatctgttgacggacgacctaccaacatggtcggagaaatccgaaaaagagatgagcggaaaacgaattttggacagtgccaggccaaggacaacacgacgattctctgccgaacattcgatggcattttgaaggcattgcgcgtcagcccaacggagtgcctgcgaaatgaatttcaattttaaatttgcatgataattcattagtaagtgccgaattccaaatggtgagttcgtcgtcgattttcaattggtcacgttcgagaatttcgcacaacaaaatttgttccatttccaaaaattcctcagattcaaacaaagtttcggcattttggtcaatgtaatccaagcagcgaagagcaaaatccttaaaa
